United States Patent Application Publication US 2006/0134663 A1 - sequence listing, part 54

SEQ ID NO: 127561 - DNA, 773 bp, Homo Sapiens
  misc_feature (230)..(288): n is a, c, g, or t
tttgtcttttgaaatatacaatgttttgtaggctctgcccttcaatgtgaaagcaggacattaaatttgaaattatttgacaattaaatgtttaggaccatctaacttcaactgcaaaactaaacagatctaccttgtccttccttcaaaccacctcacaaaaataagagaaaacaattcaaacatgattatttttttaaagtccttgaaagtattaaaactctcagagnnnnnnnnnnnnnnnnnnnnnnnnnnnnnnnnnnnnnnnnnnnnnnnnnnnnnnnnnnntgttggggtgggggaggaatcaatgggcctctcttttatttggcgacaagcaagtgcaagaaagttcatttgtaatttgttcagttgtctgtcttttgcacatctgcattctgaccagaaggaactttgaggtttttctgcagcacatgagcatctgcgggctctatcctcttatagtagttcttctttgtctcaataatctcaaagccaaacttcctgtagaagtcaattgccgactcattgctgatctggacatgcagataaatgttgtcaaaagtaccatctttttcacagatgtttaagacatgatttaacattttagttcctattcctagccttcggtaaggtgccagacatcatagtgtcatgatgtaaagtctcttctgattctgtgaatgatccaccctacagcatactgcacctacagcaatatcattgaaataggcaagttttgctagctcgccaacctccagcacatccttgcc

SEQ ID NO: 127562 - DNA, 1121 bp, Homo Sapiens
  misc_feature (274)..(282): n is a, c, g, or t
tcttttgaaattacaatgttttgtaggctctgcccttcaatgtgaaagcaggacattaaatttgaaattatttgacaattaaatgtttaggaccatctaacttcaactgcaaaactaaacagatctaccttgtccttccttcaaaccacctgacaaaaataagagaaaacaattcaaacatgattatttttttaaagtccttgattgtattataactctcagagaaaaggaagggaggaaagattatcaagaacaaggagggagaaaagctttnnnnnnnnngtgttggggtgggggaggaatcaatgggcctctcttttatttggcgacaagcaagtgcaagaaagttcatttgtaatttgttcagttgtctgtcttttgcacatctgcattctgaccagaaggaactttgaggtttttctgcagcacatgagcatctgcgggctctatcctcttatagtagttcttctttgtctcaataatctcaaagccaaacttcctgtagaagtcaattgccgactcattgctgatctggacatgcagataaatgttgtcaaaagtaccatctttttcacagatgtttaagacatgatttaacattttagttcctattcctagccttcggtaaggtgccagacatcctagtgtcatgatgtaaagtctcttctgattctgtgaatgatccaccctacagcatactgcacctacagcaatatcattgaaataggcaagttttgctagctcgccaacctccagcacatccttgtagaacttgtcattgtagctgactggaaagatgacctgattcaatcttttcaactgtttaatattgtgtggtgtcacatctcccagctcgatccggcctttcatcttccccgcctgctgaggccgtcgttaccaccgatatcaacgccgtcgtagtcgccgcccttaggtctccgcacccttagctcgggccactcaaccccgcaagccggcctcctagcctgggcagggagctgtgcgagcaacgaaggccgcgagagtcgagtgagggcttgagtctggtgggggcgggagtgtctcccgccgccgcgcttgtgccgccgcttctccacacgtgcactcgggtctctcggccc

SEQ ID NO: 127563 - DNA, 526 bp, Homo Sapiens
tcctgccatcatgtgaagaaggacgtgtttgtttccccttctgccacgattgtaagtttcctgaggccttcccagctatgtggaactgtgagttaattaaacctctttcctttataaattacccagtcatgggcagtcctttacagcagcatgagaatggactaatacactcctcaaatgttttgaagattgttgcaccttggaactaccagtgtgcacacaatctggctcaatgtatatattggctcagcaaggcaaagaactgaagttccaggatggaagaacctgtgttctcctcataatagtatagaataattcaagataggcaagaaggacagcagtaaatgaagaccatggaagaaaagaaggaatgccaaagatcgaggaaatctaccaagactagtagggtagtccagaagaagctgtttcagggcctgttgccagctatgcctttgagaacctcgggatcccaaagaatgaggggaatttcttcagaaagacaatctcggcatgcattatttctttg

SEQ ID NO: 127564 - DNA, 659 bp, Homo Sapiens
  misc_feature (123)..(131): n is a, c, g, or t
tgcaggatctacaaatcattttattgaaattgaacaaataacacaacagtcttcctaagctaggggccatcctccccaagccatttcccacattatagaagcacagagcttgcacagtacttnnnnnnnnngtcacctctatatagaaatcagactctgccacgacatcatcatggactatttacaaaccttcacattataagtattccttttatggtttttccctcctttctttccctacccaggggttctagtgctttcccttgactgatcctgaaggggtgggggttactgtaagggagggggtggtaggctactcataactactggcaccagccttagggtgttgtcccttaccacaaggtggtgaacagtcccctcccaattggaggggtggaggatttggtgcaaagccatggagattagacagaataggtgggttggagtaactccccataggcacaagcatccgcagcctgtcctgaccccagcctgcactctctcaactcctcaactgggggttcggggttggggggcaacagttagttgcagtagggggatcagcccagccctggggtagagggagaagccccacccagtcgccactcctatcaatagccagcaaactgtccatccatctgaaggcgggaacaaatggc

SEQ ID NO: 127565 - DNA, 1210 bp, Homo Sapiens
  misc_feature (1078)..(1113): n is a, c, g, or t
ttaacattttaacactttatttcagttatttagttcattttaaggtattcggtcatccaaacgaactacatacatgtgatatttgccttattattcttaattaaaccatcaaagtaattttttttacatcttaaatgtcaatgttgagcctccattgagagaaaaatcaaggcacatattgtcatcattttatttagtatgatgcttttgatcttttgcaggaagttcttttttctttcatctgaaagccttaacattttacacagaagggatactgcacaaatgctgtgtggacttaccagctttctgatgaatgaggatgttaattacatattgaaagtggtaatggttttgaaatgaaaaagagagcattattggaagaatggaaaatacatctcagaaagaaacctatagttccacacaattaaaagaaagaaagagaaaaagcaaaagtaggtgtcagggctggaccagctttgttgttgttattgttctttagcaaccaaatattgaaaaaacactaagcgaacggataccaggggaaagaaattaaatgtgcttgaaagatagggaagaaagatactgagtgtctaaggagctattactgctgttcacaaagctttgcaaatgttaatattctgatttttctcctaataaaatacaaattaagaaagacattagtgtattttatcaacactagttcaagagagagtcagttttctttccttatggagaagtttctgatgtactcttcctgatggaaactatagaaaaatatcatgtccttctattttaacatgttttatcaaaatcaaaatagttaccaaaatctcaaagcattttgtttccttagtactcaaaatccatggaaaacggggagaaatcaacattaagggataatttgaacctatatataatgtttccttaacaattaaatgttattaccatgcaatagtgcaatcaattcctaggacaaacacctccaggaaatatattaacctctgaactaatgttaaagaagctccccccggaccgtaatggccgaattcccgggcatatgtccggtaccgtcgactgnnnnnnnnnnnnnnnnnnnnnnnnnnnnnnnnnnnncgccgcttcctcgctcgactgactcgctgcgctcgtcgttcgctaatcattacaacgactgagcggcaccatagtatgtgagtcgacaacaacttct

SEQ ID NO: 127566 - DNA, 708 bp, Homo Sapiens
  misc_feature (676)..(676): n is a, c, g, or t
tttatcataaaaacctttttatatcagctcacccacacctccctccgttcctccctgccctttctcgccctggtgatcatcagggatgctggagtctggcgcccccccacaccaccagagctgaagccgacattcaaggtggacgtggcgcgtggagagcaagggaaggcccagctcctctccttcgtccccactctctgtgggctcaggaaacacacgctgaccggaggcagtggccaggagaggcaggctagggtgcaggctcacgccattggtgcagtccttctggggcagaaaactcaacacgggctccggcttcccatcattgccaggcccgtccgtgtcccacacagagacagccccgctcgtgctgccactcactaggaactgcccggtcgggtccagatcgaagtagatgcgctgattggtggtcacctctcgacccagggaccacagtgggtaaccagactgccggagatcccagcacaggagctcagcatccttgcgggctcctgagaagaagcggttgccatcgggatgaaagcagaggtgggtgatgcccccttggtgccctcccagcaaggcgagaggggagccatcatcccaggcatacagacccagggaggcggcgtaggagccacaggcctagaggggctgggctgggctgaaagctttncaagaaatgatgcggtctggccctgctttttt

SEQ ID NO: 127567 - DNA, 670 bp, Homo Sapiens
tttataaagtcaatatacaaaatgtattctatttttaaaatggcacagaatgagaaaaaattcttcatgctgataagtgcctcattcccaaacagggacttcaaattgatcagattctcttgcaggcaaaagctttgcagcagtctgcatttactggaatattgctctttgaacacggccacattcaggtttgttaaatatatcctcttccgcttctggagttagttggatgttatctctgactggggacaggggtttcttacaaggaggaagcttttcagaatcttttttaaatccaaagtttttccagagctcattgagtttgatctgtaaccccggcttgttctcggcattatgatgctttctcttctggatgcttgccggcttcttgctcagcccactggctctggcaggtcctagaagtttgatcttggttgtagaaagagagtctgcagaactggacttatatagcccaggaaccttgttccttagaggtgtgtctttttttgagaaatgagataaacatagcttggaggtctggtcactttgactgtcaagtaacttaatattgcaatcagattcctctgaatcagagtgcttactagagcactgagaaagctttgatgcatttgaactctgcagtgagaatctccactttcctgggactgtg

SEQ ID NO: 127568 - DNA, 1039 bp, Homo Sapiens
  misc_feature (112)..(112): n is a, c, g, or t
  misc_feature (138)..(138): n is a, c, g, or t
  misc_feature (202)..(202): n is a, c, g, or t
  misc_feature (950)..(958): n is a, c, g, or t
ctcatctcctgccacactgctgcagcatcaagtgtgctatgagagctgtatgtgcccaggggtgggccctgccactggccaccccgagcccaggacgcattctggtcatctntgagcccacttgtagtgtagcttctnctgttagagatgttagccttttctctctgtggcgacttttctgccttcccttcttctgtttttngtgatcattcttagctacctgtgccaagtcacagttagactacctcagaatgtagtcaagaattcacccagtgttctttggatgtcccttccctagggggaaaggctggggaatgttgctgggagcattcccagctgcctctccaaagtggtcctaactctgccttggctatggtgcagacattccaaaaagtgttttgtatacagccctgtacatctagttttcttggttctccctggcaagttcgctaccctagcttaggctgacgttctgatgagtctctgcttgctgagctcatcactgtgggatggtgacctgcagagctgcagattggagcaagtggacagaggagggagccagctaagccaaatccgtcactgccacttggctggcaggccttataagagggcggatctgggcccgtttgcaggaggccattgcctaccctctccccacagtgagccagcagccatcagctgatcccacctgggaaaccttcatgcctctctgatggttactgcccacccttaccccacccctcagctcagcctggtatggaaagcaaggtgcacgttggtctttgattgttctgtcctcacagcagagccagctttccccccatgttgctgctgcttttgctgctcatgctgcttgttgttttctcttccttatctttccaaattgtttccttgaaatgcttgtttccaatttttcttagattatgtttctaatttttattcccaggtgnnnnnnnnncttacttgacagaaaaaaagaaaaccccaacaatatcttgctgtattatcacattttttataaagttaaagcatttttctt

SEQ ID NO: 127569 - DNA, 733 bp, Homo Sapiens
aatgttgcataacaatgtttatttagttttacatttgtttacaatttcttataaacacttcattataattgttttatacaaacaacagtttaaatttacttatgtttatcatttatttgcttactagtttttcaatttcagataatccttttagaatcatttcccttcttgaagatcatccttttgtagtctctttactgaagttgtgctgaggataacatctgtttttcatctgagcatctgtttgtttcagtttcgcttgttgcaaattctaagctaatagtttttctcagaattctaccctcttttgggtacattgttgctgttaggaagcctactaagtatttgactgtcttgctttcactgatctttttctccccatggttgcttttaaaatcttgtatttggtatcttgtcatttacaataccttgagtctaggcctggattttatttaaatatatgtttggtatatattgtgcttcctgaatttatgaattcatgtttttccaacaaatttgtaaaattgtgttatctttcaagtactgcctctcctttattctctaaattttctctttctaggactcctagtctttataattcttccctcgaactctcttaactttccaatgttttctagctccttgtttctcctcactgctcactggggtatttctttagatccagcttatagtttagttcacttgtctcttcagctgagtctaataaatattc

SEQ ID NO: 127570 - DNA, 403 bp, Homo Sapiens
gccaacacccaatgggttgagctggagtaagaacaggctgcccagcacacttcctgggccactgagccctgggcgtgaaaagcaaacgggccagtgaggtttggctgggactcagctccccagcctctggctcaagcccgattacgaacacaaaggtcatctgattggatttcctgtcccctcagctcacttaaggaggcttttctgtccacagctttggttgcaaaaagcaatctggctaaagggatttgggacatccggctggtgaatgtaggggaggttttacctttagatgaggcaccagaaacgatgtgctccctggtaccatcctgagctgccctcttgactttaatgctaaccctgctgcttttcctcaaggctcagacatcccatttcgatgctt

SEQ ID NO: 127571 - DNA, 661 bp, Homo Sapiens
tttttctgccagaaacaagtttatttacacaaggacacacagtgtaacgggttacaaaatacttaactgaaatccatatccagggagacaaagcaaggagtgggtttacatgagaaccagaccagccacagggagagagtgggtaaggggccgggagcctggggctcagcacagagaggcctagtacactgagcctggccccatccccatcccccaggaggatctaaaacaaacacacaagcacactatgaaccgatggtgctgggactcctgcccctcccctggctccctcaatcctgctcaggcccccataggataataaatatgtaaacagattggtggggccctggggatagaaggagagaaagtatatgtggtactggggaggaggaggaaggaagagtcagccccctaggagccacttcccatctttggtttcctacaggctggatggcatcccctggaagccttgtaggcccacagcccctggcagggctcctgggaaagagaagggacagcgcccagccccctcctggtcttagctcccttgggctggtggtcagcaaagggagcccagaaggtatggaagctccagctgagagccgactcctggatccctgggttctggccttaccccttctagaacctccattaacaccat

SEQ ID NO: 127572 - DNA, 1444 bp, Homo Sapiens
  misc_feature (648)..(674): n is a, c, g, or t
  misc_feature (693)..(1317): n is a, c, g, or t
  misc_feature (1333)..(1333): n is a, c, g, or t
cactcttttgagatgttttgcaacaacaaaagcatggttgacactcgtctgttaagagattgtttatgttatatatactcaaaaacaattcttcatctattcctgtactaatggttctctttgcagttcacagagaattggggctctcttcatgccttgaaattttggggtccatagtgaatattttgttatttatttgtttggctcattctttatatagtaatggaaacataagtctaggagttagaaatgaattttttagaccttagtaaaaccatttaaccataaaatggacaactgagaattctcccagctgcctgaaagcgtcgccaactgtggttatcctgcaagctgctacctgcaacttggacgttgtttccacgtgctctgctggctacgattcttgcattctgggtttggcttttttctgtgtcatcaactatggttatcctctaaataggcatttaatgaaacattgtacaaattgtcactcatttgatgacacctgggaataacattagcaggctgatgtcctgcaccattatgtttactaatcacatgttctgtgtgctgtgacgactgtcaaagagtatctggccatggcggacactcagcatttgttgattgaataaatgttagctcttctcnnnnnnnnnnnnnnnnnnnnnnnnnnnccctcgtgccgaattcttnnnnnnnnnnnnnnnnnnnnnnnnnnnnnnnnnnnnnnnnnnnnnnnnnnnnnnnnnnnnnnnnnnnnnnnnnnnnnnnnnnnnnnnnnnnnnnnnnnnnnnnnnnnnnnnnnnnnnnnnnnnnnnnnnnnnnnnnnnnnnnnnnnnnnnnnnnnnnnnnnnnnnnnnnnnnnnnnnnnnnnnnnnnnnnnnnnnnnnnnnnnnnnnnnnnnnnnnnnnnnnnnnnnnnnnnnnnnnnnnnnnnnnnnnnnnnnnnnnnnnnnnnnnnnnnnnnnnnnnnnnnnnnnnnnnnnnnnnnnnnnnnnnnnnnnnnnnnnnnnnnnnnnnnnnnnnnnnnnnnnnnnnnnnnnnnnnnnnnnnnnnnnnnnnnnnnnnnnnnnnnnnnnnnnnnnnnnnnnnnnnnnnnnnnnnnnnnnnnnnnnnnnnnnnnnnnnnnnnnnnnnnnnnnnnnnnnnnnnnnnnnnnnnnnnnnnnnnnnnnnnnnnnnnnnnnnnnnnnnnnnnnnnnnnnnnnnnnnnnnnnnnnnnnnnnnnnnnnnnnnnnnnnnnnnnnnnnnnnnnnnnnnnnnnnnnnnnnnnnnnnnnnnnnnnnnnnnnnnnnnnnnnnnnnnnnnnnnnnnnnnnnncaggtgggcttctcanactcagctgtaggactcagtcggtgtagcgtcgccagcgggtgttgacaccccgtcagcgacgtggcttacgtatacgctgatcaccgtaaacactaccatgcacacatga

SEQ ID NO: 127573 - DNA, 621 bp, Homo Sapiens
  misc_feature (323)..(391): n is a, c, g, or t
  misc_feature (595)..(595): n is a, c, g, or t
atattggcctcaaagtcttcatgtctacagtgttattttttgctattattttttgtttcttcgacagtgacataaactgaggtaaacatctgtgaccaacacctctcctaaggggcaaagggtcccagcccgaccagcagaggaggtggcagcaccagggccccaacctggtgttccggttctgctctggggtcaggctggaggctggccctctgggtgcctctgggaatgagggggctgggctacataactatggtcccctcccaactctaacatactagatactacaacggctggggaaactcccgaacaggatcttaacnnnnnnnnnnnnnnnnnnnnnnnnnnnnnnnnnnnnnnnnnnnnnnnnnnnnnnnnnnnnnnnnnnnnncgagcacggcaagggacgtctactgtggaatctcgattcctagttattgcaggagagatcaggatgtcgcgaggcctaaggcaaaaggagaagtctcggctgggagaggcagccccgatgggctccaggtgggccgggggcagtgaccagggccttctctgagacctggtccttggagggagtgggggtttgctacttacctgncatgtggagggcccataccactgggg

SEQ ID NO: 127574 - DNA, 1237 bp, Homo Sapiens
tttttatagaaagacactttattacactgcccactcacaccaggccgggacaggagtcactccttagaaccccgagcggctgtccaggctgatggaggaggggaccactcacccgccacagagccagccccctcacatggcttcctccctgaggagcatctcccacactggggcttccaacgatctttgctctgcgtgtgctgaaaggacagcgtccagaatcagcctcagcctggacttctgttaccatgggaggataagcttgtcatgctcacagatgtgcactcctagtgccacgcctctaaacgtcccccagacggcattggggctctcgccggggagcttggctactgtctcgatccccggccaagcaggcctcatggccaactttctcagtgtccacagcagacaaaaatgtccacagccagagctccaaagctctgccggccctggtgccactgccacctctgcgtccggagcctgtggggctcagctctgctgctctggcccaagtctggcctggagtccctggtgccctttgcaagcacggaggcggctggacatccttcgcatcaccagcctctgggcctgcaagcgcttccggagcttttcattttccttcagagtgaggaagagttttttcttcagggaatctaagtcccaaagggcatagctgtgatcagatggctgcttgttgggggtccttctcaggcctgcagggccagtcggccggccaacagcctctgttgcttgcggcctccgtggcgagacctgttttacgtggccttcggcatttgggggcaactgaagctcttcaagtgcagtgtccatgtttctcccaggactgtcctctccggcccccgcctcagggaggaccttttctttctgagaagagctggcatttcctctctcactggcagggtctgtgttctccctcacctgctgtgtggggtcctgaaaggcgaacaccgtgggcacggcattgtgctttaggttcttgcggtttccaaaggcgctgaagcactctggccggaagtgctcggagcagatgaccgtgtgctgcttgggcttgaagttgccccggccgatgttcagcacccattccttcagcagctccgggcggctgaacggaaaccggtggaaggtgagctgcttcctgcggctgctgtagcggttgcagcactgccgggccgcgcacgacttcggcatcttcgagccaggcctggctgcccccaac

SEQ ID NO: 127575 - DNA, 932 bp, Homo Sapiens
  misc_feature (110)..(119): n is a, c, g, or t
acagcttacaaaacataattttatttaaatttgtatagataaaaatctaccaaaatttaaacaaaaattttatccaaatcctttcccacaacaaaattggacatcatggnnnnnnnnnncacattcaaataaggttcccatctttctaccataaactggtagattctgggaggatgaggagtaagagagaaacgaggagagaagatagtgatactaaacacaatttgatcttcagtgttgtctcatcttgaaatatcttaataacagagatttccataagaatcaggattcatttttgacacaaaaatggaagcttccactcccaaaatcacaaataaggcttctggttttctttttagtgtgaggtaaacagtatattcaatattaaggcaaatggtaaaaacacatggatggtatattaatgcagatattccattattaaatatattttggaatactcacggatttttcaaacatatgttagaattagaaacctgtaaaatctgcagtagtgtgtaatagctatttgcttgaatgtcttagcagtgcctttttagtagctaatatgttcagtgtaatcttgtgcctttttagtaattaatatattaaatataatcttgtctgagtttttaaatggtctgtttttctttttcattatgtaggattagatgcccaccaaaattcttgtaaatgaagcaggacttgatttcaaattctgtctatacacacaatatttggccacatagaccactccccaaagtctgcaaaacactgcctactgggcaggcttacagtgacagaaaagtatgagaacacaagatattatttttataaagactaaaatcagatttaggctgtctagatatcttattccagaaaacacagatttaagatttttcagtgattcttgccttccccctcccctttctcgt

SEQ ID NO: 127576 - DNA, 929 bp, Homo Sapiens
tcccccaatgccctttgaggttgcgcaaagctttcgtcacaacaacggtgcagcctgtttcgaagtcccagaagcgcgggatgtagttgcccaggtagttcaactgcagccccacagcaggaaaagaaggcatcacgctgagctcagatgtgaggacagaggcagtgagttcatagcaggccccaggaaggtggccctggccccagggagacaccaaggctccatccaggttctggaagatacggcagcggtggtccagggtgatattgatctgctccctcttctccgggtccaagaagatcttggtgtaaaacagctgatcgctgtcgctgtcctggccctcccactcggccaccagtttgctgaggttgggggcataaccgatgaagcctccagagcccaggaacctcttgccatcggacaccaccggatacttggtctccagcctgcggtctgggtagatgagctcctcagcagagaagaccacctggctcctggcctgccggaacttcttcaggagctcccggggccccgatgcaaacagcacgtcatagctgtctgcgaagagaatgaccagatcctccttgtctgcgtgcttctccagagctttcttcagcagccggaccttctgccctccacctgccgacgtccccttctccacattccagtcctcccctaggccaagcgcctggatcttgtagttgaagaactgagctgagcgcttgaagcgacggaatccctcggtctccttagtggccaccgtgaggactaaaaggttgtcctccggcttggcgtcgcccttcgcttcggccagcagcagccagcccagcagggccagtagcagcaggggccgcatggccgaggtatgggggacgatcggccgacccggcctcgtgccgaattcggcgcgccgtcgacttcatactctc

SEQ ID NO: 127577 - DNA, 913 bp, Homo Sapiens
ttgaaatccagtcgggtggaccagacgccatgctgagtggcacttgtcccagtcagctttgaagtcagagccggagtagtgccagtagtcactgcagctgtgccccgtgccatgatcagaaccggagggtgtcatggccagttcctcgctctcacatggcccatttcaaactgagcacgacctcatccaaggctccatcaggttctggaagatacggcagcggtggtccagggtgatattgatctgctccctcttctccgggtccaagaagatcttggtgtaaaacagctgatcgctgtcgctgtcctggccctcccactcggccaccagtttgctgaggttgggggcataaccgatgaagcctccagagcccaggaacctcttgccatcggacaccaccggatacttggtctccagcctgcggtctgggtagatgagctcctcagcagagaagaccacctggctcctggcctgccggaacttcttcaggagctcccggggccccgatgcaaacagcacgtcatagctgtctgcgaagagaatgaccagatcctccttgtctgcgtgcttctccagagctttcttcagcagccggaccttctgccctccacctgccgacgtccccttctccacattccagtcctcccctaggccaagcgcctggatcttgtagttgaagaactgagctgagcgcttgaagcgacggaatccctcggtctccttagtggccaccgtgaggactaaaaggttgtcctccggcttggcgtcgcccttcgcttcggccagcagcagccagcccagcagggccagtagcagcaggggccgcatggccgaggtatgggggacgatcggccgacccggcggcgctcgcaggcctcgtgccgaattcggcgcgccgtcgacttcatactct

SEQ ID NO: 127578 - DNA, 865 bp, Homo Sapiens
tattcaatgcaaaattcacagcttggttttggaggaaaaatccattttagggaatgacccagaccgtgaaaacaggaccaaggaggggtgtcgagacagcgaccagacgtgggagagttttccccatgccctgaggtgcgcaagctttgtcacacaggtgcagcctgtttggaggtccagaagcgcgggatgtagttgcccaggtagttcaactgcagcttggttggcccgttgccatggatcaggaccgggagggtgtcataggccaggttcctcgctctcacatggcccatttcaaacttgagcacgacctcatccaaggctccatccaggttctggaagatacggcagcggtggtccagggtgatattgatctgctccctcttctccgggtccaagaagatcttggtgtaaaacagctgatcgctgtcgctgtcctggccctcccactcggccaccagtttgctgaggttgggggcataaccgatgaagcctccagagcccaggaacctcttgccatcggacaccaccggatacttggtctccagcctgcggtctgggtagatgagctcctcagcagagaagaccacctggctcctggcctgccggaacttcttcaggagctcccggggccccgatgcaaacagcacgtcatagctgtctgcgaagagaatgaccagatcctccttgtctgcgtgcttctccagagctttcttcagcagccggaccttctgccctccacctgccgacgtccccttctccacattccagtcctcccctaggccaagcgcctggatcttgtagtgaagaactgagctgagcgcctcgtgccgaattcggcgcgccgtgacttcatactctcccg

SEQ ID NO: 127579 - DNA, 3171 bp, Homo Sapiens
  misc_feature (2997)..(3024): n is a, c, g, or t
gcagcgggacctgcggccccgtcgcgaagtttccagccctgcgagcgccgccgggtcggccgatcgtcccccatacctcggccatgcggcccctgctgctactggccctgctgggctggctgctgctggccgaagcgaagggcgacgccaagccggaggacaaccttttagtcctcacggtggccactaaggagaccgagggattccgtcgcttcaagcgctcagctcagttcttcaactacaagatccaggcgcttggcctaggggaggactggaatgtggagaaggggacgtcggcaggtggagggcagaaggtccggctgctgaagaaagctctggagaagcacgcagacaaggaggatctggtcattctcttcgcagacagctatgacgtgctgtttgcatcggggccccgggagctcctgaagaagttccggcaggccaggagccaggtggtcttctctgctgaggagctcatctacccagaccgcaggctggagaccaagtatccggtggtgtccgatggcaagaggttcctgggctctggaggcttcatcggttatgcccccaacctcagcaaactggtggccgagtgggagggccaggacagcgacagcgatcagctgttttacaccaagatcttcttggacccggagaagagggagcagatcaatatcaccctggaccaccgctgccgtatcttccagaacctggatggagccttggatgaggtcgtgctcaagtttgaaatgggccatgtgagagcgaggaacctggcctatgacaccctcccggtcctgatccatggcaacgggccaaccaagctgcagttgaactacctgggcaactacatcccgcgcttctggaccttcgaaacaggctgcaccgtgtgtgacgaaggcttgcgcagcctcaagggcattggggatgaagctctgcccacggtcctggtcggcgtgttcatcgaacagcccacgccgtttgtgtccctgttcttccagcggctcctgcggctccactacccccagaaacacatgcgacttttcatccacaaccacgagcagcaccacaaggctcaggtggaagagttcctggcacagcatggcagcgagtaccagtctgtgaagctggtgggccctgaggtgcggatggcgaatgcagatgccaggaacatgggcgcagacctgtgccggcaggaccgcagctgcacctactacttcagcgtggatgctgacgtggccctgaccgagcccaacagcctgcggctgctgatccaacagaacaagaacgtcattgccccgctgatgacccggcatgggaggctgtggtcgaacttctggggggctctcagtgcagatggctactatgcccgttccgaggactacgtggacattgtgcaggggcggcgtgttggtgtctggaatgtgccctatatttcaaacatctacttgatcaagggcagtgccctgcggggtgagctgcagtcctcagatctcttccaccacagcaagctggaccccgacatggccttctgtgccaacatccggcagcaggatgtgttcatgttcctgaccaaccggcacacccttggccatctgctctccctagacagctaccgcaccacccacctgcacaacgacctctgggaggtgttcagcaaccccgaggactggaaggagaagtacatccaccagaactacaccaaagccctggcagggaagctggtggagacgccctgcccggatgtctattggttccccatcttcacggaggtggcctgtgatgagctggtggaggagatggagcactttggccagtggtctctgggcaacaacaaggacaaccgcatccagggtggctacgagaacgtgccgactattgacatccacatgaaccagatcggctttgagcgggagtggcacaaattcctgctggagtacattgcgcccatgacggagaagctctaccccggctactacaccagggcccagtttgacctggcctttgtcgtccgctacaagcctgatgagcagccctcactgatgccacaccatgatgcctccaccttcaccatcaacatcgccctgaaccgagtcggggtggattacgagggcgggggctgtcggttcctgcgctacaactgttccatccgagccccaaggaagggctggaccctcatgcaccctggacgactcacgcattaccatgaggggctccccaccaccaggggcacccgctacatcgcagtctccttcgtcgatccctaattggccaggcctgaccctcttggacctttcttctttgccgacaaccactgcccagcagcctctgggacctcggggtcccagggaacccagtccagcctcctggctgttgacttcccattgctcttggagccaccaatcaaagagattcaaagagattcctgcaggccagaggcggaacacacctttatggctggggctctccgtggtgttctggacccagcccctggagacaccattcacttttactgctttgtagtgactcgtgctctccaacctgtcttcctgaaaaaccaaggcccccttcccccacctcttccatggggtgagacttgagcagaacaggggcttccccaagttgcccagaaagactgtctgggtgagaagccatggccagagcttctcccaggcacaggtgttgcaccagggacttctgcttcaagttttggggtaaagacacctggatcagactccaagggctgccctgagtctgggacttctgcctccatggctggtcatgagagcaaaccgtagtcccctggagacagcgactccagagaacctcttgggagacagaagaggcatctgtgcacagctcgatcttctacttgcctgtggggaggggagtgacaggtccacacaccacactgggtcaccctgtcctggatgcctctgaagagagggacagaccgtcagaaactggagagtttctattaaaggtcatttaaacccnnnnnnnnnnnnnnnnnnnnnnnnnnnnaaggggcggcccgctctagaagtatcccctcggagggggccccaagccttacggcgtaccccaggctttcctttggtaacaaaggggggcccctaataaggggaaggtcggtatttattaagcctaagggaccctctgggccgttca

SEQ ID NO: 127580 - DNA, 1086 bp, Homo Sapiens
  misc_feature (496)..(518): n is a, c, g, or t
cccagtattggtatgtttcttttttcccaagaattctttaggagtatatttaacttctgggaggagtactgatttttcattcacttatatatgatcaatttctgcagatgtttcctgtgtctttggtatgttgttaactgtacaactaaaatttgctttcagccttatctatgctctttgattcaaggaggctgagtttcctgctaggatcccatcttgtagttcagtgtgtaaataaccaaaacatttcctcccttgagaaccccccaggccctgccccaagtcatttcatgaactgaggaaaacttcaaatacaatgaacattttattttaaaaaacctaactcaccacttggtaaaaggtcaccaaatgtttatgagagaggaaataagaataaaaaagacatttagttctcaggaacaagtgttagagaactgatacacaaccctccagaaatgaggcagagataatagatgaaatgtttcaacctgtgttnnnnnnnnnnnnnnnnnnnnnnntgccatcagaggaaaagacaggggcagcacaaggaacagcactgccaattttaagagggggatcaccctaaccaaaaatcaccactttgttcttggaaggagaatgaacattaaacagaacttaaaatcagagactatttatattaaataactcttcccttaaaaatggcctgaccacagcaatgaatctgtaaacacagagtaatatttttcctacagtaaagagtcactttaatctcaaaagatacttttcactgttctaaatgacaggattttaagcattttttcctatatataatacagcatcacttaaaattttatttaaagacagttgattcaggcctgccttggactggaaagaagtctttaacttagtgggattagtgcttcagcttggtcccaaatattttccccattattgtttctcaaaactcatgtcatagatggttttacagatgatggttttacagatgatgtcaatgctgtttaaaatcactgaagactgagttgggcctggtatattggagagaactgaaggcaaggatggtttaatccccaactgctaagt

SEQ ID NO: 127581 - DNA, 2231 bp, Homo Sapiens
  misc_feature (862)..(862): n is a, c, g, or t
  misc_feature (906)..(906): n is a, c, g, or t
gtatcaaaaaataatctttattgtcactagtataaaacagagcagatcaactggcctctcggtctgtacaaagtgtggggcgtgaaaccgcctgggctgcccccacttctcccataattccctgccctagagcagcacctccagagctaggagaaggagagggggccacccaaggccttcccttgaggagaggggtcaggagtggactggagtgggggctgttttctatctgagggaggcaaagaagcagaggagaaaactggagtggcggaaccctcccgctcctcatcccgtcccctgtggccgcgccccagagtccactggatgggtggaggggcggcgggcagcctgaaggcgggctgaggcatgagccagtccacggcctggtcagagggccacccgcgtgcagcaatggcgcagcaagcacggcaggatgccgcggttcatctggtggaactccacgagctgcagcaggtcagtgaagcgggtctggccatcatccatgctgaagtacaggcggtcctcctcctcgctcggcaggatgagataatgcttcactttctgcaggtggcacaaagagaggacaaagccctgggggttccgctgactctctcggaccaggaacaggccgtctaccaagccctgctgtccaataagccgctggctctcctcacgggaaatgcgcccgtgggaaccagaattggggtgcggtggatggctgcactgagggctcgtgcccggaggctggcatgggcatgctgagggcggtggtttgtctttttccttccaggccttggtcttctcccagggccccactcagagccttccgggggttctcaatgacacgccccagcatggtcangagaagtccatggccaccagggtattatctgaggcacttctcantgggtggggaggccaaacacgatggatgcagatggcgagactgtgcctgctggtaattcttgtacagctgccaccccgtacttgaagaggcggaaggcagccagccagccaggttgcggctctgctcatcttcactgcagaagatccgaagcccccttgtggccatttcgaagcttgttggggcttgacacagaaaccgaagtcagtgggcatcccgtagagcttgcggccctgcgtcaccacgtacacgttggactcgttcacatctgccacgtactgcaggtgcctcggatccttagaggtgcccttggtggagtaatagaggccagatcggcgcaagaagcagaaaaagcgtttccaaagcttccgtcctgaaccccgcagctgcagaaagccctggatctcaggaaagctgccagcattcaggaagttctggatgaggtcttcatgggatataccagtgtgtgcatcgagacagctggagaccattttttctgggaacagggagtgtggggagctcttgaacagttcgtacttggcgaagtttttccggaagacgaagcggctatctccgcccacgggccaggcagcctgcacttccaccacggactcgtggtcctccaaaccccgctccagtgctaggtgggggtggcactccaccagcccccaggtctcgtcgctcaaggcgtgagctcgctgcaccagcatttcacacacgtggcgagctgtggcacctgctgccacctccacagacctgcaggccccatcctcactgtacacctttactacatgggggcggctggcatcgcgggggagcagcccccttgcactggaggggcccccgagaattgggctctgtgagggaggactgcagagctcagggaaggggttggggatagaggggagggaggtggcacgcctctcctcctctcgaagtttcctgccggtggttgggatgaggagaggctgggacctctttacctcctcaggcagaggggtatcagggggccggggagtcccaggaggggtcccaggggctgggcaaaggtcttccggagagctgctaagatgaggtggagacagatccagctccatggcgtctgagcgagagaggggcttaacggaaccagttgtgtgcccttgtcctggaggagccccagcaggagtagcaggacacccgttccgaagtctggctccgtctaggaacccccagattcctggattttatttcagatccactcccgcttctctacaggtggtaggagggtgtcccgacttcggacagagaagtcagaggcgggggggatcccgggaattccggaccg

SEQ ID NO: 127582 - DNA, 767 bp, Homo Sapiens
attttttctgggaacagggagttgggagctcttgaacagttcgtacttggcgaagtttttccggaagacgaagcggctatctccgcccacgggccaggcagcctgcacttccaccacggactcgtggtcctccaaaccccggctccagtgttaggtgggggtggcactccaccagcccccaggtctcgtcgctcaaggcgtgagctcgctgcaccagcatttcacacacgtggcgagctgtggcacctgctgccacctccacagacctgcaggccccatcctcactgtacacctttactacatgggggcggctggcatcgcgggggagcagcccccttgcactggaggggcccccgagaattgggctctgtgagggaggactgcagagctcagggaaggggttggggatagaggggagggaggtggcacgcctctcctcctctcgaagtttcctgccggtggttgggatgaggagaggctgggacctctttacctcctcaggcagaggggtatcagggggccggggagtcccaggaggggtcccaggggctgggcaaaggtcttccggagagctgctaagatgaggtggagacagatccagctccatggcgtctgagcgagagaggggcttaacggaaccagttgtgtgcccttgtcctgaaccccgagcgtcaggacacccggctgggaccacgtcttcagggagggagacgccaggcccttactacccctcgtgccgattaacacccagcctcgtactagcctaa

SEQ ID NO: 127583 - DNA, 2065 bp, Homo Sapiens
ggcggtaacaatgctctttatttgtggcgtttaaaggcggggttgggcgggacagcgcccttgcgtgtattaggcacaggttcggaacgcagcatctttccaggggcttccctactagctcagccccataaagtcactggtttcctccatctggaccagcagccgcaccagccaaggcgcccactgggtgtcggaggtgggcgatgtcaatccccgtggccttcgtcgggagggtggagctggccaaaaagagagcggtacagttctgtcctggcatcatcattcattgtagtatggtcaataggtgccatgaaactcagtagcttgctaaggacatgaaaccgaagtttcctgcctttgctggctttcctatctacttttttgtggattttgcttcgtaacttctggattgcaagccactgccttcccatggccacctgatcgttgggatccaaggagctggtcttccgttctatgagttctcgaaggagctggtggtaaaagtcatcatcatcaaagatttcttcatccaagtccttcagatgagcattagcaggggcttgaggaaggatctccggttcccctggcaaactctctgggacaggctgagctgctggctcaggtttgccaagaactcgatagacagagcgcttggtctgtgtccttcgaagtaatctctctttgtccatcagaatatggtcgatctgagtcaagattgagcgttcaaaggcaccaaaacccttccccagttttccagaagccagtttggtcttatcgtgccatttctgaagtgtgcggttcctgtagactgtaaagtcggcaaagcgctttgccatgaagctgggatagtcctccatctccagcttcctctttgcagggacccttcttcgttgctgcttcttctcttctaccagctcatcatcttcactagaaatctcctcacttcccgcattgggctttgtcccatctactagatatctagtgtctgggtactggaaaagcaactcttcctgaagacctaccaatgacctcaacaatgctttaagtgccttgtgactatttttcagggcactggaaaattctgggccacctttgtccttgaacaatgggaaaacatctggttgaggaagctggttggtggtcaacagagctttttgtagtttgatccttccttccaagagctggtcccacagtgctatctggttcttcacggctcttcctttctccacttcctcagaaactttgacactagagaaggtcatcaccacaccatcatcctcactgtttctatctccagccctgtcttcctcactctcgcccttgggagtcttccgcgtcatccccttcttccatgccactctcttcgtcttcctcctcctcactgctcccaaggtcatccattcccttggtaaatttctcaaagtcactgatactctggacactgaagcccggtgtttttgcagagtggcttctgctcttcttgctctccctgtgatcaccacactcctgttcctcagcagcacccaggtcgtcctcatcatattcctccagacccagtccctctgaatcttcatctccagacccttcctcatcagatatttcctcatcagacgatcctggcagagtctgctcccaatggtcttcattccatgcttttctagaggtggttttgccgcaataccttttgtccgtgtccaagagggaggctgatgccagttttctaatgctacccactactaggaaatcaccttccccatcttccccttcatcaaacctgtcaatcaccctggcagcagtggcttcctcggggtccgcttcagggtccgcctcgcttggtcgcgggttcaacaactgttccagttgcagcgccaggggctgcggccccgccatcgtcaccagctcccggtccactccgcttcgcgcacgtaaatgtgcggcccaacccccggccccgaagctccttccctgccggatcctctcgccttgatccgattccccgactccgccagagaccgcgcggagcccctcgtgccgattcaacaccagcctcgtactagctactttt

SEQ ID NO: 127584 - DNA, 692 bp, Homo Sapiens
ttgtattgttgtcaaataataatttattttaaaaaaatctcaaaacatgttcaaacacattcagtagcaaagatccaccattggcacacacattaagaaagcacacacactaggcttctagttgggctaattaaaatctctatggctggaaaggtggttggttgtacttaattaagcttttttgaagtgcaaagctatgcataacagatgagcttgaaagctgcagagtttaagatagacttaatttttcatgattttcccaaagccagtcatgatatttatttaatttgtggtcttcagggtgcacctggaagaaacataagatacagaggcagagaccttaatgtaacttagtcagaaatacattttttaaaattggctttttaaatgtttgctgggggacagtacattacgataccatacctaaaagttataacctttaacctcctgggattcatgaatattttaagttataccttatattaaggtaatctcacacaatttacaaggtactgtccaaattactactcaaccatgacttagaatgtggggtggcgataacatgagtcaagtattaatacctcactttccagaaggaggttctagaccgagaggttcaatggattctcaggtcacaatggattgctctgatgaagctgggataggaccatggtccttcagttcaggcttgg

SEQ ID NO: 127585 - DNA, 729 bp, Homo Sapiens
  misc_feature (668)..(668): n is a, c, g, or t
ggcttgttgtcaaataataatttattttaaaaaaatctcaaaacatgttcaaacacattcagtagcaaagatccaccattggcacacacattaagaaagcacacacactacggcttctagttgggctaattaaaatctctatggctggaaaggtggttggttgtacttaattaagcttttttgaagtgcaaagctatgcataacagatgagcttgaaagctgcagagtttaagatagacttaatttttcatgattttcccaaagccagtcatgatatttatttaatttgtggtcttcagggtgcacctgcttccactcattgacacaaaaaattcggtaagagtcgttgccatatttaccaatcccatgaagctcaattggatacttccactgctttgtcaggtattcatctgagaacttgacaatggtttttgcccgaagatcgtagagaccacgaggtttaagaagttctgacacatctctccagtctgcggttcttgctacctcagctgaaggatacttctccagaaacttccaaagcacaggtattgccattttgcctgaggtccgattgagaaatatagtagcgatgagaagcttccatggatcatgaaaaagtgtttcttgaacgagattaaaaggtgaccgaggaggtgtccatttcttanaggctttacgtcgtggggggctaagagctctttgttatatttgctggaaaaatcctcgtgc

SEQ ID NO: 127586 - DNA, 688 bp, Homo Sapiens
ctgtttaactgtattttctgggtttattcccccttgttccaagctctaagcctcagcttactccacctccatagcctgcacagtttcctccactagctccagggttagtggcttcactgtctgggtcaggacagctgtggttccaggcacaaagtggtagcggccagacctcttcacgggctctgtgggtgagctcagtgtccgcagcagcttggcgccagtctttgtgatcacacatgcgtccacattgcccccggagcccaggtcacccaagatcccggcggtgacggcttccaccagcagcccctgagcagcctccagctgcggtgatgggtgtgtgagacctaacgggctctctctgctgttaacttaggctacagcctggggacttgcctgtccacttacccaatctggtcttgccctccaaacccccactgtgtttctccctctgagccttagccacctctgaggcaacatcacctgcttccatcccaccccaaacaaaatctaggctccagacgttgatataagtaggaccctactggtccttctctccgccctcggctcctaaagatcctctgtgagcttcgacttctcccagccgtgcaggctttggtattggacggtgttatgtcgggaccgcacttctctgcccttactccacttacccaatctggtcttgccctcg

SEQ ID NO: 127587 - DNA, 1179 bp, Homo Sapiens
  misc_feature (1069)..(1103): n is a, c, g, or t
gagcgaggcctgggtggcgaattcggcacgaggtttttgtttaactgtattttctgggtttattcccccttgttccaagctctaagcctcagcttactccacctccatagcctgcacagtttcctccactagctccagggttagtggcttcactgtctgggtcaggacagctgtggttccaggcacaaagtggtagcggccagacctcttcacgggctctgtgggtgagctcagtgtccgcagcagcttggcgccagtctttgtgatcacacatgcgtccacattgcccccggagcccaggtcacccaagatcccggcggtgacggcttccaccagcagcccctgagcagcctccagcgtcatgttcggctggaaccggtcttctagcaccgccagggccgcgtcctgaccagagcccagggctgtgaagggcagacggctgtaggagccatggggatgcacaccgtagagctgcggtccagtcaggtctacgccgcccacgatcagcgatgcacccacgtggccctggtacctgaagagcgtctggcgcaggatgcgagtgaccgtggccacgcggggctcgcggcccgtagataacgcgtgtagctccatcttggacgccaccatccgtgtggtcatctcggcgtccgcggctactccagccccacagcagtagattttgggggcgatgaagtggatcttctcgcagctcttgtccgccacgaccgaatcgttagtggctcgcgtatcggcgcccagaatgaccccgtcttggaacaccaggcccgcgatggtggtcccggtcttgcgtgcgtgagggaccttgagccccgggaggacgcgttccaatgatgcatttctttggcagttctcgaaggagaagccccctcggggctccagggctggcttcagcatcttggggcaggcagaggggattaggggtcgcgggcggatgagtcggccagacaagcggggccagtgagcagctaaaaagtcctctgctaggcttcacgtctcccccggccgtaatggccgaattcccgggcatatgtccggtaccgtcgactgnnnnnnnnnnnnnnnnnnnnnnnnnnnnnnnnnnncgccgcttcctcgctcaactgacttcgctgcgctcgtcgttcggaataacgcccagcgcccttagtgatcttcatt

SEQ ID NO: 127588 - DNA, 1024 bp, Homo Sapiens
gtttttgtgtcggtctgttagcctggtccagcctcgggtgttagaacggcgtcgccggcgcgtttttgtgaaagcccgatctggtgtgcgcgttttctctggaccgttggacctgctgatcgtctgtgtgcgccgcgccccaactagtgtttagaacttttttggggggcagcggcgcaaagatgttgttttgtctttgcttgcttggtgtaatggtggttgtgtgtgcggtgttctctctggttaaaagcactttattgattacagtatcaattcacaacatttcataaagccactgtacaaatagaggaatgaatcactgtgtaagaaagatctaagaacagttaaatcatgatacaagtccatagtttatatggtttagagctttaagagccttaatctaacacgtttacccttcccataattagactactactgacattcatgttcagttgaccacgagtgtgtacaaatcattctaggtaaagacaaacactttcagaatgctttaacagaaaaataattttaatcaactttaaaaacacacttagatgtggatgcctttggataggaaaatagaaatgcaagtgttcagatgcttctttgaaaagaaaacaataggatagagcaccattgtgtaaaagacaaaaggcttgagatatctaccaagtatatcactgaagttctattaattaagaaataaatactgtatgatgtaagattttgttgaatacatttaacaccagttggaatatagctttttcccccccgtaatgctgctttatcacaactgtattttacaaaatcagcaactggatttaagaaagaagacataggagattttatcaacatgcacacatttgctaaatacaaggtgtaccatcaatgtgtgattaataagttactttttaaaataaagtgctagcttagatattctactataaaccatttcattgagtacctattatgtaaccaatattttaaaatatacactgaatctgaggcaacccaaaatgaacaatgg

SEQ ID NO: 127589 - DNA, 896 bp, Homo Sapiens
  misc_feature (564)..(794): n is a, c, g, or t
ttttttggtcttaggaaatgtattttgactctttcagtctcagcaaggggatagaaggagccctgcattctctcctgacacgcttgacaaaaacaaacccaactagaggtcgccagcaacggaggggcatcctgtgtaaggacttggaagaggagttgtattgtcaccccctggccactagaggacttcatcctatttcagtggaggaaggcctgttaggggcctctctatactggtggaggtttggtcgtcttcccttcacttgatttctgccagtggccttatgtgaggatgcttcatgagatgtcaagtatccgaggagtctgtgacacaaccatccagtggtgaagtgctaaggagctcctctccagcctgcttgactctgaggttaaaagagtcttcatgttgagcacaagtcatctctttgcactttcaccagttgtgtccatctgaaaaacacagaggtctgtctcacttctgcatcacagtcccttccaagaagctccacaatgggtaaggcacaataaaatggcttatattcaacaaacacataacactcttccnnnnnnnnnnnnnnnnnnnnnnnnnnnnnnnnnnnnnnnnnnnnnnnnnnnnnnnnnnnnnnnnnnnnnnnnnnnnnnnnnnnnnnnnnnnnnnnnnnnnnnnnnnnnnnnnnnnnnnnnnnnnnnnnnnnnnnnnnnnnnnnnnnnnnnnnnnnnnnnnnnnnnnnnnnnnnnnnnnnnnnnnnnnnnnnnnnnnnnnnnnnnnnnnnnnnnnnnnnnnnnnnnnnnnnngctgcctcccaggagatgggccagataaacaatgacatattttaaaaaacatcctaacctatttttttcattatatgcacataacagaaaatttggaaaatc

SEQ ID NO: 127590 - DNA, 963 bp, Homo Sapiens
ttgaactttaaaactactatattatacaatagtaaagcagcagagtatcttacttttatataattatataaaaacttatttttatattgttacattgtgaatcacattacaatttagtctccttttcaatagaaagattttctaaggacatgatttggagccgtccacatttatcagatgccttttcattaattttttccatttttgcaattcttgatccaaactgcatggcccgtttgggcagaagagcagaggctgtaagaccaagttccacagctgcaaggcgtaaaagtaatttttcaccaattcctcggggtaaagtcaagtttgctttttcccaaatcggcagagaatttagaaaggagacaacattttcatccaggaaaggaaatcttgcttcttttccatgatcaccaataactctgtcatcacgaccaagatttctagaagaaattcgacccagttccatcattatttccttattcaatccttccagcccatgcgactgaaagcggacacgatgacgagaataacctgcaagttgctcatctgcaccaattccagtgagaactacctttgcattgctctgataggatttcactccttcctgggccactaaccaaccaattcctctagaagcaaaccagactgcacagccaatgctatcatccaaaactgtatccaatggccgaattaagtgacatattcgagttcttcttaatttctgcagttcttccatagaaacattaatttcaacaaaattccaaattcgggaagggctaacagcttgtagttcctttagtcccgcccttcctgtgattcgatctggtacactgacatgtttattaggactgtcagcagcagcagcagcaacatctttagaggattcttctgaaggtatttcacatttatttttctgtttattcccttctctgttaaaggtagttggcatggtcttttccc

SEQ ID NO: 127591 - DNA, 634 bp, Homo Sapiens
agaggaattcccatgaactcattttccatgaacataatataatagtactcacctatctcctctacccaacttgtgttttagatgagtccttttggatctttttccccataatggcctctctccttttgctttacagtgcaatcagggcagaataacagatatgttgagtagctaatttatatttctgaagatctccatagaactcttaagttctaagtcttcatagtctttgcaccttgccaagtttgctttcctttgggaattctgtcataaccacaaggttattccccagacatgcagtttggggaaattaacccggcagtagtaaacagactggattagaaaaggtggcagtcgtaataaggatattccaataaccggggaaagctacagaaggatcttgagttaggatgatgacagttacaatagaaaggagaccagtacaagagacggtgaaaacagaatggatacaatttagttgaagaattggctgtgggtgaaaagaagaaatcaaagatgcctgaagttgtgagtttcaggtagccctgagtttataatcctagttctgactcgtactatctttggatatactagctgctgactactaactgaacaaggtagtaccttgtcatct

SEQ ID NO: 127592 - DNA, 984 bp, Homo Sapiens
  misc_feature (767)..(780): n is a, c, g, or t
ttaaaacactgtgatatactggagttttagttagcggaagtcagttcagggcattttagggctgtcttgctatactgaattgtagctaacaatcctaattatatctagtaccatactgagttattggtatgaccctgtggaaacacacattattttatgtaaatataggctaaagacttaatgtcctttagcttgtgtatataattgtgttgtatagtctcagagtacattctaaccctacatttctaatcattgttattggtaatcttttctgtgaatattaggtttcctccagaaatagtccgttatttgggaaagttaactgtgtgcacttttagatattaactacatttacaggcaaatcactgtaatgagaatggtactggaaaaatactgaatagacttgctaaatggcacatgcactacaagaggaaccttttgggttatttaatatgtacagaaaacattagaaaaaatttattacagaattctaattccagtatgaatagtggaaacccatctgtaaattagatggatgttggatggaaaatgacattgctaaatttgagaatttctttttacctactaatgtagattgctttgtataataaaacacagggtttggaaggttttgttacagggagcatggtctgttgaagatttttaaaatgtatttttctagattaacttctgtacatgaaatgtctaataaaactataagaggtttagagatttttccattggaaatgtgcattttggtttctaannnnnnnnnnnnnncatttactggcatactgttatacctcattttttaaaatcaactgaatccaatattttccggtggcaaataacactttccctcatttcatacccttttctcctctcttccatgccaaacatttcctccaccccacaacgttacacttttttatttcctcccatcaaatattttgaaaagcgaagtgaatttgtggacccagggaa

SEQ ID NO: 127593 - DNA, 1137 bp, Homo Sapiens
tttttttggaatgaatggcagccctccctggagaggcagcctgtttactgaatacagaggatacgtttacaaactgaatacgcataataaataactgcacattctccatccacaggccatggcatgaaggcccaagtgggtctatcaaaggcccacatctccaaaccccctgtcctgccctcaggaccaggcccaccctgggcaagagagaacgtaagccccagggcttcaggtccccagagacacttggggaactggggggaaattctgaggccatggggcttggttctccactgcctcctgcccagggggcattggggacggtaggaggatgtgtctaaggcatagtcgacttggcacagagtggtctctttagttttgtttcccactggaggtggcacatgcaggaaaagggcctggcccaggctgccgaccggcagaagctgagtgggaaccaaaccctcctgcaatggcaggggccctgccgtcaagctaaggccaaagctgggccctggccccattctacccactgaaggcagctgtggaggaaggggcttgggttccagcctggtttgtggtagggggagatccacaaaagaaatggggatggttctggctcaggcctctgggaaagcagcacccaaccccacccacctcccgcaggggctccttccagcttgaggctcagtgggacccagactggaaggttaatgctgtgaagggaagcagcacagggtggacggggcaaggccagctgtgagaaggcagtgcccctggcaccctggtttcagaggcaggtcacacagtatggctaagttccagggaggggtgcgcagaagctcagcagaaggggagaggtgagcagcccgggaccctcccccagggcggcaactcctaccttcccatgtcctcatggaggactacaggtgtgcaccatgggtgggtgtgcacgatgggcaggtgtgcacgatgggcgtgcagtgatcactcccaggctgccaacacccatgcagacaccagatggcgccttcgtgcagctgcagaggagggagcaacagagcctgaagggaaaaggcaatggggctgcaccaaaggatagaacccaggctgaccctcgtgccgaattcgccacccagg

SEQ ID NO: 127594 - DNA, 407 bp, Homo Sapiens
tttttaataaaaacagattttaataaatttcaattaattataccatgatcataaattatctttattaaagaatacatattcttgtgatttaaaaccaaatattttaagtgatatatctaatagaaattgacatgaaattatttcatttaaaagttacaataaaaggcaaatagacatccgtatttgtctcattttagaaaacataggctttaagaatcaaaagtaagcttccaagctcacggccaggattacaacttcatattacagaaatgtttaataacaaatatttgactaacagattataattctgaagttgtacatttttaaaagccttttaattttgcttctttactaaaaaaactatgaactgatgaactcacaatagaaaattaataataatttcaggg

SEQ ID NO: 127595 - DNA, 606 bp, Homo Sapiens
  misc_feature (148)..(160): n is a, c, g, or t
ctgttttaaggtcttctttaatatatcagctcattttgagtgatctcacttatcaatggttcttgagtttttaggcaccttatgcaaatgttgcagtctccttaaactaaatatctattaagctacatacaaaaatatctgcaacggnnnnnnnnnnnnngtaggaattctagcaataaccactcattgaagtaaaaatcgaatacagggcacagctttgtagagacaaaataatccatggttaagcaaatgttagtgtataggatgagcttcacaaaaacaaaggccattttcagcacacttttagtcagtagttaatcaagggaaggctgctaatgaggtagttcaatgtcatttccccgacttaatggtagtagaaaatgaaagattaaggctatttaagccaacaggaaaatcatgaatctttaagctatttctgggtccttgtgaagaatttgcaaagtccctgatgctctccctttacgcacatggaatattttcaccaacacaaaaaacagtgctgattctgacgctgcaagcactgcacaattctcaattatttcccatcggtgacgctttcaccaaaggccatgctacgttgttctg

SEQ ID NO: 127596 - DNA, 1002 bp, Homo Sapiens
  misc_feature (788)..(788): n is a, c, g, or t
  misc_feature (791)..(792): n is a, c, g, or t
tttgatttttaaggtaagcaattattttatttccttggcctgatggcattgacttcattatacaagaacttgcagctgacagaactgacacacacatttcccccaagagaaagaacccttttcattagcagagatgaattgaaatgtcatgtctgagtgcaattcctgctccccactcccaccccacaaaatcccaaaagtgaaaataaatcaataaaatccccatgatttactaaaagtcatccctccaaacctttctaactagcagctgcagtggatgataaccaaggagggaagcagctggccatcatgtagcattcctgtgcatgtgagcctgaagggacagcagcatgggagcaagaatcctgaatgagagtagtatataattaccttacttcatacttgccccctccctacataagacacctctttcctgatacatggaaaatactagaggagatgctaagagtggttttagtctacaattggaaatgcctgagacttattaaattccaaggaaggggtgagataaggggcaccaaagagaaagagcaggttagacagggatgctcaacactcttgtcaattccagtttaatgctatttaataacaaaaccatcttcttaatcacaaccaccttcatgcctaacccctattttccaaaggtaagagatccctgtctaaatttctgggttgttgtctactgccacccctggggtggtactgtgatgtctgagtgagattgcaaccgggatggggagaaaagagtgtgagacagggaagatcanggnngcacaatgcatcaattacagtgggtctccttttggtcccaggtatgggtcactacacaagctcgtggcgatttctggctcgaggggcaatccctataggagtctataaatcgtatcatgtcaactgttcctgtgtgaattgtatcgctcacatcaacacatacagcgggagataagtgtaagctgggggtgctatgatgagtatcacata

SEQ ID NO: 127597 - DNA, 1709 bp, Homo Sapiens
  misc_feature (1662)..(1662): n is a, c, g, or t
gtgctcccagctctagcgaaaagccgccggtatttctccatctggctctcctctacctccaggcaggctcacccgagatccccgccccgaaccccccctgcacactcggcccagcgctgttgcccccggagcggacgtttctgcagctattctgagcacaccttgacgtcggctgagggagcgggacagggtcagcggcgaaggaggcaggccccgcgcggggatctcggaagccctgcggtgcatcatgaagttccagtacaaggaggaccatccctttgagtatcggaaaaaggaaggagaaaagatccggaagaaatatccggacagggtccccgtgattgtagagaaggctccaaaagccagggtgcctgatctggacaagaggaagtacctagtgccctctgaccttactgttggccagttctacttcttaatccggaagagaatccacctgagacctgaggacgccttattcttctttgtcaacaacaccatccctcccaccagtgctaccatgggccaactgtatgaggacaatcatgaggaagactattttctgtatgtggcctacagtgatgagagtgtctatgggaaatgagtggttggaagcccagcagatgggagcacctggacttgggggtaggggaggggtgtgtgtgcgcgacatggggaaagagggtggctcccaccgcaaggagacagaaggtgaagacatctagaaacattacaccacacacaccgtcatcacattttcacatgctcaattgatattttttgctgcttcctcggcccagggagaaagcatgtcaggacagagctgttggattggctttgatagaggaatggggatgatgtaagtttacagtattcctggggtttaattgttgtgcagtttcatagatgggtcaggaggtggacaagttggggccagagatgatggcagtccagcagcaactccctgtgctcccttctctttgggcagagattctatttttgacatttgcacaagacaggtagggaaaggggacttgtggtagtggaccatacctggggaccaaaagagacccactgtaattgatgcattgtggcccctgatcttccctgtctcacacttcttttctcccatcccggttgcaatctcactcagacatcacagtaccaccccaggggtggcagtagacaacaacccagaaatttagacagggatctcttacctttggaaaataggggttaggcatgaaggtggttgtgattaagaagatggttttgttattaaatagcattaaactggaattgacaagagtgttgagcatccctgtctaacctgctctttctctttggtgccccttatctcaccccttccttggaatttaataagtctcaggcatttccaattgtagactaaaaccactcttagcatctcctctagtattttccatgtatcaggacagaggtgtcttatgtagggagggggcaagtatgaagtaaggtaattatatactactctcattcaggattcttgctcccatgctgctgtcccttcaggctcacatgcacaggaatgctacatgatggccagctgcttccctccttggttatcatccactgcaagctgctagttagaaaggtttggagggatgacttttagtaaatcatggngattttattgatttattttcacttttgggattttgtggggtgggagt

SEQ ID NO: 127598 - DNA, 885 bp, Homo Sapiens
  misc_feature (749)..(765): n is a, c, g, or t
gcggcatgagggcagccacagtacaggccctcggctccccccacggcaacccacggtggcctctccagcagagtcagatgaggaaaaccgacagaagacccggccacgaacaaaaatttcagtggaagccttgggaatcctccagagtttcatacaagacgtgggcctgtaccctgacgaagaggccatccagactctgtctgcccagctcgaccttcccaagtacaccatcatcaagttctttcagaaccagcggtactatctcaagcaccacggcaaactgaaggacaattccggtttagaggtcgatgtggcagaatataaagaagaggagctgctgaaggatttggaagagagtgtccaagataaaaatactaacacccttttttcagtgaaactagaagaagagctgtcagtggaaggaaacacagacattaatactgatttgaaagactgagataaaagtatttgtttcgttcaacagtgccactggtatttactaacaaaatgaaaagtccaccttgtcttctctcagaaaacctttgttgttcattgtttggccaatgaatcttcaaaaacttgcacaaacagaaaagttggaaaaggataatacagactgcactaaatgttttcctctgttttacaaactgcttggcagccccaggtgaagcatcaaggattgtttggtattaaaatttgtgttcacgggatgcaccaaagtgtgtaccccgtaagcatgaaaccagtgnnnnnnnnnnnnnnnnnagttcttattccggagcctcaaacaagcattataccttctgtgattatgatttcctctcctataattatttctgtagcactccacactgatctttggaaacttgccccttatttaaaaaa

SEQ ID NO: 127599 - DNA, 1154 bp, Homo Sapiens
  misc_feature (114)..(114): n is a, c, g, or t
  misc_feature (193)..(205): n is a, c, g, or t
  misc_feature (419)..(427): n is a, c, g, or t
  misc_feature (471)..(471): n is a, c, g, or t
  misc_feature (476)..(479): n is a, c, g, or t
  misc_feature (483)..(485): n is a, c, g, or t
  misc_feature (487)..(487): n is a, c, g, or t
  misc_feature (489)..(490): n is a, c, g, or t
  misc_feature (492)..(494): n is a, c, g, or t
  misc_feature (497)..(498): n is a, c, g, or t
  misc_feature (500)..(500): n is a, c, g, or t
  misc_feature (502)..(513): n is a, c, g, or t
  misc_feature (515)..(546): n is a, c, g, or t
tataggatttttttaaagaggtccactgtaataaaaaagacagagtttttttgtggtaagatgccaaaactagtaacggagctgtgttttattacccccaatacctcccttganagaaaagaatttttattttctcccggcccgcggtgcaagaaaattatttaggggtgtgaggagtgtccacacaaatttnnnnnnnnnnnnntgaaaaaatatggtgttcctcccacaaaaaagacacgaaaattgtggcgcttgttttctcctaaataacggcccgaggaaaaaaaaggtccccaatgtcttgccacttttttaaaaaaaagaggcttcctttggggaaccctttctccaaaataaaaagttttgggcgccccacgaatttgtgggcacccccggggggcaatttaaagaggggnnnnnnnnnacctttattaggggcccccgtggtccttggaaacctggggaccntttannnntggnnncntnnannnatnntntnnnnnnnnnnnncnnnnnnnnnnnnnnnnnnnnnnnnnnnnnnnntacccagaaagctctttattggcctccagggccctggtccagccccactgtggggtcacatggaaacccaggctggggagccgcctcttgtctcacaaaagtccacgtcctccgggaaaacggcaagccctcggcgtgggggtcagcgatgccgggccctccatgctacaacctcttgttcttgctcagccggttgtggcgccagatgttctgtttccgcagccgccgccagtactcccggctctcggggtccagctcctccagggtctttgggggacccaagttcatctcaaacagccattcagggtactcagcatccggtttcaggggtacatcctgcccttccttgtagatgttgacgcccatggcatatgtggtgagctggacaggatctgtgcatacgtcggggtccttgagggcctcgctggtcactgcaccttttcccgatttggcccccttcataactggtttcttggcataatcccgggccaggagtcttccggaagtggcggggtttaggagctcccaggccccccagccggcccacgtccgggtagccccgaaaaggcgtttggtcgccatgacgtattgcgggcagcttgcaacgt

SEQ ID NO: 127600 - DNA, 1859 bp, Homo Sapiens
  misc_feature (1131)..(1141): n is a, c, g, or t
tttttgtggtaataaaatgttgtcaattttattaaaagctgattccatttcttcacacagttaagtacgtttctttcttgttttgttaaagcccatttcataagagtgagttggctctgtgagaccatcactgataaagacacatacagttagcaccacacatttataaatgcagatagccacaatgacctttccaatatgtacaagctccatttacacatccacacatgtatttacagctaataaataaaatgtaaagccagaacatccttgatatatataacaaagtttttcggagccagagttcccagtgctatgtgctgctttagtgaatcttttaagttaatgcaccctgggtcacaacccaaatccagaaatttaatgaattaataaaggggatgccaacaacaaatcatacatcattttatttttagagagaattcattccaagcctgatgatgttaatcacaacattggtcctactatttataggcacgatcatctctctcagagaaagggtcgaagttctggcacatcaggaacaatttctactccgacatgttccaatacatcccttgatcgactgttttcccttccgaattatgctgaaggacaacacacatgcagagctttctagtatgtgttcagatatcacatactttcacagtcgggttcccagctatagcctctgagatatttgacatctttatcatttcatatttatacgtagaagagcattctgaaaaataggagatctagtttataaatagttgttcactcactcttgattagttgttaaaaaccaccaatagcaaccctcatggtactccatctggctcattgcacgcgatggtttacaagcactgcttaggaatccaccccaggaacctctccacccttttacttagtaaaaacggtccttgtctaaaatctgtagaagctcacacaatgccaaatttgaactcaaacctatcttttcatgtccaagccaggaaccaaagagacgcactggaagtaccactgaagcatgacccaggtaagccttaaactgaagagtaactgtcagatattgaatgattttaaattgatgaaaatccatttggagaatctaataataaaattacggtttcnnnnnnnnnnnctgcaccattcaaattatgtgtcagctgaggattacaggctcattttcaacacctacccagagaacattattataatataatcttgagacaaaaaagaagggggagagagggattaagcaataaacgataaagcctattaagaattaattgatctagattttatatctccttgaatttgtaactttgtcatgatgcaggccaatggtagggactgtttaaaacctctgtgtttatcagaccctttcttcgtccctctccaagttacatgttcctggttgacgtctggaccacattccaatagcaagagggaatcattctaaaacatcattcatactgctgtgtagatgagtctgattcgtgccgcggaaaagcattttctgtattcttggagacttagagtaaagtttgagaaggcctcagtccgaaagatccagaattccaattaaaataggaggttctaaccaattataggctatggcccaatacgccacatgaaggagccttattttactctgcgctcaaacaattatttctttctcaaaggacaaaacagcacttttcatgatccactgtcttttaacgttgggaggatgtgctatttggccactataccccataaattgaattagccactttttagtgcttgagactgtctccctgaataactaacaagggtagggggctggattaatattcaggaaaatccacttttggaac

SEQ ID NO: 127601 - DNA, 2042 bp, Homo Sapiens
  misc_feature (418)..(429): n is a, c, g, or t
tttatttatgggctcagagaatttattcatctctaacatgatattggaaaataatggatgaaaataggaaaaatgattgttaatgctgactgtgggtcttaaaaggttctggaaagcagtaagttcatttttctaaaaactataacattctgttggagtattttcttccttacgtcaatacttttcctgcattatttgaaattgtgggctggggagaaacagtagtcaaagctttctgaattgagatactttgaaattccaagtgtagatttttagaatgtcattttataaatggcagtttttggaattacttgataagaacttttgaaaatggaaggattagtatggcctatttttaaagctgctttgttaggttccttatgttttattaactgtcttttctcagtttccatttcannnnnnnnnnnnctagttttggtgacttagtgattttgtcattttttacatcaacttcatggtcttgtttttacatggtaattgcatgtacttaggatctatctaataggggctttaaataaatttggtcatatttatgtgtaagcacattttactgtaaatgtttgggtttctgaatttaaacagatctgtttatttcagtatgtagtaaacaatatcttaaagtgtccgattcactacttgttaattaaaaaagttatgattaatgtgaaactgttgtcttactatttttagaaaattgtgttctggatgattagcacatggataaaggagatttctggaatataaaatggattgtttttgaaatttctaggtttggctctatttactgtaatggttgaaaacaatttagtatttgggtgacccttttgtttttcttctaaatgtgcctctggtaaaatacagaactagactaaagatgtagctttttaatatttgtcttttgatggtggcaggagttcatacattaattgaactaacacatcatattttgacctactatttctatcatattgacttactgtttctgcacttctttgagcagacttatcttaaaaagtccacttttgttaaaagtgtagtgacagcgtctggatataagtccaacaagaagtgttcaaaatattttgaaatattgtgtgcattttataagtcactaaattaatctctctctcttctctttgaacagcttagcagtgtctgcaaaaacgaatcttttcctacaacctgttaactgactgggactgttggtaacaaagtaattgtgagacccatgtcggtcaaaaatttggcatctgctgaaaaaaatgaatgccattttcaagtttcccaaattacttctatactgatttcactttccagaaatggagatatgaaaagattctctggaatccttgaaagacttaatagagatacatgagactaagttaatcttggaacaaaattatactttttttgtctttcatgggagtgatactcagttattgcatatctttacaaaattgtaacctttggagaattacagtatttcatcaagaaattagagtttttacataatcaagagcatattctatggaattaacatttagtggactagaattacataagcaggccatcagtgatcacaaggcatatgagtttgtatttatttcctggaacatgagagctaatttggagtacagacagacaccctgctgagtagaatataaaagttaatgtaaagttctgaactataaagagtagtccttttaaatagatgcattgatttgtatatctttgaaaaagttgattatgattaaatgtgtgggtagttaattacaatttagggtaacaaccaggatgtatggattcttgaggttttggcttcttgagctttctcttgagtacttgatactgttttctgaatattttgaggtttctaattaatggtatgctagtttctactgttttatataaaaatttatctagtgttgtataaggactttagtattgtggatgatgggagtggctttttgtggcatatggttgttttaattgaaatattttttcagtttattacaagtgtg

SEQ ID NO: 127602 - DNA, 986 bp, Homo Sapiens
  misc_feature (244)..(244): n is a, c, g, or t
  misc_feature (428)..(931): n is a, c, g, or t
tttttaagcttcagacgggtaatacatatttattgaaaattttcttcaccgacaatggtgaaatcaagacctcaaattacaaaacatggtggcaggtgatacttacaaaaataaagcgaaggtctatgttttacagatttgtgcatgtttccttcaaatctcagtctgtactgtcattaaaaagatcatggaatctatgttgttcctcatgatggaatagtaaaaaaactgcattccactgacnaaaaaaaatagctttgcttccaaatagcacaagtctttaaagtgacttttcccaacaataaatatagaaaatagcctttaacaagcgtcttttagcttggtcagggttgtatcatttgtttggaaagtacatccttcccctgcagtcagaagaccccagacagcctcctcgtgccgaattcttnnnnnnnnnnnnnnnnnnnnnnnnnnnnnnnnnnnnnnnnnnnnnnnnnnnnnnnnnnnnnnnnnnnnnnnnnnnnnnnnnnnnnnnnnnnnnnnnnnnnnnnnnnnnnnnnnnnnnnnnnnnnnnnnnnnnnnnnnnnnnnnnnnnnnnnnnnnnnnnnnnnnnnnnnnnnnnnnnnnnnnnnnnnnnnnnnnnnnnnnnnnnnnnnnnnnnnnnnnnnnnnnnnnnnnnnnnnnnnnnnnnnnnnnnnnnnnnnnnnnnnnnnnnnnnnnnnnnnnnnnnnnnnnnnnnnnnnnnnnnnnnnnnnnnnnnnnnnnnnnnnnnnnnnnnnnnnnnnnnnnnnnnnnnnnnnnnnnnnnnnnnnnnnnnnnnnnnnnnnnnnnnnnnnnnnnnnnnnnnnnnnnnnnnnnnnnnnnnnnnnnnnnnnnnnnnnnnnnnnnnnnnnnnnnnnnnnnnnnnnnnnnnnnnnnnnnnnnnnnnnnnnnnnnnnnnnnnnnnnnnnnngagtgggaaacccgacagacttataagtacaagcgtttcccctgggagctcctcg

SEQ ID NO: 127603 - DNA, 629 bp, Homo Sapiens
tcaagtctttaccattttatggtatcaaatttcttaagctcatagtgacaacagtacgaggatggtgcttttgacctacggtctcatacctcccttccttcagcatcctcgctagacccagccttgaaccctttgtttggcatgaggtagggcctcagtgcctcagtggcattcataattattttctttccatggtgaggttgggagagagttgagctcttctctagaggaggggcccaggtaaggctgagagggggctccgagaagctccttcctccacagccctctcccagcagccactgctgtcctccacaaaggcacctctggctcctccacttcctgtgatccaaatggtgggggaagagcagcaggcagggctgctcctcaggccaaaacaacctggtggtgggagtggatggcacagaggagaaagcagtggctaggagtcaggtggagatgatgttttgctccctgagggctccaggtcagctttgctctaattttgttttcatttgttttcacaatcgtggagggagaactctctggaggcttgggaaggtggaccccagctgcagagaacacaggccaagaccacacaccacagcccaggtcttgtgggtggacaggag

SEQ ID NO: 127604 - DNA, 1289 bp, Homo Sapiens
caagtctttaccattttatggtatcaaatttcttaagctcatagtgacaacagtacgaggatggtgcttttgacctacggtctcatacctcccttccttcagcaggatgggggctgctggcagcaggatggaggagggagcctgtggtgccaccggaggctgggtctgttgactctgagttgggggagtttcatgaggaaagaggggtgctggagggagatgacgagtaaccagctcatttgaggagctgaggagtttcggtcccagggcccgccaggcaaccagagcttggggcacagctcctgggctttgggaaaggttcttggaacctctatttcctaactcacaggcccggagctccaaggagtggctgccccggagcagtggggaactgttggcatgctgcagctcctgcttctttttggccttccaagcctctgcaggggccagagacaagcggggagaagagagtcccctgcggctgcagaggctgtctgagctggaacaggggctggagagctgggccagctggggtgggaggcgcctgacagctgggacctggggacttggcctggctggggtactggagggcagctcagcgatgagggagccataaaaagtgctggtgtctggaagcatgggcacgccggggcttcgggagtcccaggagagcaaggatcgacgacagtctagtgggtcccgtgcatccgcccccagccgactgctgagctgcttgctgctgctcaggtcccgagagccagaggtggaacgccaagtgtctgccaaccactgggagtcactgtgatccatcctggggcagtggagggagggggtgaggccaggagaaacagggagaagtgagaacctttttggccaagacttcctgttcagaggcagcagaagagggcaaggagatggtggctttatccttactactgcttttcagcttttcacagactccttaagatctctgacctggtcccctaaacccagcacccctttcttattcctggatgaggggaaatccgagtcacccagagctgggaggtagtaatgacagacagctatgtatgctgaggtaaaaagaagacctgaagacaatctggtttgacatctctatctgtcacagcttagcttgggtaagtacatctgttgcacttgggtaagtacatcctctctaagccccagttttctcatctgtaaaatgatggcagtagggccttccacactcaagactgatggtctgggtttatatgaggaaatgtgagatcactcagctggccagagca

SEQ ID NO: 127605 - DNA, 855 bp, Homo Sapiens
  misc_feature (580)..(580): n is a, c, g, or t
actagttgttttaacaatgatgacatgataacagttgttagaaaggcaaggggcatgagtgaggagtaagatggggagacctcacatacctatgaagacgcagtctgcctccctgggctctagaccgaaaccaaagctatccacagccactgccagggcccgggcaaagtgagcatcagcgaggaaggagccatcggaggagctgacaaggctggctctggcgctggcggcattgtcctcagaggctgagccccaaccattggctaaggagccctcgctgggggtgggggtgaggcagggccgaggtgggcacagcaagactccccccttgggccccacccttcttccagtcctgcccatgtccgtgaactctgaggctgttgggacgctgatgtacccataggtggtggggggtgaagggagcccttggcatgggagagacgctgttcctgggagtctcctcaccctcactgagttccaagcacagggctacctcctcaggggtcagcacgctgtcttgatcctcccccagggatgacagtgaggagctggacaggcgactggaagctgggctggggcnagagagggaagaggcctgggggctagggggactgcaggggctaaggatggggatgggggctgctggcagcaggatggaggagggagcctgtggtgccaccggaggctgggtctgttgactctgagttgggggagtttcatgaggaaagaggggtgctggagggagatgacgagtaaccagctcatttgaggagctgaggagtttcggtcccagggcccgccaggcaaccagagcttggggcacagctcctgggctttgggaaaggttcttggaac

SEQ ID NO: 127606 - DNA, 520 bp, Homo Sapiens
aaaaaaattgaatactctttattagatgcattactttcattaccagacacaacaatatatatattttttaagtatttcagaccaagaaactcacaggaggtgttggaggtgggtggctggcctcttttgtctctttattattatattgagtagggcttcagctttttcatgcaatcctgaactcccggaccactgggtttggcacagacttgccgccccttcttggtgaggaatatgacacctggcttggagcactcgctgctcgtttcaaaataacttttcatgagtgaacacgggatgctttgtgagatgtaggaggtgcagcagtcagcagcaaagtgaaagctgttcagaactactggattttccagtggaagctttgacatcattaactctgtctctgcatcatttgtgaactgggcctgggatccaaggacagcaacaagcatgaggcaggagagggcagccacggagaccttcatcctcctggtgggcaggcagggctggccgagcctcgtgc

SEQ ID NO: 127607 - DNA, 1728 bp, Homo Sapiens
  misc_feature (46)..(46): n is a, c, g, or t
  misc_feature (134)..(134): n is a, c, g, or t
  misc_feature (245)..(285): n is a, c, g, or t
gtaggtccatttttggctgccaggggggcctggaaggaggggtggnggggggccccttgaaccctgtctccccccatcccagcccaacagaaaaggggggcgccaggggctacggggaaaagggccactcttcnggacattcatgatcgacccccacaatgggctcagggggagagggggctgggtgtcaggcaaggcgccagacaccccttgcgggctggaggacggggtggctggacctttgnnnnnnnnnnnnnnnnnnnnnnnnnnnnnnnnnnnnnnnnnatacatgttcacctcttagtgttctctccacccccagcgacccccacttgcagacttccagtgatgggagggccgctgcccttcctggagacagaagaacatgggggagggcctgtcccagagggtgggggtcctgggagcctcgcttgctcccacgagtccctgtgtttttctaaaagtcacgagatcaaaactggagttcagtagtagggtctcatctacccccagcaaggagggtggtgccacgcggagcatctcccgggctgggaggagtgggaggcctggccccctactggcctcagtggggctggggtgacccgcggcggctcttcgcctgagcggaagggcgctgggcctcatctggtgcggttctggcgcatgaggggcacgatgctggcaggcggccctgccttggccaggaatgggtgcttcagcagctcggctgccgtggcccgctgggcagggtctcgcaccagcaggcggtccaggaagcccttcagggatggcgacaccttgtgcaggttcttcagtcggggtggcaggttgtcccgaatcatcttcatggctttgaggggtggctcgttgaagtaggggggctctccgtccaccatctcaatcaccattatccccagcgaccagatgtctacctctggcccgtagggaaggcgggagatgagctctgggggccatccagtagggcgtgccgaccagcgacttccttcggggcacttccttgctcacctgggcgcagaacccaaagtctgacagcttcaccctgccatcatgggtcagcaggatcgagtcgctcttgatgtcccggtggatgacgccctgggcgtggagcaccgacagggcctgcagcactgcaaggcacacggccgcgatctgctcctcgttcatcctggtgtgggtgacgatgtcggtgagggcgcctccttccaggaactccatgaccacccagagctcgtcccccaccaggtagctgttgtacatctccaccacattctcgtgctggtagtccctcatgattaccacctcgttgaagagcagctcgcgcctctgctgcttgcgcaggtccatcttcttgacggccaccagcttgcccgagctgcgcacggtggcgatgcacacgatgcccgtggagccctcgccaatcttgatgaagttgtccaggtaggagcgggggtcgcctgggtccaccaccagctgcagggcagcccggaactgctcatgggatactcgctgtggctcccgctgtggtgagcgggggccagggggcccaggaacagcaggggcggcgggggtgcaggctggaggggccagctggggctctgaggcgtggggtcccagcactccagggctgggggcacctcgggctcgggtgggaggccgggaggaggaggaggaggactgggggatggccaggccccccgctgatgcccg

SEQ ID NO: 127608 - DNA, 564 bp, Homo Sapiens
  misc_feature (439)..(477): n is a, c, g, or t
tttcaaaacaagacaatgttttaattgtaaaactaactcgaggcaggggtgggcgggctggggctgcgctgaccgggcaggaacctggttcttcaggcagtggttctgccagggccaccccgcaggacagggaccatctgtcccccaataagggcaggggctagagtgttataaaatgacaatataaatagacttctagaaaagaggaggctgtccaggtgcagtagtcatttgctgcaggggctggagagggtggggggccctgacctgtctccccatccagccacagaaagggggcgcagggctacgggaaaaggccactcttcggacattcatgatcgacccccacaatggctcagggggagagggggctggtgtgtcaggcaaatgcgccagacaccaccttgcgggctgtaggacggggtggctggacctttgnnnnnnnnnnnnnnnnnnnnnnnnnnnnnnnnnnnnnnntcatacatgttcacctcttagtgttctctccacccccagcgacccccactgcagacttccagtgatgggagggccgctgcccttcct

SEQ ID NO: 127609 - DNA, 557 bp, Homo Sapiens
taatgttaagtctctttattcagatcccacagagagtaggtggcagagcggggacgtggagtctagagatttggcagaaaaagagtggaaacctcagtcattctgagggaccagacgggggtgcaggctgaaagctgagcctgggaggggctggggggccaccctgaggggtctcttccccggggtcttgtctccctctggggtgggctctgtcccactccttcctctgctggctcaggagtctgggggctccgcctcctttccacagctgccgcctgccagcctcctccctactctgggctgggggcacggcctgcctctgtctccagccctccggggaggacgtggggccccgttcccctaaccgctctcagaagcttccacgcgggccccttctggacactttgcttcacagacacagacagggcagcggcagaacttgcagatcacaaggttctgttttcacccagtctctgtgctgccaggccacaggtcctcaggaatgcctgtgaggcacatctgtctccagggcctcctgtgagtgtctcctgtccttc

SEQ ID NO: 127610 - DNA, 2168 bp, Homo Sapiens
ttttgaaaaagacagaagcagcttttactatatttacatccaacaaaacttcgcagggaacaatccttattgcacaggtcaggacctgggtgggtgaggcattccccaaggcggggcaggcaagaaaaattaggactggagggggcaccagttcttcctaaggggagcttgagactcctctagctcccagtgcctgactttgaaggaactacaaaccaccggaccatggtgccctatttcccttccctttctcactctccataagaacctcataagcaagggggctgtggctccagaataaataatttaaaataaaatacaaacacttaggtagaaaggcatggagagccttgggctccttcagcaacgtcagggaagagggaccattattggtggagaatgacatccctacctcccattcagggcaaaggctcagtagctctgcatctttccagttgttttttaaaacaaaaacttctaaaatgaccagggcaatgcagatctgtgggtaccctggaggggagttcccggtataggacaagggaagaacagagctgtaccaactccccccagatctcccccaacatcagcacgaacaaactgggtaggttggtgatgggggaatcaggacttttggtaacagtggatccctcttcctgttgtcctcgcttggagcctttgactgggcatccttcccagcctgttcccaactccatgaaggcaacagggaagcagtttaactctagaatcccttcttcctcacttccccaccctaggctggagagggaagcttaaggtctctagcattctggaggtgctccaaaacattttcggcagtcaatggccttgggagtgggcatctgcgcccgccggtgcctcagctcctccttgcccatgctgctggccagcttgttaaaggcagacttgtacttcttatcgaaggccactatgtccacgtggtccttgcccagagcagccattgtcaggaataatatctcacggtagattcccctctgcaggtgcaggccagtgggtgggggccctagagtttccagcaggagccccacagccttgtgcacttcattgagtccaacatggcgcagcactgactccaacagtgccaaactaagggatgcaggtacagggcctggccataccacccgctgggggatctggcctggatgaaaggaaagaaggccaccagaatcactgagccctctgggtatgggacccaccccttccccacccaggccaaataccagactcactgtggaccctccagagcacatagagaggtgggcagctattggggtcaggggtcagtacatcccacagcagccgtacctgaacagaggctggatcaggggttagccaaggagatggggcctgggagtgcgaaggcccatcacaggaggccagcaccaggcctggtagaatactgggcaggcgtagccgttggaaataccacaaaaggttccagaagatgatggggtgggcagagggcagttcaggcaacgccagcacctcactgccctcgttctctaccagcgactccagctccttacgcagcaccagggggctcaggtatgcccatgccccactctcaacccgccgggaggctccctatcaggcacaaagggggagggcagtagagggcatgtacatccccagagccttgcctcccactgagccaccacatccaacagcttttgggatgccccttgccctcaagggcaagagatgtgcccatctctccctggcaccccacaggccccacacagggcaacattcccgttcctcatgcccctttggcccagcccttacccccatgtgcccgttgcagagctggggctcatccagagcaaggcagagccttcggtcactgagcacagggccaggaccaccagggacaggagcatctttgctgccactggcaccagcagatttggggctggggacactgggccgggaatcaagggtctggacactgagcaggggcacaaaggggcaggcgcagaaggggcaggttgtgttgaggttagagtcatcaggtgcccagccagccatgatttcctcatcatacaccagcgaatcacaggcacggcacagggagcagctggacagcagaatttccagggaaggtgactgatcccggagaattccggacc

SEQ ID NO: 127611 - DNA, 671 bp, Homo Sapiens
  misc_feature (252)..(287): n is a, c, g, or t
  misc_feature (553)..(561): n is a, c, g, or t
ttttgacaataaattggtatgatttatttggagagcaatattacaatatttcataatgatgtttagacccttagaagcagcaattttactcataaggataatcataaatgctttttttgacatgagcacaaggatacatgtacagaaatattcattgaagttgattatagaggaaagaggaaagttggcatattattcagggttctccagagaaagagaaccaataggggtaaaaaaagtgaatatataccnnnnnnnnnnnnnnnnnnnnnnnnnnnnnnnnnnnnaaacaaaaattgtgggaggtcattgttttggagtgagctcacgcactagactccaacaaaccagattaaaccacaatagagtcactcatgccaaatgttacacaatcatactgaaactttaaggaaacagacagatcccaagcagaccatttttttcccctgaaaacaggaaatttcaatctgattgagtcagcataataaggaagtccctctgctttaacccttacaaaaaagtaacctgaagtaatctgatgttaaccaatcannnnnnnnnaattgtgccatttcctcattcccaccttacaaggcccattgttcttttattgtctagtcaatgagaatgatgagactttatttcctgggtgatattttgtaagttggcta

SEQ ID NO: 127612 - DNA, 1595 bp, Homo Sapiens
  misc_feature (20)..(20): n is a, c, g, or t
  misc_feature (457)..(471): n is a, c, g, or t
  misc_feature (781)..(889): n is a, c, g, or t
cccccaaagcacgctttgtngagccaggcgggcctcactttttgtggggttggagccggacataggcggcgctatgggtgtggtgtctatgtgccgcctgagggtattttatttatggagacgagggcgccggcacacaatatggagagacagttgtgtctttctgcgccgccgcgcggtgtttgtgcgcctcgcctcttgcgggcaaaatactagttgtggtgtgttggcggaggggcgcataccacaggcggtggcgtgcggtgactaggtcgcgttcggaggggaggtctccaacacgctgttctctcgccgcggataacggcgggttgttgttaaagagagcagcgcggcggcagtatttcgcgtcgaacaagaataacgtgctataacgtagctgtattctccccacccatgggttttcttcgggggggcgggcgatgataccaaagcagcnnnnnnnnnnnnnnnaaccatgtgggcggatcagagaattttccggaacggggggacgcggtgttttggcagggaagggcgcccatattattgacccccgcggagagaaccccccccggggatttttgtgttaaggaaggcttgcgtttgtccgcagaggggcgttttacttttgttggggaaacccaaggggggaagttcagggccgggtatttgttttggggaaaaaaatttgtgggcggggttcggggccccaaggggggcctcgcgcccaaaggaatggttttaaaaagtttttttaggggcgagggcggggcacaagggnnnnnnnnnnnnnnnnnnnnnnnnnnnnnnnnnnnnnnnnnnnnnnnnnnnnnnnnnnnnnnnnnnnnnnnnnnnnnnnnnnnnnnnnnnnnnnnnnnnnnnnnnnnnncaggagattcttaggagagttttattcattcattgatccagtatttacaggggctagaggggtcaagctgtgctcagcccagaggcagctgccacacttgccagcaccccccactcagtcactatgtacagataaaggggcctgcttggatcacctttttcaaagccatctggcagaggccatggggctgtgttggggcctgggctccagaggcactgctgggcccattaccccttggcatcaggtcctctggaacacaggggctccaacgggttgtcttgatcctgctgtcccccaccctgagtgccttgcagaggctgaggaaactggagtagcaggaagagctgagtggtgccagcttcctataagcaaccctgtctctgctacccctgagagggagacatggtaatactgaggggctggacagaggctcttctgagcctcaagcgccagggacagagacctagagcccaatttaggcccatagctagggccacaacactgaaggcgaagagccctagaaccttgctatggagagcagtcttgaacagcctggctagaacaaggaagacagttcacaggccactgaacagttcccacatgctctgctcaggccatgggatcccagcagcctgctcaccccaaccccactgggacaccctactcccaacccagcccagtgctgggtccctgagtttggactctc

SEQ ID NO: 127613 - DNA, 661 bp, Homo Sapiens
tactttccaataatcttttcatttttaatatcaattgatgttttaaaaaatacagaggtgtttgacacagaatagcaccattgtgtaggacacacacagttcctgcgcccggcacctgaagggaggtcttctggcctgggctgggggcagtcactcagggggcatttgactcacaccagttagtttcctgcctctgccttgacccgaaggtcttacaggaagacaataaataaatagaacaccgagattttattttgcagtctgcccagttcaggtctcttagaaagagaggggagaaaagtccgaactgtgagagggtgggatgaatggacatcaggtcaggtcagccattcagtgcagagtcctagagtgactgagattggaaagtacttgggtcctttgggtttgcaacggattgtgttgtttctgggttcaggtttttacaagaagcagaccggccctatgtccacaccgaattcctgctcgggccctcctatgtccatgggtgcaatgtcaatgatggggaggcgtgaggtcttctgtgaccggtactcgataacagtcttgccccacttaccggtatgtttcgtgcagccaatcctcacggcagtgtacgtgaaccgctattgccctctgccgatctcccgtcattgagcctgga

SEQ ID NO: 127614 - DNA, 998 bp, Homo Sapiens
  misc_feature (806)..(942): n is a, c, g, or t
aagggtttctaacgaattacctttactagcaagaataaaactgcaagaaaattaaacgtaaaaatgtcagtcctaaatcatgcacgagtttcagaatatttgaatatttccttttggggcccaccgctgccaaggtggccgcagtttcgggtttcgccggacagggctcactaaaacgtgcctacgccccagggatggacgacttggagacaggggccgggaagcctttgtctcaggtcaccctgcgccaggtttgtcgcctaagtttatgggatggacgggagacaacatttgtaagtttagagttttgggaacgttgtttcgtttaatcctccccacaccgttttagggtggctgttcatatttcccattttgtggatggagcaactgaggtttcgacgggaaaaagtgactcgctcaaagtcactcaggctgaaatcggcagagtcgggacttgaacccagtctgtgcctcgctacgacaggggttccgctaccacgcgttggtcgagtgcgggtgcggaactgggatgtccgagcctcctctaccagcccatccgcaaatgttccctgcgaggtctggagaaacccggtgccccgcgggctgggctggattcgtggcgggtacctagggtcgagctgtcaagttcaatctcaagcttccaacatttattttcctgagcgcccactatgtgtcgatccgcaaaaaacgagcaagagcaggaaccagccaacaagtggttcaagttcattcgcgcttcttccccgggggtaactgaacactgctttagggtgtcacgcagaccnnnnnnnnnnnnnnnnnnnnnnnnnnnnnnnnnnnnnnnnnnnnnnnnnnnnnnnnnnnnnnnnnnnnnnnnnnnnnnnnnnnnnnnnnnnnnnnnnnnnnnnnnnnnnnnnnnnnnnnnnnnnnnnnnnnnnnnnncagtaggtgctcaatccctgctcgtgcctctcccgcgcctatgcgtgccagggcgc

SEQ ID NO: 127615 - DNA, 853 bp, Homo Sapiens
ttcatagtgtaatttcttttaatgtataggattgtttccaactcatcaggtctggtgcaattctgtcacgatttaacatggaacatccgggctgcccttcctgaatagtccagggcaagagcagtagtgagtgattcttctcttttctcgggttcactttgacctgaagcaagttgctatcttcggagagtatgtatggaccccaacagaatggggcccaggggtcttcatcccttacaaatcctggactgtatcaaagggaaggcctcggtaattcgtgctcacccagcccattcggatcctggtcctccctctcttggggttcagggggttcctagagttttcttgttcccacccaggcatggggggctagtgtccagctgagagttctctctccactgggcgggggtccgtgcctggatggccagcgcatggaccggacctcccagctcctcggccagcgctgcgtggaccagccggtgtcgttgtagggggctcagtccctcgaaacgagagctcaccacagccacgcggaagtgagtctcactgccaggcgggaccgcgtggccaccgctctcgttgcgaagctctagcacctcggggctcagggcctcctccaacttcgtgcgaatggcggcctccaccggaccgatggccccggatcccgcgctgccctggcacaaacaaacgcggccagccatggagaccagacccaggaccagccgcccactcagcatgggctacgccagagactcagacgccaggagtgagggtcggggcgatccgcctgccgctcagcctcggccactgcgattcccgctcagggccaggactctggacgctccggagcaaa

SEQ ID NO: 127616 - DNA, 646 bp, Homo Sapiens
  misc_feature (57)..(67): n is a, c, g, or t
  misc_feature (614)..(614): n is a, c, g, or t
agttttgtttctttattatttaaaaaatattaacagcaattaaaaacaacaacaacnnnnnnnnnnncattcacaacctgtcacagagtcctataagctttggccatttattcccaacggagtctttcatccaaaggcaggtggggaatttcagccaaaaggccccttcatggttttcatgggtgggtactgctgctccatcggcatggccccaaagcagtcagagggattacagtggccagccttgcctggctggcccatgggacccgggggcccagggatgccagggatgccttgctggcccattggtcctgttgcacccatcttgccatagcctggaggaccttgaggacctggggggccgggaagaccattttctcctgcaatgccaataccaatgtcccctttttcacctttggtaccaggcaatcctcttactcctggcaagccctgccgtccttctctgccaatctgaccagggagcccaggtgaccctggagcacctggcctgcccggagcaccatccttccctggaggccctgttcgtctcggagctgccgccatctccatggggaactgcatcctggaggtgtagtaagccattctctcatcanacattttaatgatctcttgtctgatgaactct

SEQ ID NO: 127617 - DNA, 1490 bp, Homo Sapiens
ctgttcttccatgcctttattggtgacagcaatggacaagaacaataccaggcatagcagacaccctagcccagtacctgaggtgccaggcaggccctgaagggccattggcacatccagtcccagcccaagatccagtctacccaggccatgtccccgaatgggcaggaggccgtctgtccagtttgtatgtgtggatcagtctctctgagtgtctgagccgctgcctgcagggcccccccattctccgcacatggtaggggctgttaggaacatagcgtggcatcccccggtggaccactgggccccagtgctgaccatggggattagggccagggattggaggtggcagagggccaggcacaaagttcactccagggccacatcctaagtggggtggcatcgagaagtcctccactggattatagttgaagaattcatggggtgggaagggctggcctgggaaaaaaggggtatcctggggcaggggtgggaagaggggaggtggcgagggctgaggaagcgggtagggaaaaggcatgggaggaggcaaagaagaaggtggggggtgggagcaaggccaggtgctccccgaagtctgggttctgcctatggcttccctgggaatggatgattcatctctgcccagtcctcaatccacgggtcagggggatagccacgcttgggcagctccacgccccaggcgtcagccacatgggtcagaagcaggtgtgagaggtggcggtgtgcatgctggtcccagtggacaccatcccgatgacggtgctgtactgcatgccggaagtgaaagtggaggtctaggacatcaaagcagtggtccccggccagcgtagcactgtagaagttcccttcaaccacatcccgccgcagggagcctgccaggggctggagtctctggcaggaggaaacccccagtgatacgttccccgaggggcatcgccatgttccacaccagcaggcaggagtctggcaatacttggtccatgcgcacaaacacccgctccaggttctcccggtagctctccattgagcagcgaccatatctggagagatcccagaggcaggagttgatgatcaccaggtccggggcaggtccatatgtcagctcttccagaacatcctcaaggtactcggagtaaacacgagtgaggaagtagaagcgcacaaggtggtggccagagcccgagcagaactggcggacctcacgatactgtgtcccgttgtgcagctcgcccagctggcccccagccaccagctggtcctgttcaaagctcagctcccccttggctttcagctgggcagctgtgagcagtgagtctttctggagcaagagcaccaggtccttgtacacagccctctgaatggagtcccccaagatgaccacgaacttgttgtgtagcagctgctggacttccgaggcctggaagtgacccctcgtgccgattcccacccgcctcgtaccttgcctt

SEQ ID NO: 127618 - DNA, 1411 bp, Homo Sapiens
tatattgaagaatttcatggggtgtgaaggcttgccctggaaaaaagggtaatccttgggtcagtggtggggaaagaaggggagtggcgaggctgagggaagcgggtagggaaaaggcatgggaggaggcaaaagaaagaagttgtggtttgggaccagccaggtgctccccgaagtctgggtctgcctatggcttccctggaatggatgattcatctctgcccagtcctcaatccacgggtcagggggatagccacgcttgggcagctccacgccccaggcgtcagccacatgggtcagaagcaggtgtgagaggtgcggtgtgcatgctggtcccagtggacaccatcccgatgacggtgctgtactgcatgccggaagtgaaagtggagttctaggaccatcaaagcacgtgttccccggcccagcgtagcacttgtagaagttccctttcaaccacatcccgcccgcagggagcctgccaggggctggagctctggcaggaggaaaccccccagtgatacgttccccgaggggcatcgccatgttccacaccagcaggcaggagtctggcaatacttggtccatgcgcacaaacacccgctccaggttctcccggtagctctccattgagcagcgaccatatctggagagatcccagaggcaggagttgatgatcaccaggtccggggcaggtccatatgtcagctcttccagaacatcctcaaggtacttggctttcagctgggcagctgtgagcagtgagtctttctggagcaagagcaccaggtccttgtacacagccctctgaatggagtcccccaagatgaccacgaacttgttgtgtagcagctgctggacttccgaggcctggaagtggaccatgtcgcttcgcagcgggcggcgcggctcctcgctcgacagacagaagaccatgccgccaccagcaacgacaggcaagtcccggggctccgcggtgttcacccgcgacccgggtatgcctgcgcaccgcgcgcctggcccgcagcgggctcctagccaagcctcatgttcccgcgccccagtcggccagtcggttctgcaaagctcccgccccgcagagaccgtgggtccaggttagccgtcggtgcacagcccagcgcccagcgctctccatgcgagcgtcgcggtggccccgacggcgcctcaggcctcggcgcctcgggctgcgacgctcacagcttccacttccgttcacccatgtctcgccctgagcgacccccagtgcccgaagggaaagcaaggcgatggaggtggccgccacagggcgcaggagccagggctgggcccacttggcgggcgcgaagcccaggtacgggctggggtctcggggcggcagccaagtgaggcatgcccacagtggtgatggccg

SEQ ID NO: 127619 - DNA, 510 bp, Homo Sapiens
  misc_feature (213)..(252): n is a, c, g, or t
tttttgttttcttttcactaattttatttatattaggtagttttcactcagaatatcaattcatttttcaggtttagatatatgtatatgtagctgttcgtatgcattaatcacttagaaactttatttggtataacttcacatttttggtatatagaaattttattttcttaatgcagcacagtagacatacaatcaatattattccctagnnnnnnnnnnnnnnnnnnnnnnnnnnnnnnnnnnnnnnnngaaagcctcatatgcagtaaatatttaaaaatgtatatctaactttgattctgtttctgactatacactactagctttataaatctgaatgaatatgacatttacacatttgaatgaagtacacggatgggtccattccagatgcttattacaccgtatgaataatctgctcttcactttggtcattaaggttccatgtgctgaggcatatagtggatccgaaagacacttccaggaagtacatttattacattggca

SEQ ID NO: 127620 - DNA, 947 bp, Homo Sapiens
actagcatgaacatatttattcacatacctttctaaaacacgaatggtagatactacattttggttttcaaacatagcttgttttattataaacaaacatcattctctggaaattaaaagctttgataatttcaaattatttttaacaatcagtcactaacggaatgcaaaaggcaattttattattatacattaaaacgtaaatcacatttaagcacgaacactaacaaataggctcatttgtcatctttatgccgtttctcttcactggtttcttccatatacaaaataaattcttctttgtcataacccattagatggatatagtcttcacggtttggaaagagcactggattaactaacagtgattttgttttagcataaaatgtggtaaatacatgtttagcatctggaatcttcacatcattctggtgaaacactgtactcgtttctgcaagcatagcattgtaggtaatggctttataagtgtctgttgtggcctcatggtacaatcgaatgacatagccttttgtaataaagtgaagcagcactggggtgatcaccgtaaagcttcccatgatgccatagaatatgatttgaataggcagaggcacactttcagaaatagcattattttgtgtaaaaatgtatggcagaaatgtaaggccaatcagactcgtagaataagagaaacatttcacaccaaacactgctcgggccatattgccagtataaattagccttccatcttctgatttgtcagatggcgtatttaagaatcgaacatatccttcccaataaacagggatctgcgctcgacccggacgccggagaaggcgcgcggctcccgaaggccccgtactccagccggctaccggccccgaaggcccgctgctggaggacgcccgggagacagaggcccggggacctcggagcgcggcggccgc

SEQ ID NO: 127621 - DNA, 691 bp, Homo Sapiens
  misc_feature (398)..(447): n is a, c, g, or t
tgcatcaactatccgtgactgtgtatcagcaatccatgtgataaatcatgtttacgcatctgcaatcttcacatcatactcgtaatacactgtactcgtttctgcaagcatagcatcgtaggtaatggctttataagtgtctgttgtggcctcatggtacaatcgaatgacatagccttttgtaataaagtgaagcagcactggggtgatcaccgtatagcttcccatgatgccatagaatatgatttgaataggcagaggcacactttcagaaatagcattattttgtgtaaaaatgtatggcagaaatgtaaggccaatcagactcgtagaataagagaaacatttcacacctgtaatcccagcaggaggctgagccaggagaatcgcttgaacannnnnnnnnnnnnnnnnnnnnnnnnnnnnnnnnnnnnnnnnnnnnnnnnnaaacactgctcgggccatattgccagtataaattagccttccatcttctgatttgtcagatggcgtatttaagaatcgaacatatccttcccaataaacagggatctgcgctcgacccggacgccggagaaggcgcgcggctcccgaaggccctgtactccagccggctaccggccccgaaggcccgctggtggaggacgcccgggagacagaggcccggggacctcggagcgcggcggccgca

SEQ ID NO: 127622 - DNA, 1105 bp, Homo Sapiens
ggaatgaagatgagcctcggaaaggatatattacttttctattgctttataacaaattactagaaacttggaagcttaaaacaacacgttgtggatgaatattttgggcatcgcttagctggattctctgtttcagggtgtcaccaggttacaacacaggtgttggtgggactgtgttcctttctggatcttggagtcttcttccaacctcatcacactgttagaagaattcaattccttgcagttgtaggagtgaggccctcagatcccgaaggacacccacagattttgcaatgtgttcctgaataagcagttcctatcagaccatctttcttcttcaaggactgctgtggttagggacgctcatctgcaacaacacagtgtaattcagcacttctcatgctcttcttctcacgctcctcaaaaatccacctttttcaggggtgatgtcaatgaagtccaacagtgagctgaccatgaagcccccacctgggcctgcagacttagagccagagccgtagaccacttatagcctccagtccaattgcaatatagcattttgggaaaagtacggttacccaagcagtggacgtggttccgcaccgtgcagttggcagggtagcgctgccgaggacaggacaccgtcatgcagctggtggagttggtacactcgtaatctgtttcaggaagctgccagcaaaatctgcaagtcatgttaatgatgaagttcttttgggatttgaagtcttgatcaacacaggtaacagatggtttcactgcacagtcaaaagtgacaggcttcccataggtacaggagaaatttgttgtgcagtctatacagtctgcaggaagcctgctacacaaaccattgctcggacacttcatcacataaggtgggatttcagtactttctgctgccctgggaactactgtgaatgtgcgtgttgggcccggatcctttattgactgagccagcgcctgaaattgctcaccgcccgacagaatgcagaactgcgagaggaagagcagcacgcgacacaaggcgcggaggccccgcagcgggcgcacccctcccgccatcttgccagcgcctgcgcacttcccc

SEQ ID NO: 127623 - DNA, 677 bp, Homo Sapiens
tttatttcttaacttgcaattttattaatttttcagtactcttaccttttatatactactaagaaaatttaaaccataactagacataaacattctgcagtttaattcaaattttcatatatacagaccagactacatatgtattacactgcaaaacttacacatgactgaagctgagcctaataacttcaattagccaacaacagaaacactcccacttcctgcagtcacagcaattagctaacaataaaaacactcccacttcctgcagtcacagctgaaagacttttcaaggcagactacatttgggctggagatacaagtgatgtagtttgacttgggcaatacaaaacaaaagtcataggaattaaatggattttcaatcactgtataattcattctcctggcttaagtacgttttaattttttcacagaaaaaaatatatttcaggcaaataaaaacaaattccagattagcatagttcagcgtttcatttatcttacctttatcaaggcaaacaaagtacagatgctgtacattaaaaacatagaaatatatcactcacaccacatcaactcctacggacaaaagggctttttctaagccctgctcctttctgaagcaacaccacagctaaatgtacaaagagccatctgctggtccaacatagccaact

SEQ ID NO: 127624 - DNA, 458 bp, Homo Sapiens
tgtgtcatttgctacataggatcaagacttcaaatcccaaaagaacttcatcattaacatgacttgcagattttgctggcagcttcctgaaacagattacgagtgtaccaactccaccagctgcatgacggtgtcctgtcctcggcagcgctaccctgccaactgcacggtgcgggaccacgtccactgcttgggtaggtcagagttcaaggacatttgtcaacaaaatgtttttctccaagtttattgaagggactttaaccagaaatttgcgagtcaagttacttaattagaaacatttatcagcagctctttaaatgtgccaagcatcatcaataaactcaacgtactaaagtaaagcatccagaaaattgcagttctttttaaatgtaatatttgataaaataagaaaaacatttgaagtataaagcataatacacagtaattgacctttaccc

SEQ ID NO: 127625 - DNA, 1009 bp, Homo Sapiens
  misc_feature (62)..(62): n is a, c, g, or t
  misc_feature (82)..(82): n is a, c, g, or t
  misc_feature (124)..(124): n is a, c, g, or t
acttgggcccaattccaaaacccaaaagttccataggaatttaaatggatttttcaatccanctgtattaattcatttctcnctggcttaaagtacgtattaatttttttcacagaaaaaaatnatatttcagggcaaataaaaacaaattcccagattagcatagttcagcgtttcatttatcttacctttatcaaggcaaacaaagtacagatgctgtacattaaaaacatagaaatatatcactcacaccacatcaactcctacggacaaaagggctttttctaagccctgctcctttctgaagcacacaccacagctaaatgtacaaagagccatctgctggtccaacatagccaactccaatgagcaggacgtctatcagcgtccatattcccaggccaccgaagctgaagagcttgccgaggccttcccgccactggcccaggtagaaacggtctgctccaaacccaccgagggtgatgcttagagccagagccgtagaccacttatagcctccagtccaattgcaatatagcattttgggaaaagtacggttacccaagcagtggacgtggtcccgcaccgtgcagttggcagggtagcgctgccgaggacaggacaccgtcatgcagctggtggagttggtacactcgtaatctgtttcaggaagctgccagcaaaatctgcaagtcatgttaatgatgaagttcttttgggatttgaagtcttgatcaacacaggtaacagatggtttcactgcacagtcaaaagtgacaggcttcccataggtacaggagaaatttgttgtgcagtctatacagtctgcaggaagcctgctacacaaaccattgctcggacacttcatcacataaggtgggatttcagtactttcaccgcccgacagaatgcagaactgcgagaggaagagcagcacgcgacacaaggcgcggaggcccctcagcgggcgcacccctcccgccatcttgatcccgggaattccggaccc

SEQ ID NO: 127626 - DNA, 1004 bp, Homo Sapiens
tttttttaagtttgaagccttgcccaagctttaatgtcatgctaaccagttaccttgttagagctgggaagccaccttttgctcaaaatgcagacttctgcctttgaaaacacaccacacctgattttaagtgcttaaaggacagaaaatgtcgttgctttaaattgttgctttgttcagagacatctggatttgctgtatccatacaagcaaaagcttttccaattccagaatcaacccacactaatttgttattgcctcgtactgtattggcccagctgtaatcaactcagcaggcttttggttgtaaattcaagtggaaattgagttggtcttatttgtgcccgttgatatctgagggctgtgaggaagatggccagtaggtcaaagggaatagtgttgaaaagctgaccagtactgggcaggtggccggctgtccctcaggcaccacaacgccgagccacggtaaggggcatgagccacatttgcagaatatagccagagtccttccagaacctcctgattcgcgccaggaggcatcccagggcacacaagtgtcaagggcctactcaggtgcttggcagagctctctgtgtgttattaacagaagaggctacggcttagagtggaaaggagcatgtgatggctagcggtgggcagcctgtgtactctgccaagtttgggtggtccaggtccccacgatttctgtgtggagggttgtccggcatctggccactaggggggccggtggttctcacacacacgcagcggggctccttagcacctggcttatacagcttcctggggacgccaatccagtctctgctcaccactcactcttctgggagcacagagcggctgccctggctgactccatccgcgtgcacggcggatgctgctctctgcactgtagtggtggctccagctctgggatgcactctactgggcatgccgggtggagcatctctcgtaaacgtctgtcactcacaaacatatctccaaaa

SEQ ID NO: 127627 - DNA, 698 bp, Homo Sapiens
  misc_feature (156)..(164): n is a, c, g, or t
tttttgtgggtgaaaatgacagatttattcaacttaaatggtcaccgaggctacagcagaaccaatgctgttacaataggcaagcactactgtcagcagcaacataccatttatttcttcaacagcatctgagcctcatgggttatgttttcattnnnnnnnnntatcttataagccagttgggaagctgttaaaggccaattttaaatggcaatgtaaaacaaatttcactgaaaatacaattcaaatacaactgctatgagcactgtaagaaaaactgactagttactcagatataatagaaaagaccttaaatggtaaataaaacaatagcagcatttaaaaacctggtaactcccatttcagaagacgcccttcccctgcccagaccttcatgcctctgaacacctgcctagcctaggagaggcctgttcaagcagggaggctactggtatctgcacacaacatgcagatgagctctacaccagccgagaggaacaaggcttcagtgcagttgtgtgctggggacagcaggactcgtgtttaagtgtcagaggcttagaggggtcagctctgaactagaagtctctcacatatctggtcctgcccttgagaaatcttgtcagtaatctcaacttagaacaactttctgggaaatgtgactagaaattaaacagctgggactcctgccacattat

SEQ ID NO: 127628 - DNA, 465 bp, Homo Sapiens
ttgttgttgttgttgttttacggtctctgagggaatatagtaaaaatgcatatgcacgtgcaatttgcacggcagcatttcaccgattgtggactgtattggctaatgtgtttcctggtctttagatgcaaaccattaataacactatcttatctcatagttttttcaggggtgcttcttgattagtagggaattttgaacacctctttaaatacagctagaaaataaaaccaatttgtaaagccacatttgcatatgatgccagcctcacgcatttgtatatctccagaaattcaggtatgcctcaccaatttgcccgtctttaataaaatcttgtgttaaaatttgcatcacgtcgccttcctatgtatgacgaaacaagaaacagagatttccaattgctcttttgtcttcagacatttagtaatataaagtacctatttttatgctgaaatgtttatacag

SEQ ID NO: 127629 - DNA, 1018 bp, Homo Sapiens
caggctgaagtccatgattggaaaactatttagtaaatgtgcattggtagctcagtgtttgttagcaatggttttatggatatccctgatacatgtaccatttggtagcaaattgagaacacggtggtattgaagattgatgagacaattatgtgtaaagataaaaattaattcaagagcacagatatgctatgcatactactattataatacagtgatttataaatgagaaaaagttaacgatggacagtgttttcagaagttgaaaaggtgacactaacagtgctaaatacacaggcttttatttgttttcttcagattgctttttcgtgaatataaagatgaggagtccattctgcaacctaaaaatatttacttattaaaactatattaatactttaataaactatacaaaaaggtaatgagacaaacatctgcatttatggaactgcatgtcagtcaggccagttccctgcagagggaattcccagcatgacctcattcatctgtgaggacacagagcagtccttgtttagacatacacattcatctactgctcatcatggtcagccttccacttcttgatggtttccttctgctatgaatgcgcatgtccggttgtctgcttcttagagcagacatttaccttcctcatccaccagccattggagggggactagggccacgcagatgattgattctacccattcttcggggagggtttcctggtggccctcttccatcatcatatctggaatcagatgagtttccatagcttcttctttttttcacatcttgctgaagcagagttttgaaaaacaaaaccacaaactcagctattccccagaagaaatctgttatcaaagataatctccatggagactgactccggctgtccaacacttgtccgttcgagatgtaaaccatcttgtcccacttccccgcttcggagccaccgggcgcctggcccctgtcggtttctgtatctccctctgctccccgcccttcgagcgtcccc

SEQ ID NO: 127630 - DNA, 620 bp, Homo Sapiens
  misc_feature (444)..(444): n is a, c, g, or t
ttgtctagaaaaaaggcttttattgtcccaggctggagggcagggtcagaggtagctgacatcattgcagatgatgggctggcggctacgacagctcatgagagctgcaaagcgtgagacatccgcaggcagttcaggttctgggcgaggtgggcatgacagccgctttcctgccatagctgtccgccgagccctggccagccggcgccgaagctgctcagagaggccaagcaggaactgagggggccgagcacgggcacggtgcccacctccgtcacccccttcactccctgtctcaggcagctccatccagttgtgcaccaagtcagcaaagcaattgtcccctagtaccaggggctggcgactgcgacccctgttcagtagggctgctgtccagtcctctgcttccagtccctgccagtgctccaggcaggcgtctggggntggacttgggccgtggatggtggacaggtggtacactggctacaggggccctgctgggcatggggaggccactgactgagaggcactgcctacgaaggggctgtgctgagggtgctgggcgctgggatacaggcagttcttcctctcgccatgtgctgcctgacacctccgagaag

SEQ ID NO: 127631 - DNA, 677 bp, Homo Sapiens
gaatcaaactgctctccccttttaatcagttttatagaatattttacagtactaatcacattaggagacaggaggggtttcctgtacatatacaagattgtgcaagctcattaattgagacttatagaaaggttttatctgtttcaaaagaggcagtacagctttttaatccaggtgaagcacaagaagaatccagtagacaggagagtattaatttgacagaggtgaattcccctagtgcatggccgctacccacactgtctgccattatccaagtggagacgtcatctctcttgaattgaacccttgctgagctcaggcctgtgggatgcggcagctccagggtcactccatagctcaaccacaacttaacacggaagcaaactatattttcatttatccaagtgttctcaagagtaataaagctattccttgtcctactactttctaacctacattctaaaatatattaagtaatttttaacctggcaaagttctcaagcattttggcatttaaagtaatcgcaaatacctcatcactgttaatccacttactaaaaatcctttgggcttcaagatagtttcagatttacttcccttaaaattaaagcaattgcgtacaaaataaactcactagacttaaatatttacaaagagagacaacagccttttcttta

SEQ ID NO: 127632 - DNA, 425 bp, Homo Sapiens
  misc_feature (144)..(263): n is a, c, g, or t
gcagagcccgaggatgcggccgaagggacggtggagcgcttttcaccgccagcggagccgtcgcccgggcccgggctgccagaggcggccgcggccgctgctgccgaggctgccgccgcggaggccgccattcacacgccgccnnnnnnnnnnnnnnnnnnnnnnnnnnnnnnnnnnnnnnnnnnnnnnnnnnnnnnnnnnnnnnnnnnnnnnnnnnnnnnnnnnnnnnnnnnnnnnnnnnnnnnnnnnnnnnnnnnnnnnnntcctgggccgctgcccgccgcgcgcgggtcgctgctacggcacggccaactgctgcttgctcgcctcccgaaggcgccgcccgcgcttcttcctcagccgccgccgaaacccgcacctcgcgccacaagcacaagcacaaccgctcgctcgcgcctcgtgcc

SEQ ID NO: 127633 - DNA, 1202 bp, Homo Sapiens
gaaggctcccccagggcgccgttcaaaagccacacccccactcccgtggtggagagctggccacccccagctgtcccacaccaggagagccccaccccctcctcagtcgggaccacaggcagaggaccgccccacccccccgggacatccgcaggccgccagggacagtccaggggaaaccaaactcaccctggtggcacataaccagatccctggcttctgcagacacggcaaatggtggcactgtcatccagggttcccgggccaccacctggggctgaggtaccctcaggagccaccacctccaggcctgaggctggtgctgccactaggtgaggccagcggggaccctcagcaccagaccctccgcaagagccataagcacagtttggtctcagggccctcagtggcagtaggaggggctccaatggcagcctccgtctcctcctccttgacaatggccatgccagccaggggtggggcaccaggggttcctgcaggcgcagtcctggctggccggtagctgcagcggcagcgccacgttcaataacaataaggttgtagtcctcagtggtactgcctgggaagaccttgaagacgggtggctggctgtcagctgtgaggtccaggtccaggcgttcaaggctcactcgtggcaccttgcgcataaggccgctcacctcgccctcacctgagcgggaccgtttcacacctgacacatggggctctgcacttgagtagggatcatctcctgacccaaagccatagccttcctgcacctccatgggctggctgctgccagagccctgcttgctcaggggccctggggctcttggaggggccatgggtgcagggcctgttgagttagtgccaggacgctctgccacaatcttgccaaaggcctcggcactcttggtccaggcattgaggtcccactgaaacttcatctcgccatgtggctccacgggatccacaatcatcttgagggcccggtgcagctggaagtagatcaacttcttagaaagcaaaagggctgtgttgttgtcactctccagagcccaagaggcaaagcgcagaatgtgctcctggtgcttctggatcttggtcatggtccagtgctgccgctccaggcgctcctgctgcccctacagtcaccttctgggcctcgtgccgaatttacaccgcaggcctcctaccttagg

SEQ ID NO: 127634 - DNA, 1586 bp, Homo Sapiens
tacagtcaataaaccaggccccaggaccacagtcccccaaccagccaacgcctgaggaactggtgaagtttttattaaatccacagaagtaaaaaccatatcgtgaggaactgggggatggggccaccagggagtgggagtcaggccaccaggggagtggggatggggtgacaggacagagaacagagccaggctgggctggccatgggggctccagcctcaggggccatcaccagggccaccagacagctcctgggaactcaggccagcaccaggcaggctcatcggcgggggctccaccagcacagcagagaacttggtgtcaccgaaggcctcgttcatgcgcgtctcgaagaagcgctgcaggccgatgatggactgcacgtctgccttgtcctcagttaacttgttgaattgcttgaacatgcggcccacatcctgggcaaactcctgtggggagctgtagggaggtgacaacttctcctggaggcgggcacggatcagggtcagatccagggtgccaccgggctggtccagggagaaggtggagtcggtagccagctgatgcagggggcggcagggttcgtgacagaatagggccagcagtacacgctcacatttccgctggttggctggtgagagcttggccaccacgccagtgctgtctgcaccatccaggctgaggctgccatcctcctccttcaggtcagggagcacatggcagagtgagcagctccactcctcccctggtacatcctgcagggccggcaggtgacagtccaggtggaaacaaaactcacactggttgcacataaccagatcgcctggcttctggcagacacggcaaatggtggcactgtcatccagggttcccgggccaccacctggggctgaggtaccctcaggagccaccacctccagccctgagctggtgctgccactaggtgaggccaggcggggaccctcagcaccaggaccctccgcaagagccataagcacaggtttggtctcagggccctcagtggcagtaggaggggctccaatggcagcctccgtctcctcctccttgacaatggccatgccagccaggggtggggcaccaggggttcctgcaggcgcagtccctggctggccggtagctgcagcggcagcgccacgttcaataacaataaggttgtagtcctcagtggtactgcctgggaagaccttgaagacgggtggctggctgtcagctgtgaggtccaggtccaggcgttcaaggctcactcgtggcaccttgcgcataaggccgctcacctcgccctcacctgagcgggaccgtttcacacctgacacatggggctctgcacttgagtagggatcatctcctgacccaaagccatagccttcctgcacctccatgggctggctgctgccagagccctgcttgctcaggggccctggggctcttggaggggccatgggtgcagggcctgttgagttagtgccaggacgctctgccacaatcttgccaaaggcctcggcactcttggtccaggcattgagcctcgtgccgatttaacaccagcctcgtactatgctatgtt

SEQ ID NO: 127635 - DNA, 1047 bp, Homo Sapiens
agaagggcgggccaggattccagggttcagattccagggttgcccaccggggctggttccagggagaagggtggagttcgttagccagctgatgcaggggggcggcagggtttgtgacagaatagggcccagcagtacacgctcacattttccgctggttggctggtgagagcttggccaccacgccagtgctgtctgcaccatccaggctgaggctgccatcctcctccttcaggtcagggagcacatggcagagtgagcagctccactcctcccctggtacatcctgcagggccggcaggtgacagtccaggtggaaaccaaactcacactggttgcacataaccagatcgcctggcttctggcagacacggcaaatggtggcactgtcatccagggttcccgggccaccacctggggctgaggtaccctcaggagccaccacctccagccctgagctggtgctgccactaggtgaggccaggcggggaccctcagcaccaggaccctccgcaagagccataagcacaggtttggtctcagggccctcagtggcagtaggaggggctccaatggcagcctccgtctcctcctccttgacaatggccatgccagccaggggtggggcaccaggggttcctgcaggcgcagtccctggctggccggtagctgcagcggcagcgccacgttcaataacaataaggttgtagtcctcagtggtactgcctgggaagaccttgaagacgggtggctggctgtcagctgtgaggtccaggtccaggcgttcaaggctcactcgtggcaccttgcgcataaggccgctcacctcgccctcacctgagcgggaccgtttcacacctgacacatggggctctgcacttgagtagggatcatctcctgacccaaagccatagccttcctgcacctccatgggctggctgctgccagagccctgcttgctcaggggccctggggctcttggaggggccatgggtgcagggcctgttgagttaagtgccagacgccctcggccgatttaaatcccgg

SEQ ID NO: 127636 - DNA, 1032 bp, Homo Sapiens
  misc_feature (561)..(561): n is a, c, g, or t
tttctgcggcggctgcttctgttcttcgtctctttcgtcctgctccctgtgttgttctcctcttcccgtgtttctctttcgccgtttggcctgcgctcttcttcgcttcccctgctctgcttgctcttccagctgggtccctgagtctgccccttgcgcccgggacccatctttggggccgtgcactggagtggtccctcttaacgcaatggctgtgttgttgcactctcctgaccccagagcaagccgcagaagtgctcctgtgcttctggatcgtggtcaggtgccagtgctgccgctccagcgctccttctgccctccatcaccttctgggcatcattgaccagcacacgccccgcttatgtcagctccttcatgatctgcaggatgccatcttgacatccactcgcacacgcttctgtacgtcagacacctggcggattgagctgcgaacctccttggtgctcttctgcaatgttgcatgtttgtcccccaaggcggcttcaccagtgaaggcccaggagcttgcgctggttccatcactgcaatcctctaagaacntggtacttggtggtcctttgtgggcatttgagcttggcagtctcggcaggtgagagtatcacagctctcacaaaacagcacaaggggttcatgcttgtgtacgttgcaatagacagtacgttcaccatcccgagacttggctggcccagtagagcgcacagtatggtcccttggtgtacttcacccgctggtgcgcctctacacaggtctcacacagaggctccgagcactccacacagtagctggtggctggggcattatcctcacagctagtgcagcactggttcgcatcctgggcgtcggtggcagccttgctgccactatcacgcatgaaataattctccacgatgtctttggagaagcactgttgcttgcacacgggacagtccaccacggtccgtcgcccccgccccggccgtcccccgagctgttgcggcggcggggccgcggcccaaagcacgcacccttcgt

SEQ ID NO: 127637 - DNA, 1462 bp, Homo Sapiens
  misc_feature (1179)..(1237): n is a, c, g, or t
  misc_feature (1240)..(1332): n is a, c, g, or t
ttattctccatgtgtcccaccggtgccccatctgctggatggccccgtgtcaattggaataattcacttttgaataccacaacgtctttgttgttctcattgtccagacccccaagagtccaaggcccaagaattgtgctccttgtgccttttggatcttgtcaatgttccagtcgcgcgttccaggcgctcctctgcccctcagtcacctttctgggcatcattgaccagcacacggccccgcttattcagctccttcatgatctgccaggatggccagtcttgacatccactttgcacacgcttctgtaacgtcagacacctggcggattgagcctgcgaacctccttggtgctcttctcgcaatgttgcatgtttgtccccaaggcgcttcaccagtgaggccaggagcttgcgctggttcctcactgcatcctctaagaactggtactggtggtccttgtgggcattgagctggcagtctcggcaggtgagagtatcacagctctcacaaaacagcacaaggggttcatgcttgtgtacgttgcaatagacagtacgttcaccatcccgagacttggctggcccagtagagcgcacagtatggtccttggtgtacttcacccgctggtgcgcctctacacaggtctcacacagaggctccgagcactccacacagtagctggtggctggggcattatcctcacagctagtgcagcactggttcgcatcctgggcgtcggtggcagccttgctgccactatcacgcatgaaataattctccacgatgtctttggagaagcactgttgcttgcacacgggacagtccaccacggtgccgtcgcccgccgccccgccgtcccccgagctgttggcggcggcgggggccgcgggccctaagcaggcactacaggccgagtgcaaacagggcagcaggcggggctccctctcgggtcgcaggcgctctctgcacacgccgcagtgctccagcagctccagcgcctcggcgccgccccccgcgggcgacgacgccgcggctgaggcagaggccgaggctgcggccgaaggggcggtggagcgcttttcgccgccagcggagccctcgcccgggcccgggctgccagaggcggccgaggccgctgctgccgaggctgccgccgcggaggccgccattcacannnnnnnnnnnnnnnnnnnnnnnnnnnnnnnnnnnnnnnnnnnnnnnnnnnnnnnnnnncgnnnnnnnnnnnnnnnnnnnnnnnnnnnnnnnnnnnnnnnnnnnnnnnnnnnnnnnnnnnnnnnnnnnnnnnnnnnnnnnnnnnnnnnnnnnnngacgctgctacggcacggccaactgctgcctgctcgcctcccgaaggcgccgcccgcgcttcttcctcagccgccgccgaaacccgcaccacgcgccacaagcacaagcacaaccgctcgcccgcgcgcc

SEQ ID NO: 127638 - DNA, 1889 bp, Homo Sapiens
  misc_feature (30)..(30): n is a, c, g, or t
  misc_feature (38)..(38): n is a, c, g, or t
  misc_feature (76)..(77): n is a, c, g, or t
  misc_feature (95)..(96): n is a, c, g, or t
  misc_feature (111)..(111): n is a, c, g, or t
  misc_feature (1875)..(1875): n is a, c, g, or t
gtggccccattccttttccttccctttttncagggttncagggggaggcaccatgggccaggaggttggagccagnnttcccaattcctttcccnngtggggtacattccntgccaggggcccggccaagttgaccagtcccagggtggaaacaaaaactcaaccactgggttgcacataaccaggatccgcctggctttctggcagaccacgggcaaatgggtgggccactgtcatcccaggggtttcccgggcccacccacctggggggctgaggtaccctcaggaggccaccacctcccagcccctgagctggtgctgccactaggtgaggccaggcggggaccctcagcacccaggaccctccgcaagagccataagcacaggtttggtctcagggccctcagtggcagtaggaggggctccaatggcagcctccgtctcctcctccttgacaatggccatgccagccaggggtggggcaccaggggttcctgcaggcgcagtccctggctggccggtagctgcagcggcagcgccacgttcaataacaataaggttgtagtcctcagtggtactgcctgggaagaccttgaagacgggtggctggctgtcagctgtgaggtccaggtccaggcgttcaaggctcactcgtggcaccttgcgcataaggccgctcacctcgccctcacctgagcgggaccgtttcacacctgacacatggggctctgcacttgagtagggatcatctcctgacccaaagccatagccttcctgcacctccatgggctggctgctgccagagccctgcttgctcaggggccctggggctcttggaggggccatgggtgcagggcctgttgagttagtgccaggacgctctgccacaatcttgccaaaggcctcggcactcttggtccaggcattgaggtcccactgaaacttcatctcgccatgtggctccacgggatccacaatcatcttgagggcccggtgcagctggaagtagatcaacttcttagaaagcaaaagggctgtgttgttgtcactctccagagcccaagaggcaaagcgcagaatgtgctcctggtgcttctggatcttggtcatggtccagtgctgccgctccaggcgctcctgctgcccctcagtcaccttctgggcatcattgaccagcacacggccccgcttattcagctccttcatgatctgcaggatggccatcttgacatccacttgcacacgcttctgtacgtcagacacctggcggattgagctgcgaacctccttggtgctcttctgcaatgttgcatgtttgtccccaaggcgcttcaccagtgaggccaggagcttgcgctggttcctcactgcatcctctaagaactggtactggtggtccttgtgggcattgagctggcagtctcggcaggtgagagtatcacagctctcacaaaacagcacaaggggttcatgcttgtgtacgttgcaatagacagtacgttcaccatcccgagacttggctggcccagtagagcgcacagtatggtccttggtgtacttcacccgctggtgcgcctctacacaggtctcacacagaggctccgagcactccacacagtagctggtggctggggcattatcctcacagctagtgcagcactggttcgcatcctgggcgtcggtggcagccttgctgccactatcacgcatgaaataattctccacgatgtctttggagaagcactgttgcttgcacacgggacagtccaccacttcgagaagcagggatgtgggagactgttacaagttcccacccaggttatggcccccaccattcccctgctgggtgggcccccctcgtgccaattcgccacncaggctcgctccta

SEQ ID NO: 127639 - DNA, 1036 bp, Homo Sapiens
acaaaaatccaatgtaagaccattgtgctcgtgacgaaaaggggtggggtggatggacgtggcatggatatcaaagcttccccccacaaactaggagctccccactctgtccggcgcagctcccagaaagatcccatccttccggacaggaccccagctggtgagccctggcctgaggcacagtccacacggaggagcactgcccagggagccagcgctcacagtggcctgcagagccctgggacggtgttatggtaagacagcccaaaccggagcagcaagccggccacccagagaacgaggcgctcctgcaccctgcgagccaggacaaggtggccaggggcggcccacagacagccaaggagacccggggtctgtggcgccgctttcccatctcaagcgagtcacaggtcggcggctttcccgtggtgagaagcacctgaccagtgacactgtggccaccttgctgcctctcgctgaggagggcgtgcccctcagagcctgtctgcagtccttcaagccagtgttcctttcagggtcaaggagggctgtccttgttggaagcaccggcaccacagccctccctgcggcatgttttggtgtcagaccactcagcccttcttagatccaccagtgacattcggggcccgacaacctggctccactaaagggagaggccctggctccaccacacagacggccccagctcactgagtcccgctaaagggggtcccaccacacagacggccccggctcaccgagtcccactgaagtcagtatgtgagttcctcacattaaaagaaaccagatgaaatagcagccacaatatagcgccacacaccacactctttggctccccgagggaagaaggctactgctaaaaggaatacaagtcaggagtcaggtagagggcaactagaaagttctgaggaagggcgtctgacccccactgctgggaacataaccacactgcctcagcaggggagctacaggctcctcgtgccgaattcgccacccaggcctcgctacctagccc

SEQ ID NO: 127640 - DNA, 1408 bp, Homo Sapiens
  misc_feature (86)..(120): n is a, c, g, or t
gaattgtatacactcactatagggcgctagcgcgttatttcgaacgatcgagcgcagcagagtcagatgagcgaggaagcgtgcgnnnnnnnnnnnnnnnnnnnnnnnnnnnnnnnnnnncagtcgacggtaccggacatatgcccgggaattcggccattacggccgggggactcggcttgttgtgttgctgcctgagtgccggagacggtcctgctgctgccgcagtcctgccagctgtccgacgatgtcgtcccacctagtcgagccgccgccgcccctgcacaacaacaacaacaactgcgaggaaaatgagcagtctctgcccccgccggccggcctcaacagttcctgggtggagctacccatgaacagcagcaatggcaatgataatggcaatgggaaaaatggggggctggaacacgtaccatcctcatcctccatccacaatggagacatggagaagattcttttggatgcacaacatgaatcaggacagagtagttccagaggcagttctcactgtgacagcccttcgccacaagaagatgggcagatcatgtttgatgtggaaatgcacaccagcagggaccatagctctcagtcagaagaagaagttgtagaaggagagaaggaagtcgaggctttgaagaaaagtgcggactgggtatcagactggtccagtagacccgaaaacattccacccaaggagttccacttcagacaccctaaacgttctgtgtctttaagcatgaggaaaagtggcgccatgaagaaaggggggtattttctccgcagaatttctgaaggtgtccattccatctctcttcctttctcatgtttggctttggggctaggcatctatattggaaagcgactgagcacaccctctgccagcacctactgagggaaaggaaaagcccctggaaatgcgtgtgacctgtgaagtggtgtattgtcacagtagcttatttgaacttgagaccattgtaagcatgacccaacctaccaccctgtttttacatatccaattccagtaactctcaaattcaatattttattcaaactctgttgaggcattttactaaccttataccctttttggcctgaagacattttagaatttcctaacagagtttactgttgtttagaaatttgcaagggcttcttttccgcaaatgccaccagcagattataattttgtcagcaatgctattatctctaattagtgccaccagactagacctgtatcattcatggtataaattttactcttgcaacataactaccatctctctcttaaaacgagatcaggttagcaaatgatgtaaaagaagctttattgtctagttgttttttttcccccaagacaaaggcaagtttccctaagtttgagttgatagttatt

SEQ ID NO: 127641 - DNA, 423 bp, Homo Sapiens
  misc_feature (347)..(381): n is a, c, g, or t
tctttttaataactatcaactcaaacttagggaaacttgcctttgtcttgggggaaaaaaaacaactagacaataaagcttcttttacatcatttgctaacctgatctcgttttaagagagagatggtagttatgttgcaagagtaaaatttataccatgaatgatacaggtctagtctggtggcactaattagagataatagcattgctgacaaaattataatctgctggtggcatttgcggaaaagaagcccttgcaaatttctaaacaacagtaaactctgttaggaaattctcccggccgtaatggccgaattcccgggcatatgtccggtaccgtcgactgnnnnnnnnnnnnnnnnnnnnnnnnnnnnnnnnnnncggccgcttcctcgctcatacacttcgctgcgctcgtcgcat

SEQ ID NO: 127642 - DNA, 769 bp, Homo Sapiens
  misc_feature (46)..(80): n is a, c, g, or t
aggaagctcgatgttttgagacgaagcgaaaggccggggcctggcnnnnnnnnnnnnnnnnnnnnnnnnnnnnnnnnnnncagtcgacggtaccggacatatgcccgggaattcggccattacggccggggaggcgcagaaaagggggcggcggactcggcttgttgtgttgctgcctgaggtgccggagacggtcctgctgctgccgcagtcctgccagctgtccgacgatgtcgtcccacctagtcgagccgccgccgcccctgcacaacaagcaacaacaactgcgaggaaaatgagcagtctctgcccccgccggccggcctcaacagttcctgggtggagctacccatgaacagcagcaatggcaatgataatggcaatgggaaaaatggggggctggaacacgtaccatcctcatcctccatccacaatggagacatggagaagattcttttggatgcacaacatgaatcaggacagagtagttccagaggcagttctcactgtgacagcccttcgccacaagaagatgggcagatcatgtttgatgtggaacatgcacaccagcagggaccatagctctcagtcagaagaagaagtcgtaagaaggagagaaggaagtcgaggctttgaagaaaagtgcggactgggtatcagactggtccagtagacccgaaaacattccacccaaggagttccacttcagacaccctaaacgttctgtgtctttaagcatgaggaaaaagtggagccatgaagaaagggg

SEQ ID NO: 127643 - DNA, 800 bp, Homo Sapiens
gaaaaaggattttttaaaggcgccagaaaaaggaaggggaagaagaaaacctccatggggccaggaatttttttataaaaaggaggtgttcatatttccacgcccatttaaattgggaaaaggaggaaggaggtgaagattcccaaaggttgcctttatttaatttgtgccccggtgttttttcccttttaaccaatccagttttgaagctgctggctgttatgattttttccatcaaggatggaaggcctaattatgtaaaggtcaaatccgatttaaaattttgtgcttttatagaaagaaatttctttcatagacgtggtgatatatcatttgttggacctgctaatagtaggtcaaaggggagcactccttgccccctgttccctgggtttgtgcagttttctttttagagtttatagtagggcaagtggttctttttctctgaattacaggatggaaaaaggtcatatcctttgtcaggaaatataaacttgaaagtatgtagtcagctcttgtaatactcatatttatgattgtcctatatgaaaaacaacttcagttaaaactataatgtgtgattctgtataacaaggtgatgtctgtttcccagggctcagacctaatccagttataataaaatcaattaaatgaaatattctatagaatcgatctatgcccttgttaatctccatccatataggagtcacgttctttaagacagatggtggtagttatttttgtggcatggttagatttgactggttttgcagaagattacagttatgtactgcataatg

SEQ ID NO: 127644 - DNA, 1403 bp, Homo Sapiens
aagacttaggctaggtacgaggcttggtgttgaattcggcacgagggcgtctggcgtccgtgcgctgcacaatggcggctctgaagagttggctgtcgcgcagcgtaacttcattcttcaggtacagacagtgtttgtgtgttcctgttgtggctaactttaagaagcggtgtttctcagaattgataagaccatggcacaaaactgtgacgattggctttggagtaaccctgtgtgcggttcctattgcacagaaatcagagcctcattcccttagtagtgaagcattgatgaggagagcagtgtctttggtaacagatagcacctctacctttctctctcagaccacatatgcgttgattgaagctattactgaatatactaaggctgtttataccttaacttctctttaccgacaatatacaagtttacttgggaaaatgaattcagaggaggaagatgaagtgtggcaggtgatcataggagccagagctgagatgacttcaaaacaccaagagtacttgaagctggaaaccacttggatgactgcagttggtctttcagagatggcagcagaagctgcatatcaaactggcgcagatcaggcctctataaccgccaggaatcacattcagctggtgaaactgcaggtggaagaggtgcaccagctctcccggaaagcagaaaccaagctggcagaagcacagatagaagagctccgtcagaaaacacaggaggaaggggaggagcgggctgagtcggagcaggaggcctacctgcgtgaggattgagggcctgagcacactgccctgtctccccactcagtggggaaagcaggggcagatgccaccctgcccagggttggcatgactgtctgtgcaccgagaagaggcggcaggtcctgccctggccaatcaggcgagacgcctttgtgagctgtgagtgcctcctgtggtctcaggcttgcgctggacctggttcttagcccttgggcactgcaccctgtttaacatttcaccccactctgtacagctgctcttacccattttttttacctcacacccaaagcattttgcctacctgggtcagagagaggagtcctttttgtcatgcccttaagttcagcaactgtttaacctgttttcagtcttatttacgtcgtcaaaaatgatttagtacttgttccctctgttgggatgccagttgtggcagggggaggggaacctgtccagtttgtacgatttctttgtatgtatttctgatgtgttctctgatctgcccccactgtcctgtgaggacagctgaggccaaggagtgaaaaacctattactactaagagaaggggtgcagagtgtttacctggtgctctcaacaggacttaacatcaacaggacttaacacag

SEQ ID NO: 127645 - DNA, 939 bp, Homo Sapiens
  misc_feature (181)..(181): n is a, c, g, or t
  misc_feature (300)..(300): n is a, c, g, or t
tggggtaaagagccaccccgtacaaaaagtgggggtgaaaaatttttaaacaaggggccaagggcccccaaggggtataaaaacaggtttccagggccaaaccctgggggcccccccgggggggccttttccaggttcacaaaaggggtttttcccctttattgcccaggggcaggacctnccccccttttttctgggtgcacagaccagtcatgccaaccctgggacaggtgggcatctgccccctgttttccccatgaagtggggagacagggcagtgtgctcaggccctcaatcctncacgcaggtaggcctcctgctccgactcagcccgctcctcccccttcctcctgtgttttctgacggagctcgttctatctgtgcttctgccagcttggtttctgctttccgggagagctggtgcacctcttccacctgcagtttcaccagctgaatgtgattcctggcggttatagaggcctgatctgcgccagtttgatatgcagcttctgctgccatctctgaaagaccaactgcagtcatccaagtggtttccagcttcaagtactcttggtgttttgaagtcatctcagctctggctcctatgatcacctgccacacttcatcttcctcctctgaattcattttcccaagtaaacttgtatattgtcggtaaagagaagttaaggtataaacagcctgtgcaataggaaccgcacacagggttactccaaagccaatcgtcacagttttgtgccatggtcttatcaattctgagaaacaccgcttcttaaagttagccacaacaggaacacacaaacactgtctgtacctgaagaatgaagttacgctgcgcgacagccaactcttcagagccgccattgtgcagcgcgcggacgcccctcgtgccgattcgccacccggcctcgtacctagccg

SEQ ID NO: 127646 - DNA, 911 bp, Homo Sapiens
  misc_feature (42)..(43): n is a, c, g, or t
  misc_feature (119)..(119): n is a, c, g, or t
  misc_feature (163)..(163): n is a, c, g, or t
ggcattcacaagcttcacaaaaggggtcttccccttgattgnnccaggggcaggaacctgcccgctttttctcgggtgcacagacagtcatgccaaccctgggcagggtggcatctgcncctgctttccccactgagtggggagacagggcagtgtgctcagnccctcaatcctcacgcaggtaggcttcctgctcggactcagcccgctcctccccttcctcctgtgtttctgacggagctcttctatctgtgcttctgccagcttggtttctgctttccgggagagctggtgcacctcttccacctgcagtttcaccagctgaatgtgattcctggcggttatagaggcctgatctgcgccagtttgatatgcagcttctgctgccatctctgaaagaccaactgcagtcatccaagtggtttccagcttcaagtactcttggtgttttgaagtcatctcagctctggctcctatgatcacctgccacacttcatcttcctcctctgaattcattttcccaagtaaacttgtatattgtcggtaaagagaagttaaggtataaacagccttagtatattcagtaatagcttcaatcaacgcatatgtggtctgagagagaaaggtagaggtgctatctgttaccaaagacactgctctcctcatcaatgcttcactactaagggaatgaggctctgatttctgtgcaataggaaccgcacacagggttactccaaagccaatcgtcacagttttgtgccatggtcttatcaattctgagaaacaccgcttcttaaagttagccacaacaggaacacacaaacactgtctgtacctgaagaatgaagttacgctgcgcgacagccaactcttcagagccgccattgtgcagcgcgcggacgccagacgca

SEQ ID NO: 127647 - DNA, 1001 bp, Homo Sapiens
  misc_feature (67)..(67): n is a, c, g, or t
  misc_feature (79)..(79): n is a, c, g, or t
  misc_feature (133)..(133): n is a, c, g, or t
  misc_feature (225)..(225): n is a, c, g, or t
  misc_feature (238)..(238): n is a, c, g, or t
  misc_feature (260)..(260): n is a, c, g, or t
  misc_feature (330)..(330): n is a, c, g, or t
gctgagccagatcgccgagacgcagattcccgtcttatcccgctgtcgtgatgtccaggtcagcgcngtgcctgctccngccggagcctaatcaggcagagacggtgcgccgcgcccgccagatcacacactnaagatctcttcgatgaatgggaatgtcagagcagcacaccaccagatgtatcagacagagaccgatagctggtgtccagttgtacctttacncagggatgcatcngactggacccccccactccacncagtgtcgtgtattcagaaacctcctgttttctcaagtctctgaagtccagacagcactgatgcgagctntggtccgcacactctggaaagaagagagaagtgaaggctctaggtagggagaacagagagccactgggcacaggcttctctcctcttgtgtaaagaagcccagggagggatagagctctgactggacagaagactgtactctgcagcctgccttcctagagttgggttgtcactgtcctgcagggggcagcagccaccagcaaacaccactgcctgcaggagcctgggctgactggttgggactcaccgaagatcccttcttcctgggcggtggcctgcaggaactggaacagctgctctgtgtagcccaactctgcagaagagagaagacctagacctggcacccagcacagacacagcctgcctcgaggactgcaagggaacaagggcctcaccagtatcgggcagctggccctggcggaggaaggcggcagcctgtgcaaaggccttgagcagcgggctgagcaggcggcagaggaaaagaaagaaatctgggcagtgtgactgctggctgagctggaggggacaggccggggtgagtgcagctccccaccgcctccctaccacctccctccaggggcagctttttgaaacacaccctgaagtaccggccgtcagcctctccgaagtcatcactgtcactatcagtaaagtccccactcggtttccac

SEQ ID NO: 127648 - DNA, 1076 bp, Homo Sapiens
  misc_feature (960)..(994): n is a, c, g, or t
gccttttgctcagtgaagatttattgttatagaaggcaactaatacaatagatttgtgggctcgaaattttaaaaagttctaaaaaggcagttaaagcttgacaataaacttgagtaaggtttacacaatatcaaagtatattagttctttgaaatgaaaaggtattttttttcttcctttaacattgagatgtctgagatgtcaggattttgtagcattcttagaaacaacatccactgtgtgggatactttttttccttctggagttttaaaccagtctgactctttggttgtgcctatacaatgaaaagtctacaaatgaaatgagagaagtcaggatattttcctttgttaaactaagtagctgaataattagaactacctagataaaagactcaaaatgtttttgttatctggttgcctggttaggacatagccaacatttcaatggaatgtagtatcttatacaactgcatataattttttaaaaaataaacaatgactttgtttctttagatacatcaaatgctgcttgagtggccaaagggaaaatgccaactctttgaaatgtagtatctgtagcacttttcttctttcagtagtttttcatgccccaaatacaaactttaaggagtaacatctatcctcaaaacccaaaaatacccatttgttttgaggttcacagtccaccagtataagttttaaactgcgccaaaaggcttaggtagggttcagcagtcaggcatgacagatgcataattctaaccaacagtgcacatgtgacatgcttcctactgaaattaaactgccaaataaaaaggaaggattgtgccctttttaataacaaagaatgcagtcgttagaattcttcagatttggaattccagcagcactctagtgttttcttccccggccgtaatggccgaattcccgggcatatgtccggtaccgtcgactgnnnnnnnnnnnnnnnnnnnnnnnnnnnnnnnnnnnccggccgcttcctcgctccaactgactcgctgcgctcggtcgttcggctatagagcagtaccgccctatagtgagtgatcga

SEQ ID NO: 127649 - DNA, 2285 bp, Homo Sapiens
  misc_feature (1719)..(1739): n is a, c, g, or t
ttttttttacaaaaaggatttttattaaagagaaatctgtttggtgggtcagatatgaaatagatttacagaaactttacatcaggtgtctccaagacataaaaggccgcccaggaaaagcaacgcccccttgccaggatgccagtgggaggacggcaggatggcagcccaggccacgtggcgtggaccctgcgtaggaggctgcaggaagctccaggctgcccgacagtcacggcgttccccggaaatgggttccctaggagggagcagcaggcggcgggggttccaggcatgtctgtgctgggctcggagctcgtgcacgcacactgtcctgcttaaactcctagtccatgtctcgtgggacccccaaagccgtcccctaaggaatgtgctctggtacacaaggggaaaacacaccaacccgccccttaccgagacagcgggcgcaccagcctgggccacgtgagcctctgctgagctctttggcacagcacacctgggcctttaacacctgtcacttacaaaagtagacattcctgtagtaaaacttcttaaaaacacctatttctgcaaaataatgtgtttctgtatgtggagctctgcacatatacatgtcctttgggaagaaagcagcgtggaccgagactgagggctggtccggggacgtccgagtgctgctggaggtcggtcaggcttcagtccctgcccgctgcccgcgctcacatgaggtcgttgagctccgcctccagcgccttggccatctcgtcggcctcggagctgctgccctcgtcctcgttgctggactccctgctggactcgctggcggcgtcctcttcattcagcttcctcttgtggcctctgggcccccggccccctgccgcgctcctctcgctggacgcaggtgccccgagcgtccgctccctgcgggtccctggcttccggggctggggctcctcctcctgctcctcaggcctcctcttctcgctgtcgctgtcgtcgctgccttctccaaggatgtcgtccacctctttgtccatactctctaaatcctccttacaaagagtgtacagcggcattgtctcagacatactgggctgtcgctttcttctagaagggccaggctgctctccgtcctgagcgtcaggcagctcttcaccaaacatctgcggctggggtggcggaaccgctctgaaggaagagggctcctggcggatgggtagggagctggagggtgctgggggcccccgggcgcccgtcctgatgagcttccccgtgttggagtcgtagatccgaacctcggggccaggctgggccttgggaagaaccggcatcgggtggaacaaggcggtggggggcacaccctcccggtcgggaaaggccgcagggctgttctcccagctcgcgcggcgatcaggtgcgtggccctgtcaggggcgtcgggggctcagcaccagccgagtgaggatcttcgctcccagcgccgtgtgcgttgtaatgctcccgcgtcttctctatcgggaagttttgtcgggtgtagcccactgaaaattatggccacgtctgccagcaccttgctcttgagctccggcacgatcttgcggatgtccggcgcctcctcgatctccttgttgaggtagcggtcatacttggcatagtagtcagtgtgtacacggaccaggatctcctccaggtagatgaggtggtcatcctcatccgtgnnnnnnnnnnnnnnnnnnnnnatgctctggtccagggactcacccgcagtgacccccgacagctcgctgttctgtgactcggtctccgcctccttcctgtcggcacagccgttgcccaggccgcagaggccatcccgctcgccctcctcctgcccacccagctcaggctccttgtccggggcatgcgcgccaggctcggcctctccggggagactcggtgctgcaggccgccccggctccagggaactgccctgtgccagcgccccggctccctctggggcagccttcggcttctgccggcctcttttcccctcgctttcgccatcagaggcggaggaggaggacttcgtgccctcggactcactgctgctctcgctgtcgctggataagtcaaagtccaggtcagtgcccgtggcaccctgggcaggccgctgtcccggtgccacccggccaccctgcgcacaggatcctggggctcaggagcgcctgccagctcttggctgctggtggggcctgggcaggggccagatgtcccctcggccgatttaacccagctcgtactagcta

SEQ ID NO: 127650 - DNA, 1045 bp, Homo Sapiens
  misc_feature (471)..(491): n is a, c, g, or t
cccggggctcgaccgggtggggcgttctgtgtgccgcggtgggcctggacgtgggcccgtggacagttccaccaggtgtgccggcgggaccccccctttgcaggcgcagagcccaactgaggtgaacgcaggccaactccagcgcgacacttcctgccacccgccgcgtccagtgctggccttcagggcgtcgggggccaaccacacccgagtgaggatcttccctcccagccccgtggcgtggtaaagctccccgcgtcttcttctatcgggaagattgtcggtgttacccactgaaaattaggccacgtctgccagcaccttgctcttgagctccggcacgatctttgcggatgtccggcgcctcctcgatctccttgttgaggtacggtcaatacttggcatagtagtcagtgtgtacacggaccaggatctcctccaggtagatgaggtggtcatcctcatccgtgnnnnnnnnnnnnnnnnnnnnnatgctctggtccagggactcacccgcagtgacccccgacagctcgctgttctgtgactcggtctccgcctccttcctgtcggcacagccgttgcccaggccgcagaggccatcccgctcgccctcctcctgcccacccagctcaggctccttgtccggggcatgcgcgccaggctcggcctctccggggagactcggtgctgcaggccgccccggctccagggaactgccctgtgccagcgccccggctccctctggggcagccttcggcttctgccggcctcttttcccctcgctttcgccatcagaggcggaggaggaggacttcgtgccctcggactcactgctgctctcgctgtcgctggataagtcaaagtccaggtcagtgcccgtggcaccctgggcaggccgctgtcccggtgccacccggccaccctgcgcacaggatcctggggctcaggagcgcctgccagcttcttggctgctggtgggggcctgggcagggggccagatgtcccctcgtgccgattaaacacccagcctctactagcctag

SEQ ID NO: 127651 - DNA, 1051 bp, Homo Sapiens
acaaacagaatacatctaacacaataagtatttcaggtaaggcaggttgctaaaaagaatagtatagagcgtccagatcaggaaaagctgtccaaggcccggctccttgaggcacatacggattgccggctattttcccatcgctttgccatcgagcggaagaggaggattcgtgcgctcggactcactggtgctttcgctgtcgctggataagtcaaagttcaggtcagtgcccgtggcaccctgggcagggccgctgtcccgttgccacccggccaccttgcgcacaggatccctggggctcaggagcgcttgccagctcttggctgctggtgggggcctgggcagggggccagatgtccctctcgtctggcttcccggggcggggtgagtcccgcggggtggcggcctcgctgccgttcagctcccgtgcaggcttctccaggccattgctgggctccactccaggggcctgcgttaccccctcagggtctctcacgggcggagatggctctgagacctcagtgcctcgagaatgatttactttctttctcgtctgagattctcgggacccagggggcgcattcatatcacccgtgccctggaagtatacatatttcttcacagttatcagattgggggcaaacttccagacatcttctcgatcatcaataatgcaaaccattgagtctccacaaggaaagagatttctaaggtttcccgttttagaaaatgggtcaatacattcatcccttgataatattcggtgagaaaaaagcttcttctcggggtctaaaaagcctgcgatggtgtgtgcgtacagccggctgccgaaggtgaagacgtgcagctcgtacagcttggcgatcttctccaggaagtccttgcagtgtggacgcaggcgcgtgtgcagcatgggctcaccccggcccagctggaagtgaaagatgcctttattcgacatctgctgacagtgctgctcggttgtgtgaatcaacgtctggtccaagtcccctcgtgccgaattcggcgcgccgtgacttcatactct

SEQ ID NO: 127652 - DNA, 996 bp, Homo Sapiens
  misc_feature (751)..(751): n is a, c, g, or t
  misc_feature (756)..(756): n is a, c, g, or t
  misc_feature (768)..(768): n is a, c, g, or t
ttttttgaggtcacaacgcctatttattccccacacgtcacgccctgcaccccgggtgggcttggcacacacctcaccgccatgagcggctgcagggccgcggcggcccccgttcctactgctacctacgatacacggtactgcgcctacctcacagacggccaggagccagggagccccaggatgctccgactgacaaccctgctgctgggaccacggcgccgtgggctcgtctgccacccccaggcctcaggaacccagacaggctgcctgctgtccggctctccggctgctttcctggtggctgttttagggccaaggtgggtggcacctgaggtgtcccgtggcctccacccagcacaggaggggtaagcttccctggggggccccgggcccatgaaacatccaggacagaaggacagcaggatgggacacagacagaaacggcccagctgccttccctgtgcccggggctaaggcggccgggacagaaggtcatgatgtcgcccctggctctcagtcgcgaggaccagaaaatgagggtgggaggaggggaaacatgtctgtcaacatgcccaactggagaaaagtcacagaaactggtcctatgcacccaggacggctcctgagccgcggaggcgtggggtgaccgcagccgtctcttaggtgtctgccactaaagagttcctcatgcaaacacacatggcccgcggtgcccaggccgcagctggcagtgagctcttccgagcangacanggccggggtggncggaggtcactcggaagaggctctcaagacggagagttctgcaacaacacgggatgggggcggggctgtaaggcttggagcacacatccgcacacgtgactgaactgcactctcgacgctatgcgtcctcacactcgtgcgattcttgctcgagggcattcctaatgatcgataatcgtacagtcaacgttctggtaatgtatcgccaatcaaacatcaccgacaatg

SEQ ID NO: 127653 - DNA, 1498 bp, Homo Sapiens
  misc_feature (701)..(719): n is a, c, g, or t
cacacgcaccggacaatcgatacccaagaacgcaacaagtgaaccgtcccacagcgcagagaggaaggagggcaacagactaacaggggcgtagaggagaagaaattatacgaacagacaccaagaggcagaacgtacaaacataccacccgcgatgccacccgacacgcgactaataaaacgaaagagcagcagcacagaatggcaaagaccacaccacaaagagacaggcaaagccgctacattccacacactctgtcagccaacaacggcccagcaagacaagtacaacaacaacaaaaaagagcaaaaacacagaaatcttttccttgtggtggagatgaaaagaggccaagccaccaaaaacgagccaaacaggtaagcgcgaagacgagcagagttacaggaggaagagaaaaagaacagacctgcgccgttccagtacgcgaaaaaacataaattgtgagggggggaacaaccagggaggagggcccccaggcgggtttcaaaccaattttcttaccgcgcgccttatttttatttggaaaaatttggggggggataacacatgtcacccagcgaaacccgttttaaaattgtttgagaaattattacgcatccattttgggaaatttgcccctggagaccaagaattcggcccgaggaccattttgatgttggagcgcccgcggctgtaggcnnnnnnnnnnnnnnnnnnngagaattcattaataattttattttgaattacaatctattatcacttcaaaaagagccacttcagaaaacatccaacggatgttgacttaccagtaaaaatgtaagtcatcaatgtatgatttatactacagaatacataataaattatatttacatgcaatgactagactatcacacacaaggtaaaaaaatacagtattttatgtacattttaaaagatttacatgttcatatacaatttataaagttaaaaattctctgtacaaaatcttacatgtacagagtttatataagccccattcttatggctgtatcaccacacagatttgcttaaaactataatactacaaacactcgggttcttcatattcaatcttggcacccatatagcaatacactattctgaaatgtaaattacaaaggaaataaaatgtaatcatgcagacattttttaatataagaaaatgcgataaaatatactacaccagatcaacatttatcaattccatagatactgagttttcaacttactgcactgttttcatataagtacatgcaaaactagcagattatggatttttaaagtaacattaaaataataccatagtttgacaatacttgggcaataggaatgaaaactaagagccctagcctaattatttctgccttaacagaaatctcaattaagacattacatatataaaaatcacagaaatgtcaatattataattcccaaatttataagatctgcatcacatcaaatagacactgatcattt

SEQ ID NO: 127654 - DNA, 1181 bp, Homo Sapiens
  misc_feature (1070)..(1104): n is a, c, g, or t
  misc_feature (1160)..(1160): n is a, c, g, or t
ggcaacaagcagggacacgcacacacggctcaccagcagcaccccctttaataaaacatgggcggggggtcatgtgacaggaagaagggggtgaaataggaccatttacaaccacagaaaaacctctgtacatgtctagcgcctggcagaggggggcagcagggcagcagcgggctggagccagccctatttgtagaggatatcgtagtgtccaggccggtagagaaggtagaccttgggctcggagccctcagggaagatgtgcggattggtggtgccgccctcgccgcggtccatgtactccacctggatggacacgctgagggcctgggccagcgcaatgatgtggatgtggtcgctctccttgcacatgggctccacctcctgctggcagaactccttgacagtccgtccaccctcgatgaagtgctcgaagaacttgctctcgcgctgcaggtagcccgaggtgagcagccgcaggtagaccacaaggtagtcggaggtgctctggtcattgaaggaggccagcaggtcggcgacagaggtctgcttctccacctgctcaatcaggtccatgaacgtgttgtggaaatcctcaattgtgaattcagtgaagccctgggacaccaggtcttccttgctcttggcagacacagccttgaaccgctgcaactccttgctgtcatccagcagtgcctccaagtgggagaatccgaaagcccgatagaaacagttgccgtcaggcctggtcttgcggatgtacgagtactttttgtggaggtccttgatcttctgttgatagatgttgtcatcttcagcatactccttgtataggaccgagagctccagccgctctgacaccagagggttctgcacagcaatctcttgctgaattcggtcctgctgagccatgatggcttcatcataggccagacagttaacaccttcggagtcgctgcccagcggctcctgcttctgctgctgaggttcctccgccgccatctttaaacagcgccgcccccggccgtaatggccgaattcccgggcatatgtccggtaccgtcgactgnnnnnnnnnnnnnnnnnnnnnnnnnnnnnnnnnnncgccgcttcctcgctcacagactcgctgcgctcgtcgttcggctctacgcggaggncccatttaggtatatagtttt

SEQ ID NO: 127655 - DNA, 1115 bp, Homo Sapiens
  misc_feature (68)..(78): n is a, c, g, or t
  misc_feature (181)..(190): n is a, c, g, or t
tgatggcggggatatataggtgtggggggcgaaaaggaggcaccacccctttaaaatgaaaacaatcnnnnnnnnnnntccatggtgcccccggaaagaagggggggtgacattagggacccaatttaccacgctccagaaaaaaaccgtgggtggcattgtcaaggccgcctggcaagannnnnnnnnnccagggacagcaagcggggctggaacccagcccctattttgtagagggatcttggtagtttcccgggcccggtagagaagggtagacctttgggctcgggagccctcaggggaagatgtgcggaattggtggtgcccgccctcgcccgcggttccatgtactccacctggatggacacgctgagggcctgggccagcgcaatgatgtggatgtggtcgctctccttgcacatgggctccacctcctgctggcagaactccttgacagtccgtccaccctcgatgaagtgctcgaagaacttgctctcgcgctgcaggtagcccgaggtgagcagccgcaggtagaccacaaggtagtcggaggtgctctggtcattgaaggaggccagcaggtcggcgacagaggtctgcttctccacctgctcaatcaggtccatgaacgtgttgtggaaatcctcaattgtgaattcagtgaagccctgggacaccaggtcttccttgctcttggcagacacagccttgaaccgctgcaactccttgctgtcatccagcagtgcctccaagtgggagaatccgaaagcccgatagaaacagttgccgtcaggcctggtcttgcggatgtacgagtactttttgtggaggtccttgatcttctgttgatagatgttgtcatcttcagcatactccttgtataggaccgagagctccagccgctctgacaccagagggttctgcacagcaatctcttgctgaattcggtcctgctgagccatgatggcttcatcataggccagacagttaacaccttcggagtcgctgcccagcggctcctgcttctgctgctgaggttcctccgccgccatctttaaacagcgccgcaccctcgtgccgaattcgccacccaggcctcgctacctagaagtata

SEQ ID NO: 127656 - DNA, 965 bp, Homo Sapiens
cccatattttaagggggatttggaagggtcaacggcccggttggggaaaggtagaccctgaggttttggagctccctccggggaagaattttggagaaattgggtgggggcggcaccttctccggcgggttccagtggtgctaccacgcctggagtggagcccgcgttgaggggggccttggggcccagggggcaatagggaattggggattggttgttccgcttttcgccttgccacacattggggtttccccccctcccgtggttggggcgggaggttaccatggaacaggtcccgggtccacccccttgggaggaaaaggggcttgaaagggagactttgcttcttccgcggctggccgggttaggccccaagggggaaggccaggccgcccgggtagaaccaccaaaggtagttccggaggggggcttcgggttcaatggaaaggagggcccagcagggtcgggcgaccaggaggtctgcttttcccgcctgctccaatcagttcccatggacggtgttgtggaaaattcttcaattgtggaattcagtgaagccctgggacaccaggtcttctttgctcttggcagacacagccttgaaccgctgcaattccttgctgtcatccagcagtgcctccaagtgggagaatccgaaagcccgatagaaacagttgccgtcaggcctggtcttgcggatgtacgagtactttttgtggaggtccttgatcttctgttgatagatgttgtcatcttcagcatactccttgtataggaccgagagctccagccgctctgacaccagagggttctgcacagcaatctcttgctgaattcggtcctgctgagccatgatggcttcatcatagggcagacagttaacaccttcggagtcgctgcccagcggctcctgcttctgctgctgaggttcctccgccgccatctttaaacagcgccgcacaccc

SEQ ID NO: 127657 - DNA, 1301 bp, Homo Sapiens
  misc_feature (141)..(149): n is a, c, g, or t
tggggggacccccccatggcccctatatttttttgtaggggggggatatcttggtgagggtttcaccaaaaagccccggataaagagaaaaagtgtttagacccccttggggggctttgagaagcccccctttcagggggnnnnnnnnntgtgggcggggaattggggtgggtataccggcgccttttgtgtcaggggtgttcccaaggttaacttcccacccctgaggatgggaaccccccctggaggggggcctgggggcccaggcgcccaatggaaggtgggaagtgtggtccgccttctcccgtggcgaacatgggggcttccaaccttcctgggagtgggcagaaatttcccctgaaacaaggtcggttccacgccctaggaaagaaagtgtcttcgaaagaacttttgcttcttcggcgttgcaagggtagccccggaggggaaaccaaccggcagggtagaacccccaaggaagttcggaaggtggttttggtccatgaaaggaggcccaaccaggttgggcgaacagaagttttgtttctcccccctgctcaaatcagggtccatgaaggtgtttgtggaaatcctcaattgtgaattcagtgaagccctgggacaccaggtcttccttgctcttggcagacacagccttgaacctgggggtgggatggaaaggcgggcccagcatgggctcctcgaccagcccagacgccagggccgagacagcactgccccgcctggcaaggccagagtccagcccatcgcccgggaaggagggagacaccctactcgagacacatcctactcgcccggggacggaggtagacacccacctgcctcggctgcccagtgcccacccttctcaccgtctgcaactccttgctgtcatccagcagtgcctccaagtgggagaatccgaaagcccgatagaaacagttgccgtcaggcctggtcttgccggatgtacgagtactttttgtggacggctccttgatcttctgtctgatagactgttgtcatcttcagcatactccttgtataggtaccgagagctccagccgctctgacaccagagggttctgcacagcaatctcttgctgaattcggtcctgtctgagccatgatggcttcatcataggccagacagttcacaccttcggagtcgctgcccagcggctcctgcttctgctgctgaggttcctccgccgccatctttaaacatcccgggaaattccggtctctgggtcagcctgcttcattagttgtttctagctattattttataacattcaata

SEQ ID NO: 127658 - DNA, 532 bp, Homo Sapiens
gagaatttttcttttcattgaacccttttgcattattgtagaagatggattcaaactaactctatatacagagaaattggcaaaaagtttctggcagtgatctataaaagaaatcagggattaaacagtcacagtgggatggaattgacagattaaaaataggatttgtaagactcgagagactgatttgtatgtagggagtgagatggaagagtataggatgacatattttttcacttctgtgatttagaaagtcctgtcatttactgtggtaggaatttaaggggagaagtttgtgaaggtgaaacgtattgactttgagatatctatgtggaaagtcaagtagaaatgcccagtaggcagtgggaactcagatttaggtgagaagatttagtttaggaatcattcagcttggaaaatggaatacattatcttgtatgtatctaatgtaagaaggctgaaacttcagcttttaaagcagacaaaagaagagtcaataattgagacagagaagctgcctgagaggctaggg

SEQ ID NO: 127659 - DNA, 731 bp, Homo Sapiens
tttttttgaaacgaaaacgaggactttattataaaaaaacgttggaccacgttgggctgggcaccaggacagtgtcctggcacgtttccaggcgagccgcgcaggctcctggagcagctcctcgggcaggaaaccctgtacgccagggattggagaggcctgcgccaccctccatgcaacgtccagacaggtggatgttcagcagcccgtccaaagggatgctccaagcgctgtggggtggggccagaagcccgcccacctgggccctggaggaggctggagtgtgagagcctctgtgacgcgcatctgccgggctactcatacagccagtgcccagcgctgtcctcccagcagaggagctcgtctgcgcggaaccagagagcgatctcgcggcgggcactctccaccgagtcgctgccgtgaatcaggttcttgccaacctcgatgcagaaatccccgcggatggtgccgggcggggcgtcggccgggttcgtggctccgatgagcgcccgcgaggtgcgcaccacgtccagcccctgccataccatggccaccaccggcccggaggccatatacttgacaaggcggccgtagaacgggcgttcacgcagctcggcgtagtgctcacgcagcagctcctccggaggcctgcaccagcttcagcgccaccaacttgaagccttcctctcgaagcgcgcacatctcgccaccagccgcgctgcacgcgtccg

SEQ ID NO: 127660 - DNA, 964 bp, Homo Sapiens
  misc_feature (709)..(769): n is a, c, g, or t
gcctgttcctgggcccaaaccgaaacgaaaacgaggactttattataaaaaaacgttggaccacgttgggctgggcaccaggacagtgtcctggcacgtttccaggcgagccgcgcaggctcctggagcagctcctcgggcaggaaaccctgtacgccagggattggagaggcctgcgccaccctccatgcaacgtccagacaggtggatgttcagcagcccgtccaaagggatgctccaagcgctgtggggtggggccagaagcccgcccacctgggccctggaggaggctggagtgtgagagcctctgtgacgcgcatctgccgggctactcatacagccagtgcccagcgctgtcctcccagcagaggagctcgtctgcgcggaaccagagagcgatctcgcggcgggcactctccaccgagtcgctgccgtgaatcaggttcttgccaacctcgatgcagaaatccccgcggatggtgccgggcggggcgtcggccgggttcgtggctccgatgagcgcccgcgaggtgcgcaccacgtccagcccctgccaaaccatggccaccaccggcccggaggccatatacttgacaaggcggccgtagaacgggcgttcacgcagctcggcgtagtgctcacgcagcagctcctcggaggcctgcggaagggtcaggccgcctgcgcccgcacccggcacctaggcgtnnnnnnnnnnnnnnnnnnnnnnnnnnnnnnnnnnnnnnnnnnnnnnnnnnnnnnnnnnnnnctgcaccagcttcagcgccaccaacttgaagcccttcctctcgaagcgccgcacaatctcgcccaccagccgccgctgcacgccgtccggcttcacggccaggaaggtgcgttcgtgtgcgccggtgcaggccgcggggaagaggttagcgaagatggtcagcaccaggcagatcatcccgggaattccggaccg

SEQ ID NO: 127661 - DNA, 981 bp, Homo Sapiens
  misc_feature (535)..(535): n is a, c, g, or t
  misc_feature (590)..(590): n is a, c, g, or t
  misc_feature (647)..(647): n is a, c, g, or t
gagacttggcctccgcagctgccctccggccccccacggctgccgggttccggggtgcaagtgaagcagcctccccgcggaggccgcagcgccccgaccaggcctctttaagcgcaggccccgccccgggcgccaccgccccgccccgcggatcccgctcccgcaccgccatcatgatctgcctggtgctgaccatcttcgctaacctcttccccgcggcctgcaccggcgcacacgaacgcaccttcctggccgtgaagccggacggcgtgcagcggcggctggtgggcgagattgtgcggcgcttcgagaggaagggcttcaagttggtggcgctgaagctggtgcaggcctccgaggagctgctgcgtgagcactacgccgagctgcgtgaccgcccgttctacggccgccttgtcaagtatatggcctccgggccggtggtggccatggtttggcaggggctggacgtggtgcgcacctcgcgggcgctcatcggagccacgaacccggccgacgccccgcccggcaccantccgcggggatttctgcatcgaggttggcaagaacctgattcacggcagcgactncggtggagagtgcccgccgcggagatcgctctctggttccgcgcagacgagctcctnctgctgggaggacagcgctgggcactggctgtatgagtagcccggcagatgcgcgtcacaggaggctctcacactccagcctcctccgggccccaggtgggcgggcttctggccccaccccacagcgcttggagcatcccttttggacgggctgctgaacatccacctgtctggaccgttgcctgcagggtggcgcagcctctccatccctggcgtcacgtttcctggccgaagagctgctccggacctgccgggtcgctggcacgtccagacctgtctggtgccagccccgtggtcccgttcttctattaccgctcctccgccgcgcccccca

SEQ ID NO: 127662 - DNA, 844 bp, Homo Sapiens
tgggggaactgacaagaaactgcgcaactgcagccgcctggcctgcctagcaggcgagctccgttgcacgctgagcgatgactgcattccactcacgtggcgctgcgacggccacccagactgtcccgactccagcgacgagctcggctgtggaaccaatgagatcctcccggaaggggatgccacaaccatggggcacccctgtgaccctggagagtgtcacctctctcaggaatgccacaaccatggggccccctgtgaccctggagagtgtcccctctgtcgggaatgccacatcctcctctgccggagaccagtctggaagcccaactgcctatggggttattgcagctgctgcggtgctcagtgcaagcctggtcaccgccaccctcctccttttgtcctggctccgagcccaggagcgcctccgcccactggggttactggtggccatgaaggagtccctgctgctgtcagaacagaagacctcgctgccctgaggacaagcacttgccaccaccgtcactcagccctgggcgtagccggacaggaggagagcagtgatgcggatgggtacccgggcacaccagccctcagagacctgagctcttctggccacgtggaacctcgaacccgagctcctgcagaagtggccctggagattgagggtccctggacactccctatggagatccggggagctaggatggggaacctgccacagccagaactgaggggctggccccaggcagctcccagggggtagaacggccctgtgcttaagacactcctgctgccccgtctgagggtggcgattaaagttgcttcacatcctcaaaaaaaa

SEQ ID NO: 127663 - DNA, 925 bp, Homo Sapiens
ttctttctgttttgtgaacagccaggcaggggatccctttccatggcccccccagtaaccccccagtgggccgggggcgcttctgggcttcggagccaggacaaaaggaaggaggggtggcggtgaccaggcttgcactgagcaccgcagcagctgcaataaccccataggcagttgggcttccagactggtctccggcagaggaggatgtggcattcccgacagaggggacactctccagggtcacagggggccccatggttgtggcattcctgagagaggtgacactctccagggtcacagggggccccatggttgtggcatccccttccgggaggatctcattggttccacagccgagctcgtcgctggagtcgggacagtctgggtggccgtcgcagcgccacgtgagtggaatgcagtcatcgctcagcgtgcaacggagctcgcctgctaggcaggccaggcggctgcagttgcgcagtttcttgtcagttcccccagagcagtcactgacgccggtgcaggggcaggggaggccagggggcggtgggcattgccctttctgggtacatggctcaatcctgcactcctcctcatcgctgccatcgctgcagtccaagtccctgtcgcagcgccaggtgaggggcacgcataagccactggtgcggcactggaacttggtgggtgggcacgagcctgagctggggcctgcggcctgggcagaggtcggggtggaaagcgggctcgcggcggcctccaggcctagtccgaggccgagcagcagcagcagcgccaggcccagagcccctgttcgccacgctccaacctgcgccatccaaccgccgctcatgctgtccccacagcggcgccggccacgcgctgtccagaccgctcatcccgggaatccggaccggtccagcct

SEQ ID NO: 127664 - DNA, 912 bp, Homo Sapiens
gcttcagggccagggaaggtctttctgtttttgaccgccagcacggggattccttcatggccccaccagtaacccccaggtgggcgggaggcgtttcctgggctcggaggccaggaccaaaaggaggaagggtggcggtgaccaggcttgcactgagcctccgcagcaggctgccataacccccataggcagttgggcttccagactggtttccggcagaggaggatgtggcattcccgacagaggggacactctccagggtcacagggggccccatggttgtggcattcctgagagaggtgacactctccagggtcacagggggccccatggttgtggcatccccttccgggaggatctcattggttccacagccgagctcgtcgctggagtcgggacagtctgggtggccgtcgcagcgccacgtgagtggaatgcagtcatcgctcagcgtgcaacggagctcgcctgctaggcaggccaggcggctgcagttgcgcagtttcttgtcagttcccccagagcagtcactgacgccggtgcaggggcaggggaggccagggggcggtgggcattgccctttctgggtacatggctcaatcctgcactcctcctcatcgctgccatcgctgcagtccaagtccctgtcgcagcgccaggtgaggggcacgcataagccactggtgcggcactggaacttggtgggtgggcacgagcctgagctggggcctgcggcctgggcagaggtcggggtggaaagcgggctcgcggcggcctccaggcttagtccgaggccgagcagcagcagcagcgccaggcccagagcccctgttcgccacgctccaacctgcgccatccaaccgccgctcatgctgtccccacagcggcgccggccacgcgctgtccagaccg

SEQ ID NO: 127665 - DNA, 895 bp, Homo Sapiens
  misc_feature (398)..(430): n is a, c, g, or t
  misc_feature (534)..(571): n is a, c, g, or t
  misc_feature (796)..(815): n is a, c, g, or t
ttttataccagtttttagctggtgtttatgaagaacagtgagtacctagaactgtgccactaattaaaggaaatcctaagaaggtgcatttctttacagagctgtgtcatgccatcctttgggccctctgctggaaaagtagaatcaagtctcaaataatgcctttttaattgtatcctctagtattatagatataggacagtactgtatcatacctctgtgaatgtaaaatatcttgtacctgctttatgatacgtagtagtgaccgtgctttatcagagctgtttttaatgatgttattctagaatgttttctttccagatgatgattcagaagctaattttaaaaaacggtgccaggtaccacaacagtaacagaactttgcaattttctggggnnnnnnnnnnnnnnnnnnnnnnnnnnnnnnnnnaaatggagtgtgctggatgtctctataattttatttagatgactgcagaacctggaaaagctgttgctgctattgatgcataacatactgctattggtcttttnnnnnnnnnnnnnnnnnnnnnnnnnnnnnnnnnnnnnnatttgaatttttggaaactttagctgtgctgtcaactttggaaaaagtatcccggtttactgtgttgagttggcattgtacagaaattaacagccatattggtctagaaacgttaaacttaatttttttccatttgtacaggggtaacgcactgtattaaatatgtaaggtcttatctacatgggtttgattacagaaactaataaagtattctctaaataatgnnnnnnnnnnnnnnnnnnnncctgagaggcggccgcaagctttttccctttagtgagggttaattttggctatggcacttggcccgttcgtttaccaacc

SEQ ID NO: 127666 - DNA, 1159 bp, Homo Sapiens
  misc_feature (80)..(100): n is a, c, g, or t
  misc_feature (696)..(1034): n is a, c, g, or t
tgttaaaacgacgggccaagtgccatagccgaaattaaccctcactaaagggaaaaagcttgcggccgcggctgtaggcnnnnnnnnnnnnnnnnnnnnngttttagtaaaggtttattttaaccacttgatttccaagaaagttaatgaaaattcaccataaaatattgctttcattcttgtttacacaactaaattgctcatttatgttactaaaagatagcagtattaaatattaaagcttaggacaaaggattgacaattggttgcagtttctaatcattggaaataatgtctaacaacgtatcccaagtaccatgaatatttatatagattattcccattatttaactttgaattattaatgtgtaaattatcacttaccagctgacatcaaggtagcgcaggctactgttcagatacagtgcatcacataactgttgtataccactgttttttatatcatgcttacacatgtgtagtgcaacaagacagtgattttctttcaacatgcggcctacatggactgtagactcttcctaaaagtggataaaatcttatttctagaatataattttgaagtagtacatgtttatttcagacatatgctgttatttaaattagctttttaaaaagattatattggttaaaactgttagtccacaatttgcatttgttcctcgtgccgaattcttnnnnnnnnnnnnnnnnnnnnnnnnnnnnnnnnnnnnnnnnnnnnnnnnnnnnnnnnnnnnnnnnnnnnnnnnnnnnnnnnnnnnnnnnnnnnnnnnnnnnnnnnnnnnnnnnnnnnnnnnnnnnnnnnnnnnnnnnnnnnnnnnnnnnnnnnnnnnnnnnnnnnnnnnnnnnnnnnnnnnnnnnnnnnnnnnnnnnnnnnnnnnnnnnnnnnnnnnnnnnnnnnnnnnnnnnnnnnnnnnnnnnnnnnnnnnnnnnnnnnnnnnnnnnnnnnnnnnnnnnnnnnnnnnnnnnnnnnnnnnnnnnnnnnnnnnnnnnnnnnnnnnnnnnnnnnnnnnnnntgcggtatacggttatcacatatcaggcatattgagtaatactatttatcacatgcacatacgctagtacgtataagcgcttgctgctttttcaatgtccgccctctagagatacaaattactca

SEQ ID NO: 127667 - DNA, 1496 bp, Homo Sapiens
  misc_feature (65)..(118): n is a, c, g, or t
gccttcttttctccagtttaaatgctaatttgttagctttcttctccactcttcgttccttgcgnnnnnnnnnnnnnnnnnnnnnnnnnnnnnnnnnnnnnnnnnnnnnnnnnnnnnnagaacgtggctgagttgatactttaggaagatcactgccattaatcatctgtattctttcagtttgctttgctgtgagtcctttctttggtaagacattgagaggtattcctgttttagaagatattcgaatttgtttgggctttggttgatacttgataagctgtggatggttatataaatttgagtatgtactacaaatagattcacaatcccacttctctttggcttcttcaaggactacagtaatcatttcttcctcctcagactcatcaagctcattcattggcaggtcttgatcctccaagggttcaagggtattcaattttacacaattctctgccttctctttatagtagtcattcaaaacttcctgtaagcgattgctgtccacttgaatagaaccttccaattctgcattatccagagctccaatttcatcatcatcatattgctcataaaacttctcaaacctctcatcatgtagggtcagctgttcatttctcctcatgactgaggaagtcatcgaatactccgtgaagcgactctttgtttcctcactccagaacaagtgatctgctatagctctgtgagtttttccgggcacatgacatacagtcttcattctgacaataggcctgcagagtcatagtcatcattgctatctcccttctcatcatccacatcttcccactcgctgtcatcttcattctcagatttctgtatatccattccctcttcctctcctgttgccttattggcctgaagaataaagtcatcctcaagcagattatctggatcatcaaagtcaaaatcatcatcaagagctgcaacaatgtcaggatcaaaatccagtcgaggtcctgaaactggagctgctttatttaacaatccaacatcttcctcaaactctgaagcaaacactgatgaaggcaacttaattccagtgcttggaattactagcgtttcttctttctcctctctcctgttgtgtgcactgaaggtacttgagggaataagctctgaaggcccagatggttccttcaggtgctgcaggtagtcatagtcgtcatcaaagaacactccatacttcctctgttctgctcgcctttcttcattgtctattttttgtgtgggcaatagaaccctctggggtgcactctcatctgctgctaaaggatctcgttggctccggtggaccaagtgaaaagacacagctttcttcttctctataaagggctttttcttcctgtgaggcatgctgcagccgcgcggcgctcacccccaacaggggcggcgatgacaccctcgaagtccggcggggagaccaaggtccagctgaaggccgcttctgtaggcctcaccacacgtgcagcccc

SEQ ID NO: 127668 - DNA, 451 bp, Homo Sapiens
tttttcacgttatgaagatattttcctttaatttatcaaacatttcacattcatgaagtcatttacttcagagcaaatgtaagcttataatattaaaaattaaagtattacaatatttacaagatggttggcaggggacacttactagtataaaaataatacaaatattgtattttcctcttatctgccagtaaaaatggcaaacagttttgtctttctgaagtttctagtcaataaccaaagatgaggagcccctaataaagtgccttgccctgtatgctccactgtctatagctttagaccctcaacattcttcttcaagttcagcagctctttttcttgccttcttttctccagtttaaatgctaatttgttagctttcttctccactcttcgttccttgcgctcttcttttatagcttgctttcttgctcttttatcttctttgctt

SEQ ID NO: 127669 - DNA, 683 bp, Homo Sapiens
tttcacgcagcaataaaatcgtgtttatttagtgatatgacaagtagagaaatcaaacataatattttacaaaatgtacaatttatatttttataaatactttaaaagagagaagcggaacacgtgtggtggcattaaaagaatgtctagatttaattttgcagcctaccttgtagcctgacaaaccagatacatgtatgtatacacatatatcttgatcatgagttttcataattatggcccaaggataagttttgggcatgtctacaataattccaaactctcataaaatgtgtggtctctcaccaccagtcatgttgattttgctctatttttctcaaaattccacaaaatgcacatttgaaacagctatcagaggatgtaagcaagtgctttgggcctcagtttactcatcagttagatgagagaatccctgctaatatgctgtttctgcttaattaaaaaacttgggggcctcagcagcttccaatatataaatgtctgagggctatgagggaccagtcatctttgtattgggagttttctgtttagtttctttctattggaaaggagtcaatgtgtcttaaatggagaaagtttatgacaccagtccacttagtaaacatttcattactgtagatcaacacgtttcctagtgtaaactaaacagaaaagtatagcat

SEQ ID NO: 127670 - DNA, 1708 bp, Homo Sapiens
tttttttcctgtgcacaggtcccatttattgtagaaaataataataattacagtgatgaatagctcttcttaaattacaaaacagaaaccacaaagaaggaagaggaaaaaccccaggacttccaagggtgaagctgtcccctcctccctgccaccctcccaggctcattagtgtccttggaaggggcagaggactcagaggggatcagtctccaggggccctgggctgaagcgggtgaggcagagagtcctgaggccacagagctgggcaacctgagccgcctctctggccccctcccccaccactgcccaaacctgtttacagcaccttcgcccctcccctctaaacccgtccatccactctgcacttcccaggcaggtgggtgggcaaggcctcagccatactcctgggcgcgggtttcggtgagcaaggcacagtcccagaggtgatatcaaggcctacccgcaacagaggagatgcaggcagacagagtggggaaaatgtaaatggggacagtggccaacaccgatgcaggcagatcccaaagtcagggttaagccatcctggccagcagaagccagctccccactccaccaccacaccctgtcacttccgtccctccccaatatccagaggagggtggactctgttcttgctagcaggaggcggccttgggaagttgtccgagtgggccagagaggctgaaggctgctgccttcctgcctggctcagtctctgcccagtccccagtccccagcagccagtggcccgtggcagggccctcctggggtcacagcctgcgctgagctcagtccagggaagaacaaagcagagaggaacagagtggagccgtggcaccttacacgtagttgctggcagcagcagagcgggcagcagaatacttggcggagtaaggcttgtctgtgcggggtggacagttgcagcaaagcagccccccgccaaggagcagcaggccggaggcggcccagccgacgtagagcgaggcacccatctcccgcttctgcccggaggccaccagcggattgtagaagtcttggatgatgttgtgggccgtccaggacaccggcactatcaccataaggccggccaacaggaacaccacgcccgccacgatcatggtcttggccttggcgctttcatcctccaggcagttggtacacttgccccccaccacggacagcagcacgcccagagcagccacgatgatgctgatgatgacgagggcgcgggccgcctgcaggtcctgcggcagtgccagcagcgagtcgtacaccttgcactgcatctggccggtgctctgcaccacgcagttcatccataggccctcccagatggtctgcgaggtgacaatgttgctgccgatgaaggccgtcacgcgccacatgggcagcgcgcagcacagcatgacggccagccagcccaggacggccagcgcgatgcccattacctgtagccccatggaggccattgttcagcgtccgcgggagttgaggacctggaaggctgaggggatccggctgtgggggccgtaggattccaagcgctggggacggacttaacgttcgcagagtgcacctttgcaccgtgagtcaggagataaagccagtcctgatgcgcaagccagcaagtgtgagcagaccagttccttccagccgaccctccgtgccgaattcgaaacccagcctc

SEQ ID NO: 127671 - DNA, 1093 bp, Homo Sapiens
  misc_feature (117)..(117): n is a, c, g, or t
gaaggccggcccttgggaaagttgtccgaattgggcccagaagagggttgaagggttggttcctttcctgccctggggctcagtctctgccccagttcccccagtcccccagccagnccagtggcccgtgccagggccctccctggggtccccagcctgcgctgagctcagtccagggaagaacaaagcagagaggaacagagtggagcccgtggcaccttacacgtagttgctggcagcagcagagcgggcagcagaatacttggcggagtaaggcttgtctgtgcggggtggacagttgcagcaaagcagccccccgccaaggagcagcaggccggaggcggcccagccgacgtagagcgaggcacccatctcccgcttctgcccggaggccaccagcggattgtagaagtcttggatgatgttgtgggccgtccaggacaccggcactatcaccataaggccggccaacaggaacaccacgcccgccacgatcatggtcttggccttggcgctttcatcctccaggcagttggtacacttgccccccaccacggacagcagcacgcccagagcagccacgatgatgctgatgatgacgagggcgcgggccgcctgcaggtcctgcggcagtgccagcagcgagtcgtacaccttgcactgcatctggccggtgctctgcaccacgcagttcatccataggccctcccagatggtctgcgaggtgacaatgttgctgccgatgaaggccgtcacgcgccacatgggcagcgcgcagcacagcatgacggccagccagcccaggacggccagcgcgatgcccattacctgtagccccatggaggccattgttcagcgtccgcgggagttgaggacctggaaggctgaggggatccggctgtgggggccgtaggattccaagcgctggggacggacttaacgttcgcagagtgcacctttgcaccgtgagtcaggagataaagccagtcctgatgcgcaagccagcaagtgtgagcagaccagttccttccagccgacagcgtgggcggacgcgtgggtcgacgatatcccgggaattccggaccggtccagc

SEQ ID NO: 127672 - DNA, 1077 bp, Homo Sapiens
tcccgggggggtgggttttcccccccggagggtccaccggggccgcaatccccacactgtgggaaccccatcggggttctttggggggccctccggccggctccctgggctggccctcactccgtggtgtgtgtttgtgtgggtggtggggttctccccgggttgcctagcgtagtctgggtcgtagcctgtgcccgggctggttccgggccgttggagcgcgccggagtagacgaccttggtgcccgtgtacttcttctcgcgtgggggacacgagcagcagagcagcgcgccccccagcagctgcagcgcccggccgcccagcccacgtacaggcccgcgcccatctcgcgcttctgcgcctcgggcaccacggggttgtagaagtcccggataatggtgttggccgaccaggacaccggcacgagggtgagcagggcggcgagaaggaacagcacgcctgccacgatggtgatcttggccttggccgtgtcgtcctgcacgcagttggtgcactgggcgcccaccagcgccactagcagcccgaaggcggccagcaggatggccaccacgatgagggcgcgggccgcctgaaggtcctgtggcagtgccagcagcgagtcgtacaccttgcactgcatctggccggtgctctgcaccacgcagttcatccacaggccctcccagatgttctgcgacgtgatgatgttgctgccgatgaaggccgacacgcgccacatgggcaacgcgcagcacacgatggtgcccagccagcccagcacggccagcgcggtgcccgtgatctccaggcccatggacatggctgccgcggcaaggcccgctccaccgggtggctccgggtgcggggagacgaggcgccggggccgctgggcctggcgggagctgcggcgccccgacggacggacggacggacggactgactcaccgacggcgcgcgctaacggctcggctccatacgctctcgccgcggctgcgcctgcacctgcctgtggccctcgtgccgaattcgccacccaggcctcgctaccttagaaccgttatagttactgccccagt

SEQ ID NO: 127673 - DNA, 1290 bp, Homo Sapiens
tttctcttgacgttgatataaagggcttttattttctttacagttttctgtattttccaaatttctacataaacatacacataaaagtcataaaaatgtcccttaaaatgacactccctccaatgcagggagtgaggaggtgtgtgctgggacgccagcagggtggctgctggcagctaatccctgtgcaggtgcagccactgctacactccagcgtctgaggcccctctgcactggcagtgttagaatggctgtctgagagccaaggctgttcacccgagcagagtcatggagctggtacaggcaggagccaaggtaagcactaggctggtgtgtgccctccagggggcaccctccttgaagcaggccctccaaggtactcgccccctgaggcagccgataacagccggaagccttcccctggggggacctggccatttgtggagcagggaaaggctccactgccagtggaaatgtgaggccagcagcccaggatgtctgcttcccagagtccgcgtgggtcagtgcttgggccagacaggggctgcctgcggtggcaggacagtggcgggctgcctgggctggagtgtggggtgtgtcctcagctgcccaccagtgttcccatcccagtctctggtgggaggcccttgggcagggccgacccagccgggtcacctcaggagtgtctcagctccacctcggagccgaactggggcccgtgggagtgccggtggaggctgcggtggcggatgctgaagagccgctggctgaggcccagggtggctaccagcagggcgatgcccaggaagagcagcagccactggcccacgcgggcctgctgcgcatccaggtccaggcccaggaagctgacgcggccgctgtctgggaggggcccttctgagcgagcggagttcggcgtccagttgtactgcggccagcccagcttctccccatgcagctcgttctccgtgcggagccagtccagcagcggcttgaagtagctcaacatggccgaggcgctcatgttgggctggcccgtgatcagctgcatggcttccggccacggcctactgaagcccagcttcatggcggtcgccaggcgctgcccggcctccttggactggtagatgtcacacttgtgcagggggcccgtgtggccagctgcctggcacagtgcctcgtggaactggaactggatgatgaagctgacgaagtacctgatgtaaggcacgctagaaggaatgtggaacttggcccctgggtcaaagtcaccttgagtcctgggcactg

SEQ ID NO: 127674 - DNA, 1246 bp, Homo Sapiens
gagcccgtaccgggcgcagtgcgagcggagtcggcgtccagttgtactgcggccagcccagcttctccccatgcagctcgttctccgtgcggagccagtccagcagcggcttgaagtagctcaacatggccgaggcgctcatgttgggctggcccgtgatcagctgcatggcttccggccacggcctactgaagcccagcttcatggcggtcgccaggcgctgcccggcctccttggactggtagatgtcacacttgtgcagggggcccgtgtggccagctgcctggcacagtgcctcgtggaactggaactggatgatgaagctgacgaagtacctgatgtaaggcacgctagaaggaatgtggaacttggcccctgggtcaaagtcaccttgagtcctgggcactggggggcagaggccctggtacttcagcctgaggctccaccactcctggttatagttctccttggtgatgcttccatcaaataccctccagcgccactgatcgacgaggtagctgaaggggataaaggcgatcttgtcaagggccatcttcatcagaaagttgatgtcatgctcgttgtagaagtcccaggccgaggcgtggcagaccacctcccgcccgtcggttggcttctccagcatcgacttgttccagaactcaggaggcacgggcagcagccccagggaggtgaagaaatcatcagcctccttaaacatcctcctgggcgtccagccctgctttagcatagcctctgtggtgtccatcgagggggctgaagggaagggcaccaccaagtcatagatgttggaccaggtctgcgcccacatgttccccagcaggtgagcaggaatgggcccctccaggttgatgtgctgggccccgtagtgacggtgcagggcccggcgcacgtaggcatgcaggttgaggtagagtggctgcagctcctggaagagccgctccaggtcttgctccagggatggtgtctcgtacatagacctccacgagtcccctgcatctacatagccattgagccgggcagcctggttgatgagttccacgtatttcgggtaaaactggaggatggctctccccgccttgtctcgccagccctcccatgcccataacaggtcttcatatttccgggatgtggccatcacattcgtcagatctggctcgagctgcaggcagctgccattcgggtggcacacagtggccacgctgtaggtggtttccatatccaa

SEQ ID NO: 127675 - DNA, 722 bp, Homo Sapiens
ccggggacctcagtttctcctttattgctcctgtacgaacccctcccctcccccctgtaaacacagtgctgcgagatcgctggcagagaaggcttcctccagcggctgggtggtgaaggaccctggctcttctctcggggcgacccctcagtgctcggcagtcatactggggtgcgagagaggtgggcagcagctcagcctccccccgctggggagcgaaagtttcttggtctcagcttcatttccgtgaagggcaccgagaactcgaagcccttccagtggtaccagctcactccctgatggtccactgtgctcccgtagagcccgttgaggttggcgtagtggcagttcctgtaccaccaggcccctcggtaggagacagcgcaggagatgagcaagctgttggggtcccgatcacgggcagagaagacactgccgctgtggtagctcatggagtcccctgcggtgccgtggtagccctccaagtggaggcggtagtactccgcagccgagtctacgtggaaggagtcgtactgggcgaacacagcctcgtccccagcccgcaggtccacgcgcatggagtagtcacctgcctgtgtcaggctgtgcagggcctcattgcccagccagaactctccagagatgttccctaaaccatgggcatagtcctcccagtccctccagaagtctgtctcgtccagccatgactacataccctcctt

SEQ ID NO: 127676 - DNA, 594 bp, Homo Sapiens
ccttccttcctttaatgtctttcattcctggcaggatgacaggaggtggtcctgggggcccagggtcccctcggctgcctttacaacctggttcaccagccagacccttcagaccgggtattccgaaaaatccagcctcgcctttgctccctggaaacccgggtctccctttgagtccaggcatgccttggaaaccatccatcccaggtgagcctctatctccttttagcccgggggtcccaggcattccatcaattcctttaaatccagggcttcctggatggccttgctcccctgtgaagccagcatctcctctgtcaccagagagacctttcatgcccacagggccaggagcgcctgtgtccccagggtcccctctatcaccaggcagaccttcacggcctgggattcctggcagccccaagggcccctcttggccaggagctcctgggaatccatgcagtcctggaggcccatacaggcctggctggccggaaggtcctgggaggcctggctggcccttcagccctggcatcccaggcatcccttggcttcctctgaatccaggggggcctctgtctccgggaaggcttt

SEQ ID NO: 127677 - DNA, 493 bp, Homo Sapiens
ttttgaggttttagtacatcatagcactttattttatgaaaacatgtagcagattttccacaaaaatgcttatttttaatccaaaagtatattgcttcataatggtattcagtgcacagcagagtaaaagaagttaattcatgatgtactggttaattttgcatggcttcttaaggccagcaaaatgctggcagttttctttatctttgtgaagaacaggcccttcctgtttggggaagttggcttttatgtcagctcttggccagtggtcacttccaagcctggtgtctccggccctgtagtctgtagtgccagactgtgctggcctggagagtgctggggcaggtggaggccagggaatggtcccatacagttatctcccctgccctggttacagacagcttcgagaaccagaggagaagagcatagggtcatggagcaggtgggctgaagccagggccacagggagcaatccgtgaccccccaaggtggg

SEQ ID NO: 127678 - DNA, 1183 bp, Homo Sapiens
  misc_feature (117)..(126): n is a, c, g, or t
gttttaaagatattttatttttcaataccagtaatgactgaaaattaaagaattaaagcaggaagcaaaacaaaaacaaacaagaaacccaaaacttgcaacctaaactctccgggnnnnnnnnnnttgctataaatgttaaaagacttaaagagaacattgacaatgcagccctgatgtacctaatcatacttcaaactgctggatgttttaagctgagaatctccccagtgcctttctagtgctctaaaatcatctcccaaacagatgagaaatgaaacaaacaggtctcccttcttgagtacataatttttataaattgcgtcggacccacagtgaatgtattttagagagtttcaccaaaactatcaaagatcaaatggcagcaaaagatcagggaaagaaggtagaaaaactatgcagtcacagagctaacccgcaagctgcccttagtcctatacacctgaaatcaaatccatagccaatggtgaggaagaccacatcagaggttagctgcatgacagcacagctgggtcctatctccctgccaggggtctcaactgtaactcgcgctccaactgctctgcagtcagggtgccctggatggcttcacagcctggattgaacacagagtaggcgctcttctctccctctttcttctcttcagggcctcgtgtcccgacgtacatccaatagaacaaggacaggacaaaatatgccaggccaaattccagttccacaaacagtcccagcaggaccaaccagagaagaaccttcaagaaggtgatattggtcaggaaagactggtcccagcacgacggcagaggaatggctgtgttccatggtgtctctgatgtgctgccctggggctgagccgcttcctgaactaggccgggctgggcccgggcactcgcgggcctaggtttccataccaggaaccgctttagccagcctggggctgcctttagagtcgctgctgcttccgccttctctcctggggtttgtgcgccctgactggcagcagggggttgggccgccagacccgcccgtttccgcgccgcccgaaactcagctaaccgctgttccatggcgcgcgcctcgcgtccgttggccgataagggagcgcgcgcccgcaggccgcacagccctcgtgcggaattcgccacccaggcccgctcctaga

SEQ ID NO: 127679 - DNA, 659 bp, Homo Sapiens
  misc_feature (594)..(594): n is a, c, g, or t
  misc_feature (645)..(645): n is a, c, g, or t
cgctttgcaaggttttgtttgtttgacagcaggaatgggctggggagggtcccccgcaagctggaccccttgttccgttcggcccgtgaggagaacggaactggcggccaaggggaaccggcggaacgagatcagctggagcgcactgatttcgaggctttgtgttcatttcgccctaggccccttctcgatgggctttccaatgtcctttccccggagcttgaggcctgaaatgagccacagccactggccactgcagcaccagctccctcctccccccaacgctgcccctcttcaacatcttcccagggaaggggggccacgccgctcccgtgcctcactgggctctcagcacacgagcactcctggttcccacatctaattttgaagaggatgagtctgatcaccttagacagcagagcatgaacacccctctccggaagaaccggagccggggtcctctgtggaactggcttccggccccatgctgacagggcccggacccgctgtgctcaggctcagagaaccatcgccaacagcacaggctgacgggaactggcaaggggaagggactcggactccacttgctcttangggtttcctgaggcctgcagagacccaccatccctcagtctgtactacctnggagaagcaaagct

SEQ ID NO: 127680 - DNA, 692 bp, Homo Sapiens
ttttttgcgctttgcaaggttttgtttgtttgacagcaggaatgggctggggagggtcccccgcaagctggaccccttgttccgttcggcccgtgaggagaacggaactggcggccaaggggaaccggcggaacgagatcagctggagcgcactgatttcgaggctttgtgttcatttcgccctaggccccttctcgatgggctttccaatgtcctttccccggagcttgaggccaatggcccgctcgattttgccaagcacctggttattgggtatggcccgtccgctctcatagtccgcgatcacctgtggcttctcattgattttcgtggccaggtccttctgcgtaagccccttgctctgccgaccttgctggatcaccttgcccacctccagggtcaccctgtcatggtgcagctcctctgtctcccggtccagcttggccgtgttcttggtaatagaatgttgtttgttctggccagcagcccatttcttggaagtctccacatcttctcctcgtctctgtgccgctaagatagcctgcttggatttggcctgggcggccgtagggcccttcttgcgcagcaccgtcaccgtgtcccagtcgctctcggccatggcgggcgaagacgagcgtccgtccggccggacgcgtggtcgacgatatcccgggaatccggaccggtccagc

SEQ ID NO: 127681 - DNA, 1383 bp, Homo Sapiens
  misc_feature (73)..(134): n is a, c, g, or t
  misc_feature (456)..(519): n is a, c, g, or t
gcttctcgcgtgctgtctcttcgctcgtgctcctctttttctgtctccttgtcttttcttgctcgttccctgnnnnnnnnnnnnnnnnnnnnnnnnnnnnnnnnnnnnnnnnnnnnnnnnnnnnnnnnnnnnnngcttgtcctgcttctcgctatgcgtgtcgtctgctcgtcctgctctcgttgtgctgctcctgtcgtgctggctcttgtctccgtgtcgcttccttgcgtccgctcttgtcgtcgttgtgttttctgcgttctctctttctgcttcttcttctgtgtcgtgatgtctagctcttattattgtccggtcagtatgttctccctattgtggggcgccttttcttcgtgttcacaatcgtgcgtcttcgcatctttgttgcggcctgctccttgctcttgcttcttttgctcgtctagagtgatttcttctgccggctctgctttnnnnnnnnnnnnnnnnnnnnnnnnnnnnnnnnnnnnnnnnnnnnnnnnnnnnnnnnnnnnnnnncaaagttttgtctgttggacaccaggaattggctggggaggttccccctccaagctggaccccctggttccgttcggccccgtgaggagaacggaactggcgcccaagggaaccgcggaacgagatcagctggagcgcactgatttcgaggctttgtgttcatttcgccctaggccccttctcgatgggcttttccaatgtcctttccccggagcttgaggcctgaaatgagccacagccactggccactgcagcaccagctccctcctccccccaacgctgcccctcttcaacatcttcccagggaaggggggccacgccgctcccgtgcctcactgggctctcagcacacgagcactcctggttcccacatcaatggcccgctcgattttgccaagcacctggttattgggtatggcccgtccgctctcatagtccgcgatcacctgtggcttctcattgattttcgtggccaggtccttctgcgtaagccccttgctctgccgaccttgctggatcaccttgcccacctccagggtcaccctgtcatggtgcagctcctctgtctcccggtccagcttggccgtgttcttggtaatagaatgttgtttgttctggccagcagcccatttcttggaagtctccacatcttctcctcgtctctgtgccgctaagatagcctgcttggatttggcctgggcggccgtagggcccttcttgcgcagcaccgtcaccgtgtcccagtcgctctcggccatggcgggcgaagacgagcgtccgtccggcggctcagcggcagctgctagagcctcgtgccgatttaaaccccaggcctcgtacctagccgtattcctcctcccccca

SEQ ID NO: 127682 - DNA, 776 bp, Homo Sapiens
  misc_feature (31)..(31): n is a, c, g, or t
  misc_feature (37)..(37): n is a, c, g, or t
gaccatgttgtaatttctttggggggtttgntggggngtattcaagcatgttcttttattaagcgtaggatgcgaggcacagcaggaggtttaagtacaatgtgaaagcaagagaactgagactgtgattgacagacaaagggattaactaacgttttattctctgccccccaaaatatcctgtgtattcttaagtatatacgcttcccttcctgcctttcaaggtatctaaggaatgatttgaaaaatttgttataatctctaaagaattttttgtatagcattagcaaaggagtctatgacaagtactttgccacctggtagttctgcgtattctactccctctgggtgtcactgtcatcctcactggctgggacaaggttctgagatttgtctccccagcagttgctaagctggctcagtcttggtcaggatgaatgaaacaattatctcctggatcaatgcagcaaggagcagtgaacacttgctttttcttccctaagtaggagaaggccagcccctggctgcagtggtggccgtggtggtagctggatgggacgaggggacctcaggctattctataacagtaaaagaaagagaattgctggtgcttctccagggagatacggaacctacacgccaaccaggtttttactttcaaacaggccaccaccagaaagcaaagagacctatgcctagccccgccccagaaaagtgatactttaccccaaggaattccctgcttcccattgggacttaagattttcactctgtcc

SEQ ID NO: 127683 - DNA, 1239 bp, Homo Sapiens
  misc_feature (442)..(502): n is a, c, g, or t
  misc_feature (600)..(739): n is a, c, g, or t
tttcagagcaaacagcatgagctttatttctgcactgattcccattgccctggcccctagtcccacagggaggatgtggaacagcccggtagatgccgtgctcatagtacgtttcagtcatggctgaggagccccaagcttacaaaccccaacctttatcaagcaaatctgccaaaccgttgtcctggaaggaggcactgtctttattatactggaaagaaagccatcctgtcctctgctcctgagggagacactatctgtaccttgcaagtttctttgctagacaacgttccttggaaagatggcctgaaaccaaagctgccagcacttctgttcccaagacatgtgaaaacacaagagacccgaggatcactgtgtccaaccaatgacagtttagctggcttcaagctgctcctctgggttgtggaatattacacagctnnnnnnnnnnnnnnnnnnnnnnnnnnnnnnnnnnnnnnnnnnnnnnnnnnnnnnnnnnnnnctttagtgtgagacaggtctggtgttcagcccatgctctgcccctgtgaaagagctctgcaaccctgggcaagttcttcaacagctctacacctcaannnnnnnnnnnnnnnnnnnnnnnnnnnnnnnnnnnnnnnnnnnnnnnnnnnnnnnnnnnnnnnnnnnnnnnnnnnnnnnnnnnnnnnnnnnnnnnnnnnnnnnnnnnnnnnnnnnnnnnnnnnnnnnnnnnnnnnnnnnnatgcgcccgttttgtgaatgtaggggttatcaacaaacattgcagccataccacatgtatagaccctgcccgttgaagaatgagtcaagaaattgggtgggtgttctgtcatcgatcaactcttgcttatcacccctctgcagtgctgcaagaggaatctcatatacgtgatggaagtgatttgtgctttcagctgagagtagcactgtatccattccaaagtttcagttacgcctcggtccctgatgatctgcaggaatttctccttctctctctgttgctgtttgaacctagacatccctgtggcatttcatctctcggctgtttcttccctaagactcagtctttcatccattcttctaaaatgcgtgacactgcttcactcgcccttgccatgttcctgcaggccaagatcacatgtgcaccatggagggcaaaagacttggcggtttcgaaccgattctcacgagctgaactgctcccctcctcgtgccgaattc

SEQ ID NO: 127684 - DNA, 806 bp, Homo Sapiens
tacccacaaaagaagatgtaattgatgagactattcaagatcttttattttttccttcttttgctagtggaaaatttttattctgcacttttctggcggagggtggtattttgttttccattcttctaaaatgcgtgacactgcttcactcgcccttgccatgttcctgcaggccaagatcacatgtgcaccatggagggcaaaagacttggcggtttcgaaccctattcctgaattagctccagtgaccacaaccactttgccagtgaaatcccggccctggagaatttccatggcagtggtgctgccgtcgtatctttgccgggtggttggcttggtcggattatcatccacagtaaacgccagtcttgggtccaagtaggtggttcttttatttatatggtcaacaaaaaacacttgtccgttctcatcagtttcttgttcccatccgtatggcaaatctcctgccactcgttttctttttccagtttttggatgttcccactgagtcttctcctcggtgtgattggcgtagtaaacccagccgtccttggtggttctctcctcccagcccggaggcagctcgtcctcactgtccgtgtcgtccagccccgcgtagcgcagcgctgccatggctaactgtggaggcacctggcccccctatcgcccgctgccgggtccactcgctcaggaactcactcccgctccaaacgagacccgcgcgcgtcggggcccgaccgctcacgcccctcgtgccgaattcgccacccaggcctcgctaccttagaccgttatagtactgccgt

SEQ ID NO: 127685 - DNA, 571 bp, Homo Sapiens
tttcgctttttaaaacatctttattttttggcggggatgaggccgctttgccctcgccgcgccgcgcagtgctgcatcctgaacagcagagggcgcgccgggaagccaccaggtgacccccgctggacccgaggcccaccaagggggccggcccctactgggaaccctggacccttttccctgaagctccttaacagttactttcactttgcaccgcacgcgctgcgctggagtgcgcgtcctccccgcgcaggtggcgtccgtgggctgtgcagggtcccaggtgcgtccgcggccccactgcggcccccttacttggcgtagtaaacccagccgtccttggtggttctctcctcccagcccggaggcagctcgtcctcactgtccgtgtcggtccagccccgcgtagcgcagcgctgccatggctgactgtggaggcacctggcccccctatcgcccgctgccgggtccactcgctcaggaactcactcccgctccaacgagacccgcgcgcgtcggggcccgaccgctcacgcctgcctcgtgccgattcacccccagccttctgcca

SEQ ID NO: 127686 - DNA, 924 bp, Homo Sapiens
tgtactaagatttgcagtctgtgtgaatctctattcctgactgctgcggatcttgttgaaggacatttgaaagggcccagcctggcacttgcgtgagggacacaacacaggtcgggtgttgtgcccatccgctctgagctccacttagccggactggctgccaagccgttcttggatcagcctctcgctgagcgcccacagggtccgggccgtctcttcgctctgagcttctggtgagggcatgcagcggcagcagttgttgaagtacatccctcccagaccctccagttctgggacagcagcacagtacacggtggtggcagctccctgttgccattcttctaaaatgcgtgacactgcttcactcgcccttgccatgttcctgcaggccaagatcacatgtgcaccatggagggcaaaaggacttggcggtttcgaaccctattcctgaattagctccagtgaccacaaccactttgccagtgaaatcccggccctggagaatttccatggcagtggtgctgccgtcgtatctttgccgggtggttggcttggtcggattatcatccacagtaaacgccagtcttgggtccaagtaggtggttcttttatttatatggtcaacaaaaaacacttgtccgttctcatcagtttcttgttcccatccgtatggcaaatctcctgccactcgttttctttttccagtttttggatgttcccactgagtcttctcctcggtgtgattggcgtagtaaacccagccgtccttggtggttctctcctcccagcccggaggcagctcgtcctcactgtccgtgtcgtccagccccgcgtagcgcagcgctgccatggctaactgcggcctcgtgccgaattcgccacccaggcctcgctaccttagaaccgttatagttactgccgtcc

SEQ ID NO: 127687 - DNA, 1352 bp, Homo Sapiens
  misc_feature (197)..(206): n is a, c, g, or t
  misc_feature (223)..(321): n is a, c, g, or t
  misc_feature (332)..(408): n is a, c, g, or t
  misc_feature (426)..(439): n is a, c, g, or t
  misc_feature (447)..(583): n is a, c, g, or t
ttggaagcctaattactctatagtgagtcagtgattcacgggtcatttagcaagctttccgtcccgggggaaaattttttccccagggccaaggggggatacccccgggggaattagggttaccaccacccggttggagggggtcccatgggggcgggaaggttaaaaaattccccccactttttaaaaaatgcccnnnnnnnnnnaaattttaaaagaagannnnnnnnnnnnnnnnnnnnnnnnnnnnnnnnnnnnnnnnnnnnnnnnnnnnnnnnnnnnnnnnnnnnnnnnnnnnnnnnnnnnnnnnnnnnnnnnnnnaatccaacccnnnnnnnnnnnnnnnnnnnnnnnnnnnnnnnnnnnnnnnnnnnnnnnnnnnnnnnnnnnnnnnnnnnnnnnnnnnnngttttaaaaaattttttnnnnnnnnnnnnnncccccaannnnnnnnnnnnnnnnnnnnnnnnnnnnnnnnnnnnnnnnnnnnnnnnnnnnnnnnnnnnnnnnnnnnnnnnnnnnnnnnnnnnnnnnnnnnnnnnnnnnnnnnnnnnnnnnnnnnnnnnnnnnnnnnnnnnnnnnngtaagtccaatgttttatttcctacaaagttaactaacattttttctctactacatagcactcatacaaatgatttctctttcttacatgcatacacacattctgtttcactaattgttgaacacaactaatattttgtcagatttattattcaagaattacatcattacagtgaattataatgtttctgaaaacagtaagcagaaaagatgattagtaaatgttagcataaaatgaaatgaaatgtgaaagtggctgatatctgggtgcctaaggaccttgtctcacagagttctcaaagtcagcagccagtctcagggcccgctcatagtactccagggcttcattcatatttccttccaatttgtagacgaacccaaggaggctcaagctttccagatctaatgcctttctccgaagtttccttaaaaccaatttcttcaaagaattgatacttttatcccttgttaatgatgcctgttctatttttatagcttttaaataatggataattgcattgacgtcagatttcttttgaaattcctgaaaccgaccatagtggaaatgtatgtcttgcattgtttcttctaccactggtttcatgcataacaatttttgaaaattctcttcagcttttctgtgattgcctgcttctatatacattcttgccaggtctagatgagccaccctcaaatgtgggctttttttccactgcagattcaaaatgaaatatggctgatcttatcattttgtctagcttttctctgtt

SEQ ID NO: 127688 - DNA, 982 bp, Homo Sapiens
gtagtataaacgccagctacatccagtgggagctgcttgcagaaaccacgactgtaattagtatttacctaaatgggttaataatatcctaccagcaacaggtgggaatacacaaataaccaaaacacaagttatcctttcaaataaaacgctttggggaaaaagaacatcttttactaacagaaatttcttagcctctggaaggccagttgattcggtaacatatgccaggagacttcagcaatatcctgctccattgtagaaaacagcaatctgatccttttctctcctcaatcattaacgagattatgcatttggggtgtgataatcctccagggacaagtattctcaaatcatacgtttcagtttcttcttaaggtgcttaacaaagtctcgtctcatacatcttgctgcttccttgatgatggattcaaaaaatcgcttcctgactgcagtaggtccttgcactccttcaagcatttcgaagattttttcatatttttgtccaacgcatcggagttccttcactaatttacgttttatatcagcattaatttctcgttggcttttgggagaggaggctgtttctctgcattctaggtcatctccagagaaactgctggtaacgtttcctcccacaggtgcattgctaccaggtttctgcatcatcctatctttgctgaaaccagtgaagtcatcaatctgagaatccaattggctgggtggaatagcatgtcctgtcataagcttcttttctttggacatggcagagcctgcaataaggctgtctcctgctccttgtttccttgccaacagggccatcctctgccttttctgatacgaaggactgtcacattccctgggacgtttaaacacagtttcaggatctacagccaccttctctgttttatcggtcattgtttcagtcctgaagtcctgaccttgctggaggagagacggcggcacctcacaaaatggcccc

SEQ ID NO: 127689 - DNA, 1253 bp, Homo Sapiens
  misc_feature (18)..(18): n is a, c, g, or t
acagttttttgcccgcgntctccgcgccgcggcgaaataaaaccaagccaatggggaaaaattttatttaattttatgcttcatatcatgtacattaagtactacataaacttgtctttaggctatcaatatttaacttgggcagtacttcatcttgatttatttggagaaatacagcttaggcatctgcttacctgcttaggcatcaagaggtgccaaattagaaaatagggcattaacaatcaaaatttttaagctgacccacatacttgctactggtttcgcttatgtttaagcatttaaagttggcaaaacatgttatcaatgtattatgcaagagtttacatcttttgcataagtggtccattgggttgcacctaccccttgaccaaacaaaaacaaaacatcactggcaccatactcgaaactacctgtatcctaggttataagattgtgaaagccaacaatctataaggttggagggactctagttaatctttgggcttagaggaggaaaaaaagatagtcccatactgcatttcacatctcttaaaaatagttttagcagcttaaacctttttagttataaaacttattacactagggtttactttgaaatatagtttacaaccaaatcaagtataacatacatacactggcactttagcacaagggcaaactttaaaaacaagttattttggacctttaaaattaggccatattataaaaaacagtccacggtcttacattcagcaaattcatactaaaatactccatttttgtaagataaaggccaagaaaactttacatatgctacaagtttattacagatatttacatggctctttctcccctaggtacttaaaattttcacattatccaactccccaaagcaagctttgcaggaatgatgaggccagagcactattagaatagcttgtgcagtgctgtaatacaaaaatgtattttgaaagctattgagtgaccattaaatactgtttctataaaaaatggttttggtgtatttgttgacagacacttaatccactacatttaataaacagggccattggggtgtactatgtctcattctaatgagctccaaatgccctttccacccactgtacaattcactaaaatgcaattattacgaaaaattcacattttctttcagcagtgcatcaggttagcatattactggtttgggtgtttctaatatactaaaccttcagatgtttacctaattctgaatc

SEQ ID NO: 127690 - DNA, 740 bp, Homo Sapiens
tgacgttttgaacacagatcactttattggcatggctttgttttaagaaaaggaaaagtgacaaagccaagagacagactctgctaacagatgcctgggggtggctggacatttttgcctcatgctgtgcaaagagggggatcctggcccacacatcctgctgattccttgggacaaggttgtctgcctgggcctcactgcaccttcttgaatacttgcttgcagaccacaccttccactctcatctccaggtgcagctcatcaccctcgatccactgggtccagccacgcccctccttctcacccttctgcacacactggagcttgtctccgtcccagctcactgttgtcatgcacttgcggtcatctatgcctgtcagatcctcctcaaactccttcccaacctggaagtccatgatgtagttcctaaaagtgctcagcgtgcggatgatcatatggtcaccgtcctgcacgatctctttgtctggcttcagcaagttggcgattttgcgcaaggccacattgacgtcgagggcgcgcaggtactcctcgaaattctcgttgaccaacatcttccagtacccagtgaagtcgactggcatttcggggagtgactggagccagttggccacaagcgggcgggacggctggagactgccgggacagcggctgccggtgctacgcgggtggtggcctcgtgccgaattcaacacccaggcctcgctacctagccgtaagtt

SEQ ID NO: 127691 - DNA, 943 bp, Homo Sapiens
  misc_feature (920)..(920): n is a, c, g, or t
caacttggacctccaagttttatttcttcaggccaaagaacacatttatggcccacagtgtcctataatggacataccatgttgcatattgtcttcatctcctagggctgccataaaaaagtgccacaaaccatatggctgacttacaaaacaaaatgcactgtctcacagttctggagactagaagtctgagatcaagttcttggcagggctggatccttctgagggctgtgaggaagaatctaatccacacttctctcctagcttctggtggtttgctggcaatctttggcatccctgggcttgtagaattctgccttcatcttcatatggcatatcccctgtgttatctctgtgcacaaatttcccttttttataaagacacaaatcatactggattagggggcccaccctattacagcatgacctcatcttaactaattacattaacaacaatctcatttccaaataaggtcatgttcttaggtactgggggttctgagttcagcatacgaattttttatttagggtaacatatatcccttttttcagtttttattgtgttaaaacacacataaaatttaccatcttaaccattttaagtgtacaattcagtggtattaaatacattgataatgttgtacaattatgcccacaacccatctgcaaaactctcttcatcttgtaaaactgaaatgatatttattaaaacctaacccctaccccctcctcccagcccctggcaaccaccattctaacttatgtctatgaagttgatattctaggcccctcatttaaatggaatcatgcagtatttgtttttgtgactggcttatttcacctagcataatgtactcaaggtgcatccatgtcacagcatatgtcagaattttcttccttttggaagctgaataatattncactgtatgtatgtatatgtcag

SEQ ID NO: 127692 - DNA, 859 bp, Homo Sapiens
gcacgagggctatattcattacttacctcaaagcatgctgcaagaaaattagttagttacttgtcatgctttgaaatctctggatgaaaggtgctttggaagcacaaaccattatcacttgtctcatagggattgtccccttgaacatccagcagtgttattttacagaagacaaattaactgaaggcttttcttttattacatctaaagagctctacataaacaggtaacattcaataggtaaacaatttttttccaatgcatgtaataaatattttcacttggtacttttatacaaactgacattgtctactatacatttttaaaagccattttactggtttggcatgcggtatggaaattctaagagagaaagttttaaggcaatgaatcacagatttaagttcatggaatttatggtaactttatctgtttatgtacattttcccctttgttaaacaattaacagcagcacactctgggaccaccagctattttccctctctttctgaaatctaagctttgtatttaattaaaaaacagaattcaacatctattgataaaacaaaattcttactaaaataatttcaaatgtgctttaaaaagtcctgaagatcttgaaagttttatgtgtttaaaattgaaattgtctaaaaaaatgctctttccacattaatttagttaggatatattttcactccatttcagacacttgactcaaaggaaaatctgccaaagaatccgatttttcagagcttacgtgaatctttcctcagtaaagatacagaattgtgatcatgtctaaataattagtacagcaattttaatgctcaaaatagtcaaccaagtatggcatggt

SEQ ID NO: 127693 - DNA, 990 bp, Homo Sapiens
  misc_feature (627)..(627): n is a, c, g, or t
  misc_feature (652)..(652): n is a, c, g, or t
  misc_feature (692)..(692): n is a, c, g, or t
  misc_feature (719)..(719): n is a, c, g, or t
  misc_feature (816)..(816): n is a, c, g, or t
  misc_feature (834)..(834): n is a, c, g, or t
  misc_feature (854)..(854): n is a, c, g, or t
  misc_feature (877)..(877): n is a, c, g, or t
  misc_feature (906)..(906): n is a, c, g, or t
  misc_feature (910)..(910): n is a, c, g, or t
ttttttttgagagtccaaagccacacggtttattgaggggtggggccaagtgggctctggtggccagaatgggctatgtgtcacagtcctcggggacagcagctgtgatgatgagggagggctccaggacacctgggccggtgaagctctcctctgcacacagtctctggccggggagctgggaggccaggccgccctgggccagggactccacaatgacctccgccgagcccacctccagctctgcaggcggctgcagcgccaccaccaccatcttctcgtcctcgatgatcaggttgcggagcttgcgctgccgcgggttgtagttctctacccggtcgtggatctccatgtgcctccgcaggtgggcctgtcgggtaaacttgtagccacactcggtgcactcaaacttcctcacccccttggtgccgtctgacgtgcacacgcagttgctccacggctttgaaggtcttgccgcatatctggcaaaagtggggccggccctcctgatggcggctgggcacgtgcctcaggaggggccccttctcagtgaagcgctgttcacagaactcgcaactgaagggccttttccccggtgtgggtgcggttgtgcttgtccaggctggncttgggttcggaaggtcttgcacanaggtggcactggaagggttctcacccgtgtgtgtgcgcangtgcatgttgagattggcttttgggtnaggcgtggtgcagactcacatacgtgtggctctcaatcctgtgcttggcttgatgtgatctgcaggcattccggtcgaggccggtgccaactcctcnacacaacagttccacacngtcttggagctcatgcactncactctttcgagaaggagactgngacagtgggcagatgggctgggggtcatnattngtcattggtcgcagtcttctcgcatgatgttgagcagagaactgttggatccccctttgcacagtgacccagtctctttg

SEQ ID NO: 127694 - DNA, 1153 bp, Homo Sapiens
  misc_feature (354)..(354): n is a, c, g, or t
  misc_feature (361)..(361): n is a, c, g, or t
  misc_feature (365)..(367): n is a, c, g, or t
  misc_feature (371)..(444): n is a, c, g, or t
  misc_feature (660)..(668): n is a, c, g, or t
  misc_feature (1074)..(1083): n is a, c, g, or t
tttcccagttttggccgggaaaagctttaaagggaaatttccccccccgttttttccaaataaaagggccagggggcgggggcgtttatttttgaattttggggcctcctttgggaacccccggtgagtaagaccccccggtgaaggccccctaagaaatcccctttgggggtttttccaaaaacctcttgggtttccccccgggggctttttttatggggggggaaatccaaacccctttttctggccccgggttttccttgggaaccactttaggcccagtttcactttccccccggggccccgccgccaaacaaaaggttttagaaaatttttggggggccagggggcccncaagggntttnnngggnnnnnnnnnnnnnnnnnnnnnnnnnnnnnnnnnnnnnnnnnnnnnnnnnnnnnnnnnnnnnnnnnnnnnnnnnnatttgagaacatttttaataaataatgtgacaaaattacttttctgattattggattttcagtatgcaaaattatggctaaaaataaggggcttcttacatgaacataatgaaaacattaatcacatggattgttcccttagtactgcacgccttttctatggaactttttcaaattatctaaatgaacaagtttggttttggtgaacaccagccnnnnnnnnngtggttcagttttgtttggctttgttttccactggggtcagacctgatacttatctatctatgaataaatgtacatttttttcttcaaatagcaccaattataaaatcaatgatattcataaaatgacaaaaaaggatcatagaaatctactagtcagagggcatcatttgtcaattgaaagcaagtaatgcctctattagagattttaaggaaatcttgtaggtttcgacattggccacaacaaacttaaacctctttttttctttaagtccaggaaaagtaagaaccatttggttcatggcccacaataaagtatgcatgttacttcaccatctgtcattattcaaatattccaaatacaaacatagagcattaacaaaacaggttaaaaacgcttctcaacannnnnnnnnncaataagacaaaaaaggttaatagttacaatggtttacaaataaagtttagtgattgtgcttttaaaacc

SEQ ID NO: 127695 - DNA, 898 bp, Homo Sapiens
ttttagaatgaaataatcagtttaatatttatagacttgagaaagaacttgaattaaaattcagtctggagtctgaattagcaccatctgaatacagaaagaattctatgtacatgcacaaattagtttaattaacatatataggtaaaatatatttgtttgttttacttgatatacttgttttgacagactcttcctggggttacacttatttttattagttggctgggcatgatacaggttgaacgcccctcagttccagggccttggcaaaattaacctccagtggcttgcctgtgcctttggtgagcttcagggatctgatgcaacctcggaacggaatactggttgttaggccaaactgcttgaggtcatctgggaagcctccaacaaacacagggtcatttgtgtcagctgatgtagatgctgggtttgggctttgggcttccacctggttcccatcgactgtgagctcaatgcggtgtttgatcttgttggcagtgactttatgccattgtccatcacacaaatgccctggaaccccagcatcatagacagcagtgaatctgcccgcaccattgtccacatgaaacatcaacttttcatcaatcatttcaatacccattccatccattttttgactactgatccccagaagaactccagtcgttgtagttgtgcggaattcaaattctacaagaaggtccaatcccactttgaatccaccaactgctttggcaaaaccggttccgtcaaaatatgttcccctctgagcatttgcaaaacatgtcccaacatggaagctggaggtgggttgttccagatcggcaggggcctctgccatgtggagattcctgacgcagccatcaatgctataggtcactggaccaattcttcg

SEQ ID NO: 127696 - DNA, 809 bp, Homo Sapiens
ttttttttagaggagactgaaaaagataatttattccatcagaggcatcacaattacagattacagacatttgcaagtaaataatatgcagggttagagcgctgcgttttaacatttaacattcatgagtaaacagagatggccggtgggtaaatatcttgccaaggtggttcctggtattaagccttttgagtcttaagatgacaaatccctaggggtcaggtggttttcccgcacgaactcttgtcaatgagaaatccctcagccccttttgtcttgggtctcacagctccagaagtgagccgggccagaacgaagccatcctagagtccccaaggacagccctcccgtggaccccggctagggcccccagagtctcatcctcaggagtgcgccagctctgggcctgcgtgccggcggggtctgcagccacaggtcccgcgagtcccggacacttccaggacgtggtctcctggtgagacagctcctccgggtaccagtctcgactcctccgggcagcgacaacaaagtcgagtcccgccctccagcttcgcctgctgcgcgctcttgtcctctctcgggcgcgccaactctggggcacagctggctcctcctgggggcgatgcagcatcacagggctccggcccaccccgggccagggcgccgaccctccctgccggaccctctctagaaggccgcgggtctgggtctggctcatcccttaaagattccaagattgggcgcactctgagctccccaacacaaatgatgggatccctgcgcgtgcccccacgtcacagagtggtagg

SEQ ID NO: 127697 - DNA, 1330 bp, Homo Sapiens
  misc_feature (161)..(171): n is a, c, g, or t
  misc_feature (788)..(798): n is a, c, g, or t
agtttaagtaataaatgtttaatcaaagaattttacatattattaacagcattcatttggccaaacatctacacgtttgtagaatcctactgtatataaagtgggaatgtatcaagtatagactatgaaagtgcaaataacaagtcaaggttagattaacnnnnnnnnnnnacattataaaattaacttgtttacaaaataggctttgccaaacttcattactgaattgtaaagtcaatgactgtgttgtttttaaaatatgtaccaaggaaatacaaattggataatgatcatttttcatgctcaggagagaacagcacagaaataaaggatactgcacaaggtgcaaggaaaccggaacccattgtgtacactgtcttcacacagagcattctttctcaccttaactgcagctgtgcaagatgcctcagtgtgatgcaaagactctatattggaaaaattacaacttggtctaaaaacttattggtgttgatatttttaatccaaaataaatttataaaaaaatcctttaatggactatttcagtttaatatacagtaatacactgtagataaagttaatattccccccactaatttaatagggattgatatcaatgtttctgatcactggagaaataaaaactaatgtggacctttgatatccatggcataggaggattcccacagtttatcctaagaggatctggggaatattaaatattctaatacagtgtcttagcaatatgaattttaagtacacaggatatttccaaagcagggtttggnnnnnnnnnnngtaatcaaaacccataatcacatctcttgtggataacaatattaatataactttttacccagcccaggacttgcctgtacaaactcagaactgaaagtttggtatctgtagacttctggtaacaatctggcaaaacactaaatggagtgttgtacttatctattttgcttatgttatgctagttttgataatatttaagtaaaacagccattccaacagtttactctagttttaattacacactgtaccattgtatcctaattacaactaagaccagtattttcttcctagttatcagtgtcttactgtgaagttgatttttttcaacactaaacagtaatcacacagcaaatgagtattgcgcagtagaacaacacatgtcagcatttgctagttaggcaaacaactgattgaacatttagttgttatagttagtgtaaagcaggcccgacgcgtggcgacgcgtggtcgacattatcccgggattccggaccgtaccacctgctttttgtacacactggttctatatgca

SEQ ID NO: 127698 - DNA, 1041 bp, Homo Sapiens
  misc_feature (47)..(47): n is a, c, g, or t
  misc_feature (53)..(54): n is a, c, g, or t
  misc_feature (73)..(73): n is a, c, g, or t
  misc_feature (182)..(182): n is a, c, g, or t
  misc_feature (200)..(201): n is a, c, g, or t
  misc_feature (217)..(424): n is a, c, g, or t
  misc_feature (447)..(464): n is a, c, g, or t
ttttgattttcagggcgactttgaaaacccgcacgggcttacgtctngcttgnntgccttgctacatgtttcntgcgttccctgatcttgataccgtatccgctttgatgagtgtacgctcccgcaccgacgacgagcgcagcgatcagtagcgagaagccgagagcgccaatacgcaaacngcctgtcccgcgcgtgcnngatcataatgcagctnnnnnnnnnnnnnnnnnnnnnnnnnnnnnnnnnnnnnnnnnnnnnnnnnnnnnnnnnnnnnnnnnnnnnnnnnnnnnnnnnnnnnnnnnnnnnnnnnnnnnnnnnnnnnnnnnnnnnnnnnnnnnnnnnnnnnnnnnnnnnnnnnnnnnnnnnnnnnnnnnnnnnnnnnnnnnnnnnnnnnnnnnnnnnnnnnnnnnnnnnnnnnnnnaagaattcggcacggaggaggcnnnnnnnnnnnnnnnnnnaatatccatggcacacaactaggccaagaaaaataccacaaggtcaagtcgaaaacacgacatgttaaaacacttccttgaccctggagaacgaggatggtggtgaacagcccctcagcgacgtctgatcttggccagtagctgctgtgaccgagtcaccaagatgaccacagcaggacccttcacatgtggcctcaagctcggccaggtccagcagtcacgtcgtgaaggcagtgtgtgcctctcggccggcacaggaggggcccatcgagttcatggatgggatttcactgcatcccaggaaaaggctgggctgggcttcttgaggcaggccctggcagatgtaatgagcttggtgaggatgacacagtcctctaacaaccctgcctcagcgccccatcccccgcttccctgggagctttctcattctttcccttcagatgttatctttgggccacccggcactatttttggaatagggaatttgaaaataaaatacaaataaaccaaccttttgaactgtaaggtgtgtggcggtgggggaggggagtgtattttaaaaaaaatacaaggatga

SEQ ID NO: 127699 - DNA, 690 bp, Homo Sapiens
  misc_feature (651)..(651): n is a, c, g, or t
tttttttaatcaaactcttgggttttatttctgtaaaagctccagctctaccttcccctgaccccaagtctagggctaccggaaggtagagaagctctgggtggcagtgcaggaggcatagggcacaccccgggagcgaatctgtagggtatggaaggtgaggggtgggttggggcctgaggagcctgggttcagggactcagtgtgaggctccatgacagtcacagggactgcataggacagcacctggggccggtcgtcatggcgtctcagcgtgcccttgcccaggaggtgtaggatgcaggagaggacgtcagtgctgctgcatgcagaccccttaccaaggctgctgaccaaacccctgggaggacacgggcccttctgccaagcctccagcaccagacagacaagctggtcaatgtgcagcccctcatctccatgggccttgaggattcggacgatgaggcagttcagaagattccgtctcttctccaagttctggccgtcttcaccctcagcttgcaggtacgtctgaggtgggatgagccgcacaatgtcccatctcgacctgggttccttgctgccatctcgaatcttgaggacccctcctggtataccttttgctcgtgaaggtccagggggcctcttgangaggtgaggggccaatcgcctgattgagcatgtctgcgg

SEQ ID NO: 127700 - DNA, 481 bp, Homo Sapiens
  misc_feature (89)..(89): n is a, c, g, or t
tataatcaaactcttgggttttatttctgtaaaagctccagctctaccttcccctgaccccaaagtctagggctaccggaaggtagagnaagctctgggtggcagtgcaggaggcatagggcacaccccgggagcgaatctgtagggtatggaaggtgaggggtgggttggggcctgaggagcctgggttcagggactcagtgtgaggaacacatcaaagaaagggatgttgatgggccggtgggttcgtctgtggtcttcggatctggcccagcaccatctggatgcagcctcccaggatgttggtgatgagtttgcggtagaggtgggcatgcttctcacacttgaacaccatgtcccgcagctcctgagccagctccagctttcccaggtgcttttccagggccttgggagatagcgtctcttgctcccagctgattccctcgtgccgaattcttggcctcgaggcaaaattccctaa

SEQ ID NO: 127701 - DNA, 711 bp, Homo Sapiens
ttttttttgaggttgatcaaaaacctttattctggtcctcatcattcaggaagccacttatgcagaacactttcttcatctctgctctaagcagcagcagctgcatccaggcttgatatggaagacagacagaaatagtggaagaccttgcagagaagagctaattgatgagatctctgcttatcccggcataggtgaaggcagaacaggaagagtgtgtgtaagtgcaaagactccgttcttcaaagctgaggcctgtgcagaggggtgaactgaaggcttcagatgaaggctcacaaaactgccccgctcggcaatcaatctaaagtaccttccagaaaagcaaattcatccacagcttctattgcattatccaagtctctcctctgaagggttttcctttttccctgctgagcgcaacagtaggcatcttttgcaatggtctccacaaacagttccgcggctcgtgccagaatgaagatggcttcctgtcccgctagcgtcacgtcgggatctgccttcaccaaggccttcactcgcgccagaggcaacctcgagagacgagccccaggcacactcgttggggcctggggctgcgaggccgctgcctccccagcaggtacctcctcctctcggggcgtcccgcttcctgccgccgccgccgccgccatcccggccttgagcgtgctgcgcgcggccgccgactgtccc

SEQ ID NO: 127702 - DNA, 713 bp, Homo Sapiens
  misc_feature (658)..(658): n is a, c, g, or t
  misc_feature (703)..(703): n is a, c, g, or t
tgttgtcacctaatatttgcgttaatacaatgatgttatttttatttggatagtatttgtatgattggaaatgagtgttaatctttatatgtattttaccagtccttgactaacatgttttcaagacatcttaccaatccatttcattgaattaatgagtaaggagactctctagaaatggttggtttgtaaagcaaggacattatctggaagaatcatccagagtttactgtatgacgagcatttcttgatagcaaggttcattttggtgtcaatcgttacagtcagtccatttcagtgggaacaacgaatttctccacagggtcttatttttctgtttttcacttcaccaaatggggtagatattttttcagaatgcagttattagaaccttgggattttcttctgtctccattgagtctcttgtttttttcccagatctgaaccatttcactttctgcatctgctctaaggtttctggaagagtcattcccaaactttcagggaaaaaaagggtgaagattccaatcaggacagtcagactacccatgacgatgtagggcagcattctgttgtaagcaccgaggtaaacacagtagggggcaatgatgctgcccactctggaggccgtggatgtgaccccaccgccatgttcctngaccagggttgggtagagctcagcagtgaagacatacagcatggngaaagcagag

SEQ ID NO: 127703 - DNA, 1728 bp, Homo Sapiens
  misc_feature (1324)..(1334): n is a, c, g, or t
  misc_feature (1493)..(1543): n is a, c, g, or t
  misc_feature (1590)..(1627): n is a, c, g, or t
tttgaatatttatagatttatttataatgaaattatggtctaaatatttacaacatataggaaaccagaggataagtttatacaaagccagcctgcaaagtattcaaatgtgcaaaaatgacagttcaatatctcaaactattcctggttcagcagactagctccttcactttcacacatcaatatttgatacaaaaagttattttggcaaaatctgtaatgccaagaaaaaggacaatttgcaatttcagtcattaagtccaaaatcctatagccagcagtcagatctctctgttttagctgcaaccagttctgggagagagagaccactgtatttcatttctgtgatgagttctgaccagttttagtcaagaagttttctctgacccagctgaagacaggatcttagaagggcaataaaaacagtaatggctatgagaccaatgtgcctgaaggtgccagctttggatcaccccaattaaaaaacacaatgaaaaaataatttcattttcctatccaggatccagctatatccaacagttttaaatgagacagcattttccaaaacagaaataatccaaaacaaaacagggatgcagatctgtcagaattaaatactgaaaaggacggtcttaaaatcatttccccactaataaatagtaaggctctgtttgtaaccagttatatatcaaaattgaccaaacagtagtaaaatacaaataaaactttctttatgtcagaactggggctattcacctggaaaaggctgaccaggtcaaatgtgtatgggaacgaccctgttaggatgctttgttggacaagcacatttcaccaactgttaaaaagcttctgagataaatttgtgattctaattaaattttaacagattctatgccactgcagaaataaggatttttgtggttgttaaggaacccctttaagaaaggggggcactgaatctctaacttctgcaaaggtccagatggttcccagcacaggccccagagtcttgttaaatcaaatgcatgcattattgctaagaagagtcactgagggtcaaaactctgttccactgtttcctagggagccatccagaatggcatctgttgtttagctcgtggttgtgatgaaggatattggtatcccaaactccagccctgtggaaaactacttgcatttttatgacctccatgttcctcctcttcatcagatgaatctgcagcataagccaccaagccaaatcccttctctgtagttttcatcttcttggctggataatctagaatagagaaaaaacaaccccaaccccatccccgccaagggnnnnnnnnnnntaccataaattcgttaattaaaaaaaagatgttaattttaagtggttagttggacaccattttgaggtcacagggtcaatggtcacccaaaaacgttgaagatcacacgaaaaacagcaccagcatcagcaaatgtgaatccaccagaaccatgtaagnnnnnnnnnnnnnnnnnnnnnnnnnnnnnnnnnnnnnnnnnnnnnnnnnnnggaaagttagcaagtgagtctcttgagggctgatatttcaccttttnnnnnnnnnnnnnnnnnnnnnnnnnnnnnnnnnnnnnncgtattttcttctgttcatttttatgagtacaggcaaagaataaaatatcccatgtacctctacaggatttagagttctggcctgctaaaagacaacattt

SEQ ID NO: 127704 - DNA, 408 bp, Homo Sapiens
ttttaatagaggcctattaatatgctttctattttttgctgtgctcagttttatagatttccccaagtaaggttcatttttgccatttaaggaaaggaaacaaagacagagcttcctaattatcctcagtaattattttcaataatatccttgagtatacgatatcctctcgcgttttctgaacagacttcacattcttcttcttttcttcttcctttggaaaacatcgtgacactcccagctggccagctcaacgtccctggaagggaagggacaactgaagttcacctcaggacggtggagcccacatcataactgcacccaggtggccacagcgaacgacaccaccctccgtggctgggacacccggagcatgaggtcagtgagcccacccggcgcaggccccac

SEQ ID NO: 127705 - DNA, 1705 bp, Homo Sapiens
ttttgcagcgtggatttattttatttcattttttactctcaagagaaagaagagttactactgcaggaacagacatttttttaaaaagcgaaactcctgacacccttaaaacagaaaacattgttattcacataataatgtggggctctgtctctgccgacaggggctgggttcgggcattagctgtgccgtcgacaatagccccattcaccccattcataaatgctgctgctacaggaagggaacagcggctctcccagagagggatccacctggaacacgagtcacctccaaagagctgcgactgtttgagaatctgccaagaggaaaaccactcaatgggacctggataacccaggcccgggagtcatagcaggatgtggtacttcagggccctgggcaccctgttgatcacgagcctcccgtcatagctcagggaggcaaacagccacgggtcagccgaggaccagtccacggcatagacgctgtcctcgtgctcctcgtaggtggcgatcacgttgtcctgcaggggctccttgctcttctcttcagaacggtggtcctcctggtcactgatgtcatcgtcgtctaccaagtggccgaagggctccgacgagatggacaccatgttggaaaggatgactctgctgtcactgctgcccgtgaggaccagctggtcatgagagtggttgtagcggacgttccacacccagtgggagtgctcctccagggtcttcacgggttcggtgacatttcgggtgtcccagaacttcaccttacagtcgtctccgcagctggccaagtagtactgcttattgggattaaagtcaaggtcccgcaccagctgtccgtgggcattctctatgcagtagatctggctcatgctccgggtgtcccagccacggagggtggtgtcgttcgctgtggccacctgggtgcagttatgatgtgggctccaccgtcctgaggtgaacttcagttgtcccttcccttccagggacgctgagctggccagcacagcctggctcgagctttcctgtaaatcccacagcaggatatggttatcagccaaggaaatgattttcttcccatctcccattggctcccacacgacacaggccatgttgccatgggctgtgttgtcaaggtgacagagcagctccagggtctgtgcagtgctggatgaatcatcaggggactcgtggctgcctgattccaattccttcggcatcctccacacggctgcacatgtcaggactttgctgtctgaagttctgttgtagcaggtcgtcagcacacctctgtctgcagggctagcgctaatatgccagatttcacccgcttgatggaggaggacatttttatttataatgttgttttcatcgtcaaaatctatgatatggatctgattatcatatttaagagactgcgtcccaaccaaaaaccgaatggcatctgtttctgcagtttgaggtgttaaggcacgtgcctggaactccagcccgtagatcactggtgcatcgtcctccatgctgcggggaagcgacccgaccccggccactcacacgctaaggacctcgctacggccggcgcgtccccacctcgcgggcgtgttcccagcgcccattcattccctccccgcagcaaacgactccaaactggaagtctttctggcccagaacagcttccgtagtgccacttccta

SEQ ID NO: 127706 - DNA, 810 bp, Homo Sapiens
  misc_feature (261)..(274): n is a, c, g, or t
  misc_feature (550)..(550): n is a, c, g, or t
  misc_feature (568)..(568): n is a, c, g, or t
  misc_feature (673)..(673): n is a, c, g, or t
  misc_feature (759)..(759): n is a, c, g, or t
aatttagataacctagtggttaatatgctcatgaacatcagcaacaaccgtgcattccttggcagatgggatgcgatggaaaccaaaggtttccttaaggcaagcacttcacaactagttttctgtcaattcttgcgtaaatcacattctgtattcatacaaaaactttgtttttctctgacaaactgtacacatagaaacaaatttccaaatggacaggaacttaaatttgtggagatgccccatgtcttgtgagacttnnnnnnnnnnnnnngatcccagcttttatcttcacaaaacaacatgggagttggggcaatgagggtggacaggacagggccagccaggctggtagctggcagcagtctcttcatcttgaagacctcattgagggttcctgggattcaggtgcccagaaaagattcagggctacaatggtgcaggcttccttttgtttctcttggtgagtccacaagaagttcttacatactgtccagagaggcctcagggtactcagttccagcttctaccgaccccttccaccaccccngtgaagctcctcgcctcnggcgggccagagttcatgttactccctctaccccagttactgccactccggccccctcgagaaggggtgccactgcctggagggcccccaaaaggttcatctctngtggtatccatcgtggtgctctccgtctaaggagctggaacgcccagatttgggcactctctgagcaggtcctgggccccctcggnctttgcctcctcggtcttcaaaagggctcctggggctccatctctctgtgc

SEQ ID NO: 127707 - DNA, 1128 bp, Homo Sapiens
  misc_feature (84)..(143): n is a, c, g, or t
  misc_feature (1026)..(1060): n is a, c, g, or t
cttgttaacaaacaattctttgtacagtggtttggtactaatcatgaagcaagtaaagtctctgaaaatagtatacaaacgagnnnnnnnnnnnnnnnnnnnnnnnnnnnnnnnnnnnnnnnnnnnnnnnnnnnnnnnnnnnncattgatttcacaagtcttcaggttgtttatagacatagctatagacaacatctcagtttcatacagaactcattcaatcatataaaaataaacacaaatttacattgactcatcaactatacaatttaaaaaggcacttggaaggggtattgtattattgcatttgtggtatgcatttgaaatagtttaagtacattaatgaatttgtaagaatcctcttttgcacttattcccatctttaattaattttcaaaaattattaaaatgttttaaaatagtaagacaatggagcatgcgccaggaatgttcaaagctaatctttccctcctcccccaaggcacatactgttaattggcataatacctacactaaaccaaaatacttttaatacattctcctgtgttttgttcttgttattttttttcctcccttttaaaaatatactttaaagcactacaggtaatcaaaaaaaggctttagttcaacaatggcaaccagacaaccgacatgtaatggagtaaacttggaatactttttaaggcacctgagttcgcgtctggcagatctcttcctatgggaaatcctattacagactctattacaaagcatactgttcttttcagttgaaatgatttggcagcaatgtaaatctttgcatttttttaggaagaaaagatgcatgtgcttttcattttatctttgaagagaaaggttactgtcttttattctctcaatctagccatcagcaaatatatagtaattttaaacttcacatggaaaggattatctttaaacacatgaattccatgctcttgcagctctctctctgtgcccggccgtaatggccgaattcccgggcatatgtccggtaccgtcgactgnnnnnnnnnnnnnnnnnnnnnnnnnnnnnnnnnnncggccgcttcctcgctcactactcgctgcgctcgggtcgttcggctaaagcgcgctgcgcccatatga

SEQ ID NO: 127708 - DNA, 943 bp, Homo Sapiens
  misc_feature (154)..(154): n is a, c, g, or t
  misc_feature (186)..(206): n is a, c, g, or t
  misc_feature (661)..(694): n is a, c, g, or t
aaaaatagtttaaagtaccattaaatgaattttgtaagattcctctttttgcacttattccccatctttaattaattttcaaaaattattaaaatgttttaaaatagtaagacaatggagcatgcgccaggaatgttcaaagctaatctttccntctccccccaaggcacatactgttaattggcnnnnnnnnnnnnnnnnnnnnntacttttaatacattctcctgtgttttattcttgttatttttttcctcccttttaaaaatatactttaaagcactacaggtaatcaaaaaaaggctttagttcaacaatggcaaccagacaaccgacatgtaatggagtaaacttggaatactttttaaggcacctgagttcgcgtctggcagatctcttcctatgggaaatcctattacagactctattacaaagcaatactgttcttttcagttgaaatgatttggcagcaatgtaaatctttgcatttttttaggaagaaaagatgcaatgtgcttttcattttatctttgaagagaaaggttactgtcttttattctctcaatctagccatcagcaaatatatagtaattttaaacttcacatggaaaggattatctttaaacacatgaattccatgctcttgcagctctctctctgtggnnnnnnnnnnnnnnnnnnnnnnnnnnnnnnnnnnctatacatattatttggttggtcagcacaggagaaaatgcctttggactttatttgtcatttggcttcggagtgaagaaatgcattctgttcggagtaaacattgattgcgtcactcagtgtgctacacagcagccagattcctcatgtttgtgcaggagagacattctggcgacgcgtggtcgacgatatcccgggaattccgaccgtaccagcctgctttttttaccactgttcatatgtcacatcg

SEQ ID NO: 127709 - DNA, 800 bp, Homo Sapiens
tttctatagaacattattgataaaagatcaacagcaatctaccaactccaggaccatttttgcaaggtgcaaatcactcctaaagacaatgttggaatgtttacttgtgtatttcattgggggaaacgcccatcttttaaatgttatcaaacttattttttggtaggtgttccaaagtttaacaggtaactcgtgcagagcaaaggatcctgcggtggcatgtcactcttcactcctcaggagggtcttcctacatcctgtagttcttgtttcctgcactccctctacttgcgttcttcaaatgtacttccttctgggtcttgggcatgtcggtgtggcgctgggcacggacagagcgagctgacttggcaggcttgaggggtgcgcaatacatctccagcctccttagatcacagctccggaagcagcactcatccacgatgcctgtcttaggcgccctccgactgctggagccataccctgtgggcttgttgtaaataaagcccctgtctccacacacgaactgaagagcatccaccagctcagccccgcagagcgtctccggtccagccgtggcagagctggtgaaggtgagcaggcacagcgccaggtagaagagatgcgaggaggacatggtgtgcatcttcacctttcagaaatcacaaaagcagcactgtaaataattgggttggaagactgctgatttttcgcattgcttctgaagtaccaagtctgaaaatgattggtagcaggaatatgaagcaaaaagaatccagagagatgggaatgtgagagcatgt

SEQ ID NO: 127710 - DNA, 1019 bp, Homo Sapiens
gaaaatcacattcaagccaatacacgtgattaaactactgttgtatcattgggctgcgacggttacaagtccacaaactgtttaactggacatatgtgaggtggtaaatccctccattttacaggtctttgggaagttctggggccaggaaatccaaatttgataataggattttctcaactgaactcagggcagagcacagatggtctgagtgaacgccctgtgtgacaggtgccttcctgcaggtaggaacacttcctctgcagtcagagggagaagaaaacatcaggagctggatgtgatttcagatctgcaccgagaaacatgctgatttcactggggatgtggcagtcccaggtgaaggctggctaggtcataattgacatctcctccctgtctctgctctcagacatggagttgattatgctttttaaatactttatgaattccatccggatctcctcagggtcatcttccaggtttgagtgcaccagcttcagcttgttcaagggtggcgacaaagacaggcttcctttatcatctccagagcctggtttgtggtgtgcaattagcatacactgtgtgtcctgtaaggacggctgttggacaaagcaggaataccacatctccatttccttccggtggcttgggatgtcagcattgaagacgatcaccactccatgagcatccttcatcagggccggccagcaggactcaaacttagcatcgccaccacagtcccatagctcgaattcacagcccgtgcctttgttgttgctggtaacatgcgggttctcaaattctaggatcctcactccttgggttgggctgtattcagtgatgtcagaagattctgtcagaaagttggccaaaacagtttttccactctcgcaaggccccacgaagaggatcttggctttcagcatagttgtccgccgcggcttagccggccggagcccacgggaggcggcgcgtcaggacggagctctacttgccgctttcgtcctcgtccgattcac

SEQ ID NO: 127711 - DNA, 1001 bp, Homo Sapiens
ttttccggtaaccgttactggtggcgtcacacccaactgttaacggaatattgaggtggaaaccccctttacagtcttgggagttctggcccgggaacccgaatttgatataggattttctcaactgaacttccggccagagcacagttgttctgattgaacgccctgcgtgacaggtgcccttcctgcaggtagggaacacttcctctgcagtcagagggagaagaaaacatcaggagctggatgtgatgttcaagatctgcacccgagaaacatgctggatttcaactgggggatgtggcgagtcccaggtgaaggctggctaggtcataattgacatctcctccctgtctctgctctcagacatggagttgattatgctttttaaatactttatgaattccatccggatctcctcagggtcatcttccaggtttgagtgcaccagcttcagcttgttcaagggtggcgacaaagacaggcttcctttatcatctccagagcctggtttgtggtgtgcaattagcatacactgtgtgtcctgtaaggacggctgttggacaaagcaggaataccacatctccatttccttccggtggcttgggatgtcagcattgaagacgatcaccactccatgagcatccttcatacagggccggccagcaggactcaaacttagcatcgccaccacagtcccatagctcgaattcacagcccgtgcctttgttgttgctggtaacatgcgggttctcaaattctaggatcctcactccttgggttgggctgtattcagtgatgtcagaagattctgtcagaaagttggccaaacagtttttccactctcgcaaggccccacgaagaggatcttggctttcagcatagttgtccgccgcggcttagccggccggagccccacgggaggcggcgcgtcaggacggagctctacttgccgctttcgtttccatgcctcggccgattcaaaccagcctcgtacctagcta

SEQ ID NO: 127712 - DNA, 1443 bp, Homo Sapiens
atactacaaacctattttatttatataacttcttatgaagtagattttgtacacatggtaggctaaaaattaaaactgcttttccacaaaactgataaattactagattcttggttctttcatgatatcataacattaaatcattaaaaatataaggcaatttaatgtaaactactagcatttacaaaacagtaaagttataaaaaactgtattacaagcaaatgcaccaaataccagtgaacatgaaacaggagtgaagtttgctggagaacattaaaaatcacttttcagtgggttcacttcacattcatgctgcactgggcctgacacgttcagcaccatgaagcagacacttcggcaactagaaatgttacttctgtttgactttttttctaaaatgaaaaagcagtctgtgaaatgcgtgttaagaacgatctatctagagtcgcacagggtccagggccgctgcagttgactcagttgttcccatcctcgttttatttgacaaagtacttcatttggccactctggaagaatttattttcttgatatcaactgggctcagaatcagtgttccatttttgaattttccaacctgtccaatccgtccatttgacaaaatactgggagcggacttctttttggatttcctgtcctcctgtcctttcctcttctttttcgttgaaaatatctgtttcttgggccagtctcttttcttcttcctttgctgcctttttttctttaatttgctcctgtaaaaccttgtaattcacataactctttttaggaggcttagcgcccagcataatggcacgttcctgttccaggattctctcctttccttttccataacccgtgataccaaaccggtgcacttctaaacgagctttttctaggttaaattcttgtgtatccacatctctctccaaacactaggattagcctttgtgttcttgttatgatctggcgtcaattttctttttttattgctgtgaaattctaccacttctacttgttccctattgttctttagggaagagggaggaactgcagcagccaggatctctggtcctgtgggggtcccagaaggagcacaatgccgctcttctctaagttccttgaagaagctcgaagcgctcttcctctggcctcttatgagagaaccaggtaggggagatggctctgctgccaaggccgctgaagccatcacatctctcttcttgttttcccttttctttatgatcttcttctgttctgtttcaccttctgtacctccaaagtcgtaaaggttctggagcagagcgtcaagaagtgtcggagaactgggaggcgtggaggaccccggcccttgctcctgcgacattgtggggtcagccgaggaatcaacccttattctgccgcgccctcgtgccgaattcaacaccaggcctcgtacctagccg

SEQ ID NO: 127713 - DNA, 957 bp, Homo Sapiens
  misc_feature (589)..(589): n is a, c, g, or t
  misc_feature (593)..(593): n is a, c, g, or t
tttttctggctgcaaatcgtttttatgggaacctgcagggtgacccggcaccttgctaactgggcttagagtctaagggcttgggggctgcatctgatacaggttggagtttggggtgggagagtcctaggaagggggccccaagtagaaatgagagaaatcaggaagggatatcgggggcgtccacgggggtgctccgactggccttgcacccgtaccccagctctgcaccccccgtcacgagcagttcaatgcccgtgcagaagttggcttcggaggccaggaacactgccgcagccccgacctcagcgggctggcccatgcggcccagtggctgggccagcatgccctctcggattgtggccctagggtctggcattaaggctgccagctcctcccacagcggggtccagatgtttcctggggagatacagttgactcggacaccatatggactttcatccagggccaaagctttggtcatggctgttactgcccccttggtggccacatagggaactgcctgggcctggccgattgcccccaccaggctggagatgttgatgacattcccttgactcttccgcangtangggagggcgagggtggccaacgttgttgacaacacaatccaggcggccaaatcggcggatggtctcagaaaccagggtcttcacatcatcttcctgagtcacatcacagaggataaagacagctccagggagctcctgctccagggcccggcccccagactcatccttgtggcagataaccactcgggccccgctgttcacgaaggcgcgcacgatcccagctccggatgccgcgcccgcccccggtcacgaccaccaccttcccggcatagcgcgttcccgtagccatcccgtgtacgtcggtctctctctatctctactctgggcctctttcacctccaaagccccgtgaggccgtcgcatc

SEQ ID NO: 127714 - DNA, 532 bp, Homo Sapiens
tttttggctgcaaatcgtttttatgggaacctgcagggtgacccggcaccttgctaactgggcttagagtctaagggcttgggggctgcatctgatacaggttggagtttggggtgggagagtcctaggaagggggccccaagtagaaatgagagaaatcaggaagggatatcgggggcgtccacgggggtgctccgactggccttgcacccgtaccccagctctgcaccccccgtcacgagcagttcaatgcccgtgcagaagttggcttcggaggccaggaacactgccgcagccccgacctcagcgggctggcccatgcggcccagtggcagttgactcggacaccatatggactttcatccagggccaaagctttggtcatggctgttactgcccccttggtggccacatagggaactgcctgggcctggccgattgcccccaccaggctggagatgttgatgacattcccttgactcttccgcaggtaggggagggcgagccttggagacaagaagccaagtaaact

SEQ ID NO: 127715 - DNA, 1157 bp, Homo Sapiens
  misc_feature (116)..(136): n is a, c, g, or t
  misc_feature (138)..(138): n is a, c, g, or t
  misc_feature (142)..(142): n is a, c, g, or t
aaagccagcttattgcgcccaggtttcactttaccctaccggggccccgcggcggccaaaacgaaatggtcctagaaagtttcttggaggggccgaggcggcccgacatgtttttnnnnnnnnnnnnnnnnnnnnntnttantgggaagtcaggatttattaagaacatcgggatcccagatatttctttttttaccatataccttaacatttgggggattttgattcccacaaaaacctctatcatttaaaaccagatattcgaattacaaggctaacatttttagctaatcaactcttcagtgctgatcccagaaaatagcctccaatgggtctttgagtcatggaaatggacaactttcagccattgacatgagtggtgtcggtggtcacacctttaacattcaagccacaagctctaaagtctggaaagggtgaggtctactgtcctgcattgtcgccatctgctgtcgtattttcagtgctaatggactgtacgttgtctgcaaggttgtgtgcatgctcaagaaacaaatctttgagtacacttaattccttggtcagcaatttgatttttgcttccaaccgttcattctcttctttgagctgattgactctctgcagtgtgtcttgtgctttctgcttgcttttcaaccggctctttttcacagccatgttgttcctctctcggcgttgccgatactcgtcactgtttcgatccatgggcgaactctttttgctctgcttgctgggagccacagctttgcctcctcccccagggccagcaggcaccagctgaggaacctgctgtaagccgctggcatgtgcctgggtatggataacactaattccgttcacccctggagtgctgttttgctgcgatatcttgctcatttgggcactctcccttgccaacacagaacaggtagaaatgagagcagggtggtcaatggtttccacgctaagctgccaaaaaatcttcacatgtacctgctcctctagcccgcctgcccccaggcggcctccactccgagcggccccgcgcggtgcggcccgagccgacccaggcctcacagcccgcgagtcagcgaggaggagcgacggttacgaaaccggcagcctccgcccgttccgcagccgcggccaccggcttcccc

SEQ ID NO: 127716 - DNA, 999 bp, Homo Sapiens
  misc_feature (23)..(23): n is a, c, g, or t
  misc_feature (944)..(944): n is a, c, g, or t
tacccggagaacccacccccttntggggaattttggttctcacagaaacccgctctggggcggtgcccgccccggggggcgttttgttatatgggtggagggaagttccccaagctccttggttcctggtccccggaatttccctttaggaaccaacgctaatggcccatgttcccgttaccctacgggggccccgcgcgcccaaagaaaatggttctgaaaagacttttcgaggggccgagggcggcccgccaaggatatattttcgtgctttgtggtttcggggaatgtaacaagcatttattaaaaactgtgctgcacaaaacatgttagaaactagccaggtgctaggagtctaatcaaggcaggggcagggtaaaaacatgggaatattacatggacaagcttgtctagcatggcagtctataacccttgagggtttacataaaataaaggaacatttttgtggctcaggctccccagagttctctttatgtttgggcagagactgccccatcccttagtgatcccaccttagagccaggttttcaaagtcatttctcccagtatatctgtctctgtatgcaagtttcctctggttgccttgagcaaaaacaatcatccaactcaaatttgctagccctatgctgggccagcccacgttcccgtaggacatctgtaggctaagtaagccccgggtgatctgtgtcttggtcttcctaattccgttgcagctcttcctctctcagccaggagtggaaagtcctaagcctccttccattcatcccattatcaaggtgatggctctccctccccagctctgcttccaggaagatgacatcccaataacttgggtatcaccaaaacccctccctgaccaccagggaaactgctgtctgtcttatgtccatttggacagactatccatctgttgcttgtttcangacttgttgatggggtggacagaccagaatttcatgtatttctgtggatcaagat

SEQ ID NO: 127717 - DNA, 2788 bp, Homo Sapiens
  misc_feature (78)..(78): n is a, c, g, or t
  misc_feature (2667)..(2667): n is a, c, g, or t
  misc_feature (2743)..(2743): n is a, c, g, or t
tcggctgtagatgtagcagtttctggaggaaatgaagatttgtggtggtctttccagtcaccaggttgtgaaagtctnaggggtgaggggaaggaaatcccctcaaggacaagatactactaccacattaaggtcaggagttcttaaagggcgaagatttcattttattccactggcttcaggggcttgctagaggaggcccagttggtacagtaatacttattcaccaagctggtcatcgacgaaattgaggatgtcctggccatcctgctgcaggtgatggtgaaggatctgagaatgcggctgctgatggggggtcagaatgtgcataaagggggcaggtgggtaggcagcagctgtggccggattgatggggcccccacttcctagggctgaaggcaagttgaaggaagcagcaggagtaccggaatgaaaaccttgtttctcaaaggactgctgggttttggagtacacagaacccgagatatctggcacgcccgtgttactggaggtgactgaaacaccagtgttgtatccatgagacccatatccactcggctgttggaaaggggtggccgatgcattcacactgacattcacaccatgctgcttggaagaggtaggagccacagggaacacagcaggcccatactggaaggtgctggggaggcccgggacccctgtatagtatggcaggctggtgtaactgtagccaggaggcagcgccgggttcaggaatgtctgctgcgtggtatggtgagtctgcgtctggttctgttggggttgggccaaggttgtggccggggctggggaggaggcatccccacggccgaactttgtgaggtcaccagaataagggttgctggccaggctaccatccctcccagtcagcggagtagtgggtgtgggaaatgggatgctgtagtaatccaatggaaatcttgtctgaagcatctgcaagtcatcataaccatatacttgtggcgggtaggcatgtaacagccctggagccataatatacggattaggcaacaacggcgggaccccaggagggaggttgggaggagcttttcctgaagtcgtagcaactgagcttcgagtcgaggctgtgacagtggagttgctgcctaggctgaggcccaggctactgccactattgagactggaggagacactgaccactgggggaggtgcagagactgtgctggatgtggtggaaaaagtgctggaggaagaatggagattcgcctcactctcccacacttgtgtgcaaaagagtggatgtcgaagtgcgcccagaagatgttgatgatgaaagggtattctgctgcgtagataacgtgctgctgtgttgtgtggtggtagtatttggaatctcctcactgtggctcaagccacccaaggaggatgaatgctgattggttgtcgtcagtaaggaagctgcagataccgtttcattgagaggggggatgctagaagtggaaggtgaatcagatttcactgcagagcctgtagcaccttcaacagattgtgtggtctgtaactgcgtggcctgcacagaactgaagccattctttgcctgagtcaggtccttttggggtgatgaagagatggagctggggtaccgccgagtctgtgtggatctctgttcataaagagggccctgagcattattttgggaggtataggttgtcgactgaattgggccgctctgataaccagactcctgactctggttagatgaaattgtagaggatgattcactggccgtgctggtatacaggctacttggagcctggcttgaagaggcgctcgtggtgggggtggactcataatcagaaaggacaggctctgacccaaactgcaatgccccaaactgcaggtttagccctgagatatctgctgagccaggcatctccacagccagagcaggaatcttagaagtcaaggaggcttttttcttctgctgtttcagtttctgctgagccggctgagggctagaggactggttgtctgaagatccaggcgacatctgtggagccgatgtggatttgcttggcagaggagaagacggaggtggaggtgcagctgtggaggtagccactgcaggtgacttctcctgaaggaacacctccatcatggttgaagatggggtaaaagcctggcgctttgtaaaggggctgtgcactgctgaatcacttgggttcttcaaatcatactgcaccagtgatggggattgtgtcgtcgagcccatgtcccaagaggaggtggtggtgcttccagactgagaatgctgagctgccaactgagccagggcttgggcagtcttgaattgctccaagaactgggagcctgtagtactgccgcctttagcttcaccgacatcaccaaatcctttccctaacatgctcaccatactgtgatgagaaaatgtgttccctgaagcaggctgtgatatggcagtctgcttcgaattactgaacaccagaggctgggccagagaaggagcctgagacggatccagattagatgaatcattctccattgtagatggtgtcttccccagcagaacagcaaggtcaattctctgaccagcagtgattgtcacattctccgcaggcagaggcactgaagacacattagaggcagtgaagatcttggtctcanaaagatcttcattccaatcttcagtcccccactcctctgttgcagtcctccatgcactcgtcccatcatctggttnaaagtggccagtgttgttccacgtattgccgctgctattgccata

SEQ ID NO: 127718 - DNA, 664 bp, Homo Sapiens
ggggtacaggtggggtttggttacatggatgagttctttagtgatttctgcgactttagcgcacccatcacccgagcagtgtacactgtacccaatatgtagtctttcatccctcaccccactccaagatttagttctgccagacgatacatgttgccttcacttctttttagtttatttgcctggacccatctaagtcatacttaaaactctataaagcattttttttctttgaaatggtctcagctccttcttgatcctctccattttccacccaatctcctctatccctctccctttactgcctgaaatcggctgtagatgtagcagtttctggaggaaatgaagatttgtggtggttctttccagtcaccaggttgtgaaagtcttaggggtgaggggaaggaaatcccctcaaggacaagatactactaccacattaaggtcaggagttcttaaagggcgaagatttcattttattccactgccttcaggggcctgctagaggaggcccagttggtacagtaatacttattcaccaagctggtcatcgacgaaattgaggatgtcctagacggagcaagaataggcagaggctgaaggtagaggttttctttttatatatacaagacacattaatccattaaatttgaggacacagtac

SEQ ID NO: 127719 - DNA, 991 bp, Homo Sapiens
  misc_feature (174)..(187): n is a, c, g, or t
aattgggggagaaattccaaggccctttaggtccaggcccaaggattcccctagggagaccagctatgggccatgttccatttaccctatctgggccccgcgccgccaaacgaaatggtttaggaaagcttcttggagggccgaggcgggccgaacatggtttggtttacggtnnnnnnnnnnnnnnggagctaaagaaataccacagtttattgaagactacaaatatttttgttacaagttgaaactacatgccttccagaaatcaaaagcaacagcaggtgtgtgcattgatgcttcgaaggtgctgcaccgcttgaacttgaaatgggtaagacagggtcagacacatgggggagagggaaatgggggaggggcaagttcaaaagcccagaaggtatccaccaactcatttccccaagccacgcaggccatggcctcagctcagcaggctctcctcagtggtctggtttctgaaacaagacttcagtgcaaatttatacacacacacaaaacacagcccccagccttgggccaaattagctctcagccgtccagaaatgcttgtaagggggtggatattttcttccagtgttgtatccatgagacccatatccactcggctgttggaaaggggtggccgatgcattcacactgacattcacaccatgctgcttggaagaggtaggagccacagggaacacagcaggcccatactggaaggtgctggggaggcccgggacccctgtatagtatggcaggctggtgtaactgtagccaggaggcagcgccgggttcaggaatgtctgctgcgtggtatggtgagtctgcgtctggttctgttggggttgggccaaggttgtggccggggctggggaggaggcatccccacggccgaactttgtgaggtcaccagaataagggttgctggccaggctaccatccctcccagtcagcggagtagtgggtgtgggaaatgggatgctgtacc

SEQ ID NO: 127720 - DNA, 436 bp, Homo Sapiens
tatttatagccagattttgaagagtataagagacagagacttgtcgaatagagagtaaaactggttgttcgtgtatgttttgtgtctactctattggtatcaagaagccagcctactagaatcagtagtatttagctcaaggaaagcttcaagacctttcatgaatcatttaatctctgtgtactttactgctttttccttaaataaaattgaaggaaataatccgtgtcctgttctaacccagaatgaggatgaatgttctgttgaattagcttgtctcttggctccttgttttgctaacatcatgaccagttcctgttattgctatatgtctgtatctttcagccacaagtatatggttatgatgacttgcagatgcttcagacaagatttccattggattactacagcatcccatttcccacacccactactc

SEQ ID NO: 127721 - DNA, 620 bp, Homo Sapiens
gagggggacaacacatctcttaggcagagcagtgacgggctgtgccccaaagtccaaacaggccaggcagagaagggcagggacagggctcaggctgagaagaacagctggcgtccaggcagggtggccagaacgggtgggcacaaaggatgggcccgcaggcctaagtcatttggtgcggcgcctccagcatctccataaggaaggtgtcaatgggtgtgtccccgatgagcttgaagaagaagagatgttccaggcatttgagcccgatggagcgcagagccggcaggcggagcaagagcttagcgaaccttcccggctgctctgggtacttgtgcttgcagtaggcctccaaggacgcatagaccttctccctcagcgcctccacctcggccgggttcgagagccccttggagtcagggttaaagaggacgatggcgcgcaggcagcccagctccgtcttgtccatctgcatgtcccgcatcttggacacaagctccgtcagcaccctgtcaaagatggcgcccacccctgcgctgtgggcgctgttccggtggacgtgcagcccggtggccaggaggatcccgtccttcacggcgatggagcggtgggagaaggag

SEQ ID NO: 127722 - DNA, 696 bp, Homo Sapiens
  misc_feature (458)..(458): n is a, c, g, or t
cacactcagaatttaatttctccaaaagttgtttctgtgtttgattcatgtagaaaatcacaaagccttctcgccttttctgagtgggcgggatccacagctggcttacttctggacacggagcatggactgagaagcaagagcttccttccaggagaggcaccactcagaggcaggcccggctgcacaagtcctccctgctgggcctggtcactgcagctctcctttcccacccaactgttcaccttgtcacagggctatgtcttggctcttggctaagactttaagggcccacacagcagagaacagcagaggacagaagcctcagatcctgacgacctgcacagcaatgcatgggctctgcctctctgccccgtccgctgccggcctcctaaggtagagtcgggcgaaggtgcctcccacctgccctttggtaaggcgcccagggttcacacagnacacagccgaggacatccttcacgaaggtacctcagctctgacgggatgatgaggacatctggggtgacaggcagctgtgcgtaaacatagaacgactcatagtcaatggccatgtcttcttggggccgacatacagcgggtagtagctcctctgggtcacgaatgtgcttacgtatccgggctgaatctgtctgacagtccggaagaattactgatctcctcgggccccaggtggaa

SEQ ID NO: 127723 - DNA, 691 bp, Homo Sapiens
ttttcagaagtcacactcagaatttaatttctccaaaagttgtttctgtgtttgattcatgtagaaaatcacaaagccttctcgccttttctgagtgggcgggatccacagctggcttacttctggacacggagcatggactgagaagcaagagcttccttccaggagaggcaccactcagaggcaggcccggctgcacaagtcctccctgctgggcctggtcactgcagctgcccctccctggctggctcctctctcctttcccacccaactgttcaccttgtcacagggctatgtcttggctcttggctaagactttaagggcccacacagcagagaacagcagaggacagaagcctcagatcctgacgacctgcacagcaatgcatgggctctgcctctctgccccgtccgctgccggcctcctaaggtagagtcgggcgaaggtgcctcccacctgccctttggtaaggcgcccagggttcacacagacacagccgaggacatccttcacgaagtacctcagctctgacgggatgatgaggacatctggggtgacaggcagctgtgcgtaaacatagaacgactcatagtcaatggccatgtcttcttggggcgggtagagtgggtagtagctcctctggggtcagatgtgcttgagtattcggctgaatctgtctgaagttccgga

SEQ ID NO: 127724 - DNA, 650 bp, Homo Sapiens
  misc_feature (591)..(591): n is a, c, g, or t
gcttggtcctttgtagtcctttattatttatcttcatgataacccttacatttagggtagcattatgcttattttatagaagaaactcaatctccaagaagatatagtctcccaaagatcccccaagtagtaatatattaggcagagctaaactcacacactcactcaagatcctagtactggtacatgctatgctaattaaatttgctaaaatggatgaaatggcaatttctcaggtcccttccaatgatcctgttctctgcttctacttgctatctttttctcttctctcaactagcattaacatccgaaactatatgtaatcaccaaatttcatctaccatggttttttaattattctttaaatttttctctatttccacattaaatccagagaaatgttacttttttgaaagtttctgcttcctgcctctctgaaggccatgggacttaactatttgtcaaagcagaaattcccatgggacttacctatctgtcaaagcagaaattcccaacattttgtaaacaccactaattactttttataactgtaaagacaattattccatacttaaaaccaattcacaatanaataaatcctcaatacttcttattccctggagtagtaattttaattagattctattgat

SEQ ID NO: 127725 - DNA, 1041 bp, Homo Sapiens
  misc_feature (113)..(123): n is a, c, g, or t
gtcttttgaatcaaatttactaaaatattcataaacctttctccacccgaaggatgcaaacgaaagggagacacagagactgtcaaagctataggcagtctgcaggtgatgannnnnnnnnnnaaatgtggtttggaatctggagtctgagacctggacccaaatctcaccacagctttgtgctggctgagcaccctgggaaggaaggtaacttcacagcggaacccctagccccacacctattatctaaagacgattgcatggcccccagaacagtggggactgaatttcgtatggcaggacctcatctgaatatacagtaggtgctcaatacgtgctattaccctcttccctttttggcagtagacagataagctttttctatgactgataccatttttagatgtgaaaacactgactcctagagagtaacatttcatcactagccttcaatggtaattcatacaattggaaatgcatggaaagccatatttttcacttccttctcctctcttgttaatcttatctcatattcatgggtggcccaaaacttttcatagctttgagcgctctgtcccaatatttttaagtacatggaacttgttagcaacttcgatttttttattcaaaggaagtgccataacacttcaaatcatgtcaattccatgacactcatcttcaaaaaagatctttcagttcaaatcttagaaagcaagtttttaaattataaaagatatgcttcttatattctccaaatcctgctcctgaacagggatattgtttcaatagtttgttcctttttcacagctgagcagtgtttcattgtatggatatccaccatgtgtttatccattcacctgctgatggctgtttgggttgttttcccttttttttgctattccaaataaagttgctatgaatatttgtatacaagtctttgtgtggaaacatgcttttatttttcttgggtagacacctagtagtggaatggctgggtcacatggtaggtctaattttcacttttaagaaactaccaaacca

SEQ ID NO: 127726 - DNA, 2004 bp, Homo Sapiens
  misc_feature (226)..(226): n is a, c, g, or t
  misc_feature (352)..(366): n is a, c, g, or t
  misc_feature (1860)..(1877): n is a, c, g, or t
  misc_feature (1946)..(1960): n is a, c, g, or t
aaggctagtacgaggccgggtggttgaatcggcacgagggttttacaaaggggaaaggaaaagaaaacaaaaacgcaagctccatgtgtatagctgaacttttatatgtttcttgccagcccctccgctcccttccatctctagcctctgtcctgtttagtttgatacgtcactgcagtaccttaagaggtgactcttaagaatgcatcccctcctgattcctcangctggttcacccttgaggttatttgcaaaaagaaaaggaggttcttgagggcaccgattgcgagcattctggtgcctggctccccgcctgggaagcgatggggtgctcagagcagcaggcaggttnnnnnnnnnnnnnnntcatagttgggttccagctcctggcttgatgagcccagggcgcttacaggcagcccatgaagttgatgacagttttagcatgagaatcacacagggtccctgtcctgggctcctctaaagccagtggatgtgctgggcaccagagacaaatcatggagatggctgctggtggctcccaggttggcccagatggggtgagctgacatactacaggcccatcccaggccccgtgggctctgcttctggggctccataccctgccctgcaggggtgctgtgtttttcacacatttctttccctgaagccttctgtaacctgtcattttccttccttcctcttccggagcctgctgctttctctggacctgtctccacctcccacacagctcatcgtgaacaccacttggtgatggagggagtggacccgtgtgtggtccccaagtgaggccactgggagtttgtccttttcctcctttgcttcactcccagcagcagacccaggttgtcaggacaggagggcctgagctaagcagtaggcatcagtctcgtttgtcttcagacggcgggggcaggtccagggtgaggctgggtggagggctgaccaaggtccaaagggcctgcgcagcctccgggagggcagcttctccagccagaggcttgtgtgagccatcgtgtgctgggcttgtttttaagtaagaaacaaggaaatcactccagattctgtcattccaaggaaagggaaggggacagttcaggtttctcagctgttcttaggggtcactgagcgtctacctcctcctccagaggaggctggctcagaacacctagaggagggggccggggatgcaccccccaccagaggctgccttcagcgtctcacgggtgcaggacagcgctcaggcttgggctctaagctctgtgtctagtgtagaacatggggaaggagcatcttaggaactgctgaagtaacttcttactgctctcacaattctaaggaagcgggagaacggcctcctaccaacagcgcccaccccagagctgcctgggaaagggcagttttactgaaaggtgctttactgttcacctgcatctttcagcagctcccctcctgccctcacctggtcttttccctctttatcccaagcctttatgcttgagtcccttccccaggggctgcccacccgacagttccaggcattccctacctgagcttcttgtctgcttttccttctcccactgcaagcggctgcttgtggggcctgggatgagccctctctgtccccaccggccctccttgccaagccattcctgggtgagttcaggcctgcgggagccacacattcatctccacctggacacttgagccgcatggccagacccctcccacctgatgcggtggtgcgtgtgatttgtcaaaagaaagccttctggatgctgttaagatgtacccttcaggtgaacctggtatcagacccacagtacttgctgtttgagnnnnnnnnnnnnnnnnnnggtcacctgttctccagcccttttctcttacctggtatttccttcctttctcctcccccaccccaaatnnnnnnnnnnnnnnncactagaatttatttatatgtattgatgttgtaggtctaggtga

SEQ ID NO: 127727 - DNA, 1099 bp, Homo Sapiens
tttttttaatttataaaggaaagtgtttaattgactgaagagttcagcatggccagggaggcctcaagaaacttacaatcatgggggaacgcaaaggggaagcaaagcaccttcttcacaaggcttcaggagaaagagtgaggagttaaaggggcagagccctttataaaaccatcagatcttgtgagaactcacccactatcaggagaacatcgtaggggaaaccacccccatgatccaatcacctcccaccaggtctctccctagacacatggggattatggggattacaattcgagatgaaatttgggtgaggacacagacaaaccataccagccatttatgttatttctaataacccactgcccccatttcttttttaacttttttcactttctaaaactgttagtctggttttgacccctgtatttatcttctgtggctttcatcttttctctttgtctctttcagttctactttcaggaatattttctcacctacatcttccaacactattaattacttttgaattttaaatatttttaattttaaaaagccctattgttttaatagtttcacttccaattgttttatgaatgcgatttctccagatatctttcaaactaatttttttattcactagatagcactgtcttatattttaaagattctgaaaaacacaatttttaacgcttatgtagtccgccatcaaaacatcaatgtactgaagattttaagcagcatgaggcaccatcacgtttttgtttcttccccctcatttccccgcccctaccagatctgtttttgatgtttagcctagaagtagcaagaaggatgaactgaagcagattagagatcgagctggtaatccagatgagaaataatgaaagtcttctctagggtaatagtggtgaggtaaaggcaaaaggatagctgacagacgttaggaggtgaaatggcacaggacttggtgaaaaactggttaggagaagaggaaagagaaaagcccaggttatcctcagatttatggtttggacaacaggaagaatagcaatttctccaagtcgagtcctattataaatattttcattcttgtatt

SEQ ID NO: 127728 - DNA, 1027 bp, Homo Sapiens
  misc_feature (700)..(700): n is a, c, g, or t
  misc_feature (731)..(731): n is a, c, g, or t
  misc_feature (814)..(814): n is a, c, g, or t
  misc_feature (891)..(891): n is a, c, g, or t
  misc_feature (898)..(898): n is a, c, g, or t
  misc_feature (918)..(918): n is a, c, g, or t
  misc_feature (956)..(956): n is a, c, g, or t
  misc_feature (1002)..(1002): n is a, c, g, or t
cattcaaacccagcaaaaataaaatttaatttgggctcaagtcttgggcagtttgtccttcctcaggaccagccgtcagcagtccctgacgaaagcaccccattctctccacagacagctggttccagaaggaccctctgaggctggtcttccgggtaggatgtgctgtgggagggttctgtttccgaggaggagaggcgcgacacagcgtgcaaggacctgcagcaccttccacgcagcaccccctgctcctcctcctcagcccctgccgggctctgactcctaagtcaggcaggagcttcttcaggcccctggctgaggaagagccacagccaccctaaaatggcttcgggggcatgcagccctccatctccagcagctctggccatccctcgtatttgtttgtgtctgggctgttctttaagaactgctcaaaggggcttttacccctgaggtctttggctcctatgaagacccagctgtcccggaagcccagttgttttgcgtaggaactccccaagtcagagaagagtttcctgctttcatcgttcattttggtccctggatcgtcgtaggaggccaccagcaccagtgcaccccccggaatttctttaaggaatttcactaggtgcataacatctccggagtacatgtcaaatgccttctgtctcagcacagctcccgtggttccattcaccantgcgatgttgaggcctctgctcacattgttnttcacaggactcatgatcatgcggtcttacatgcacatactaagggccacgacgttggcggaccactgcagatcttaacgcanagtacactgctgcgcagggctgatgaggcacacttgtacatgttagctggatctcttggtgggcgaggctgcaacancgtgganacggatggcttcatgctganctcatgttcctcgactaacatcatgtcgtgatattggnaagtgacgggcagaggcgagcgacctgacctctcatctgtccagtnagggtcgcttggagcagcttcactg

SEQ ID NO: 127729 - DNA, 662 bp, Homo Sapiens
  misc_feature (562)..(575): n is a, c, g, or t
cagaccgaacagtgaaaagctttcagtggaggacaaaggagggcctcactgtgcgggacctggccttctgcacggcccaaggagaacctggaggccaccactaaagctgaatgacctgtgtcttgaagaagttgctttctttacatgggaaggaaatcatgccaaaaaaatccaaaacaaagaagtacctggagtggagagagtattcctgctgaaacgcgcataggaagcttttgtccctgctgttaatgcgggcagcacctacagcaacttggaatgagtaagaagcagtgcgttaactatctatttaataaaatgcgctcattatgcaagtcgcctactctctgctacctggacgttcattcttatgtattaggagggaggctgcgctccttcagacttgctgcagaatcattttgtatcatgtatggtctgtgtctccccagtcccctcagaaccatgcccatggatggtgactgctggctctgtcacctcatcaaactggatgtgacccatgccgcctcgttggattgtcggaatgtagacagaaatgtactgttcnnnnnnnnnnnnnnaaacaatgtaattgctacttgataaggaccgaacattattctagtttcatgtttaatttgaattaaatatattctgtggtttatatt

SEQ ID NO: 127730 - DNA, 955 bp, Homo Sapiens
  misc_feature (866)..(866): n is a, c, g, or t
  misc_feature (888)..(888): n is a, c, g, or t
acagaataaagtgcttcgtttattgatgattaaaatgtccccagctccctgccccagtgccatgggcctcataaggtcagaggggttcagtccccctaaccattcccccggggcccaagcctcttcccactccagccatgctgggaaggcaatagtgtcggggagtggtgggggtttaaggtgcaaagagtataacaaacaaaactgtataaacacaataggaaagagcttaactaggaaacatgtagcttatggaaccttcctccccatattaaaggcaggaataaagacattaaatgacaacaaaaaagggtttcctattagtgctagcctcatgggggcaagcaattgggtctaggctgcgcctccccagtccccccaatcccccgaggggcctgaacatgcaggctcctttaccggcagtgctatgggcgccccacccaccggtgcacaggcccaggagggacgaggacgctggagccagccagggacaggttgtggcaggacctagagggaggataaggcctagagcgggcctttgggggagcagagatggacacagccacacttgttgctttctggtgttggatatatggccagagtagctggtgaggaacttgggtgctctgtgagcagccggcctgccccctgccccactaatagcaccttgaaaccctaccagcactgcccaagcctcatcctaggactctgcccccaaagctggtgctgccagtcagcctgtctgcccaaggagggtctggctcacagcgctgtgaggcacagcagcttctggggacatctccaggactcaggacccttggtgccacctggtgcaggtcagggatccctgggcctgctggcagcanagtgggtggggaaggcaagtcnctggggtccagcccctgcctgccccactccacacagtgaagcactggtctgcagtctccgcacctcg

SEQ ID NO: 127731 - DNA, 1320 bp, Homo Sapiens
gtgggcagagggagatgtatttttcacagatcacgcaacacacaggaagacacagcgagggtttttagattccgagaccagggtgaaaaatctgctctgatccaacaaagcacccccactgtgcttggcagccgatcagccactgtgggacgatgacccaagagtcccggacctcaccctgatgcccccatctggagactctcgggacacagcaggtgtggcgtctgggatgtactttattggacaagtggtggcccaagtcttggtctggaagcactggggccctggacccaggcactgagtttgaggaggcccagagttcagggctgtttggagcgaggccacaagcggctggtgagggagccaaggaagaggttctgcttgttggacttggagagctcggccaggcgctgctgctcctcctgctctagccggctttgccgctgtttgaaagccgccagcgggtcatcctccagggcatagtgctccagcacggttcgcacgtcctccacaccattcagtgcaatggtcttgaggaaggcagacagatccaacaagacccggtcatcagagttgccgtcccagggccgcagggcaacgccgttatagggctgcaggcggaaggcttccttcttgcagtccacaactactactcgagctgggtcccgattcagacatgaaatatcctttacatggtgtccatccatgtatcttgtggcgtcccggaataggcggtaggagatgaagccatgggggtccacactatcaatgagtggaaacgcagtcatgccagtctctgacgtaaagatgacaatttcatataaaggggcaagctgctggaacaaggtctcgatgcctgggcgcttcttaaacctccagccagtggccagcgaccactcaggatgcaagaggacgccggtgagctccaaaacgagcgtgtagggtggctggtagtacggttcctgcagagggtctgggagaaggcaagggctggtgggctcgatgatcatcattgtcgaactcatcaggaatcttggcaccattttcgtccaccgggttgtttccaaagatatagacgacgctcacagtcccaccagctccaagcagcccagcaagccagagcgcaacttttttggcatagctgggaccctctgagcccggctgctgctgtggcccttgcgccttagtgctcccgcggctcccgatctctgcggcctgatctggggcccggcggggcggcgtcgccaacctcgtgcacagtccccgcgagccgagccggagcccgacttcgcaagcgcgagaacaccgctgccgaggccg

SEQ ID NO: 127732 - DNA, 917 bp, Homo Sapiens
ttcagcaatggtctgagaaagcagacagatcccaccagacccggtcatcagagttgccgtccgcagggccgcagggctacgccgttataggctgcagcggaaggcttccttcttgcagtccacatactactactcgagctgggtcccgattcagacatggaatatcctgtacatggtgtccatccatgtatcttgtggcgtcccggaataggcggtaggagatgaagccatgggggtccacactatcaatgagtggaaacgcagtcatgccagtctctgacgtaaagatgacaatttcatataaaggggcaagctgctggaacaaggtctcgatgcctgggcgcttcttaaacctccagccagtggccagcgaccactcaggatgcaagaggacgccggtgagctccaaaacgagcgtgtagggtggctggtagtacggttcctgcagagggtctgggagaaggcaagggctggtgggctcgatgatcatctgtctataatctttgaaatatttgtatgtccggcgcaactgctgtaccagaattggatcattgtcgaactcatcaggaatcttggcaccattttcgtccaccgggttgtttccaaagatatagacgacgctcacagtcccaccagctccaagcagcccagcaagccagagcgcaacttttttggcatagctgggaccctctgagcccggctgctgctgtggcccttgcgccttagtgctcccgcggctcccgatctctgcggcctgatctggggcccggcggggcggcgtcgccaacctcgtgcacagtccccgcgagccgagccggagcccgcttcgcaagcgcgagaacaccgctgccgaggccgccagtctgccctcgtgccgatttaacaccacggcctcgacgctagaccgtacgggggga

SEQ ID NO: 127733 - DNA, 686 bp, Homo Sapiens
  misc_feature (288)..(296): n is a, c, g, or t
tttattttggatgtgaatgtattaacagctttggagagggagattgttagagatccaggctggtgacttgtagaaccaccgaaagctctgagacagaaaggggctaatgaaagtctctagttgcagttgggtgtggatggcacacaaagaccttaagtgtttaggtgatttgctgcaggcttctcggccgactggaagcagagcacatctagattgtagtttctctggtgccagggcagtcttagttgtcctgttataccatagttttgctttgtagggaatatgaannnnnnnnnataaacgctgagaaaaaggtaggcatagatggtgctgcagtgttctttctttgttagtttaactgaaagtctgtcatccacgccttcttatgttgtccttctcttcctctgaaggaattcacttggaatcttataacagtggtacgttgtcttattcaggaagaaggagagacgaccatcttgcaactgaagccttgtccccaccacacaggacagccttcctcctgaagagaatgtctttgtgtgtccgaagttgagatggcctgccctactgccaaagaggtgacaggaaggctgggagcagctttgttaaattgtgttcagttctgttacacagtgcattgccctttgttgggggtatgcatgtatgaacacacatgcttgtcggaa

SEQ ID NO: 127734 - DNA, 3155 bp, Homo Sapiens
ccttttgaaatgtaagtatacagattttaatttatttttaagaataattgtatattttaaaaacaggacacgtactgtatgagtaaacagcgtggctaacaccaagtccacactggtaagcttttgagaaccatttacactatgttgacagtagtactgctgcaggcagacagcggaagaataaataatagtgcttcaagaagagtagtgattgagaggataggtaaagagggcgcctcatcgtggaagctagagcaggaacacctccccagtagtgacatgtgcaaagttccagatctccacgacaaagacagctcaacccattggaacaaacagactcccaatgtggctggcaactgcgggggtagaagaactcaggcaaagtaggcacaggaatgggggagatgagagccaagggacaaacgccgagaaagcgttccgacaagcatgtgtgttcatacatgcatacccccaacaaagggcaatgcactgtgtaacagaactgaacacaatttaacaaagctgctcccagccttcctgtcacctctttggcagtagggcaggccatctcaacttcggacacacaaagacattctcttcaggaggaaggctgtcctgtgtggtggggacaaggcttcaggtaagagcaaagctatgatagctacagcattaattgaacatgcctaaacaaaaaagatgttaattactagttacaggtatacatgccaaaattacccccagggatgggcatagtcaatcattttcctacagtggtgaaataaaacaagctttgatcatgcttcagcaagtagaattatgtggtagagaagtcaggccccatatgctaaaatttgcacttcttgccataaacttttcatgtatataagtcaaaaccaagtctcctaggaccactaaacctatgatgggctttcaactgtaacactcattcacatctttaagttaggcccatggtcatggaacctggccaaggtttcaagcacgcctaagctgaagaaaaactaaagtcacccccatataattaggtccagtctaggcacaggaagccacagctggttgactgatcagggcttctcaggactggatgttggttgaattgaggattccagaagtagcatcagatttggaagcctttgaaagttctcgctgaagcccaacagtggaactgtcagagagggacggatccttcgcaaactcagaataggtgctggcaacagaattaatgctgaagttgcgctggaggggggccgagccagggtacccaccactcaggatgctgccgttgagctccaggtctctccttgttggctccatgcctgccagtacggggtgttttcttccctgaacaggtggaagcagcgactggcttgctgccagaaggaggaagtcgagacacgggggagtggtagactgtccctccaaagataggccgaatgctactattggccgtagcattggacatggtggtagtgttcagcttacgtgctttgcccggtgtattgggagccagtcctcgccgcttgctaggtgttcgaggagcgctgccatacagcatctctgtctctgtctgttttttgttcttcagttgtctttcctgcttggctctctctttctccaatcgatgcatctcccattgttctgccacatactccatgaatttctgcccattcaccataaatgcctttgaatgttcctgttcccacaattcaattcgtgccttcaactcttcttccagcttgggcagcattttctggagcttggctcgttgtttttcttcttttagaagatttcctcctcggtttgtaaatcgatttggatctgaagcttttctctcaaactctaagaaaagcctccaggtttcttcccacttctggacaccttcaaagagttccttgtgaacttcatagtagttttttaaccgcacaatctcagcatcgtggagctggagcagactttctgtgtagtcctcagcacagaaaggggcaaaagcttgtctctgctcctggctataaaagcactggtcccagtactgaaccagctccactcgaattgcctcaatcactttcttcatgttttgcattttcagttcttccaaccgatccacttctaattgcagcgctttccggaccttggcctttgacccagacataatggtggccacagcttctctttcttcttcaggtatttgcaacctgtcccagagctctcggatttgagtacgcagcccctcacacactgcttcattttgtgatttctgcatttccagctgccgtagcaacttttgtagtgttgcaatattctccaaagacaaacaaaaggcatcttcgtcttcacacaccacatctctttcaaagcttgtgtctggggtgtggtctaattcttccatacacagtatgatctgtctctttatactgacaaactcctcacgcctagaagcctttgtttccctcaaagttgtcacatgttgcctgaactggttcagctcttctaagctgggcactgaggcactgtcaatatcatagtggggcatacaaagaatttcgcacagttcttgatcttgctcttgaagtagcttcagttcctgttttctctcctttttctgttttcgcatcaattccacttgggtgcgcaaatctttttctagttgcaagatggtcgtctctccttcttcctgaaatggctcaacatgtaactcgctgcacagagtgttcagctctttctgacagacggatatgcttttgatgagtctttccttcaggctttcctcttcagcaatcatcatatccaggagttccttgatatgcttctttaccacctcagttctttgtaaccgctggtcctctggaatcccaattagctcccatatttcccgaaggtgatttagggctttctgcagacatactatggactcctccgccagcacctcacttctcctcatggcggacgctccaagcagccgtgagtccaggtccagacctactccacacggccccgagagcaacaaccacccgcaaacaccggcgatgtcactccgcgtagccggctccgcgagccgttgagccccgcgaaaatttcaaaccgcgccacggggcgaagcctcgcctcgtgccgattaaaccgagctgtggtcgtggcgg

SEQ ID NO: 127735 - DNA, 983 bp, Homo Sapiens
tttcacaatcttagttttatcatattgttaaaagactttcaagaaataatacaaactggagatagtagatacacaggctccattctaagaacaaagtctgttagaagcaggaacacttggacaaatatgggatgggagggatgtcaggccgaggttagagtggtgatctctccccaccctttagggcctttggaggtggagaagggatcctgcctgctagcaccacattggaagggatcatctggtccagaacccccatttctatcaactaggagctggggggagtagctagcccagagacttcgggtcagggttcaacaatcaggaagacccagttcctgaggaaacgacagttcaagaagggttgggaagaaggctgtcctctaaagaagacgtcctctgcattcaatggccccacagcaacagagtagctccttgccttccacactgcccacctcgtagttgtagtcccaagtaagttctgtcccagcccggattcttttgctggcaaagaaggccacccaggggaagcgaagatcatgggtatccacgaagacattctggacaaacaggttggggctgcaactgtggttgaggtagcggcccaggttgccttcaagcttggcatcaatgatgtagcaagactcctcgccatcatagaattggcgtgtgttcttacgaacaggtgcgctctcccccttgtccacagaggccatgttggttgatttaattgcaatcccatgggttgatttaagagcaaagcctcgggttgattttactgccacttgacgcttcattggacctggacaggagggagaatggggtcaggacccatcccaactcatgaacagacattctatcatgaatggacattctacccctatttctctcccaacattgcagctgagaaacaccaataagctggaactcaaagaccctaagtagcaggtgttgttttcaagcataattagatctgctagaca

SEQ ID NO: 127736 - DNA, 531 bp, Homo Sapiens
cagagtccagccacgggcagcccctgccctgcctctggtcaggacaacacctgcccaaggagagcaagggcctgtgacctctgctggcctgtgcgccctcacctgtcacccagctcagccctgtgtctggcctacccagggaggaaggaaccagatttatcagcctgaaaggaggtagaagttttggagaaaagacactgttcgggtgtcaagtaatgaactgactttattcgaacctcatctccaatccaatcccaccgtggtctctctctccctcagcttttctggggcgggttgactcgtgtgtcactttatcacaggggcacatggggtgagaagaggaaccttggcagtaggagatacctttgtaccaggttttaatttccagtgtacatctcagtcccctcccctaaccctcaacacagcctggggaaagcccagcttgcaacaccagttctcagcccagactgacagccagatagatcttggccctgagtttgccaattaaagatgccgtgattattacctaaa

SEQ ID NO: 127737 - DNA, 628 bp, Homo Sapiens
  misc_feature (596)..(596): n is a, c, g, or t
aattttgcaactttaatgtaacactgatacccaaaacatgaaaacacaaggaaaagcacaaaatgaaagcaggaagagcaaagagagcttcatcttgcatgccacctccgactgacaggaagaagccgcctagggtgctgtgtcgagaaggaatctgagaggaggcgctctggcttggccagtaagatcgctgcagttcgtcaacggtgctggatccaggagaagaagctggcgccagctctggcagcatttctggtccggatggtggagctggtgctggggccatctaggacgctggtgctggcccctccattggtgccacttgttgacgccagctctccacgtggccctcctgttggcacggttgctattcagaatgtactgatggtatctgggccctggcatgttcctcggccatatccacatccattgtcttgaaagcatcatccacagcctccaagaaatgagccttccattcccgggggtctcggttctgattctgggcgatgaatctcaggaccctcatcttgctggtctcatggcgggctcgcaggccccagaggaattcatactcaggtgggttgctgttggggatncttcttgtattccaggtacttctgcttcacac

SEQ ID NO: 127738 - DNA, 803 bp, Homo Sapiens
tttttaattttgcaactttaatgtaacactgatacccaaaacatgaaaacacaaggaaaagcacaaaatgaaagcaggaagagcaaagagagcttcatcttgcatgccacctccgactgacaggaagaagccgcctagggtgctgtgtcgagaaggaatctgagaggaggcgctctggcttggccagtaagatcgctgcagttcgtcaacggtgctggatccaggagaagaagctggcgccagctctggcagcatttctggtccggatggtggagctggtgctggggccatctaggacgctggtgctggcccctccattggtgccactgctgacgccagctctccacgtggccctcctgttggcacggttgctattcagaatgtactgatggtatctggcccagaaagcaaaggggatcctggcccaggcatcgccaaaatctccgtcctcatcccaggtcaggagctcgacttgtatgtcatcccagctccaccgtccaatcagcgcttcatccccgatattcatctgggccctcatctgggccctggcatgttcctcggccatatccacatccattgtcttgaaagcatcatccacagcctccaagaaatgagccttccattcccgggggtctcggttctgattctgggcgatgaatctcaggaccctcatcttgctggtctcatggcgggctcgcaggccccagaggaattcatactcaggtgggttgctgtaaggggatcttcttgtattccaggtacttctgcttcacaaagtcatctgtgatgagcttcctcagatc

SEQ ID NO: 127739 - DNA, 357 bp, Homo Sapiens
aattttgcaactttaatgtaacactgatacccaaaacatgaaaacacaaggaaaagcacaaaatgaaagcaggaagagcaaagagagcttcatcttgcatgccacctccgactgacaggaagaagccgcctagggtgctgtgtcgagaaggaatctgagaggaggcgctctggcttggccagtaagatcgctgcagttcgtcaacggtgcctataaaagcacaagaaaccaaagtgacaacatccgtggacacacgcgaaccagggaggggtgtacgtaacaaaataagtgtccgtccatgctgttgccgttgcccccagcgcccccaccccggccctccctctgacatctcacccc

SEQ ID NO: 127740 - DNA, 622 bp, Homo Sapiens
tgttcaccccttcggagtaggtttccttggtggtttttaggacatatttgttggtaaacctataacagttgcttttactttcagtgatgtacttttttcttttcctgcttcccagagatttatcagaggaggataaagctcacctaatgcaaaggttggtttctgtaagtaattcctcacatagctgtgtccaccatcacagttcatttctggagagaggcagctgataagacatatcacaccaataatccccagaaggcctccaagacaggccataagtgttgtggtattattcttttcatactctttttgatcagggtgcaaacctttggtggtgacatttacacatttttttctgtttttctgatagatggtgggaatatcaatacaaattttatactcagttgatggattcagatgagtaagattatataccttgacatcagatggtattcgagcactttgcgcagcatgagaattttcagtcttgacaaaggctgtccatttaacactagatttgagaattttagaacttgctttccaggacaccaaaactgcattggccctgaatatctcttattttaatattcaaagagccattgttatcttgtggaaaagatca

SEQ ID NO: 127741 - DNA, 1807 bp, Homo Sapiens
  misc_feature (94)..(153): n is a, c, g, or t
tgggtacggcgctccccccaccgagaatttgttattcttagagacaccggtttcccaatattggtcagcttggtccaaactcccgatctaagtnnnnnnnnnnnnnnnnnnnnnnnnnnnnnnnnnnnnnnnnnnnnnnnnnnnnnnnnnnnnacggtctttccaaaagaccagataatttatttaaccaactgtctaaagatggacattgtgattgatcacactattttatatgtaacattgaatggagtgggtgagtcctaggaaacattctctcctaaaagtttacatttttcattgactagaagtgaccaaaatagattctactgatgagaaaagacttttgaaagcagtatggtcaggttggcaggtgaatggcctcaagagcttaggatttcattgctactaaaagaacaagactattcagttgtgaaacaatgatttagtcaaatactgatgctgtctcagatgagtaactgcaaatcacttcaaaaggtagaagggtagcttaaatgtgaaaaaggttactgccacttcatgtagggaagataacaagcatttgcaaatagcaaaatagaaagaaataaatggtttcagtacaagctcttatattcacttggcatcaaaatagtccaaaataaatctgagaaccacggcaagttatagctgtgttaatgacaaaatgtgatatttactgtttaaatttagcagctgggagaatccccttataaggaagacagaaaatacatttatatccagactgcattactctttggaaaaatatgaccaatcagattttgggtattattgttacaaccttttccttcacctctgcatcatggtgatcaactaaagctcttattttctgggcacattcttctccatgtaacaggaaaaacaatgaaccttcagtgaaagtaggctgcacagctaaatggccttctattttgaggcagttctttatattctgaaatagcgtaagtactcgaagaagaatctcctttgctacgtggctgtcataaagggaaaggaatgatgaatccacttgggcacggagaagtccttctgtcatggctggattttcagacaaattcaaaagcagtttcaaaacttgcaccttcgtgtttccatttccagtaagtaacacctggaacaggtctgtaatgtaactgtgaagcatgtgctggtggtcattggtaacagtcatgtttgtcaacaatgtcagtccagccagctgcacagcagagttcagaggaccagagaagacatcctcacatacttgactgatgtatatctttatcttgatttgattttcaacattcacactcaggttatttagtgcatttaaagctttctctttaatactctggttggaatggttgattttgtttgcaacaattggaataccacccaattcacgaataatagcttggttaactgaaaaggctgcattgttacccaaagtaatcaaagctctttcaataattacaggatcctccgttgactccagcaggtaaaggagtttctgaagttgttcagcatttagaacatcatcatatgaaccatcagttaagtcttctgcggacttcgaagagcgtatcccgagctcgcggtcgccccgccgccgaccccgggtcagcctgtaaatgcagtagcaggcgcccgcgccgagcagcaggcccgccgccacccagcccgcgccccgggggccacccatgctgccgccgcggcagagccgcagcgccgggccagggcaggaggctcgcgggggccagcgcggaggtctccagcgcacgcgggcctagcc

SEQ ID NO: 127742 - DNA, 667 bp, Homo Sapiens
  misc_feature (641)..(641): n is a, c, g, or t
ttattttttgaagatttaataaggcaatattattgccaactggttttatcactcagggcatttaatagaaaatttgttaacattgtctttaatttgcttaaatatttatgaacattgctttcaagagaatttatatctggggctattctttaatagaattcattttgttgtggtttcaacttttctgtgtttcatcttgttttgataaattctgctataattgtctttaaatgctttagaatctgagtgggagtctctttggatcccattcctgcttgttccaccttctggaaccccagattcaatcagagtgtttaccacagggatcttggtcctgatcacaattcatcatcttctgatatggaatctaggtaatctgtgtcaacgtataagagaaacccggagaataagctgtctgcccaacctgggtctgagaagaggcattctggtctgtgaagaaaatctccagccagacttcatcttctggctgcagatagatgactgtggaccccgaagccacatcatggtttcctgtgttggcgtcgaaggtctttatccggtattgcccattgtgtaccagtccgattgccagatgcttattagccaatgtgatatcataagaaaagtaatagatccctggngaaagcacagatgaacttccctgtgg

SEQ ID NO: 127743 - DNA, 1146 bp, Homo Sapiens
  misc_feature (597)..(597): n is a, c, g, or t
  misc_feature (828)..(887): n is a, c, g, or t
ttttttttgaggcttggaattgatttattaagcacatcccttgccaccctcccaccttaaaagttttcagtatcaaaagaagctagcgcaggccacccgagtccctgaggttggagtcctagcatagctcccctccctcaaagagggacaaggggtcaggggcagagcaaaaatccagtctgcttcaaccacggagactgcctttgggatggaaagtttctggagctccctccattctattcctgtggggcaggaacatgccagggctgctggtaaatggcaggggtcacctttaccagggcgcaggcatagtgtggcccctgcctgccctggggccaccctggaacagtaagaccctctgggaagggaagaaaccagacccagccataagctttctccccttctccctcaaatcgccccttcctcctccccaaaatcaggctatggcaaaggggctggcagcaggggaatggaggttttggaggggaaggccagccatgcgaaggcaaggagaaaaggaggatggagagagccccagccatccccattttccttcctctgcctccgaggggctgcttcctggagggcactgttgtngtggggaccctgtgaggtttgcaggaggcgggcaaaggggcaccagacagggaacatgcacacaggcagcctggccatggagagctcctggctgtccgcccaggtggcgtcttgggcagagctggcgctccacaagtgattattgatggtgacaggattccctcatcctgctccaacctctcaactgtggacacattcaccggcagtcactcatctcacatgcccaccagnnnnnnnnnnnnnnnnnnnnnnnnnnnnnnnnnnnnnnnnnnnnnnnnnnnnnnnnnnnnttgaagccacacctcttccccgacaacacccgtctccacactgcgcacctaggcctgagctcacacacacccaggcccatgctcacggccctgtcacctatgcactcagcctggcccacactcccgacacacggtggcaggctctcaaccagacagcagcacaggatccttgccctgggcttgctggagccctggccctgaaagggagtatggtgaggcctcctgggaacctggctcctcgtgccgaattcgccaccca

SEQ ID NO: 127744 - DNA, 1072 bp, Homo Sapiens
  misc_feature (359)..(361): n is a, c, g, or t
  misc_feature (487)..(547): n is a, c, g, or t
atttgaaattttaaggtcagtttattaagttcaatgatgaaagctatcagaagaatattctcctgaaaataattttttcttagaaaaaaagaaaggaaaatcataaccctctgagcatagccacagatgctgtggcagtcaagcctctctgcagatggggacagtccattagtcagctgagtcactctctgggtcagcaggattatagtctggatcatcttcatcatcctccagctccaagtcatccatttcttggaacaaagactcatctacctccacgttgtttccagcatcctccaagaactggatatcagatgtgtcaagattatgatctgtttcaaatagttgtttcccacttnnnaatttatttttcctgctgttcttcttctttcatccgggtctttgtaatttccagagttctgcatcaaacttggctttccaatttaagaaattctcaattgtaactggagtaccatggaataattgnnnnnnnnnnnnnnnnnnnnnnnnnnnnnnnnnnnnnnnnnnnnnnnnnnnnnnnnnnnnnatctgatctactatttcatttaatttttcttgcacagctgtcactagagtaaaaatcatcaccataccaagattttcttcagcctgtaatgctagtaattttaaaatgtctgagacatcattatcttctagattttcctgggagaatatttcataaaggggagcttcatctgggtatttttcactgtatgtaaacttgagggtagtctggacagtttcatcattttctccagcctcagacgtcacagtaatggtgaagctgggtggattttctgataatactgtgaaggagtcagggtagatggactccagggcctccagctcgttgcgctgctcctcgccgtaatctgtcatcgtggcccttgctcttgcccatagatcgcccagacacctaggcggcgcgcagcagcccagacagctgccgcgccgggagagcggcggcgaacgcgtggtcgacgatatcccgggaattccggaccggtaccagcctgcttttttgaaccagctggttcatagtacatgcact

SEQ ID NO: 127745 - DNA, 627 bp, Homo Sapiens
atatttgaaattttaaggtcagtttattaagttcaatgatgaaagctatcagaagaatattctcctgaaaataattttttcttagaaaaaaagaaaggaaaatcataaccctctgagcatagccacagatgctgtggaggtcaagcctctctgcagatggggacagtccattagtcagctgagtcactctctgggtcagcaggattatagtctggatcatcttcatcatcctccagctccaagtcatccatttcttggaacaaagactcatctacctccacgttgtttccagcatcctccaagaactggatatcagatgtgtcaagattatgatctgtttcaaatagttgtttcccacttaatttattttttcctgcatgttcttcttctttcatccttttctttttaatttccaagagttctgcatcaaacttggctttccaatttaagaaattctcaattgtaactggagtaccatggaataattgctttacagcttcttctgcttctttatcctatagtttcatttctacttcacatctagttattatgtgatctactaaaaacattaattctttcatgcacagctgtcactagagtaaaaatcatcaccataccaagattgtt

SEQ ID NO: 127746 - DNA, 1474 bp, Homo Sapiens
  misc_feature (1400)..(1434): n is a, c, g, or t
gcggcatcccacaaatgggccctttatttctgaactgccaccactgcacggataaggccacttgggttgcaggcacactgtggagtgtcaggggacagagaggagaggggctgcacaccaagactgccctgtcctcacggagaggaaaagcggccgcagaagagaatcccgttggtcttgctgtgctggatgaagaaaaggaaggggtggtcggcgcagaagcgggggacgaatctggcacaccgcatcatcatgatggcagctgtggcggctgcagcctccgtgccttcctcattgacctccacaaaagacttgtgcacgaccttggacagagacaggtctgtctgggacattccagagaagtctgccttgcccagctcgaaggcatcagtcatgcccaggttgcgcaggacactctccatgtcgtagctttcctctagtttaaaccgcgggagggacacttccacctcctcttcatccatcatgtccagcctcgtccattctacgaacttctcgtaagtgagttctttctccaccgttctcaagtcagtggtctcgtccggaagcatgatgatcatattcagttccttgccaacatatggaagcaccaagatttgggtaaatatttctcctatataggtcttcttaaaagtagattgcttaaacatcatttgcacaggtttctcctcattcttgctgactttaaacagtctctcctcggtgttctccttgtcaaactgttcatcccagtttcctctgaaatagacagcattcaccagaaccagccttgtcaatggatccactgagcccggagagagcaactccgcaattttaccttctgtcttttcagctacccaggtgtttatgtgttttctggacttctctacggcgctgataaagtcaagctcctccatctctgcttggtagaatttttggcaggaatctctaaaagatgagaggaaatcacaagacttttccccaaagagcctgttggccatcctaagcaagtactgcgtgccagtcttgttcacttcggtgagaagagactggaagccctggtggatgtctccaccaccgccacttttattgaaagaaagtatctgggccatctgtgcagcggtgtttccctttgcccccatgtagaccatggccagggcacaggacatgctcatgggtgagaaaaacacattcttcgagttgtctttacccagcgttttcaaaaggtttaaggcaaaggtgccatttgcttctgcgagaacatccatgatggcagacccaagccagcgtgtccgagcggctcccaagccagacacgtactccagagcggggagcgagcgagcagaacggcccccggccgtaatggccgaattcccgggcatatgtccggtaccgtcgactgnnnnnnnnnnnnnnnnnnnnnnnnnnnnnnnnnnncgcctgcttcctcgctcacaactcgctgcgctcggtcgtt

SEQ ID NO: 127747 - DNA, 1381 bp, Homo Sapiens
  misc_feature (1057)..(1057): n is a, c, g, or t
  misc_feature (1062)..(1062): n is a, c, g, or t
  misc_feature (1080)..(1080): n is a, c, g, or t
  misc_feature (1089)..(1089): n is a, c, g, or t
  misc_feature (1124)..(1124): n is a, c, g, or t
  misc_feature (1131)..(1131): n is a, c, g, or t
  misc_feature (1142)..(1142): n is a, c, g, or t
  misc_feature (1162)..(1162): n is a, c, g, or t
  misc_feature (1169)..(1169): n is a, c, g, or t
  misc_feature (1204)..(1204): n is a, c, g, or t
  misc_feature (1230)..(1230): n is a, c, g, or t
  misc_feature (1250)..(1250): n is a, c, g, or t
cgcgtaattttaattacggacgggtgcgctgtggtgcctccgtcttgtgttaataccgccctgtattctcccctccggtgactccccctttgcgatgtgtgttctcaatcacacactcctgtgctgttcccccgccggggctttctttttaatcactgggtgcagacatcctcccgcccccgttggttctctgcccctcgccggggttctctccttgtgggcaccatcgctctgtggcgcccgttccggttactgttctcctcccggggcgcccgcccgccccacgcactgtgtgtttcaaacagagtttttcgagcgtgcctcctcccctcccaacaaccgtgtgtctcttattcactatttcttcgcttttgtttatggactgcggcatcccacaaatgggccctttatttctgaactgccaccactgcacggataaggccacttgggttgcaggcacactgtggagtgtcaggggacagagaggagaggggctgcacaccaagactgccctgtcctcacggagaggaaaagcggccgcagaagagaatcccgttggtcttgctgtgctggatgaagaaaaggaaggggtggtcggcgcagaagcgggggacgaatctggcacaccgcatcatcatgatggcagctgtggcggctgcagcctccgtgccttcctcattgacctccacaaaagacttgtgcacgaccttggacagagacaggtctgtctgggacattccagagaagtctgccttgcccagctcgaaggcatcagtcatgcccaggttgcgcaggacactctccatgtcgtagctttcctctagtttaaaccgcgggagggacacttccacctcctcttcatccatcatgtccagcctcgtccattctacgaacttctcgtaagtgagttctttctccacctagagggagacagttgaagactttaagacctagggtgctgctgcccagcagggccctgtgctatgctgtggatgcccacaccagtggcagcgtggctatggtcagcagcgctccagtgtttaacggctgaccgcanagtanggacagcagccacagcanacacccccnagtggctccttgctagcacgcctcgctcacagctnagctttnaccgttctcangtcagtggtctcgtccggancatgatnatcatatccagtcccttttgcacatatggagcacnagatttggctccgtgcgattcctggnctcgcaggccaattccctanatgagtcgtataattccgatccagtcaacttttccgtgtgaattgtatccgtcaaatccacacacaacagcgggacataatgtaagctgggggctatgatgagctaccaattatgcgtgcgtactgcgctt

SEQ ID NO: 127748 - DNA, 951 bp, Homo Sapiens
  misc_feature (148)..(148): n is a, c, g, or t
  misc_feature (445)..(568): n is a, c, g, or t
tccttctgtcttttcagctacccaggtgtttatgtgttttctggacttctctacggcgctgataaagtcaagctcctccatctctgcttggtagaatttttggcaggaatctctaaaagatgagaggaaatcacagacttttccccanagagcctgttggcccatcctaagcaagtactgcgtgccagtcttgttcacttcggtgagaagagactggaagccctggtggatgtctccaccaccgccacttttattgaaagaaagtatctgggccatctgtgcagcggtgtttccctttgcccccatgtagaccatggccagggcacaggacatgctcatgggtgagaaaaacacattcttcgagttgtctttacccagtgttttcaaaaggtttaaggcaaaggtgccatttgcttctgcgagaacatccatgatggcagacgcnnnnnnnnnnnnnnnnnnnnnnnnnnnnnnnnnnnnnnnnnnnnnnnnnnnnnnnnnnnnnnnnnnnnnnnnnnnnnnnnnnnnnnnnnnnnnnnnnnnnnnnnnnnnnnnnnnnnnnnnnnnnctaaaggacttttaattcaaatggaaatgtccacctaagaaaggctaataataaaacactccgtctccggtaatatcccggagaatctgtttcaggcgctgatctttatatcagtaacttcaacaaagcaaagccacctttgtctgaagacacgcccactggggaggtgcctgtctggccagcccaggttacaccatctggggcagaggagaagtcggtgcacatgagtttcactgtgtcaggggatttaatttgaaatactgaactggagaaaccaaagcaggatattcggaggagaagtcagtgcacatgagttttactgtgtcaggggatttaatctgaaacactgaactggagaaccagaccaggatattcggaggaga

SEQ ID NO: 127749 - DNA, 786 bp, Homo Sapiens
ttctcctatatagtcttcttaaaagtagattgcttaacatcaatttgcacagttttctccctcattcttgctgactttaaacagtctctcctcggtgttctccttggtccaaactgttcatccccagtttcctctgaaatagacagcattcacccagaaccagccttgtcaatggatccactgagcccggagagagcaactccgcaaattgttaccttctgtcttgttcagctacccaggtgtttatgtgttttcatggacttctctacggcgctgataaagtcaagctcctccatctctgcttggtagaatttttggcaggaatctctaaaagatgagaggaaatcacaagacttttccccaaagagcctgttggccaccctaagcaagtactgcgtgccagtcttgttcacttcggtgagaagagactggaagccctggtggatgtctccaccaccgccacttttattgaaagaaagtatctgggccatctgtgcagcggtgtttcccatttgcccccatgtagaccatggccagggcacaggacatgctcatgggtgagaaaaacacattcttcgagttgtctttacccagcgttttcaaaaggtttaaggcaaaggtgccatttgcttctgcgagaacatccatgatggcagactccagagcggggagcgagcgagcagaacggcgggcagaggcgccggagccgccccggacctcaaatactcgcggggggccggggcgtaatggccgaattcccgggcatatgtccggtaccgtcgactg

SEQ ID NO: 127750 - DNA, 1015 bp, Homo Sapiens
  misc_feature (889)..(923): n is a, c, g, or t
  misc_feature (927)..(967): n is a, c, g, or t
cttcgctaccgaacttctgctgaagggatgcctttttcaccccggtggtcaaagtcaggtgtctccgtcctggatgcatgatgatgcatagtgcagttcctgccgagcaataatggaaagcaccgaagagtttgggtaatgagtttcctccctatataggttcttcttaaaaggtagattgcgtaaacatcaattgcacagttcgtcctcattgcgtgctgacttgagacagtctctcctcggtgttctccttgtcaaactggttcatcccagtttccttctgaaatagacagcattcaccagaaccagccttgtcaatggatccactgagcccggagagagcaactccgcaattttaccgtctgtcttttcagctacccaggtgtttatgtgttttctggacttctctacggcgctgataaagtcaagctcctccatctctgcttggtagaatttttggcaggaatctctaaaagatgagaggaaatcacaagacttttccccaaagagcctgttggccatcctaagcaagtactgcgtgccagtcttgttcacttcggtgagaagagactggaagccctggtggatgtctccaccaccgccacttttattgaaagaaagtatctgggccatctgtgcagcggtgtttccctttgcccccatgtagaccatggccagggcacaggacatgctcatgggtgagaaaaacacattcttcgagttgtctttacccagcgttttcaaaaggtttaaggcaaaggtgccatttgcttctgcgagaacatccactgatggcagactccagagcggggagcgagcgagtcagttacggcgggcccccggccgtaatggccgaattcccgggcatatgtccggtaccgtcgactgnnnnnnnnnnnnnnnnnnnnnnnnnnnnnnnnnnncggnnnnnnnnnnnnnnnnnnnnnnnnnnnnnnnnnnnnnnnnnactaaacgcgctggcccatatgaggtagtattagttctgcccctcccc

SEQ ID NO: 127751 - DNA, 1113 bp, Homo Sapiens
tgcccaggttgggcaggaacattctccatgttgtagctttcctctagttaaacccggggaggggacatttccacctcctttttcatccatcatgtccagcttggtccattttacggaacttttcttaagtgagttctttctccaccgttctcaagtcagtggtctcgtccgaaagcatgatgatcatattcagttcttgcccaacatatggaagcaccaagatttgggtaaatatttctcctatataggtcttctaaaaagtagattgcttaaacatcatttgcacaggtttctcctcattcttgctgactttaaacagtctctcctcggtgttctccttgtcaaactgttcatcccagtttcctctgaaatagacagcattcaccagaaccagccttgtcaatggatccactgagcccggagagagcaactccgcaattttaccttctgtcttttcagctacccaggtgtttatgtgttttctggacttctctacggcgctgataaagtcaagctcctccatctctgcttggtagaatttttggcaggaatctctaaaagatgagaggaaatcacaagacttttccccaaagagcctgttggccatcctaagcaagtactgcgtgccagtcttgttcacttcggtgagaagagactggaagccctggtggatgtctccaccaccgccacttttattgaaagaaagtatctgggccatctgtgcagcggtgtttccctttgcccccatgtagaccatggccagggcacaggacatgctcatgggtgagaaaaacacattcttcgagttgtctttacccagcgttttcaaaaggtttaaggcaaaggtgccatttgcttctgcgagaacatccatgatggcagactccagagcggggagcgagcgagcagaacggcgggcagaggcgccggagccgccccggacctcaaatactcgcggggaggcgggcggagtcccgggtctcgagctaccgtcgcccgtccggagcgcggagggagaggcggggcgggacgtgcgggtcaaccccacccgccagccggaggggccgcgagtcctgcccggaggccttgactttgaccacagtacagggcccc

SEQ ID NO: 127752 - DNA, 631 bp, Homo Sapiens
ccccaaatgctgcacgtagcatccaaaagtagtcttttttgagagagtggctagggacattaggtaaagagaaagcaaagatactttattgaggattaatgtcatggtagttggaaggaaaacttttagagaattttcttgggaatactaactttgcatttatatgaatgtatacagcagatctgttcagagtttaaataacctttgaacccttgttctcattatatatgtggtatattttacagggaaattatattttctttcacactttacttgttatttctctaggagaggactgctgttttttcttaaagttcataaaatagatatatttgtgtatatgaaccaaactgaaggcacttctaatgagtgtttctacatttttagggaagcaggaattgaggaacagattctccagccatggattgtggtgaatctcgtggtggctcttctggttggattatcttggctatttttgtcttataggccaggcatggatcttagtgaagagttaatgttctcctcagaggtggaagaatatcctgataaagagaaagaaatcaaagcctcttcataataccagctcacctttggaggaataatgacccagtatttgtcccatttttgtttt

SEQ ID NO: 127753 - DNA, 902 bp, Homo Sapiens
gcacgaggcttgcttttggctctgagtacaatttcagcttttgacaggattgactttgctaaaatatcagtagcaatccgaaattttttggccctggatcctacagctttagcatctttcttgtactttactgctcttatactatctctgagtcagcaaatgacaagtgacagaatccacctttacacaccttcttctgttaatggtagcctctgggaagcaggaattgaggaacagattctccagccatggattgtggtgaatctcgtggtggctcttctggttggattatcttggctatttttgtcttataggccaggcatggatcttagtgaagagttaatgttctcctcagaggtggaagaatatcctgataaagagaaagaaatcaaagcctcttcataataccagctcacctttggaggaataatgacccagtatttgtcccatttttgtttttaaatgtatttttataagatgtatacatgtgtatttgtaatagattttttgattatataatactgaaacatctctcaatattatgaaaaatgttaaaattgtgtttgctgtttatgtctaaacattaatttgtctagcattatcatcttaatgacaaagggaataatgaactagaaaccagcaagtgaaagtgtttatttcctattttctcaaaacagttgtatttataactattaccttaaaaagcactggtttagaaaaagccataacttaaatagtgttataaaatatatatcaggtttaaacataaatttagcgaatatggtagaagggaaaaaagccttcatttttgacctccccttactgaataaattgaaatatgaagtttgtcttttctgaaatctggcttagtgattgagtatcatgtaataattatttactac

SEQ ID NO: 127754 - DNA, 498 bp, Homo Sapiens
ttccttttctggctaaatctgaataaactcaaaagaaactgggcaaggggtttacggctccccatggtgcttcacaaaggtccacattggccaactgtattcaactgacaagctgatcattgagaatcgagacatgcccaggacctagcaagccggggaccagccaccagtggcggccagggaccaccttcagcatccactctctgtttgagctgggggctcccaaaaccagcttacaatagccttttgcgctgcctgtcctgtgggagctgataaaccaagtcacatttgcattctgttgcaggcttagtgaaaaaggactgctgtctttccttggttcaagtgttagaatggagagctggagttcgttcagaatagtgctgtgtgttaccacgtctcccctgcaccccattcctaccttgtagctcatgaccattgtgtatagcatttctacactttgtttcttggtccttggcaataaaaagaatgatctccctg

SEQ ID NO: 127755 - DNA, 1299 bp, Homo Sapiens
tttaaaagcatacaaacaatatctttattacctgtaatatacttaaagagcaggggtccccagttggttaaacattgaaaacagtgggagagcttcagaatagagaaaaatgactgtgcctcacccctcacttactgagtcagaatctgcagagagggaagtgctgagagatgtctttttaaaaagctctccaactctccaggtgcttctgtccaccagccagatttgggcaccggtgctgcccagcatgccccaggcttcagggtatgggagtcgccctgggcttgggtcaggctggggctctctcattcaccaggtgtggggaggggcttgagcctgcatttccagcaaattcccaggtggggctgaggttgctgatctgcagtgctccatctctgggtgtgtacctacacacccgtcacctttgttgtactgggctcaggtataagttgcagggtgcaccgtgtacccccgtagccctgccctactccatgctgcccccagtctcaagtggtgcttgaacttgccttcaccaaggcagttctcgtctcagagttgaaccctccctgagggcccccaacagccctctccaggccttgtatcagtaggaaatgaaaatgcattaattgggaggggtttatctggggtcaaaggctcagggagatcattctttttattgccaaggaccaagaaacaaagtgtagaaatgctatacacaatggtcatgagctacaaggtaggaatggggtgcaggggagacgtggtaacacacagcactattctgaacgaactccagctctccattctaacacttgaaccaaggaaagacagcagtcctttttcactaagcctgcaacagaatgcaaatgtgacttggtttatcagctcccacaggacaggcagcgcaaaaggctattgtaagctggttttgggagcccccatctcaaacagagagtggatgctgaaggtggtccctggccgccactggtggctggtccccggcttgctaggtcctgggcatgtctcgattctcaatgatcagcttgtcagttgaatacagttggccaatgtggacctgtcgacgaattactccaaggtctctcttggctttattcactagggtttgaatttctacaggatcctttacatttttattttctctgaaggcatctcttatcctcctgacagcatatgttctgtaattgtaggcgctgaaacgcttgctctctctcagcatcgcccggtacagagataacacttgtgcgcgactggaggctgccattttggaaaaaaaagccc

SEQ ID NO: 127756 - DNA, 473 bp, Homo Sapiens
tttttttcctagatacaattcctttattatcattatcatgccccctagcacatgaagctgggcttccacctagatcagctaaggacaggggtatgtttacaatgagaacaatttctctatgcgcattaggttaagacctcttctctgtttctagaatactgtgatgactcacatccatgggccagctgcttccaggaatccatctggcctcaacaacattgggctgcctggaataacggctggcacttgcacagggcagggtatggggagcaggcctcaggtttataagcaggactgggcactgctgaaataggggaagggggcagccaacatgtagcaggttctcccaaggcatgtagaagttggtgggaaaatggggctggggtgtgtaacttgtccccttccaggaagggacccaggcacctggtctcctggccaagatcacaggcgatccaagagtcctccagggaaga

SEQ ID NO: 127757 - DNA, 1075 bp, Homo Sapiens
  misc_feature (61)..(95): n is a, c, g, or t
  misc_feature (834)..(834): n is a, c, g, or t
  misc_feature (844)..(844): n is a, c, g, or t
gtgccatagctaaaattaaccctcaactaaagggaataagcttgcggccgcctgctcaggnnnnnnnnnnnnnnnnnnnnnnnnnnnnnnnnnnnccccaggtagctatgttgtaattttatttcatgacagcaccatcttctctttgcctgcgcctgggcctcctagtgtgctgcttacgtgatgcccacgtgccacagagttattgcccgaagtgccagtgggctgtgcaggggatgggctcttccttccagatggtctgcagcctctgggaccacgcagccaccatcccctttctttcttcttcggatgcaatttcaggagcaaagctgatctgaggggcaaggactttaaatccacagaagtgtaatgtgccatgctggagtggccacaggaagtatcgagaatctccattgactcctgtcttcgtgtacatctcggccgtgcctcccgtggttacggaaaggagcgctagtttaccctggagcaaaccggaatcgtagaatcctgggatgtcaaaggcaaagccctggcacagcaccctatccatccagcccttcaggatggccggcacgctgaaccagtacagcgggaactgaaatatcactaggtcagcctcccgaacctttttctgctcatcagtgatgtcgctagccagagacctttgcttgtaggcttcgtgggtttccactccataattgaaaacctcaggattagaaagagtaccagtgatatctttgtctgtggccctcggctcaaagttcatggcatacaaatcagacactgtgacggtgcagccctgcctgctcagttcatctacagcacattcttcanggatccgttngaagactgggttctggtgtgcataacatgatacttcttactgcatagcgtagaggtggatcttctctctgtttatggtggtgggcttctgctatctcctcacgatcacatctcgacacgactccatagagcgagatggacgctccccaggcgtctagatgcgcagtccgcgatggcgccatcctacctgaggcgacctcatgcccgggaaggacgtgctctgcatctgcca

SEQ ID NO: 127758 - DNA, 819 bp, Homo Sapiens
  misc_feature (29)..(29): n is a, c, g, or t
ctccctgtctttcgtggtacatcttcggnccgtgcctcccggtggttacggaaaggaaggcgctagttttcccctggagcaaacccggaattgtagaatcctgggatgtcaaaggcaaagcctgggcacagcaccctatccatccagcccttcaggatggctggcacgctgaaccagtacagcgggaactgaaatatcactaggtcagcctcccgaacctttttctgctcatcagtgatgtcgctagccagagacctttgcttgtaggcttcgtgggtttccgctccataattgaaaacctcaggattagaaagagtgccagtgatatctttgtgtgtggccctcggctcagggttcatggcatacaaaatcagacactgtgacggtgcagccctgcctggtcagttcatctacagccacattcttcaaggatccgttgaaagacttgggttcctggtgtgcatagacaatgagtactttcttacctgccatagcgtaagaaggtggattccttctctctgatttgatgggtggctggggctttcctgcgtagtctctcttcagcgagtccagcaatcttccgaccagcgcactccccagtaggagccgcaggactgggacccgcgtctccccaaggaccgctctaggagttgcgccaggttccggccgcactggaccgcgcactcgctgacgcctggagggcgggagcgctgcgactgcgcccccggggaccacggaccggtgccaacctaagcagcccggacgcgtgggtcgacgatatcccgggaattccggaccggtaccatcctcttttttaat

SEQ ID NO: 127759 - DNA, 939 bp, Homo Sapiens
ccttcggggaacgccaacttccacgagaggcaaaaggtgattgttgaaggggtcaaaggatctttaatatccccccggaagtggtaaggtccccatgctgggaggggcccccaggaagatttgaggaatcttccattgactcctggtcttggggtacatgttcggcggtgcctcccggggttccggaaaggaagcgttagttttccctgggagcaaaccgggaatggtagaatcctgggatgtcaaaggcaaagccttggcacagccccctatccatccagcccttcaggatggccggcacgctgaaccagtacagcgggaactgaaatatcactaggtcagcctccccgaacctttttctgctcatcaggtgatgtcgctagccagagaccctttgcttgtaggcttcgtgggtttccactccataattgaaaacctcaggattagaaagagtaccagtgatatctttgtctgtggccctcggctcaaagttcatggcatacaaatcagacactgtgacggtgcagccctgcctgctcagttcatctacagccacattcttcaaggatccgttgaaagacttgggttcctggtgtgcatagacaatgagtactttcttacctgccatagcgtaagaaggtggattccttctctctgatttgatgggtggctggggctttcctgcgtagtctctcttcagcgagtccagcaatcttccgaccagcgcactccccagtaggagccgcaggactgggacccgcgtctccccaaggaccgctctaggagttgcgccaggttccggccgcactggaccgcgcactcgctgacgcctggagggcgggagcgctgcgactgcgcccccggggaccacggaccggtgccaacctaagcagcccggaacctgccccgcgccgcgggactgcaggccctttttacgca

SEQ ID NO: 127760 - DNA, 973 bp, Homo Sapiens
  misc_feature (640)..(659): n is a, c, g, or t
ggggcacgctgagccgcggacaccatgcagtcggatgatgttatctgggatacactaggaaacaagcaattttgttccttcaaaataagaaccaagactcagagcttctgccgaaatgaatatagcctgactggactgtgtaatcggtcatcctgtcccctggcaaatagtcagtatgccactattaaagaagagaaaggacagtgctacttgtatatgaaggttatagaacgagcggcttttcctcggcgtctctgggaacgggtccggcttagtaaaaactatgagaaagcactggagcaaatagatgaaaatctgatttactggccccgtttcattcgacacaaatgtaagcagagattcaccaagatcacccaatacctaattcgaattagaaaacttacactaaagcgacagaggaaacttgttcctttgagtaagaaggtggagcgtagggagaaaagaagagaggaaaaggcattaatagctgctcagctggacaatgccattgagaaggaattactggagagactgaaacaagatacgtatggcgacatctacaacttccccattcatgccttcgacaaagccctggaacaacaggaggcagagagtgactcttcagatactgaggaaaaannnnnnnnnnnnnnnnnnnnggaagatgtggggaaaaagagaatttgtcgaagatggtgaggtagatgagagtgacataagtgaattttgaggatatggataaactggatgccagcagtgatgaagatcaggatggtaaatcctccagtgaggaggaggaagaaaaggcccttagtgcgaaacacaaaggcaaaatgcccttgagaggaccactgcggagaaaacgagcctatgtggaaatagaatacgagcaggagacagagcccgtggccaaagccaaaaccacgtgatttccctttcagcatttatacccaggactgaacatgcagaactg

SEQ ID NO: 127761 - DNA, 712 bp, Homo Sapiens
  misc_feature (691)..(691): n is a, c, g, or t
ttttttacctcttagaaatatgcttttattatctgcacacagagatatgactgcctccctctaaagcattactatttgggagagggagtcttggggggtgatgggaggtcctgagtcatagcttccacataccatatgggcaggaaggcgtaaggtgcatcttggtgtacagacacggtgactgggccgccaggctcccaagagaagagatgaacgagcctggggtcatcctggacaaccgtgctctgggcaaagctaaggaaggcggcacagaagttcatgcacacagagggattccagccgtcacggtcattcctgacatattcaaacatcttcatggtaggaaaggtcttgagggaagagacaaaaccgtctgggttacggaagccagcaacaacattcgggacccctgggaggaatgactgagcccaccatttcaggagcttgtgtctgtagaaactcctccattggccagggctgtgcatctccttggaggtcttgagctccacatagcaggttgggggctgtgtggatggggcttgggggtctgtgcagtctacctcccctgagaagagcagagggtggcttcccaggcggctgcgtagcacagagcagaaggccacgttggtgttaacctccccagaggggtctggggagcttccaggtttgtctgcacacatgtactgctcanatttgtatcgcatgtacataa

SEQ ID NO: 127762 - DNA, 1075 bp, Homo Sapiens
  misc_feature (63)..(63): n is a, c, g, or t
  misc_feature (233)..(233): n is a, c, g, or t
tcccctggaggttcctggaagcttccacataagcagggttgggggccctgtgtggatgggggncttggggggttcggtgccattctaccctcccccggagaagaagcagaagggtggtttcccagggcgggttgccccacatgtactggctcaaaattggtatcccaggtacataagctccccgaggaagcgtgccccgagcaagccctctgggcccgagcgttcggtgtctnccacttcactcaggtatagtgttcccgggaaccgggaggctgccagctgccagccctcctgccgctcatacggtgtcgtcagcagttttgtcaggtgcccccgccacgtcactatggcctctgccagccagcctggacccccctccaaccggcctcggtgttccaggagccagcacagcaggtggtccagcctttcctggacctcctcgtcccggggctggtatcgatccgggtatccgtctctgaggtcaaagttggggcctggaccgttagtggggggtgggctatagtagcgcagggctcgggcatctccatggtactggcgttgagcatccagggagaagcagcccagttccgaagggcgccggtagaaaggaaagggcccagagtagagggcagggtctgtgggcagagaaggtgctggacgaggtagtttgttccgaggctcagctacctctgtcttctcagctcctctcttggtccccctgggatccatgaggtcctaagacaagcaggggtacagagtttccattctacagaggaggcctggagaaggatgactggtttaggactaagcgagccacctgatcgccaggctctggccttgaaacattcaggcccctcagacgccaccgcggccaagctctcatcctgcctctttccttgcccttcacccaccctccctccaggtcctccaaatgcagtgaggttaggaaggacgtctgcgctcagatcaagaatccagttacctcaaagctccccaacttccaccttccgcagagctatgacgtcatggcaggcacgccagaggccgaaatcccgggaattccggaccggtccag

SEQ ID NO: 127763 - DNA, 864 bp, Homo Sapiens
gtggaggggcgccggtggccacgttggtgtcaacctccttcgtgaagctcacacctcccccgccccgggaggggtttgcccgccactgtcgctgaatgattgcatcatcgaaagcagaaaaccacttttgcatccttcggcctctggcgtgcctgccatgacgtcatagctctgcggaggtggaagttggggagctttgaggcctcctctgtagaatggaaactctgtacccctgcttgtcttaggacctcatggatcccaggggaccaagagaggagctgagaagacagaggtagctgagcctgggaacaaactacctcgtccagcaccttctctgcccacagaccctgccctctactctgggccctttcctttctaccggcgcccttcggaactgggctgcttctccctggatgctcaacgccagtaccatggagatgcccgagccctgcgctactatagcccaccccccactaacggtccaggccccaactttgacctcagagacggatacccggatcgataccagccccgggacgaggaggtccaggaaaggctcggaccacctgctgtgctggctcctggaacaccgaggccggttggaggggggtccaggctggctggcagaggccatagtgacgtggcgcggggctcctgacaaaactgctgacgacaccgtatgagctggcaggagggctggcagcctggcaggctcgcggttccagggaaacactataacctgagtgaagttggagacaccgaaacgctcgggcccaagaggctttgctccggcaccggtcctccgggagcttatgtacatggggatacaaatttgaggcagtacatgtgtgcaggtgagttgcc

SEQ ID NO: 127764 - DNA, 805 bp, Homo Sapiens
tggatgctgccagctgccaagcctcgctgccgctcatacggtgtcgtcagcagtttttgtcaggtgcccccgccaggtcactatggcctctgccagccagcctggaccccgcctccaaccgggcctcggtgttcccaggagccagcacagcaggtggtccagcctttcctggacctcctcgtcccggggctggtatcgatccgggtatccgtctctgaggtcaaagttggggcctggaccgttagtgggggttgggctatagtagcgcagggctcgggcatctgccatggtactggcgttgagcatccagggagaagcagcccagttccgaagggcgccggtagaaaggaaagggcccagagtagagggcagggtctgtgggcagagaaggtgctggacgaggtagtttgttccgaggctcagctacctctgtcttctcagctcctctcttggtccccctgggatccatgaggtcctcaaagctccccaacttccacctccgcagagctatgacgtcatggcaggcacgccagaggccgaaggatgcaaaagtggttttctgctttcgatgatgcaatcattcagcgacagtggcgggcaaacccctcccggggcgggggaggtgtgagcttcacgaaggaggttgacaccaacgtggccaccggcgcccctccacgccgccaacgagtccccgggcgtgcgtgcccttggagggagccaatccgcggccggcgtggggcccggcctggcggaggtgatgctggtatgtgcgtcgccaccgcccctcccagcactgacgggcctg

SEQ ID NO: 127765 - DNA, 1083 bp, Homo Sapiens
gaaatgacaccagagggcttcattgcaggtcaataggcctgtcaccatcaccccacagcgagcaagtcttttgttccctcagctcctgcgacaaagtcagaacccaggtgctcagggccgcctgtgaatgcaggtgccttgtcccaatcagaggacatattaatagggccatgatttcctgttgccacaattttgccaaggcaggctggcaccagaacaccaaagaagggaaattatagtggagtagcagtttgtgaatctggagtccttggttcaatcacagaacaagtagggagaggagccaggacctaggccttcaggttttcagcaaggaaggactctcaggccatccttgcagttcagttaacaggaggaagcaaggatccccagagagctggagtactctgactctcggatagaaaggcaggacaatcggagcctggggttcacgtgagtcaggaaagggagctctccacactggaatcgctgtagccgaggaggttctaatgggacgatcttcgacggtttcctttccagctcaaaagaaagcacaataggacggaggacagaggggctagtacaaagtgtccagaggaacatggtcatgggctcgtcaaccctggctgaagactcaagttgggctccaggccctgcaaactgcaagaccactctgcctggcacttggacgaaatctaggagggaggcccactctctaggacacagccctagtgctgctgccacatggtgattcctacaggtcaccacggcttcggcagtcccatcctccaccaggagcccagaagagctgaaggctgaagacagagacgatatggcaagaggcagtggcctggaatggggactgaccaccctgcagaagttcagccaggtagatgtggggcaggggaacgctgatggtggtctcagggggaaaactcaggacctgcacataagtggatgaccggaaacaacaataaacattgtgagatctggaaacccttttctccaactggctgaagtggacccgggctcctggaagtagtcctagtgagggaggcaagtgtgggtcttctatatatacatcca

SEQ ID NO: 127766 - DNA, 519 bp, Homo Sapiens
attttgtccatattcatatatttatagagctagtatgtcaaaaactttacacagtgacaccattagcccctggcccacccctctccttcccacttctgtgttcgaccctacttagaccctcgcacacaaaggttgatcaaaggcagtggccacctcagactagtgcaatgccagtcctgcaggggagaggcctggcaaggtgagggtgagtctcccacagtccaagacaggtcccagaccttggcccacccagcgaggacaaaggggcctcaggtctccaaacttagctcatgtaagagcaactgcccaccattgtccctgccatgccaacttatataggcatgaccctggcccagcagtgaggcaggctgagggcatggcgggctcaggcccgagagctgagggtggcaggtgcggagtagcgctggcgggcatgcttctcacagtacagctcgtcacccacccgagaagtgcccgcgcatcttcaggttcagcccacagtcggcacaagtgtagcag

SEQ ID NO: 127767 - DNA, 1296 bp, Homo Sapiens
tccatattcatatatttatagagctagtatgtcaaaaactttacacagtgacaccattagcccctggcccacccctctccttcccacttctgtgttcgaccctacttagaccctcgcacacaaaggttgatcaaaggcagtggccacctcagactagtgcaatgccagtcctgcaggggagaggcctggcaaggtgaggggtggccagggccctggaggcgggcagggaggactgggggctcagtgagctgggcaagaaggctggcgtgccacctctctcctcagcctccagggcttcctgcaagagccgaaaggagctggactgtcggggggccgcccgtccctcgcgattttcctgcagcatcttgaagacttccgagtcctcgtccaggaggaggcttcccccttccgagtccatgctgggcctggaggaacgagggcccggggaaggcggcagcaccagcaccgccgagtcgccagcgcggccgaggccggccctgtcggcttccagggcggcctgagtaggacaggcggtcagcagcggggaggcccggggaacatgccagactctggaagctgcggctgatggccgcctctccagtgagggagctgctagagggtggtggtgagaaggggctgccggccctcgggctgagggaggttgggctggagtaggaggaccttaaggaggactgactctcagtgtatgtcctcacggagccctggaagcgagtcgccagcacttccaaggagctgtccccattggtctgccctggagacgtagcctgagaccggtccagctgcagccgcaggggcgaggggctctggcggatcttgctctgggcctcggcatgcagcatgccctccgcgctttccccgttgatggccacgattatgtctccaggccggaggtcagcgtccttggctttgccccgctcggccaccttagtcaccatgatgggcgtgtggaaatccctgccccctgtgatacggaagccccagggcgctggcccggccacatccaccgtcaacgccatacctttggaagccatgcttctgtgttctccgttccttagtgttcagccgcggggagcgattcccaggccgatggcccggctctaccagttctggagcctccttcgctccgagggcaaagtaccctgcgggctgggggctggaggaggagcgctccggccggggagagcgcagctcgcgggggcgcccccgctgatgcgaggctccagggagctggccgcggacgaggccagggttccgcgccgacaggggcgcggagag

SEQ ID NO: 127768 - DNA, 596 bp, Homo Sapiens
tttttgtgtatatgcagaaagagatttattttaaggaattggctcacattattctgggagctggcaagtctgaaatctgcagggcagacaaacagcctggagacccagggagatttgacgctgcagtctggaggctgaattgcttcttcttaagggtctcgttttaatttgaactgaccggatgcggcccaccctcattatagagggtaatgtactttaatcaaagtctgctgatttaaatgttaatcacatctaacaaatacaattcatagcaacaactagactagtgtttgaccaaaaactgagtaacatgggtagcatcgcctagccaagttgatagataaaattaaccattaaagtcactaagttccattgacaatgacctttaaatatttctcaagttggtttcttcttctccattgccattgccttaatttaggcttgtgttctcgtttaattaattcataaaatacttacgtattaggcattatgccaaatgttggagatacaattgtgagtaagattgtgtccttagggacttacattccacccttttcctgacttcgttctggccactacactccagcctgggcatc

SEQ ID NO: 127769 - DNA, 643 bp, Homo Sapiens
caatcctggttctgcccctgactggctggtgactctgagcaagttgcttgacctctccaagcctccgtttcctcatgtgcaaagtgtggacaacaacagtaccttcctcataaggaacgtggacgcgcctcagaagtacgtgttcataaatggtagccattgttgttaccttcccgtctgtgaacatggatcacatcatctctgtgggtaacccagtcctcgttgtatgacttgtcaaaatgcagttccacttgtattaatattgaccctgttcatcgtcaccaggactgcatcttggaccactgtgccgtcttctaggcacacacgacccgttatctcccttggaaaaattcctctcactggaaatgtacaattaaaggatgattgaaatgtttaactcttggagtttttagtattaccaaactcctagaaatttaagctaccaccaaaaataacatgtgccttttccctttattctcattgatggtagcagtgcacctcgtttcagtgtcctgattccttgattactgtgaacactgaacatcttttatacctttatgatatttctatgtttgtgacttcattggaatgttgatctatttcatatagattgtttttaatatacaatgtattagcccctgtc

SEQ ID NO: 127770 - DNA, 1123 bp, Homo Sapiens
  misc_feature (101)..(135): n is a, c, g, or t
taattcagcatcttagttttaatgtaattataaaagtcaccaaaaattgacagaacactagaaaacaagtaattgctaaatcaaaatagaatatcgtatannnnnnnnnnnnnnnnnnnnnnnnnnnnnnnnnnncagttgccttctttcctagatcacgtatttctatcgttgttccttttttattgttcctgtgaccactggagcactagtaataaatccttaactcaaataggttatatttaatttcagcacccaagctccaaatgcatcagctaaactgggttatagcatggagaatacctcagacgaccacagattttatttttgttaagattctatcaagactgaggcaaattataataaaagttctcatatcatagaaaacaaattacgtggaaaaggataaacatttatacagtactgaagcgttatcaacaatgagtagcagaaattctttttcactgaagtccaaaagccatcccagccctccagcagatctaaagattcttgctaaaggtcaattcaggatatagacctaatacaagaacaaggtatttactgtcaagatttgctatgaaagttccacgtaacttgtaacaactctgtccttggccaactatatatacaaggtgctgttacaatgaaatatattttaaggcacagtattccaaactgagtagaacattttgctcccagagtctgcacagattttggattatttataccagctaatagaattagtaccaattaacccgagttggaaatctgggtggtaacagacttcagagggctatccaaggtactcatgcctggtgactatgaactacgaaagatcagaaagaatgggtcacaggaatcaaggttgagctggtaagaaaggggggaaaagactggacttcagtattgacagattagcccagaatgaagaggaacaaaaacatcctttactatggtacaaataagctttataacacaaataatcttctcaataattttataaacattctagtatcatctttagggttatctgaaagaagtttctatagatatattctctagtacttttctgtcccggccgtaatggccgaattcccgggcatatgtccggtaccgtcgactg

SEQ ID NO: 127771 - DNA, 510 bp, Homo Sapiens
ttttagctgttcatatgacatactttatttccaatctacaaccattaaaaacgctttataagtttacactgtacagttattctcatgtctgaaataagacacaggggcagggagagctggtggattggactgcagttgtcctagcacccgatccatcctaggaaggagccttttgaagacagaagtggaaaggagagaatagtggacaagagaggtggacagttggcccaaggatgcccttggtcccttccctcccatgggccttgccctgggggtcccccagggcccatgactgcaggaccctcaccaggaaaccaggctgagtgggaagggggttcacagtattggcgggggctggggaggggccaggatgaggaggaagggcagcttctggctctcttcccagctgctgggggttggagctgttttttggcactgtctacaaggtatccctggggttgggaggaggaggaactggggatttaggatgctttctttgtggagttaaga

SEQ ID NO: 127772 - DNA, 1048 bp, Homo Sapiens
ggtggccggcggaaccctcgcttctccccgccaaccccgtcgagggggaagcggaggagggtcctctgcgagcgggtcgctaacggcagcgctaccataaacggaggcagagacagaggcggcggcccgggggatccggtacccccaaggcacgcctctcagatcgctagagaaggcttttctcaccgagggtgggtcacactccccccacccgccagccgctcctcctcgggcccgcagaggcgccgagggacgcctggggaagggagggggccctgcggtacgaggaaacacctgcgcgcggccacctcgagcgttcgcgttcagggcgggggcccggccggtgcgcgcgtgcgcgcaaccccaccaggcccccccgtccacccacctccttccttccgaggcagagcgcctccgaagtcaacccacacacgaccggtcggaggcagaacggcagcccctcggcggccggccggcgcacgcgtcacaccggcccgaacccaccgcgatcgctcacacggcccgcgcgcacccgccagaggggagcacgggacgtgcgctcaccgagagcaggcgggcgcccttccccgcgtgggaggggcgcgtctcgtctcgtctcactcaaaccgcctcgaaccccacaccgacgagctccctcaggacccacgcgcggacaccgcggcggcgaccggaggagggggcgccgggggcgggaacgacacaccaccgttcggcctcgggcacctgagggacaacccggagcgctccaggagcaccgcaagggcccaggcggagccgacgctcgcgcaaaccccccgagagggcagcacgacgggccggcgggacggcacccccaccgccgcggaggggggccgcccgcaagtcgacaaccactggaggcgacagcgagggctgtctgccgcgtcagaggaccccgccggcccgcacccgcgacgcagaaggcggcgggcgggacggggaggtcggggccgggtccgcaccccacgccttcccacacgcaccgccggcgggcggggagaggagagac

SEQ ID NO: 127773 - DNA, 1007 bp, Homo Sapiens
cccattgggccgctaattaggacaaggccggtctgttcgccccggtccttgagcggccgccgacttaggcaccgatggcaccttccccccgggaaacgtgccaccggcagggcccgtaccgtatatcgcaggatccacaccgcaaccgtcttctacagagtcactcgcgcctacacgtccgccacggacaccgcctgggcgtgggagcacgaggcccccaggggctggtagggacgccagggcttctaaggtggcccatgtgctcatcgggaggtccccggggcgtgtccaccaccaggtagtccagcctcccccccaggccacgtcggacaacaaactgctttatcagcgcgtttttcttgggcctctccacaccacggcctcgtccggcttctccagcaggaagcccacagacatgagcgagatgctctgctcccggtccaggaagacgggtgcccagccgcggtcgcactggtgcacagccctgccctgcgccccgagcatgcggggtatactggggccacacaggtccacatccaggattcccaccttcttgcctgcatggcgcagtgccagggccagctccgtggagatggtgcttttcccaacgcccccctttcctgagaggaccaggatgatgtgcctgacgccggccaggtttccaggctcccggcgccaccgctgaggccatgccccttgtctccagcaagctgctccatccccgacaggtccttggagggtgcatgtgaggggctcaacacatgatgcgtaaaacctgcccccttctgatccgcctctcaagggcacgttcaaaggctcccaagtccaaagcctcccggagaacctggcatgcaggcgggtcctcagacctacagaggctgcctgaggtctcctccaggggacgcggaaaaggcagccccagccccacactccggccgccgcctccatcccgccgcctccaggagctcgccctcgtgccgattctcaaccaggcctctactagcttt

SEQ ID NO: 127774 - DNA, 1108 bp, Homo Sapiens
  misc_feature (149)..(149): n is a, c, g, or t
gcccgggcctttggcaaggcccaacccagggacaggaagctgttgggttgccgaacaccatccctgggggctggggcttggtccgggggagaaagctcttcccggctgaacgctgccttggggcctgccccttgcaggggccccgggancccgaggcccagggcttttgttttctttgagagggctggagccagagccccttggtggccctggaaaagcggctgcaaggtgccttagtcaggggaggcacgcgggcgtcgcgtccagaatcttctgggctatggaggtgagtgcagcgaaggccggggctcccgggggaactcctggatgaagtcgtggccctcctccagggtcctcatgagcgcagggtccaggggcacggagcctaagaagggcaccccggcgagctgggccagctcctcttccgccgcccctggagaagacgctggtgcactccgtgcagtgtgggcaggtgaagccgctcatattctccacgattcccatcacccgcaagcccgtcttcctacagaaggtcagctcgcgcctcacgtcccccacggacaccgcctggggcgtggtgaccacgagggcccccaggggctggtagggacgcagggcttctatggtggccatgtgctcatcggaggtccccgggggcgtgtccaccaccaggtagtccagctccccccaggccacgtcggacacaaactgctttatcagcgcgtttttcttggggcctctccacaccacggcctcgtccggcttctccagcaggaagcccacagacatgagcgagatgctctgctcccggtccaggaagacgggtgcccagccgcggtcgcactggtgcacagccctgccctgcgccccgagcatgcgggggatactggggccacacaggtccacatccaggattcccaccttcttgcctgcatggcgcagtgccagggccagctccgtggagatggtgcttttcccaacgcccccctttcctgagaggaccaggatgatgtgcctgacgccggccaggtttccaggctcggccgccgcctccatcccgccgcctccaggagctcgcggctgcagtccgcttacgcccgcgggccgt

SEQ ID NO: 127775 - DNA, 917 bp, Homo Sapiens
ttctgagagctggacagaccttgtgcctggaacgctccaagtgccttatcagggagcatcggcttcgcgtccagaattcttttggctatggggtgattcagcgaagcggggctcccagggaactccttggatgaaatcgtggccctcctccagggtcctcatgagcgcagggtccaggggcacggagcctaagaagggcaccccggcgagctggcctagctcctctccgccgcccctggagaagacgctggtgcactccgtgcagtgtgggcaggtgaagccgctcatattctccacgattcccatcacccgcaagcccgtcttcctacagaaggtcagctcgcagcctcacgtcccccacggacaccgcctggggcgtggtgaccacgagggccccacaggggctggtagggacgcagggcttctatggtggccatgtgctcatcggaggtccccgggggcgtgtccaccaccaggtagtccagcatccccccaggccacgtcggacacaaactgctttatcagcgcgtttttcttggggcctctccacaccacggcctcgtccggcttcatccagcaggaagcccacagacatgagcgagatgctctgctcccggtccaggaagacgggtgcccagccgcggtcgcacatggtgcacagccctgccctgcgccccgagcatgtcggggtatactggggccacacaggtccacatccaggattcccaccttcttgcctgcatggcgcagtgccagggccagctccgtggagatggtgcttttcccaacagcccccctttcactgagaggaccaggatgatgtgcctgacgccggccaggtttccaggctcggccgccgcctccatcccgccgcctccaggagctcgcggctgcagtccgctaacgcgccgcgggcc

SEQ ID NO: 127776 - DNA, 1169 bp, Homo Sapiens
ttttttttctgtcgccacagcagcggacacgtttaatggcaggcgcctctacagttacaagacatgcctgaggtcagttcgcccccttagggggcactccccgagctaaacacagatgacagcgacccagggtgctggaggcccggggtcacctgaggactgcagaagtcctgcgctccgctaactgtgtggacacgcggctgccaggggcacaggtaggcaacatggatgggaagagagcccaggccgcccccgtctcacagctgcagagcacgcagaccacggcactgcaggccaaccaggcagagctgctggtgcgacacatcctggggctgggctggtcggggagaagctctcccgctgacgctgcctgggcctgcccctgcagggcccgggaaccgagcccaggcctctgtttctctgagaggctggagcagagcccttggtggccctggaaagcggctgcaaggtggccttagtcaggggaggcatgcgggcgtcgcgtccagaatcttctgggctatggaggtgagtgcagcgaaggcggggctcccggggaactcctggatgaagtcgtggccctcctccagggtcctcatgagcgcagggtccaggggcacggagcctaagaagggcaccccggcgagctgggccagctcctctccgccgcccctggagaagacgctggtgcactccgtgcagtgtgggcaggtgaagccgctcatattctccacgattcccatcacccgcaagcccgtcttcctacagaaggtcagctcgcgcctcacgtcccccacggacaccgcctggggcgtggtgaccacgagggcccccaggggctggtagggacgcagggcttctatggtggccatgtgctcatcggaggtccccgggggcgtgtccaccaccaggtagtccagctccccccaggccacgtcggacacaaactgctttatcagcgcttcttgcctgcatggcgcagtgccagggccagctccgtggagatggtgcttttcccaacgcccccctttcctgagaggaccaggatgatgtgcctgacgccggccaggtttccaggctcggccgccgcctccatcccgccgcctccaggagctcgcggctgcagtccgcttacgcccgcgggccgtcagcctcccagctagagcgaa

SEQ ID NO: 127777 - DNA, 987 bp, Homo Sapiens
  misc_feature (55)..(64): n is a, c, g, or t
tttgctcatggatgtgtattttaataaaaataattctgtcaaaatacaacagagnnnnnnnnnngtctctcaagtacaattttaataagatgttttgtgttagagttctctctccatcctcccacacccacaagtttcatgctaatgccaagtatcaactcttgaggacaaaggcaaaaccagtgtgcacaatgtggaggatgtctgttgcagctgtagttactaatgcaggaaaacccaatgcaaagaggaaaatgcctgaggcagccagaggccacaatctggccacaggtctgggtgcatgagactggcagtctagtagggctccgctgcctggctgccacatgggtgcatacctgagttgtgagcaaccaaaggaactttcagctctgacaattctctgcctcatcttctttgtgcttgcttaaggagtgggaaggcgctaggtggccaggcagtccccacttctgtctcgtggtgtccattttgatggcctgcacccagccacagacccatgaggatggggatgggggttctggcttgctatgagtgccagtttttgctctggaaggagtgaccatttggtgccgcaaggggaaagtgagtagggaaggctgctccccagggccggacaaaccaagaaagccaggtcttcctcctgcctccatgggtcaggtccagcccttcaccagggctcccccaggtgcctttcccactctaggctcctggaagcaggctggtaggactggatgtgcataaggggcacctctggctggcaggcaggcaggcctggactctcagcaagagagtgggctcaagcagcttggttttggccctctccacagcttgtggggcaaaggcttatgtcccaaaggtgagctgcccaactgggacagagagcccctctggagaggaacagagtaaacaacttggactcagctgaaacagtgagataaggcacagaaaatggggaggtggccatgggcc

SEQ ID NO: 127778 - DNA, 969 bp, Homo Sapiens
aatgtgcaaaaaggcttgcgagagagttttatttcagttacttcaaaatacaagtaggctattattttcctttggaagaagaaaccagaaaaaaaacttcctggattgtaacattgtgacaaatttcagattatataacacataacacaggataaatggctgtagcattaatttttttctccagttacattcctttatactaaaagactagtattaaatcttagaagaaaatttcaattgttcttacgtgttacatattaaacacaaaagcaatttattattatttggtacaacatgaacctcagtatttgctcaaatgtagaaaaggattccttaatatgctgagaaatatccttagataaatccaactgtgaaaatatagaaaaactccttactgtaattactgggaaccacaaagttaatttttacagggtagaaaaactccacaaaaatggagattcatacttaaaaccttcttttactgatagaacattctttctggtattataaaatgaacaaaagtgtacagatatgggcttggggctagataatatccatagaactcgccattttaagcaataaaaattggcatgtgggtgcatgcctgtaatccctgctacttaggaggccaaggcaggaagactgcttgaacccaggagttcaagactagcctgggcaatgtagtgaggccactgtcgctcaagggaaaaaaagacatgtttttaaacacacttctaataaaaagaatttttaaaaccaacttttttgcttctagatagtctcaatgccttggatttaaaacatgactccttcttgatacaatgaattataaaagcaaactagttccacatattaattatacgttcaagtctagttcctaaaaagtcatttctctttaacctttcttacctatcaatcaatcattttcatataatctaatgtctaaggactccaaatattggtacgggg

SEQ ID NO: 127779 - DNA, 2316 bp, Homo Sapiens
  misc_feature (279)..(291): n is a, c, g, or t
  misc_feature (434)..(444): n is a, c, g, or t
  misc_feature (605)..(622): n is a, c, g, or t
  misc_feature (664)..(725): n is a, c, g, or t
  misc_feature (1710)..(1720): n is a, c, g, or t
taagagggtggtggcccaaaaatagtgagggcacatattatttttttgtggcccgcgccgtttttgttcccccgcgtgtggggcccaaattttagttataccccacagagggggcgaccaaaagtgtgcgtggtatttcccccctggggcggattttacaggggttcccccacaaacccgcttttgtggaggggggggcttcccccttatcggcgaaaagaatattcgttaaaagaaaattttccccccccgtttttttctgggaaacaaatgtccccnnnnnnnnnnnnntgtataatttttaatatttggggggccgtcccctggggacccccccttgtgtggatgagacccccccgaaagaccccctccgagaaacgccccgtttgggagtttttttcaaaaaaccgcccggtgttccccccccggggggnnnnnnnnnnnggggggggaacgcccaaccccctttttgcctatgccccggttttttcttttggaaacccaggttttgccctgttttcactttcttatgcggggggccccgcgccccaaacgaaaagttttttaaaagtttttttagggggcggggcggcccgcacaagcannnnnnnnnnnnnnnnnnccgttttgggggcgtttcctccgttggtttgttttgttgtgnnnnnnnnnnnnnnnnnnnnnnnnnnnnnnnnnnnnnnnnnnnnnnnnnnnnnnnnnnnnnngcaaacaattaaactttatttgaaccttaaaaatttgcagagtggaacattattgtaagatctaatggcaatagagtacaaattcagtacagagcaaataatcaagcaaaatgctatataaaatatgacttacaatcacctttgaaaaaaattagctctctaactgttcacagaaaaacaaataaaagctaagcaaacataatgagaccatagcaattagcatattttctaacaagccatgttgtttaaatttatattaatgatattattatgatcttgaagagtatgtgatatattgtcaagggtgtaaagaaaactctccctggtttgtatacaaatgatttcatcaaatgaatataaagcagtcatgaattgaaagtaatgattatttgtcctgtcactccagttttaagtcttttctttcctttcttatgtctcccacctatattcaagttttaaaagaacaaaggccggtggagatctgaacagaaataacaccttatttctgtattgtcactgttcacgagactatctggcttggaactgttggtcatcagttggcaaaggactccctctcctggattaactgtaaaaggaggcagaaatctagatgctttccatcatgggcgagtttgtgccatgggggaagggtttcaagaggttttgtctgcaatgaaaagctgctgccatctactggcctaggactaaaaacttcttttcaacccaaagcacaaacccaaatccacaaaggctacattgtcatgggaaacaacggcttttgcttttcagctgctcaagttttgaaaaccagtccactaaagtcgtctttggttgtctaacttttgccaagataatttcagtctatttcaatggcactatatgaggaaaaggtaagaactgcacaaatgtaacttctgaaaactttaacttcacaatgtctctctatataaacttgtttactcacaatccctaaaatcaaatttcnnnnnnnnnnncacatttgagattggatgatcatgatattgagggggtaatggtaaagcagaccctctcaaacactgcttataaacagttttacacaaataatggagattttaaaatattaccagctcagatacatgtttagaatctttataaagcaaagatattgaaaagttccataaagataatacctgataggtaatgattcaatattaggagtttatgtgtagtccaaataattatctaaccagcaatgcattttgacatatgttaaggctacattggtatctcataggtattttaaacacctctgatttcaaatatacatgaaaaggtaattatatgattctacaaatcttgctcaggcagcacagagtataactcaaatgtcaggctaacactacctttctactcacctgttggtacatgctaccactgggatttctacactctcctctgcaaacccttcctttcttttcagtgctctgagaagtatatagaaaagcctcaaatctgctgttctgcagtgggatgtaaatagtatagcaataaggcaagataagagagtgcttggttatgcctttttactttgagaatcactgagattctg

SEQ ID NO: 127780 - DNA, 746 bp, Homo Sapiens
  misc_feature (631)..(665): n is a, c, g, or t
tttgtgcttatgtttattttaggagagtattggggagcggtctggtctctcagggatggcactctgtgggtctgtatcgcggtaggagttggaatgaggtgcagggtgggcttcaggaatggctggatccaggtatcatgttgctgactgtcatgattcgggctcatttgtaatacggcctctgtgtgttgaggtcgctgtagacatccgacctctgaccctggagctcctgataaggcgactcggtctcagtgatacgctgtttccgggtcgctgcctccgcagcccctcgcccccgagggaccagccggcccaggaagtacacggccagggcaatgagcactgtcagcaccaggtctcccatcacgatccctgccagcacgcccgggctcaccgtagagcaactgcaatcgctctgggcctgggcctggacaggacggagaccacttacagccagcaggagaggcaggagcaggagcctgctgcagggttcaagtccccccatgaagccggatgctgctggacaccacagtgtaagggccggtgggatgtggcgcagcgtccaggcaagtgaaggagccccggccgtaatggccgaattcccgggcatatgtccggtaccgtcgactgnnnnnnnnnnnnnnnnnnnnnnnnnnnnnnnnnnncggccgcttcctcgctcacctatcttcgctgcgctcggtcgttcgctgcgacgagctagcgccctaatagtgattatcatt

SEQ ID NO: 127781 - DNA, 939 bp, Homo Sapiens
  misc_feature (847)..(855): n is a, c, g, or t
gtcccgtctgaagctgtgactaaggagaggcgacggcagtggcggcgggagcagcagatggctgtagtcagcaagatgccctttgtgcctcacaaactactataccctcacgtgaagctggctcagggtggggctgtcccttccaggagttttgcccctacaaggggttagtcaagaagctgaggcagaactcactgggggtgggcagttaaggtggaggctgattctaattgtctggttgaggggccaccaccacctattccccccacctaactcatgccattccagcttccttcaggaccctgcttctgagtgacggaccagctcacacaatgtcttgtttcagtccatgatcccactgacctactcttgcctgctggagggtaatgagaagctttggttctgccatctctcccactctgccaggtgctggctgtggagcaaaggctcacctttgtggagaggataaaacctgcccaacctacctcaccatggtttttcacattgcaaagggtaataacatgggcagtgcggacttaggctaccccctccagtttgctttccgtaaatgcaaattgtccttactgcaagtcaggaatgattgctgactcacagtagggctgctatgcctgtgtgtaaacttggggatggctgagggaacatagactcactcttccacattcccaagttggtctagtgtgctgcccagtagcaaaccatggcagactcaccacctattctgagttccagggctgctgtagggcagggtgggcttcctcccagacttgccttaccctgggctgatctttgctcctggtatgcattaatggactccactgaatcctgnnnnnnnnnttaaacttccttcttacttgccagtctctagcttcattgttctctgttcacagggttcctgaaattccaaccgcatcacccgtt

SEQ ID NO: 127782 - DNA, 736 bp, Homo Sapiens
ttttgttcattcaagaagtatttattgataggtgctaggcaagatacaaagatgactcagacacagatcctgcccataaggagcttacagtctaataggggagagagaacacatacatggaatacatggtcagaactatgtttcagtaagatgaatctaacattgtgtataaagtaggctggagtaagaggttaagtgaagctgagagactactgaaattacataggtgaggaagaaagacgggaaagacttgaggtagaactgacaggacttagctgaagactggatgtggggaataacaaaaatggaagcagatgactcagactttagcatggatgatgtcatgaactgaaagaaggaacaagtttttgcaaagaaatgaaaatttcatataaaattcttctgcatagaaacaaactgtctgggatatactaggcacaatcaggaagaaatggctagttacccagaccaatggaagcacctcaaactggccagtgacttcctcccccttatatatccatccccccaaatttcccaacaattttctccactgaaatggtatagtgcctaaaatttattaaattcaaggtctatctccagacatggcctctcttgggaatgaaaacagaaatatattaagttattcacctcagtaagtttcatctaaagactctagttatgagtcactgtaccttctggtggaatacagagatgaactccctagtccttatcttct

SEQ ID NO: 127783 - DNA, 1296 bp, Homo Sapiens
tccaaggtagcgaggcctgggtggcgaattcggcacgaggcaccgcggcgctcgggtgtttttgggggcccgggtggagggcccgggtgccggggcccaaggtgcggcctcgctagcgggagagggagcgggatcaccggcccggagagagctctcagggccagagcggggcaggaggatgctttcccagccccaccatggagctgcgctgtgggggattgctgttcagttctcgctttgattcagggaatctagcccacgtggagaaggtggaatctttgtccagtgatggggaaggggtaggaggtggggcgtcagccctgaccagtggcattgcctcttcccctgactatgaattcaacgtgtggacccgaccagactgtgctgaaacggaatttgagaatgggaacaggtcatggttctacttcagcgtccggggaggaatgccaggaaaactcatcaagatcaacattatgaacatgaacaagcagagcaagctgtattcccagggcatggccccctttgtgcgcacactgcccacccggccacgctgggaacgcattcgagaccggcccacctttgagatgacagagacgcagtttgtgttatcctttgttcatcgtttcgtggagggccgtggggccaccaccttcttcgccttctgctaccccttctcctacagtgactgccaggaactgctaaaccagctagaccagcgctttccggagaaccaccctacccatagcagccccctggataccatctattaccatcgggagctcctttgctattctctggatggacttcgtgtagatctgctgacgatcacttcctgccatgggcttcgagaagatcgagagccccggtctagagcagctatttccctgataccagcaccccctcgaccattccgttttcgcaggccaagaggatattccttcttaagcagttagagtacacccaggggagactccatctagctttgtcttcaatggctttctggacttcatcctccgacctgatgatccccgggcccaaaccctccgtcgcctcttcgtctttaagctgattcccatgttgaaccccgatggtgtggtccggggacactaccgcacagactcacgtggagtgaatctgaaccgtcagtacccgaaacctgatgccgtcctgcacccggccatctatggggccaaagctgtgcttctctaccaccatggtgcactctcgtctgaactcccaaagtttcctctgaagcaccaccccagttccctggtctccctccctgatgcctcctgg

SEQ ID NO: 127784 - DNA, 1264 bp, Homo Sapiens
  misc_feature (45)..(65): n is a, c, g, or t
  misc_feature (1188)..(1222): n is a, c, g, or t
taccctcacctaaagggaataatgcttgcggccgcctgctcaggnnnnnnnnnnnnnnnnnnnnngatcttcatactctttatttgggttccagagaggggagtggcggtcgggtgatggaggcagggaatctggcagcacacaggcccagtactcagcctggaaggagaggcgtctcctgcctagcccagaagcatcacccccagagaacacaggctgtggtgaccactggggccgaggtcctagccccaccacagaggaaggttcctgggggacgaccggctccagggaggaggagaccttggccagagaaccaccacgaggctccgccctctcctggtgaccctggagactgctgcctgtggaggaagcagagatgctgcagctggaaggctgagctgcggaacctgggctcagcacggacttccactgtgacaggcaagagagacctgagctgtgaggctgctggctgaggtccagtgcctggggcaaatctgctagggatggatcatcttcggtatcagcatcatgtcctgagcaaatagttgttgttctgggaaggctcagagtctgagggaactcctcggaggaagaaagcttggtcttctccacctggctttccccggagagcagaaggtctccagaccccatggtggcaggaggcaggccactgagtgcaggctcagacctctcagctacgggctctctgttggcatcactggcctgtggctggtgggctctagaggggccgccagggtcagtcccaatccagcaagtaggggcaggtatcccttctgccccccatacaggggagatgagccctccctcagcttccaggcgtgggggctgctccccactcatgggccctgggatgtccagctcccgctccctgcagctccctctcccataggactgggcctttgtgtcttcagatgcttccgcttctgccttttcttcacccagggccaattgagactccctacctaggtcagggttctgctgaagacttcagcttcctaccgcaccgcgaacgcttcgcacgtccggagcggtctcagcagccccatgcgctggccccgagctggcggaccctgactgcaactgcggccctcctaccgcagcccacaacgcgcaggccccggccgtaatggccgaattcccgggcatatgtccggtaccgtcgactgnnnnnnnnnnnnnnnnnnnnnnnnnnnnnnnnnnncgccgcttcctcgctcaatagactcgctgcgctcggtcgtta

SEQ ID NO: 127785 - DNA, 562 bp, Homo Sapiens
ggttatttgagattttactttgtaatcgagtaatttagccacactcttgtgagggaacaagccagagccaggaccgcatattacccggtaaagctgcagagaagacttgagacttgtaagattggacctggctgcagtcccgtggtcagtaacatctgcaacattatacagccagcagatcagctcttccactgtgacaggcaagagagacctgagctgtgaggctgctggctgaggtccagtgcctggggcaaatctgctagggatggatcatcttcggtatcagcatcatgtcctgagcaaatagttgttgttctgggaaggctcagagtctgagggaactcctcggaggaagaaagcttggtcttctccacctggctttccccggagagcagaaggtctccagaccccatggtggcaggaggcaggccactgagtgcaggctcagacctctcagctacgggctctctgttggcatcactggcctgtggcatggtgggatctagaggggaccgccaggtcagttcccaatccagcaagtaggggaaggtatcccttctgc

SEQ ID NO: 127786 - DNA, 927 bp, Homo Sapiens
gcgacatgaacatgttttattatgatgttagtggattgggggaagagacaagacacctgtacacaaagcttcctaacgttgagtgtcattaccttcacacattgcaccagtgattcttgttccctgttctcctcctttcctggggaagctgcccttcaacatctgggtctgagaatggccaccggtccaacctagctggcaaggaggggcgtgttttcagcagtccagaggagaccccgagggcctggctgctccccagactgccttcccctgcggagtcgtgggcacggacgaaggagcgcaggaaacagggattctggccctcaggatccccagatccttggagggcagctccagggggaagctggctttggctggagcttgaagggaaggaagctggcccatcactgtctgacacttccaaggggctctgccctttgatatccccagtgggcagggtaaccaaggtagaaatggatcctagatacgaaaccaggctagaaacctgtgtcagccgagcggggagggcaagatactcgtcatcactttccacttcctcttctgatttccacctagactctgtgcaggtagggcgccgggcactctggctggtcctcttctccctctctggcctgggcgagggccaccctctgtcccgtgtccttagctggggagagcccatatcaaggtgcttgcctatagtcagccggtccttcgcacccctcagggctggctctctgcgctcccaacgagcatccctactgcctggggctctgggggtagatgcaagttggctccaagatgccaagcccatgccaccctgtttctggggtactctggagggccactgcttaaggcttggctctctgggcccagaaaatggcagggcagtggcctctgctggtgggcagttgggggagacattag

SEQ ID NO: 127787 - DNA, 1790 bp, Homo Sapiens
  misc_feature (1414)..(1588): n is a, c, g, or t
  misc_feature (1725)..(1725): n is a, c, g, or t
tttttttgagatcacaggctttattcctacaaccacagggcttgagcctgactggggcaagaaaacagagtttcatctgagaatgtctcttatgggctgggttctgttcaggggagggtgggaacagaggacaaggaagacaagctcctctggccctaggaacaaaacacatttactccttcaaagaagcagatgatctgaataccctctggagactgaatctgcccatacagcccctggagccaatgggcagacagtactggcatctggcacaaaagggaattcagacccagaacagaagcagcaaaatattttaaaaatagtaaattgttcctggactcacaaatcattgtttttaagggcaagtgcatgcccaatataagtactggggcttcctaagagagctgacataggattacacagctgcctccctgcttcagtggaggccctcacatcccctttgaacacttaacttgggtaggagaggtagccttttcgtctctgttctgggttctgagagctctgcagtctggaggcacagcagactgaggctgacctgggccctgtcctttctgcctggcagtcacaggatgttgtctctacctggagacaaagctggtttccggtcccagacagctggtcaagggagggtagtgtgggtcaacactggccctcagcactcctgagggggcaaagaggatgggcaaagtttggagcaggaggaatcctaggtaaaggtcaggatcatgttcactggatggtcaggcagcggtggctgaagaggtgactgatgacagatgggtcagccacagtagacatgtccccgaggtcatggtcattctgagcaatcttccgaagcactcgcctcatgattttccctgagcgggttttaggcaagccaggtggcattctggatgtagtctggtgtggcaatggggccaatcttttctctaatctgcttcttgagctcctcggtgagcttggggctgaaggtgtggccatcacacaaggtgacaaagcagtagaggcattcacccttcacaggatgagggtggcccaccacagctgcctctgcaacagcctcatgttccacaagtgctgactccacctctgctgtactcagcaggtgtccagatacattgagcatgtcatcaatcctgccagtgatccagtaatagccatcctggtcccgctggcagccatctcctgtaacatagtatccaggaaacttcttaaagtaggttgtctcaaagcgttcgtggttcccatagactgtgcgcatgatccctggccagggctgcttgaacacctggggagtgaggaagggacagtgatcacatttgctatgctgtctcactggaagataattacagcttttctaaatgtgggggaaagtgtcctgaatgaagtacannnnnnnnnnnnnnnnnnnnnnnnnnnnnnnnnnnnnnnnnnnnnnnnnnnnnnnnnnnnnnnnnnnnnnnnnnnnnnnnnnnnnnnnnnnnnnnnnnnnnnnnnnnnnnnnnnnnnnnnnnnnnnnnnnnnnnnnnnnnnnnnnnnnnnnnnnnnnnnnnnnnnnnnnnnnnnnttgcctagcacggtgttctattattgataagtgtttagtaaatttgtgtctccttttgggcaatccttgaggaaagcaggtccagtttgatacaaatgaaaacactcatttaaaaaacagtggtgcccacacaccangtaaataattattgcccaatcagtaacattctttggcagcagatcgacggaatggatggaattct

SEQ ID NO: 127788 - DNA, 586 bp, Homo Sapiens
ataatgcctttgtctcctatggttgcttgcttgattgagttagataatccacatgaaggggttagcagagaaactaacaattagtacttgataaacattagctgttgtgattattgtattcatacttgcaggagcctcacctgtcccttcaaccccaccccatttcactttcccaagagcaagttagtaacagggacagggcttacatccaggccttctgactcagcctagaattccatccattccgtcgatctgctgccaaagaatgttactgattgggcaataattatttacttggtgtgtgggcaccactgttttttaaatgagtgttttcatttgtatcaaactggacctgctttcctcaaggattgcccaaaaggagacacaaatttactaaacacttatcaataatagaacaccgtgctaggcaatttccatatactattaatttaatcctcacaataactttggaagacagaaagtattttctctgatttacagatgaggatcctgaagctcagaggggtaaagttacttctctgaggtcacctagctagtaagtggtagagctgggattccaagccag

SEQ ID NO: 127789 - DNA, 720 bp, Homo Sapiens
  misc_feature (710)..(710): n is a, c, g, or t
tttttccaattttcatttaaatgaaatattcagaattttgattaaaataaataataaattacacaagtttacaagtaacagttaaatatttagggacatgtactaagttttacaaacagtacaaatatttaagagtgttgattgggagtaagggaatgtcaactgccaataaagtggaagatgaaagaataggactttacacagagcatatttagttatgggtctctgtctcctccccacacagaaaaactcccagacattcatgacttcatccaccctgcctggcagataggccatatttcctgaccccctggctcttcacctcaaaaggtttatctttccaccacactagcaaagaccctcaggacacacaactcatactgccagctaagcatctaccccgagggacaaggcaagcacacactagggcagctgggccatcctggccctaatccctccagcggtgtccacactgagcattgcagcacttgtagaaggtggtcatcggctcatctgcagagcgggtctgaagctgcatgaagtaagcacgaggatgttcgcatttgggacacgactctgcagtagagtcaacattctcccaggcagctgctccaccaagcacatcatccacttctttcaagttttgggtacttccgatttgttaccttgcgggtgatgttgtgcacgtaggggcacgtgttgcaggcgangcggtggcac

SEQ ID NO: 127790 - DNA, 1155 bp, Homo Sapiens
gtgttccaataaaattttatttatggacactgaaatttgaatttcacataattctcacgtgtcacaaaataattcttttgattcttttccaaccatttaaaaaatgtaaagaacattcttagctctcaggctacacaaaaatatggctatactttgtcaaccatccctagaccctgaacagcatttctgaattagtaacacttaggtgtcctaaaaaacaggtttgggatagctgtgtgttaaggagtccctaaaaaattcataatgccaattagcataataaaggctctaagccttgcggttaagaaagcaagcttaacttccgtcagctcagctagtccttcctttttcctagtattaagttgcaacagtttgaaaaatatttaaataagaatagtcaagtcaaacttcctgggatgactaaaatgatagctaaggtttaaaacagacatccaagttcctgaaactaataaagccacaacatgacttcagctatgccatcagaaactgaaagtatctagaggagaacaatgataaaataaagtgtatacatgctctgaaaaaaagtcactttagtactctacgttctacattaatttgtattatatttgaactcacagatgtgaaaggaaaacaaagagttcccacaagtttgccaatctcaatttggtaagccactgtctacttccatacctaactacctcattttagttaatgacagatgggtatttactcccataaagctttaagaataactcggtgttaaaataggaagctaaaaatcaggtgcatgagaaaattatttccaagtttactaacatgaaaactgggaagctctttgatacctgcgcaacactgcagctcccattatgacattacgaaaaaacagtacaggaccataccccaaattggccatataaacacacaagtcaaactaaattacatttagaatgtcattcaaaactaccgtttaaaaaatgtaattttagcaagtcaaaatttcaatttcaacttgttttctcaagtaaactttttgcgataatattcaaattagcttgaaataacttttagcagactcagaatcaataaggatgtgattttaggtcccggccgtaatggccgaattcccgggcatatgtccggtaccgtcgactg

SEQ ID NO: 127791 - DNA, 684 bp, Homo Sapiens
tttttacaactttaaaaaatggtttatttttttctttaacaaaatcgtacagctttctcaatccccaaattaaaaaaacagaaaacaggaagaaagggaagaaggcaaaggccacacgcacaggccggcccggccgcacgcgcctgctggacggcacttcagggcacaacccacacgcgtctttggacttgcagacattccgcgaggcttctggcctctcgaaggcaaagcttttcagcgatttcattaatatttcattacgctgagatgagatgaaggcagatgctacagaaatatgtcagttaaagccacagaaacagaacagcttaagaagggctgggcgcccagctcgtcacgacacttacagctctggcgtcatcagaagcctctatcatctccctctgcaaagacgcagtctacacccagtgcgagtctcctgagcggggttagtgtttgggagtgggaggcagctgctagtcagagttgggtccttagggcgcagtgcttcacggaaacgcacagacgtctatggcagacgctctcagacacgtgtgcagaagcgacgtggcttctgtctggtaggggtttggactgttgggaggagtatgagggacacagcaggccgctggctcagcatcagcttgttggaaaagggtcacaggcaggggagcgcctgactccagc

SEQ ID NO: 127792 - DNA, 1062 bp, Homo Sapiens
gcccattgcaaagaacacatgatttattcaagacaactcgtcatcaacagcactgactcaaggaacaaaacagatgaaaaaactaaagcaaacgttctgaccctctggagtgagacccgctgaattcatacagctcaatctgtaagtgtccaagatccagggggcaggttctcaagcaggaagcctcaggcactctggctctgtggggacctcccttgggcatctgcttgagaatctggggaagggacattatcagggcaggtcctttctgcaggcggtgtcctgctgggagctcagcctaaccaaggcctggtccctgtgctcttgaccttcatctcaaggtcaaggagagggcacttgacccaactctgccagcgaggcaaagtaatggtgattcaagtagtgtggttccaggagggaaggtagggggcagacaagagtgagtgcactaaagagtcctgggcagtgtctgctgggtcccaggcagtggcccaagcttatgaaggggttggagaaggggctgaaccaccagctgacaagtcctggagagagggtggcccaggtgagcaggaagcatcatgcctctgcctcatcctggaggtcctggagtcagcccagttctcttcccatctttacactcaattccagtacagaactcagagcccgctcagccaggacctgcttgaaaaccaggcagttcctagaagcatggggagaagaggctgactttgatcttggaaaatgaagaggatcttgtctccaactcctttctcccttcctatacccatgcctcatccccagagcacttgccaatgtgcaatacatagccaggagtctgaataaatagtcaaagtctccccaaatactgtgctctgggagaggagacaggcaggtgcggaaatccaggcggcatcaaaggaaaagcctggtagaagagccacctggggaagccttttctggccaaagccgggcttggaagggcagcgagaagtcctgcccaccagactcggaaagctttgggggcaggagggctgctggggcctgactcctgccagccagtct

SEQ ID NO: 127793 - DNA, 957 bp, Homo Sapiens
  misc_feature (26)..(26): n is a, c, g, or t
ggtaaggagctgaggtgtgtggtttnttaatattaagaatatataatggaaaacacacgactgacgctcaggcatcttcccctactccccaacagatccccagaagacagcgtggaaggcagtgtagacagtaaatcgggcttcagttctatagccaagaagagatcagctgctgaaaccaccagtgggtaccccaggccacctgcctttgaacttggggatttgccatgtttgatcttgtcacatacttgcttttttacaagatgaactctttgtatttatgatttggggggcaatgaaaggtgcaatgcaggaactgctgctgccgagctcgctggtcacatgggggtgccaggcgggattctggaaaaccagtgcacttaaactgatcctgaagagagctgtcccagcactctggccaccaggagggccagattccccagaaactaccttttgcccaaagaacatgctcagtatttggggcatttcctcccacaaaccctgactgcttctgttacctcagggccttggtacctggatactgccacagaattggggcgggtgggggaggggcctatttttaaataaaataactgttcaaagttgggggttttttaaaaaattaagaaaaaggaaagctattctgtattgcaccttttcacaatttaatacattttcttacattttcctgtgattttcgaaactaaaccattgtgtgtcctgtagtgtcctggttgagctgccgctcagcagcttcctcggggggatttggaacacctgtgtctgtcgccgcactgcctgtgggaggggcccagagggctgctgggactggcgtctgtacacacttgtttggccttttctgtagttgatgctgtaaactctatggctttttaaaaacgatttcatgtttttatttagtattggaaatccaatacacttttttaatccaatcaaaaa

SEQ ID NO: 127794 - DNA, 558 bp, Homo Sapiens
  misc_feature (65)..(119): n is a, c, g, or t
ggaataaatatcccttttaatagttatatatacagatatacaactgttagctttaattggcagcnnnnnnnnnnnnnnnnnnnnnnnnnnnnnnnnnnnnnnnnnnnnnnnnnnnnnnngcactggtggtctgtgttcttattttctttggattcttgtctggttccaaaatgatcatttcttcttcttcactatctgagagtattatgggagcatcttggcttccaatatcagagacttctactccagtgtccatttttataccatcaagaatgatagcttgatcaccaccgccttcatcatcttccttctcagagtcttcaagatcaccccaggagttttttactccctttccaatttgggcagttccaggagtccatagcccaggtgtagaaacaacttttgaagggggttctgcttcagcaatgatttcttttgcttttttttctccatccgaggtatcaataggggccttttccattttaaatgctgtgatcctttgatttggtatagactctgcaaaaccaaactttccaccttctttccttactttttggt

SEQ ID NO: 127795 - DNA, 1008 bp, Homo Sapiens
cactggctttttacttggtgctttttcttgttttgcactggtggtctgtgttcttattttctttggattcttgtctggttccaaaatgatcatttcttcttcttcactatctgagagtattatgggagcatcttggcttccaatatcagagacttctactccagtgtccatttttataccatcaagaatgatagcttgatcaccaccgccttcatcatcttccttctcagagtcttcaagatcaccccaggagttttctactccctctccaatttgggcagttccaggagtccatagcacaggtgtagaaacacttaacaagttaagaaaactgagtaacaaaaatattgctatttgatgaactgttgaagatgagaatgaaagttttcttcttgtaagattgattcaagtgtgccccaagttccttactttttggtcattctccaaagctttcaatattagctctgtgatttctgttactttcacaccagcgattttactgcatctcagaacttgatcttttagtagcattatcccaccactggactggatagtacaaatctctcgatgtttgttcatggcaatcaccagcaagccatccatcacacgttcttctcgttcattgggatccaccaataaatatgttccttgctggaaaaaggcaaaactgacacaaatgggcatgtggtggatacttaatggtacaggatcacgctcttcaggtgtatacagtgttacttcatctccttggacagagacatcaggtcttcggaaatgacataaggccacgattgcagcaatgctggcagcatcaataatatttccatcatgatttaataaatgtaggtctacacgtatttgccaaaccttttcaccagcaacaacacagagagactcagtgtctatacacttcgaatttcttagacatctttccatgagtcgattcaacttcaccaagagatgtgactgcctgccaggttcgaaagctggagcggccatctgagagag

SEQ ID NO: 127796 - DNA, 822 bp, Homo Sapiens
  misc_feature (745)..(745): n is a, c, g, or t
acatatttctctgtttatatatattttctctatatatagacacaactcttcagcaaacatttacaagatatgtgggccacactgaaaaaaagagtgcactccgcggacagaacgagtcccacgcatccaattccaggacacagaaacacacacaacatacagagatctgaataggcacagtaaaccaaataaatatgacttattccaaatcacaaccacagatgctctctggaacatcacaagagaaggcagagaagagattttgtgctgtactttgagactagtctgttaaaaaaataaataggaatcagaaggtctaggacctgggtctcactaaaataacatcctctgtaaagaacagctgaacggcaaaatagttttctccggaggggccttttgcacatttcttcctgtcttgggaagctaggggacgtaggggagggagacgtaagtctaatggcagccagaacgttgccgtctcccgtttctgctttggtgggggtagggtaggagctgggagccgggaagctactgtagcctcgagtttcccacagagctctcttcaggaagtaagggctggctagacctctatccaccctgcaccagaggctgggcagaggttggaggttcaggtgcagttgaagttgctataccaagggaaagaagcctttacaagcacacaaggcaaggatgcatccccgtcctggtgtgctcagggtgggaggactaatacacccctccgcanatgcttcaatacgctgctttacctatcctctccctctccaaaatcccagctgctattctctgaccaccctagaggcg

SEQ ID NO: 127797 - DNA, 636 bp, Homo Sapiens
  misc_feature (616)..(616): n is a, c, g, or t
aatgcagtctagtctgtttttaatgatgtttttaattgacaataattgtagatattcatcggatacacagtgatgttttgatacatgggatgtctagtgatcaaatcagggtaatgagcatatcatcatctcaagcgtttattatgtgtgttgagaatgttcaatatcctccttcttgctgcttgaaactatataatatatggtcaggagtttgtttttccgtcgtcatttgtaaccgttaaacattaggatctgtgagcgtgttttctagttattctgctttattttcctctgctcctgaccgccgttggatagctgagatttcctccggatgggcagaagctcggcctgccttatggcttccgtagctgaacactgtgtcttcactgagcgggatgagtgattggtacctgccaggccccccgtccacaccctcacaccatgctgagactgtcgggggttcccattggggagtaatggtgatattctgactctctgaattcctaggccatttgggaactgtggtgactgaatatctcagagcaccctcctggcttctttctcttctggctggagaacgtctctaagagcattttaaaatcaggcttttctgtanaaaaatggccgaggccttga

SEQ ID NO: 127798 - DNA, 724 bp, Homo Sapiens
ttttggtgttcagttttgccaattttattgaaccaataaaattcctactaataacaatgaaataaatttctgcaagtataaatgtgatacagtttaacaaaacccattgttctgtacctataaatagattttcaaaatgtcataaaaagtgcagttatgaattgttaacatgttaatacacagttcctttatttcagatgtgtttgtcttgactcactaacagttccttctgcatctgtccaaataatgttaccctccctccaaagaaaaaaagagtcattaaagcactagaatattacacataaactgatccatttaggtcagctttagtcagaactgtaaaatcagcaaacataagaaaaacaaaacctagtaatacatacaaaagctttcatgggttctagaaccttcttaactgctgattcatgtggagggcattaagagttgaaaaggcttatatggttaactaccttagactatatctacagcagggtctggtttgccagaacaagtttaaagtggctgtttattaagtttgctattttcagaattgaaactataagaccgccatttgacactgaaacttgcgtgaatcctaaattgcatcaattatctatttgataaaagcttattctaatttaaaaccttatagagtaagagactgatatatatagcagtcttaaagatcacgtcatctgccttacatatatcgctaacacttaag

SEQ ID NO: 127799 - DNA, 792 bp, Homo Sapiens
  misc_feature (63)..(113): n is a, c, g, or t
  misc_feature (139)..(165): n is a, c, g, or t
  misc_feature (206)..(214): n is a, c, g, or t
gccagtgcctagcgaaaattaacctcactaaagggaataagcttgcggccgcatacgcggtcnnnnnnnnnnnnnnnnnnnnnnnnnnnnnnnnnnnnnnnnnnnnnnnnnnnatgtgaacggaaacacatttattacnnnnnnnnnnnnnnnnnnnnnnnnnnncaaattcacattgtattgagctacaatatggcagcagattnnnnnnnnntatttttacacagtttaaggtaactcctaacagaacatagccttgttgccacgagacaggacacaggattccaagtactcagtagcggcgagtgaagcgggcatcgctgggcctgctcccccggctctggcctccaaacccgccctgcatgccaccgtgtgggatggggtggccccgggaggccccgcctggggcaaagctgccgcgccctgacattcctcctcggttcatcatgtggccaggcccggagtgaccggacatgcttctctcgccaccttgccacctcttgtgatccctgtccatcatgcccccgtcggccgtgccctgccatgaccggtcatcctctcttcggccatggtccccccagtcacgtctgcccctggggggaggaggcagcccccggccctcgctcatcctcttgtcagagccatagcccccccagccatcgcgggagtcccggccgtggcgctctggtcctccatggcgttctgggtaatgctgtccttctcgttctcccatcattgaccttgaaccttctctcctgtccaccgagtggtcggggtagcggccgcggtccc

SEQ ID NO: 127800 - DNA, 1867 bp, Homo Sapiens
aaattacggctaggtacgaggcttggtgttgaattcggcacgaggctcgctgtgaagattggcgctctccagggtgtgctgggctcggtcggctgtgtggggctcggcagtcacccctggacattttgtcacccggaggctgcaacttggtcgctctggcctggcttggggggcccctcggtcttcaaagcttcacctttctccaaaggcagatgtgaagaacttgatgtcttatgtggtaaccaagacaaaagcgattaatgggaaataccatcgtttcttgggtcgtcatttcccccgcttctatgtcctgtacacaatcttcatgaaaggattgcagatgttatgggctgatgccaaaaaggctagaagaataaagacaaatatgtggaagcacaatataaagtttcatcaacttccataccgggagatggagcatttgagacagatacagcgtggtacccacccagcaatacatgatatcttggctctgagagagtgtttctctaaccatcctctgggcatgaaccaactccaggctttgcacgtgaaagccttgagccgggccatgcttctcacatcttacctgcctcctcccttgttgagacatcgtttgaagactcatacaactgtgattcaccaactggacaaggctttggcaaagctggggattggccagctgactgctcaggaagtaaaatcggcttgttatctccgtggcctgaattctacgcatattggtgaagataggtgtcgaacttggctgggagaatggctgcagatttcctgcagcctgaaagaagctgagctgtctctcttgctgcacaacgtggtcctgctctccaccaactaccttgggacaaggcgctgaatgaaccatggagcggatggcattgtcctgcagtcgtatagtatagcagtgcaggaacaaacagcacttgccagcaaagtctgtgtgtactgttaagtgtgtgggaggcagagagaggagcaggggccatgggcttcacagcatggcacacctgtgggaactgcagacattcctctcacagctagaactgaaacaaaccctcttgctaggggtggtccgtgtgaaggtgtcatcctgtccccctcataattactaatagctggaactggcagcagcctctactgggcttttactgtgatgtgttcagttcatgtcctaggaagtcagcttttgcccccaggtgggaatccttatttggcttaggactgatccacttccatgttacttacatctgtgggtttttgttgttgctgttagaaaatttttggctggtgaaaacagcactcctttggctggagcacttgtgtccatgcatgtacttgggtgtttccctccatcctttctgatatgaccaaaaatcaagttgttttgttttttgtcaccttcactggcatgggctaaccacttctttttcaaaccctctgaacacctttttctgatgggtaacttgcaggaatattctattggaaaagataacaggaagtacaagtgcttcttgaccccttcctcaatgtttctagccttcactctccattgtcttttctgggctgtattacagccctctgtggatcttcaactctgctgcctccactgtgatgcagcagtccaactgtaactgacagtggctgccttctctgggccatggatcacacctgtaaggtactaattactgcccagcctggggagatcaggagaggtctgcatagttagtaagttgggtttagcttttgtgtgtgcatcagtgacttagagttctgtaataacttattgtaaatgcatgaagcactgtttttaaacccaagtaaagactgcttgaaacctgttgatggaaatgaa

SEQ ID NO: 127801 - DNA, 1208 bp, Homo Sapiens
  misc_feature (18)..(18): n is a, c, g, or t
  misc_feature (65)..(65): n is a, c, g, or t
  misc_feature (84)..(84): n is a, c, g, or t
  misc_feature (106)..(106): n is a, c, g, or t
  misc_feature (160)..(160): n is a, c, g, or t
  misc_feature (278)..(278): n is a, c, g, or t
  misc_feature (1131)..(1165): n is a, c, g, or t
aggctccagctttctttncagggctgcaggaaaaattctgcaggccaattctcccaagcccaagntttgacactattctttcanccaatatgcgtagaaattcagnccacgggagataccaaagccgattttacttcctgagcagtcagctggccaatcncccagcttgccaaaagcctgtccagtttggtgaatcacagttgtatgagtcttcaaacgatgtctcaacaaggagggaggcaggtaagatgtgagaagcatggcccggctcaaggctntcacgtgcaaagcctggagttgggttcatgcccagagggatggttagagaaacactctctcaggagccaagatatcatgtattgcctgggtgggtacccccgctgtatcttggtgcacagatctgtcagacgccccccggagtcctgcatcagaaatgagaggggatgaccttttctaaataactaataatttctgggtgggactgctttccggaaagcatgatagatatctaagaaatcagtttgttgttttggggtccagaaatgcctgatcagtagttgcctgggaaacaggtacattagcaagaagaccaggtagttggcaaaaggtggaatggaaataatacctaggaaaagacacttggtgacgtcttggcggaactgtctcaaatgctccatctcccggtatggaagttgatgaaactttatattgtgcttccacatatttgtctttattcttctagcctttttggcatcagcccataacatctgcaatcctttcatgaagattgtgtacaggatatagaagcgggggaaatgacgacccaagaaacgatggtatttcccattaatcgcttttgtcttggttaccacataagacatcaagttcttcacatctgcctttggagaaaggtgaagctttgaagaccgaggggccccccaagccaggccagagcgaccaagttgcagcctccgggtgacaaaatgtccaggggtgactgccgagccccacacagccgaccgagcccagcacaccctggagagcgccatcttcacagcgagagaagcgggagagaagagccccggccgtaatggccgaattcccgggcatatgtccggtaccgtcgactgnnnnnnnnnnnnnnnnnnnnnnnnnnnnnnnnnnncggccgcttcctcgctcaaaaactccgctgcgctcggtcgttt

SEQ ID NO: 127802 - DNA, 1947 bp, Homo Sapiens
tttccgttttcaatcctttatttcagaaaggagagccaggagaactggggacttagaaaatacagatcctaaactcaaaagtccctgccccaggcgtgcagagccagggtcctggggttttgtgctgggcaggggctgccctgggagggggaatacagggggaggcactttaggacaccccttaggctgtggagggtgtcagctgggcctttgaagccactaaccactggttcccatcatggagagccctgtgtggggcacccaagggggtttcctcctggaagggcccccaacccaagtgtcagagaagctggcaagagctgagggagtgaggtgccatgacagcagccacagcctccagggacccaaacaggcccagctaccagcctggcactgagcatgccatctgctttaggccctggctggcgggcatgtgggcaacttgctccctcagtgcagggggctgggaggcacagatgcaggctcagcactacaaactcaaaacccccatgagagggctcagtcttatgggaaatgcctccaaccgagcccctttgccccaacacactcttcgtctgcctactgaagaaacttctgtaaatagcagagacttgagggaccccttcctggggtacgtgtatttgtatttttctgtttgggtgtttgtgtgtcccagtgggaccacctccccagggagacgaggcaggtgggcgggaggcccggcaggcgccgttacttcttcacgatctggatgacgtcctcatgctccatggtgtgggtcaggcccacccgctgcggactgtacttggtgctggtgccccacaccagggcgtacttgaactggctggcgagtgaccggtggatgcggtggcacacgtgctccactgaggcccctttccggagaatgatggcgtctgtgaagtctggcctctgtcctctcttcttggtgtagatgcaggtcagggccaagtactcccaaagcatctccagcagatagtccaggttcagcttcatgccgcagctgatgaccacactgttgggttttcgggccaggcggtccacctcttcccatggagatctggtcgattttgttataaacatacaggcagggcatgtacacccggttgcccacgatcacatcgatgaactcgtccggggagcagtcttctcggaaaagcacttctgcattgaagatcttgtattcgtgcaggatgagctgcaccagcttttccgagcactgggtcagcgtgactgtcgagttaaaggagatgccaccacctttcttgggcttgaagtagatgttaggcttgtgcttgttgaggcggatgcccacagactccagctccttctccagcagagacctctgcacctctcccttggtggcatccagcatcatgatgatgacgtcagccgtgcgcgccacagcgatcacctgccggccacggccttttccttgggctgcgccttcaatgattccaggaaggtccaggagctggatgttggcacctttgtattcaatgaccccaggaatacacgtcagagtggtgaactcataggacgctgcctcgctggccgtggaggtcatcagactcaagaatgtggacttacccacagagggaaatccaatcagcgccacacgggcatcacccgacttcatgacatcaaagccctctcctttggacgaggccgatttggacggttccaggagctgggcccgatacttggcgagcttagctttcagcaggcccagatgatactcagtggccttgttcttctgtgtccgagcgatctccttctcgatctccgagatcttctctaagatccccatggtagcagcagaggtgggcgcacagacagcggtggcggcggcaccggcaattccggtctgacggcggcgacagagtagccggacgcgtgggtcgacgatatcccgggaattccggaccg

SEQ ID NO: 127803 - DNA, 636 bp, Homo Sapiens
  misc_feature (540)..(540): n is a, c, g, or t
  misc_feature (608)..(608): n is a, c, g, or t
taaagactcacattgtccctttcttccttctcattgctcattagaacagtgactatactaactatctaaggtaagactggaggccttactattattatcacagccctgttgactacatcttcatcatcttgattcatttgtaagtgttatctgccagaacaagacagatggtatgattaatatctgcgtcaagtaggtttgtatttgtaagtacctctaagagtgtgttctgcttcaatcacagcatccaaagggggaggttcaattgctttggccagaaattggccaattcctcctagacgcagaagttttatgctaagagcaatttcatgcaatggtgttcggaacatctctggtgtcatgtgggtttcaagtctaagagaaaataagcataaaataaccatcctccttgtgtatacacagatgttaataaactttttgcagcaaggtaatcagggatacagagctgccttttcctcatccttttattttacaattaccatcggagcttttatcgttcactatacacactgttgacanatttaatctggttgcatagtggtttctgacttatcctcacagctggatagcctttaggctgagaaganaatgaaaaataatccaaatcgcgaagtt

SEQ ID NO: 127804 - DNA, 3392 bp, Homo Sapiens
  misc_feature (90)..(99): n is a, c, g, or t
  misc_feature (230)..(238): n is a, c, g, or t
  misc_feature (251)..(266): n is a, c, g, or t
  misc_feature (301)..(361): n is a, c, g, or t
ggcgagcgggcgcagataggggggtccgacaaagaagggggagcgggaatggggaacatgtaggaggaagtcgggataatagacggaacnnnnnnnnnnagtaaagcgagagagcgagcggaccgttggaggtcggggcaataggaaagggggaagataagataggggggcgagaatttttacggggggggtgggcgcggagaattaggcggtccggcccgtgttgggtnnnnnnnnnatgaagatgagtnnnnnnnnnnnnnnnnttagcggggaaggccggcaaagcggccaccgggannnnnnnnnnnnnnnnnnnnnnnnnnnnnnnnnnnnnnnnnnnnnnnnnnnnnnnnnnnnnttttggcgggggggcttgtggtgaaatattgttaggtgggggaaattggaaatagtaataaaagggaggggcggcaggggcggttttcggtgtaatactttattttctattgtattaaacgaaagccaggaaaataccaagttatttaaaggcaaatctttactccttaaagaaaaaatacaaactgtggtatttttaagagatcgttatattttacataatataaacaaaatcactaatgcatctatatgcttggtttccttaaactacaatgaaccacagaatgggtgaaaatgcatttactttttggtggcaaataaacatactggaaaaaacacgtaacacatagcatgcctttttttccttactgtctacacacaggaactgacataaccaagttttaatagccgccacctcctcttccctgtccaaagtagccagttccataggcccccctaccacctcctcgctggaatcccccagatcctctgtagcctccactaggccctctgtagtctcctccagagttgcctctaaagccacctcgggaaactcctctatagcctccaccaacacctgcaccatatcctgcccgaaaggagttggcgctgccaccatagcctccgctaccatagcctccactgctatagccaccgccatagcctccaccactgtaactagaacctccccttctatatccgcttccattgtcgtatcgggccatcttgggaggacgtggaccatctccataccgtgtactgccaatcataaggttgataccagcagctgagggtctagagatctgacggatcatgttcagcatacgttcatttacggggtccaactggctgatgatagcaggttgtttggttacttcaacaaccaaagcctccatggctgcccggagaccagtgatacaggcagcagcttcatgagatatttgcagtttaatccagtcatctacaagcacaatctgcccatcagattggactttcttggaggcaaagagaagcaactgcaggggggtgactaaagtcatgcctttagcagagatggctcgagttcgaatcttttcaccaaatacaaagaagggagatgggtacttcatgtcttggctactaaaaggacaattaacagatgatttgtggataagtgcattacgcccttcagtggtgagaatcttcctcttttccttatgatagcatacattggggtacacaccaaaggccaggagggagataacaacatccaaattattatctggtccagtgttagtaaacacttgtgtcaacaaacaatcttctggaaacccagaattaatcaaaatctctttgagctgaactttggcttcccaggtcattcttagtgtagccatattaagtcttttgtgctcacaaaaacgtatctctgcttcttctccacccattctagcatcatcccaggcttggaatactgataaaagggctacgtgatcagaaaatctgtttccagcaaaatttcgatggatatagcccagccgctttccttcattgatgaaaggctctggaaagcaggtagcagcagcaatggtacagatagcatctcccacgtagaaaatacaccccattatcatcattttgccaaaacgaggctcaatggggagtttagccaggattcgtcccaaaggagtcaactcatcattggcatctaatgcatcaagctctctaagagtgtgttctgcttcaatcacagcatccaaagggggaggttcaattgctttggccagaaattggccaattcctcctagacgcagaagttttatgctaagagcaatttcatgcaatggtgttcggaacatctctggtgtcatgtgggtttcaagtctctcaaaacgagctcggctgcacaggtgaaagcagaatccaggccgtactcggccagctcgccctttccgttgctcaaggtttgtttttgatgcccatacggtagcatagttggtcatattgttgtgagcagtgaagagtttcactttctgcttgcaggagtcaatgacataaacaacatcgtttatggtaatgcttgtttcagcaatatttgtggacaaaataaccttggttactccaactggtactggatcaaacactttgcgctgttcctctcgaggaatctgagaatgcaggggtagaatctgataccgatggcttccaaaatgtggattcatttccaaatgcttctgcatagtataaatcagattccagccaggcaaaaaaaccaacacagctccaggaacattaagggtttcaatgtacttaagtagagcctcgatgagttcaaaaggagtttccttttcgttcaattgagacatgctcaaccttgtttctggaccatattcatcaccacagatcaagttgcaatttgcatcatcatcctcaccaccatcatcatccttatccttcttctttttgtcttttggtggaggaacaaagtgggtcatctgaatgcagtcttccagaaaatattcttgaactgggtaagtcctcccataaacttcaatgatggggcaattgaagaaatattcacaaaacatgctggtatcaatagtagcagacataagaacaatgcgaacttcaggataagcctgaacaacatcacgcagtactaccaaaaggaagtcagtattaatatctctttcatgtatttcatctacaattacatgactgattcctcgaatgcctgcttctaattttctcaggagcacacctacagtacaaaacattatactggcatgaggacgaggaagtatagactcaaatcgaacgctgtagccacagctttttccaggctcttctcctctttcaaatgcaactcgctctgccacagaaaccgcactgattcttctgggctgagttactacgatgttacactctgctgctcggtcattctggataaagtcatctagaatgaactggggaacctgtgtggttttcccacatccagtagcccctctaataatgacaactgaattttgatcctcgggaattccggaccggta

SEQ ID NO: 127805 - DNA, 882 bp, Homo Sapiens
  misc_feature (110)..(129): n is a, c, g, or t
  misc_feature (337)..(337): n is a, c, g, or t
  misc_feature (344)..(344): n is a, c, g, or t
  misc_feature (380)..(380): n is a, c, g, or t
  misc_feature (429)..(430): n is a, c, g, or t
  misc_feature (437)..(437): n is a, c, g, or t
  misc_feature (462)..(462): n is a, c, g, or t
  misc_feature (473)..(473): n is a, c, g, or t
cctccccaagggaatttttccgcggtttttaaccccccggtttttttacaaagccgccaatttgccaccacacgaaattgggcttttttgtggggggcaaaagggagaannnnnnnnnnnnnnnnnnnnaaaaaaaaccacacccctttaaccagaaaggggcggatttagaatttttttcccccaaatccaaaagaagggaagaggggtctttcaatttcggggctttaaaagggccaatttcccagatgatttggggaaaaagcccattacccccctttcagtggggaggatcttccctcttttccttaggaaagccatccatgggggtcccccnccaaggnccaggagggaagataaccacatccaaattatttatntggtccagtgttagtaaacccttgggtcaccaaacaattcttctggaanncccaganttaatcaaaatctctttgagctganctttggcttcnccagtccattcttagtgtagccatattaagtcgttttgtgctcaccgaaacgtatctctgcttcgttctccacccattctagcatcatcccaggcttggaatactgataaaagggctacgtgatcagaaaatctgtttccagccaaatttcgatggatatagcccagccgctttccttcattgatgaaaggctctggaaagcaggtagcagcagcaatggtacagatagcatctcccacgtagaaaatacaccccattatcatcattttgccaaaacgaggctcaatggggattttagccaggattcgtcccataggagtctactcatcattggcatctaatgcatcaagctctctaagagtgtgtttagcttccagcacagcaaccaagtgggagttaggatccgcta

SEQ ID NO: 127806 - DNA, 508 bp, Homo Sapiens
  misc_feature (366)..(366): n is a, c, g, or t
actatctggtccagtgttagtaaacacttgtgtctaccgaccatcttctgggaacccagaattaatccgaatctctttgagctgaactttggcttcccaggtcattcttagtgtagccatattaagtcttttgtgctcaccaaaacgtatctctgcttcttctccaccccttctagcatcatcccaggcttggaatactgataaaagggctacgtgatcagaaaatctgtttccagccaaatttcgatggatatagcccagccgctttccttcattgatgaaaggctctggaaagcaggtagcagcagccatggtacagatagcatctcccacgtagaagatacaccccattatcatcattttccncaaacgaggctcaatggggagtttaaccaggattcgtccccaaggaatcaactcatcattgcatctaatcatcaagctctctaagagtgtgttctgcttcatcacaccaaccagtgggagccggatcctctagatcacccac

SEQ ID NO: 127807 - DNA, 1024 bp, Homo Sapiens
  misc_feature (120)..(149): n is a, c, g, or t
gaagaaattgaacatgacctgttgccttttatttaaaaactgttactagccctgcctggggctcctatacaaaaacaaaacacaacctaaaataaggtttcttcctgaccccagagactnnnnnnnnnnnnnnnnnnnnnnnnnnnnnncaggactggggctcaacaaatggaatgtgtgccgggaagggccacctggaagcccccactccacccccacccgatcctcaggatggcgctgggctgtcccctcgcctctgtccttgccagaagatggaggagaggcggcccaatcttctgagatgctccgtgggagccgtgtgctgatgggctggttaccaggccggggccgtgttggcaagacgcctcatccgcctcgtgttcctgtcctggtcgcggatcttcttctccatctcagcgtctgtcagagtctccagcagtgggcaccactggtccgcatcgcccgtgttccggatggcaatctccactgtgggcagagggttctcgctgaaggcgtaggtcttctgatgccagctcagctgtccccggatgctgtatgcgatggtggtgacaaactccccgcccaaccccagctccgagcacagcttcagggcaaacttctctggtgagttctccttctctgacatgtcccactcaaactggtccaccagggaaatgtttcccacatggatgttcagcttgatgatgacgcgctggtctgactggtcctccaggatgctgtccgtggggtaggactcgatctgctgtctgatggcagaggcgatggctggcacaaacgtcagcgggttcaaatccagatcgtcacagaggatttctgaaaacatctcaggcgtcatcaacttctcattcatgttccaggtgaaggcgtctcgcagcttctgcccatcgatctccatgtccagccggatggggaccagcacctcgggctgagatgcgttctcatggatcacagctgggtcatggcctcgtgccgattcaccacccagcctcgtacctagccgtat

SEQ ID NO: 127808 - DNA, 1375 bp, Homo Sapiens
gattccctcagatggcgctggagctgtcccctcgcctctgtccttgccagaagatggaggagaggcggcccaatcttctgagatgctccgtgggagccgtgtgctgatgggctggttaccaggccggggccgtgttggcaagacgcctcatccgcctcgtgttcctgtcctggtcgcggatcttcttctccatctcagcgtctgtcagagtctccagcagtgggcagagggttctcgctgaaggcgtcggtcttctgatgccagctcagctgtccccggatgctgtatgcgatggtggtgacaaactccccgcccaaccccagctccgagcacagcttcagggcaaacttctctgggtgagttctccttcttctgacatgtccccactcaaactggtccaccagggaaatgtttcccacatggatgttcagcttgatgatgacgcgctggtctgactggtcctccaggatgctgtccgtggggtaggactcgatctgctgtctgatggcagaggcgatggctggcacaaacgtcagcgggttcaaatccagatcgtcacagaggatttctgaaaacatctcaggcgtcatcaacttctcattcatgttccaggtgaaggcgtctcgcagcttctgcccatcgatctccatgtccagccggatggggaccagcacctcgggctgagatgcgttctcatggatcacagctgggtcatggtcatcaaagcaaagggggaaggttctcttcttgtctcggcccatgcggttcctgttgatggttgtggagcatggcacggcatctaagtggtgggagctgttgggcagggtgggtacccactggctgttcctcttggccttctgttccctgaggtaggtggggggctctgtgctgatggacacagccttgtacttctcatcgttgccatccagaatctcttccacttccgaggcttttaacagggtcacactggtggctagagtcgtgtatccgtgatcatgtgacgatgcaactattttcttcctctcttccacagtggctagtcgcctccagagtgaggggtatctcttgtacagagaacctcggaacatacggaggtagtttcccacctcggagccgatcatgtagaactcgccgtcgtcctccagctggaacttcacgggcttctgcccgaaggtcttgctcagcgccatcatcatcattgcggcggcagaggcgggcggccggagccgggctgcgagggatcaggagggctggggcggggccggggcgtgctgggccgagggaaaccgaagccggaaggcgaaatgcggaccgggccgggtactggcgcctcagccgggctcctcagccgccgccgccgccgcagacgacgacc

SEQ ID NO: 127809 - DNA, 1216 bp, Homo Sapiens
cgtgctacctcatcgtggtccgtgggtgcgctactgtttcacgactcgtgcctgcgtctagtcgtgcggtgtcttcttagtactgcctgccgttggtggctgtaccctcccccgttgcgtcgtgcgttgcgctgtggtgtcgttctctgcgcgccccactgtctggccgccggtgttttccccgccgggtgtgtgctttttgacgccggtggtagagcgtcccacgggtccttccccggtgtaggcccgctgtctgctttgtttgctcgcgcgtatggcggccccacaactccgcgggtcaacgcagtgttccacagagatttctcgaaacatttcagccgtcagcaagttcacagtcagtgtcccaggtaaggcgtcttccagcttgtgcccatcgaatctccaggtccacccggatgggtaccagccacctcgggtctgagaagccgttctcatggatcaccagctggtcatggtcatcaaagcaaaggggaagttctcttcttgtctcggccccatgcggttcctgttgatggttcgtggagcatggcacggcatctaagtgctgggagctgttgggcaggctgggtacccactggctgttcctcttggccttctgttccctgaggtaggtcggggggctctgtgctcgatggacacagccttgtacttctcatcgttgccatccagaatctcttccacttccgaggcttttaacagggtcacactggctggctagagctcgtgctatccgtgatcctgtagtgttaggttcttgttttttgtaccatgtgacgatgcaactagttttcttccgtctcttccacagtggctagtcgcctccagagtgaggggtatctcttgtacagagaacctcggaacatacggaggtagtttcccacctcggagccgatcatgtagaactcgccgtcgtcctccacgctggaacttcacgggcttctgcccgaaggtcttgctcagctgccatcatcatcattagcggcggcaagaggcggcgcggccggagccgggctgcgagggatcaggacgggctggggcggggccggggcgtgctgggccgagggaaaccgaagccggaaggcgaaatgcggaccgggccgggtactggcgcctcagccgggctcctcagccgccgccgccgccgcagacgacgaccctcgtgccgattcacacacccaggcctcgtacctagccg

SEQ ID NO: 127810 - DNA, 698 bp, Homo Sapiens
aaaaactaaaaagacaaattatctttattgtcacccccatccctgcaaacccaatatatagtggtaactcagggacagataactataatacattctctcattcagaaaaaaatgtgatactgagcaatactattcatgtataataatgatgaaatactgcataaacattttgcggcccatctccttgaaactgaagaaagttctgatgaaactccaattctagtcttcaggagaaactccctgtccagtctttagtacagctccttatacgagcttctgaaatgttctttttttgtccatcattctccatggccacatcctgtgtgggtactggggagctgttaaggttttatgctctatttttctacttatgcaagcttggggttggacagttaccctctgttttaacacccgaacaatgatatttgagccagatttagtatgattaataaaattcctctaaaaatgtagtcttctgattgatttgcttctggtaactacacccaaagttctttcttacataattatcaagcctaatttactgctttgctgccttgctcctatgccagttcctttagacctttatcgtagctatcttgaagccatctaaaataatgactttgaatggaaagacccacccttttcctgatctttgttgcaggacttaatctcaagggtaactatactcaagacctctt

SEQ ID NO: 127811 - DNA, 1001 bp, Homo Sapiens
  misc_feature (168)..(177): n is a, c, g, or t
aactttgtatcaaatgtattttcagcaagacttgaagatttgacacaggcacagggaaaaggaacaaacttaaaaagagtataaataaggtcagttcaaactcacttctatttgaaatgtgttttaaaaacaattttagtcttatattttaaaaatatgattgagaannnnnnnnnnctttaattcaagtcttctcaatcatcttaaaatacttgtgagctgaactgatacattaaggcaaatttttattttaaatactcatttcattgatgaactctgtttcatttaaactgctaatccagggagaaagttttcgtaaaaaacattttattgctacaaagggaaacatggtcacaaagagcctttaagcgtatcttaacgcaaattactattcaatgtctaatgcagtaaaaaaatacacagagcacaaaatacttgcccagtttatatcttccagggtaagtattcaaaaaattgatgcacacttgaatattcactcccaagagcagcatttaagataaaatgattagaatagatatactaacaatacacatttgttatccttaacaccaataaagtaataaaaattaagcttaaaaattatacaaacaatttatcggatctaagtctggtagctataaaaactaaactaaaatagttttgccttcattttattaaacaaatgttaaacatttagaaattatataaaacaaattttaatatgtggaatgcatgcaacatgggtgttaattcatattttaagctattaaatttcttacccttttttacattagaaccgaaatgtaaagctccttttaaatctaataccttatatttaattttcttcaggttgctcaacagggaagtcagcaggttcttcctttgctgtctcttcctctaattcctcttcttcaataggttcatcaatcttctcttcatcctcctcatctccttctatttgctgatcctgagaatggtcttgaatttcaaaaggattctca

SEQ ID NO: 127812 - DNA, 1225 bp, Homo Sapiens
atacaaaaaaaggtatttattttcatacaactcatttataatttattttcacacaactcactatgttacaaaactgtacacctgcccccaaagttggataacccaaagtcacattccttggaaagagaagaatcaacactgggccgctttttcaagagcagtctcttctggattgggcccaacaaggctagaccagaatgtggagtacaggaatggccattcttcaagtccgaggggtcaggttcttagcctggtgcttccagtcgttacaggaggggtgtctctgtttggaaagccagcaccagcacccagaacacaggagtccagagagacaggcaggcactgctggccaccatctggctgtggtgggaatgcccacggcgagggagccgcagttcagtggagatgtgcctgtccaggacagggacctggagttgcgggactatgtcactctcctccaggcggacccacagatcgctgaattgccggagtcgcggcctccgctgtgaccgcctccgcttcttccggaacctctgttcggcctcactgggcgtgtcggcacttccaggccgggacacaaggggaggcagcgttgagtgccctgaggatacggcttctggtgccggtacttccagggtagggacttttggagcaaagatggtggacagagtgggccgtgtggaggtctttttactcttccctttgtggatgggtcgtccagcaggggcgtgttctacctcataggcttcacgccgcaaaacatccagcactgtgttgttgcccatgaaatgaccagctccaaaggcaaagaagaagcctttgtcagggaactcctccaaaagggccttcacccgcttccctattctctcattccgcttgtagatcagctcccggcgtaagtagctgtcaatctcctgagcagtgatgcgctcctgaggtggtagcgtggcattaataaaattgggaacctgggagctgtcatggctgaggatgacggagctgaggtccccgcagttatagtgtttgatgagatcctccgtcgtgtaggggatctgaagactgcctgctcgcaggctttcctgctgcaggagggtctggttcaaagcaaagatgacctgtgaaaagttcaacccattcaatggatggcactgctcttccaccttttccactgccccagtctgtttcctcagccgctcagcctcctgggcaaggaacaggtctaaga

SEQ ID NO: 127813 - DNA, 1226 bp, Homo Sapiens
  misc_feature (99)..(99): n is a, c, g, or t
  misc_feature (122)..(122): n is a, c, g, or t
  misc_feature (133)..(133): n is a, c, g, or t
  misc_feature (186)..(186): n is a, c, g, or t
  misc_feature (195)..(195): n is a, c, g, or t
  misc_feature (202)..(202): n is a, c, g, or t
  misc_feature (225)..(225): n is a, c, g, or t
  misc_feature (235)..(235): n is a, c, g, or t
  misc_feature (241)..(241): n is a, c, g, or t
  misc_feature (319)..(319): n is a, c, g, or t
  misc_feature (342)..(342): n is a, c, g, or t
  misc_feature (1036)..(1051): n is a, c, g, or t
ccggactgtgttacacccatcatttgagatctttatcggtacggagtgcttccgatcactgcatgcgcgtggataaatgataaaacatgacaattactntctctctgcacatgctctcaaantatactgcatntgaaaaaattatagatccagtgctacatagagctaagagtgctctcttggacntcagtaccntccttcntgactggttccgttcatcagtcntgtccctctncaagtnatctagaggaatgtggtactcttaggcgtgaatgtaaatgccttaatattgaaggtcctggttagaagcatgatacangacatctactggattcatattancaaatatcctggaatgtatagcttcaaagtatattagaaaaaccccaaagatggtataatctttaagtgtgcacgttcgtttatttctgcatcttccctccaaacttgcctttgcatcttaaatatttcactatgcacactcccattcctcttgggtttcatcttgtcgtttaagaaatgtactgaaataatcattggaatatttgcattttgcacaatgactggtatgatagctcttgacaaataaggaaagcactgaaatgttgtgattgggtctcgggaaatgctcagattgatgtcttaccagcatttcttctgggcttgtgatgttgagctgtagtcttgtagccataatgagcaaattgactaagagaagcaaaggtttcttggggttattaaccagtagtgtggaaatactagttttatgtggccaaggaaaagcaaaggcttttcttttcagtttgtgttatttggaagacagaaaaacatcttgtctacatcctttggctgtttgtaggatcacgttgtccttacgatactgaaactttacagctgctgtaaattttttataaatgaatttcaaaatgttataatgggactgtaggttgtttttctacatcttcattatttggacctaaaaccagtttttaataagaaagtttatctttactctttctgaaattatgactccagnnnnnnnnnnnnnnnntacaagtcatggaatcagcaatctggtaagaaatgctgccaagaatgtggcagtagctgtcctgacagactccaactgtctttactatctgaagaatcctaggctccacatgagaggcagaaatggatcagtcttattcttttctagaaatggttatctgtagtttggtagcaaa

SEQ ID NO: 127814 - DNA, 683 bp, Homo Sapiens
  misc_feature (634)..(634): n is a, c, g, or t
tttttcaacagtggtgagtaaatttaaatgcttttattaacaatcttcttacattacaaggataatatgacaaaaagaaagtttctgcgtacatattatgataaaccaacatagctctatttgtatccagtgttctaggtcccgtcacacaggtactataaagcgtagtctgcaaaataataacatcaagaggttttttttaaagaaagtattaacatattaatatgtatgtgataatagactcctaggtatttccccccatccccacttatttttcctttgtgattgacatgaaaatggttcagcagcgtgggggtggagaagagagagacgggggctgaaatagacggaatcagactgctggttcttccggagagacaaaagtgaagactgagaggtgcccgagggcagcctggcctttgtcttttggtgagcagtattgtgaccgctgtccccctctggacagagggctcggtcccttggtgcccctggcgtgctctctctctgaggtacagtgcattgtgggattgctacctggggatgcccatcccctggccgtgggtctagtccactgcagtgggaagaaggctcggcccggcctggtctctcttgagccaggtactggagggtgtcncaagacccagttggcagctaactgtggctcaaggaggtgggcattggca

SEQ ID NO: 127815 - DNA, 1489 bp, Homo Sapiens
  misc_feature (352)..(352): n is a, c, g, or t
atgaaaacagagatctaaaaatttaatgatttaaaaatagcctctacatacaagatggcaaagagtaatacagattgaacatttggttttaaaaatgtgaaatgtctccacttagcgtagatcaatcaagtcagccatctcctaagaaatacacattatacaatgaaatctacaaagacacactttttaacttcaagcgttgttgattttcagcaaccctcttcccacatgaacatttccttgtaatgtaatgtatgacttttaatcttcttttggcagagtaggactttgagaattataatagcagttgttttgaaaagcaccttctatgatcatttatttccactgattnttttttaatcacgctgagatcatgcattcttgttttttaaatccttttctgttccaatgatttggttgtttaaaacaagcaagcttaattcagtcaggcatatattgcaaataaaaacatgtttccaagtaggctggaataaaaatgctaaataagaactgggccaaaagatcatagataatgtgcttcttctcttggtaatatgtaaatacatttacccatggggtagaagtatttcacctgccccatgaagaacctgatggcttgtggtgtctgtgctgtgtcaatactaacagatgtgaggagacagactatggaatggacgctgtgactatctgtgagatagtggaaggggttatacacactggccacaggaagttgcaaaaattagatggactctgtgtagctagccactcttgagtgtcaggtctgcatatgtgagttttaaagaaggtgcaagatagcaataaattcccttagagagcaggatatgtcctggtagctctatagttccatgatcaaggacctggccagtttccctcaggtaatgggggtagtagcaccaaagtgaatattaagagtcagaaaggcctctacttgcaactggcggatcaaaccattcccctattttggtgaacaatcatagtctgatacgcctttgtaaatctttgctgcaaatatggtttttacaactctaaaaacatcttttggaaaacctcatgactgaaccactcataaatgcagaagattgaacagccccagggaggcaattgctctccttttattgtagctgtctctcagtattgaaacaacccaatcctaactgtggtcctggcctctaaacacacaggtctctcttccctccagcacctgaactatcagagcttggatccacatatatattctgaaatttgctccgcaagagggcttttgggcacttggccatcatgtgtttaagatggtcagttttgaaaagagttttccaaacaagaataagtcatgctatgcctcatgatttggaaggtgaacacttgcaaataaactatgcttcccagatttgggagtgccaggctcagaatcatcacaaggatcgtggagaacaatattataaccagctggtatgtttttaacaacaac

SEQ ID NO: 127816 - DNA, 669 bp, Homo Sapiens
  misc_feature (669)..(669): n is a, c, g, or t
tcaggatgtcttttcgtcttgcgttaactgtggcaaggctgtgcattaaagaacataaccatcactaaaagggtggaacaccccagcgaccagtggccagtggccaggtcttatggtaacaccacagacatgcctggccaatcagatgtgatcttttgctggcacttgctcctttggcccccactgcagtaaacactttcccttggatgttggttttctgttgtgtctggcagccacacagggctgcttgaactttagccagaggcaaatatttatacatcagagtgtgcagtgttcaactggtcaggcctgagagggagagggagagacctccgtgccttttagccaaagaggatatgtcctttttttccccttccctttccaccgtgacatggtaaagtgggaccatactggatgtcatttgagcttgctgcatgtgcttctctccaaaacgtacacgtgcgcaaacttgggatgtgctttcaaaagagaggacgtcctgacatttctgcctgctcctttaattcctcttggaaagtttacggttaatattttccctggaacattgtcaagcttttgacagtgcctgagtgtatgccgaactgtgaaattgagccggagaagcaagttgtgagaaatctgtttctactcagatccgtaaggtttatn

SEQ ID NO: 127817 - DNA, 782 bp, Homo Sapiens
  misc_feature (68)..(68): n is a, c, g, or t
gtgaatcatctttatattttacttgggaaactgctacagttggctagtgggtcttccttttattgctntgagaaatggataagacatagactatcacccctcccaaaaatgtgcatatggccccatacaagacacatgtactgccagagcttggggaactccctagaatctactcctagaccaccctagtgaagtaccatagaccatattttctagatgggacaaaataataaattttgactaagaacttactgtttagagagaaaaaatagtaaataatgttcaaaatgagaagacaataactgacaagtctgtgatttttgggttagatgagaccacttttgatttttgaggaataaaaggagttagttttttggtcctgatgtgtaaaatgattcatggggtttcacatacagacaagtagttttcttttcagcaaatatttaacatatctctcaatatatttttcaccagtttttggtaaatatgcattgctataggtataccaagttttttttgttatgtttagtaactaatttcattttttctgtatatgtaaatatagctattggaccctgcattgaaaaccttcttagtactaacaacactccttttattattaccttcatagttactttaaatgacatatttatttcgagttttacttctggctgagttgcaaagtctatgagaatgttacctcctgtctcagaagcttgttagttattgtgccacctaaatattgtaataaaagtgtttaaataaaaatcttcttaaaattt

SEQ ID NO: 127818 - DNA, 1043 bp, Homo Sapiens
tttgctgcacttcccccaataaaatcctccctcgttttgctttattttattctgtgaaaataagccttattataaatcacaatgaaatccacaaaccaaaccccaaactctctagcaaaacaagacccccttgatgtataaagtcatcgctgacaggacagtctttttcagttattgcttttgtcgcttgtttcttgagaacatgactccaataaggctcatggctgccaagcccattcctgcaacgcttgcagcgatgatgacatctctgacctggtcactgcgggcgactccatagcgcagctcattcacaaagtgctcgcagttctcactggtcagcttgtagagcacctcctgccccaccagctcctccgcccgctggatgattttgctgcagggcagcggcgagtacttgtcatcatgtttgttgttgacctggtacttgtcactcccggccacatcatacagcaattccttcttcacgatggccttgtcagtcagggcggacatgacactggctgcaccagctcctgcgacctcacttggaggggccagatgaaccacatatccatcgccaacatagatggcccagtgtctgtagaaagggcgaaaaatctcaatcaggtctccaggcttaggctctggaatgggcgcacgcatcttccctcgcggtgtggaccctcaaggccaggctcgatttcgctgcgtagatgtctgaggcagggggagcagggatttattgtcattaacaggaaactgcgtctccagaccccacgggactgcggcttctgttgggcagggcgtgagaggcgcgcctcggaccccaggaacaaccacctcgctccctttaacaactttctcgccggggcccggcgggcgcccaggaggctgcaggtgccagcgggcggctcggcaggctagtctacacccgccctacccaattagatctcttcctcgcggaaggggagaagcatcccaggcacctcgcccggccttatcgcacccttccaggaagacccgctccacccacctcgcggtctcgg

SEQ ID NO: 127819 - DNA, 701 bp, Homo Sapiens
  misc_feature (554)..(637): n is a, c, g, or t
ggggggagggctggaagcctcaaacgttcgttgtcactttattggttctctttgctcgtgaagatgaccctcaccttggagccacggaggcagcatgaccccagcacccgggttccaggcccccttgaggggcagctcagtgatctctgaccccatcatccacgtgtcctccggggtggtctgtgtgaaaggaaggctcggaggaggtggctcagcatcgctgcctggatccgctgcctctcagccacggagtgtttgtggacgagcgcccacacgagctgcgggggaagtggatgtggagccagtgtagacgcctccaggcctcagcgcacccagggcccacggagtgcagaaagggtaccgagatgtccctgcctggaccacaccatggctgggtgacagggagcttggtgggccagaggccacggggctgaccaggcagaaaggggagggaggaccctggttcctgagggacacactgccccagagcatgcccttgccacgccagccagctcccagctctggagaagcctcggagcccagagcacacgtgnnnnnnnnnnnnnnnnnnnnnnnnnnnnnnnnnnnnnnnnnnnnnnnnnnnnnnnnnnnnnnnnnnnnnnnnnnnnnnnnnnnnggagatgaggctgtgctggggcctcctccacccctcgccttcagcctcgccaggtgcacaggag

SEQ ID NO: 127820 - DNA, 1199 bp, Homo Sapiens
tggtctgccagaggcagactgacaaacgtcgttttgttcttcctacggcgtggtagtttctttggtctgcaggttaccacccagatcgtgttgatgttaactgtattttttctcgagctgcatctgcgcaagacgagcagtgtgcttcgacaagacatctatggcgtcgttgtgattctctctcttctctcggcccatggtaggagttcgctccctccgagtgcgaccagcgaaacatggttgttcctttggagtgtggatccgcgctcccaccccctcggtgtctctgttcgtgcaccttgggcggaaatcatccagggtttcctcttgggcgagaaacggacaccgccgttatacgacaaagttgttggtgtgggatcccccggcgctaacacgtgtgcttcccagaggttctgtttcttgcggtaacatggttggcgttgcccaatccgtgagatttccgagtttattggattgacccgtgcccccccacaggaactggggccgccatgcccttggctgggtgccggccatccccggcccaccggagctgcctcatcgtgggtgaagtatcgacccccacacgctcaacccgggtccggccccgttggacatttgcccagggctggaccctcggctccgtcctggcgcgtcacactggaccgtctggcgcttcttcctgcgggacaatcacacattgaggtacaaggagaccccgtggcagaagtggccagacacaggatgaccagggcagcaccagtcggcaaacggggacccagcaccccactggggctggacgaagacctgctggggcctggggttcacgagggcgagggagcccccactcccaactgacctgggccgtggctgcctcgtgagcctccccgagccccggcctccgtggcctcctcctgtttcgtgtgggcgctcgtcccaccaaacactccgtggctgagaggcagcggatcccaggcagcgatgctgagcccacctcctccgagccttcctttcacaccagacccccccggaggacacgtggatgatggggtcagagatcactgagctgcccctcaagggggcctggaacccgggtgctggggtcatgctgcctccgtggctccaaggtgagggtcatcttcacgagccaagagaacccataaagtgaccacgaacgtttgaggcttccagccctccccccc

SEQ ID NO: 127821 - DNA, 568 bp, Homo Sapiens
tttttttgaaattttaaagctgggtgtccaggggagacatcacacgtcggtaggttccgtgatgcctcacaagccgcaaaaccagcaagtttttattagggactttcaaaaggggagggagtgtatgaatagggtgtgggtcacaaagatcacctacttcacaaggtaatagaatatcacaaggcaagtggaggcagggcgagatcacaggaccacaggaccggggcgaaattaaaattgctaatgaagttttgggcatgcattgtcattgataacatcttatcaggagacagggtttgagagcagacaaccggtctgaccaaaatttattaggcgggaatttcctcatcctaataagcctgggagcgctacaggagactggggcttatttcatccctacagctgtgactgtaaaatacagccaccccccaagtggccatttcagaggcctaccctcagggacgcattctctttctcaggggcgttccttgctgagaaaaagaattcagcgatatttctcccatttgcttttgaaagaagagaaatatggctctgttgcgcccggtgc

SEQ ID NO: 127822 - DNA, 1159 bp, Homo Sapiens
cagtcgacggtaccggacatatgcccgggaattcggccattacggccgggaggctggtcttgaactcctggtttcaagcaatactcccgcctcggtgtggggattgcaggcttgagccactgtgcctggcctggaaccaacctttatgtctatcaatactcccatcagttaactgtctcaggtatcataatatcccttcttatcgggggacctgccccgatagtcacgtaggttcttttctattttccctaagcgtcggctggtttgagaaataaaaggacagagtacaaaagagagaaattttaaagctgggcgtccgggggagacatcacacgttggtaggatccgtgatgccccacaagccacaaaaaccagcaagtttttattagggattttcaaaaggggagggagtgtgcgaataggtgtgggtgacagacatcaagtacttaacagggtaatagaatatcacaaggcaagtggaggcagggcgagatcacaggaccacaggaccagaggcgaaattaaaattgctaatgaagttttgggcaccattgtcattgataacatcttatcaggagacagggtttgagatcaaccggtctgaccaaaatttattaggcgggaatttcctcttcctaataagcctgggagcgctatgggagactggagtttatttcatctctgcagcctcgaccataagagacggctacgccccaggggggccagttcagagacctacccctaggtgcgcattctctttctcagggatgttccatgctgagaaaaagaattcagcgatatttctcccatttgcttttgaaagaagagaaatatggctctgttccgcccggctcaccggcggtcagagtttaaggttatctctcttgttccctgaacaattgctgttatcctgttcttttttcaaggtgcccagatttcatattgttcacacacacatgctctacaatttgtgcagttgttgcaattatcacatggtcctgaggtgacatacatcctcctcagcttacgaagatcacaggattaaaagattaaagtaaagacaggcataggaaatcacaagggtattggttggggaagtaataagtgtctgtgacatcttcataatttatgttaagagattgcagaaggtccaggtatg

SEQ ID NO: 127823 - DNA, 607 bp, Homo Sapiens
  misc_feature (515)..(515): n is a, c, g, or t
  misc_feature (592)..(592): n is a, c, g, or t
ccaaactcagagcaactttattgtcagcgtgggcggagcgttgggaggcacctcagtcatgatacaggcgcaggaggcagccgcggagggtgcctatgtagcggtcccagagggcctggtgtcggaagccatcgagggagtggacagactctgaatactgattcaggaagaaccgcacgtcgctgagtggccagtggtcggagcggcagggttccacaaacttctccacgaggtccacaaacaggtctctgacatctttattgtgggtcagcttggcggccacgttcaccagcccccgggacaggttctgtggggcagggatccttggagctctgctttctgccccagaagttggcagctgagcacagaagcttggggagggaggagcaggcccctccccagatccatccacctccctccatcaaccaagtccccattgtttatgagctgctcccgtcagcggccaccagagggagcagcagtgccacctgccggccaatccctggcaggggcanagctgcccggtaggggtggcgaactggaggctgaagatgccaagggtcagaggctggatgggaccacagaccttgangttggcttccatctc

SEQ ID NO: 127824 - DNA, 1407 bp, Homo Sapiens
tttttttggcttgtgagcagactcttctggtggatgggctgagcacagacaccattccctgagatatgtctcagttcccaaggagccactgtacacatccatccttgtacacggacaccaggtgctcagagacagacacaggcacatctgcacgccccccacttgctccccggagcgaggaccagtctccaaactcagagcaactttattgtcagcgtgggcggagcgttgggaggcacctcagtcatgatacaggcgcaggaggcagccgcggagggtgcccatgtagcggtcccagagggcctggtgtcggaagccatcgagggagtggacagacgctgaatactgattcaggaagaaccgcacgtcgctgagtggccagtggtcggagcggcagggttccacaaacttctccacgaggtccacaaacaggtctctgacatctttattgtgggtcagcttggcggccacgttcaccagcccccgggacaggttcttgaagttggcttccatctcagagaagacgcccagctttccccggagagcagtgcacaccaggctcttgtgcaggtccagaaggtccttgtcagccactagcaccttgagctccttcaagtcctggagaaattccttgtctaagtccatgtccatgtcatccatctgtgagtcgacggctccaagggtccagttttggatcatgagctcagcgcagaaggcaaagtcaccgaagctcagatactgcagttttttcttccctgtctcaaagcggttgttagcaaagaagacgatggctgcatagtccctggccaaccggtcagagaggaggaagtgttgctgaatattgtccaccagggagccccgcatttcctctaccaccttgaagacccgtttaaagttgtcaaactgtctccggcagctcttgagggtgatgcctgttttggtgctgatgtcatccaggtctttcttggtgcctttggacagcttcttgcccagcacctcccgaacaaaggcctcatcaaaggcatagtacctctcgatgagtagtgcctgccgggagggcggaatctggaagatgagctggtgcagtagcttgggcggcgcatgcagcagccgctcgagcatgtggaaggtgcggtaatggtccatggtgtcgctctgcagcaccgctgccgtggcgccagtctgctccaggattcccgagcgcacccgcagggccaccgcgtcggtcaccgagtaaccatcgagccagaggcgatacacgtcctcgtcgataagggtcgtgttccccacgaagatgtccagctcactggtcatggcgacgcccggggccgcagcgccccgagcaggagcgagcactgctcgggactggcgccctcgtgccgattcaacacccaggcctcgctcctg

SEQ ID NO: 127825 - DNA, 856 bp, Homo Sapiens
tttattgtcagcgtggcggagccttgggaggcacctcagtcatgatacaggcgcaggagcacccgcggagggtgcccatgtaacggtcccatatggcctggtgtcggaagccattgagggagtggacagacgctgaatactgattcaggaagaaccgcacgtcgctgagtggccagtggtcggagcggtagggttccacaaacttctccacgaggttcacaaacaggtctctgacatctttattgtgggtcagtttggctgccacgttcaccagcctctgggacaggttcttgaagttggcttccatctcagagaagacgcccagctttccccggagagcagtgcacaccaggctcttgtgcaggtccagaaggtccttgtcagccactagcaccttgagctccttcaagtcctggagaaattccttgtctaagtccatgtccatgtcatccatctgtgagtctgggtcagtgggggcctcaccgacggctccaagggtccagttttggatcatgagctcagcgcagaaggcaaagtcaccgaagctcagatactgcagttttttcttccctgtctcaaagcggttgttagcaaagaagacgatggctgcatagtccctggccaaccggtcagagaggaggaagtgttgctgaatattgtccaccagggagccccgcatttcctctaccaccttgaagacccgtttaaagttgtcaaactgtctccggcagctcttgagggtgatgcctgttttggtgctgatgtcatccaggtctttcttggtgcctttggacagcttcttgcccagcacctcccgaacaaaggcctcatcaaaggcatagtacctctcgatgag

SEQ ID NO: 127826 - DNA, 295 bp, Homo Sapiens
gcttttctaattttctatttttaatatattccaaaagaggtgtggttcttctagcaatgagctctcttgtcttcgcctccatctcccccagcagagtctcagggttggcactggtcttctcttcctccacacagtaggtttctaaaaacttcttatattctggatcatcttcgatgcttccagtcttggcatctttttttctcagcttctttttggctatcttctggaatggagcaaactctaccactgcaggatattctaggcctttgctgtcaaggaagatatacctcgtgcc

SEQ ID NO: 127827 - DNA, 1647 bp, Homo Sapiens
  misc_feature (873)..(873): n is a, c, g, or t
attttaaaaattttgatctgtttcacacattatatttgtttgaacttcccatgtttaaaaattttgaagaaaatccctggagtagacaatccctagagcactgacatgctgtggtccaaggttcaccaggaacagtgcctgtgccctgccacatggcggggttccttcaagcctctggtgatgaaggtgctcagggaaaggaggacggaggggcgcggaaggacccagccactgctggccaccctggcctctgctctgtgttcacgggggagcagactctggggaggcgcccctcctcaccacggcctgcaggccgggctggagcctgcgccttcaggggccttgcatctccagctggaccccctggcacaggatgtgctgcagtagcccgttgaccacatccagagtctcgtccttctccagcacgatgtcataggagtccatgtagcgctcccgccgctcctccaccttgtcattcaggaagccaattttgagaatgttctgcacaccaggaaccccatcggccatggtgaggtccccgatagagtctcccagcaggatgacattggttttgccctcaagttgctggaagtaaccacagttctcacacacagagctgttcttgttgtatgtgtgtatcagctggcccttaaatccctggagaaaaccatcttcattaaaatccatgtagttagacacgatgtggatgttggggtggaacactttcatctgtcggataatttcttccaggatatccaccaatgcccgcagaaaagatgaaaaggggaatgttgttatggtagagtgtgttgaagaaggtcttatatccctccctgagcattgcattggactctctaaccacctgggctatcnttaaacttctgaatcttctgctgacataggagattgtgcgctttggtcccccatttccaccatattgaggtagcttttccttgacggtcccggtggtgggtcgatcctcaattgggtaatagtggtgaaggagcgttgtgagctctttccgacattcctcactgatgatcttgctattatccagaatattgtaagaagaagggcatcgctttccattatatgcaaacctgttcaaggtcatgtcaaaatcagaaatcactggggagccgctggcttggggaggataatatcggccgtaggtactggtgtgggcgccttctgtccaattagaggaagcagcatgaccatattgagaaatctgtaaccggtctccgccgcccttgcggagggcgcccacgatgtcctgcacccgcccaggctgccgcatcaggaccgtggccttcatcagggtgctcacctgtcccgagacccgagagaaccactgacccctgcgccacgctgggcccgaggggagcccggggctcgcttgggcgcgcgtgtgaggcggggccggggtgcgcgagggggcggctactggcctgggtgaagcggcggtgcctcggtgaccagctggggggctggaagcgccccgggggtcggagtccgggcccgccccactccggacgcttcctccctcctcacctcctctgccatcccgttcgaggcctggtcggcggctcgcgggacaaccggacgcgtggtcgacgatatcccgggaatccggaccggtccagc

SEQ ID NO: 127828 - DNA, 1058 bp, Homo Sapiens
  misc_feature (106)..(106): n is a, c, g, or t
  misc_feature (290)..(290): n is a, c, g, or t
  misc_feature (357)..(357): n is a, c, g, or t
aaccccccatttggggcccagtgggtgaagtccccccgattagaattccttcccaagcacgggatgaccatttgtttttgcccctcaaagttgcctgggaagttancccggagttccttcacacgcaggagcctgttccttgtggtaaggtgtgtaggagcttggcccttaaaatcccctggagaaaaaccatctttcatttaaaatcccatgtagttagacacgatgtggatgttggggtggaacactttcatctgtcggataatttcttccaggatatcaccaatgcnccgcagaaaagatgaaaagggaatgtttgttatggtagagtgtgttgaagaaggtcttatatccctncctgagcattgcattggactctctaaccacctgggctatctgaaacttctgaatcttctgctgacataggagattgtgcgctttggtccaccattccaccatatgaggtagcttctccttgacggtccggtgtgggtcgatctcaattgggtaatagtggtgaaggagcgctgtgagctctttccgacactcctcactgatgatcttgctattatccagaatattgtaagaagaagggcatcgctttccattatatgcaaacctgctcaaggtcatgtcaaaatcagaaatcacctgtaaccggtctccgccgcccttgcggagggcgcccacgatctcctgcacccgcccaggctgccgcatcaggaccgtggccttcatcagggtgctcacctgtcccgagacccgagagaaccactgacccctgcgccacgctgggcccgaggggagcccggggctcgctcgggcgcgcgtgtgaggcggggccggggtgcgcgagggggcggctactggcctgggtgaagcggcggtgcctcggtgaccagctggggggctcgaagcgccccgggggtcggagtccgggcccgccccactccggacgcttcctccctcctcacctcctctgccatcccgttcgaggcctggtcggcggctcgcgggacaacgacagccccgcctcgtgccgattcgccacccaggcc

SEQ ID NO: 127829 - DNA, 1297 bp, Homo Sapiens
  misc_feature (1185)..(1219): n is a, c, g, or t
gtgcaaaaaggggctttaattcataagtaaaatcaattttattagtaaggctctttccacatgtccaaagcaaacaattaatgaattccagggaaaaccacctatatacaatgaaattagaagtatctcaggatgacaaaaaatatacaaatatgtacacccataatcaccgccgcctccgaaaaccttttttcttccgacctttctgaggtatcttcttccgcttcttaataggattctgatcctcatcaagatgaacagttccccctgtcaaagcactgatgtcactgaagtgtgtaagggaatgaagttgtgagctcatgacatttgctcgttttcgccgtcctttctctcgcttactgacgctcaaacgcaccatcatgctctcctcatagttaatcctgtgttggtcctcctgactctggcgggtaacatggggatgccgagcatcacggatttcctctggagcatctgagtactgctccttaagttcacgaatgacagagctgctcaatgcccgtctcttggctcgttctagacgcttcttctcccgctcagcttctgtttcatcataatgtactggaaccaagcgtggaggaacatatttcttagacactcccttcacagatttcttccctgaagcctcagactggtcatcttctgcttcatcttcctcctcatcctcagagctcaacttgctcatcatattgctgggatgaggcttaaaacgaagtgggtcattctcactaaggctgcctgtcactgcagtcttgatcagcttgtcaatttgatacttcagcttttggtccaagggacgaagcttttccaaaaccgttcgaatctctaccagtctcaaaactgcatcatgtccctgaagagatcctcctgaggctttgtccagaatgaggtgggtcaaatccataaggtacatgagcagcagctggtctttcacttccaagaagctgagacccttttctgtaggataggcaccagcttgaactttttgtgtcagtgatttcacttgtgcagttacagccatcacttgctcctggagatttttcagaagtgtcacggcacttggcaggtcggactccagcacccccagcgccgccatcttcgcaaagcccacccctccccggccgtaatggccgaattcccgggcatatgtccggtaccgtcgactgnnnnnnnnnnnnnnnnnnnnnnnnnnnnnnnnnnncggccgcttcctcgctcactacttcgctgcgctcggtcgttcgaaaaacgccgctagcccctatatgattatcatttt

SEQ ID NO: 127830 - DNA, 709 bp, Homo Sapiens
gcatcacggatttcctctggagcatctgagtactgctcctaaagttcacgaattgacagagctgctcaatgcccgtctcttggctcgttctagacgcttcttctcccgctcagcttctgtttcatcataatgtactggaaccaagcgtggaggaacatatttcttagacactcccttcacagatttcttccctgaagcctcagactggtcatcttctgcttcatcttcctcctcatcctcagagctcaacttgctcatcatattgctgggatgaggcttaaaacgaagtgggtcattctcactaaggctgcctgtcactgcagtcttgatcagcttgtcaatttgatacttcagcttttggtccaagggacgaagcttttccagaaccgtgcgaatctccaccagtctcaaaactgcatcatgtccctgaagagatcctcctgaggctttgtccagaatgaggtgggtcaaatccataaggtacatgagcagcagctggtctttcacttccaagaagctgagacccttttctgtaggataggcaccagcttgaactttttgtgtcagtgatttcacttgtgcagttacagccatcacttgctcctggagatttttcagaagtgtcacggcaccttggcaggtcggactccagcacccccagcgccgccctcgtgccgaattcaaccacccaggcctcgtacctagccta

SEQ ID NO: 127831 - DNA, 626 bp, Homo Sapiens
ttctctttttccagggatgaaatttccacatttatttttcttttatgtgaatagaaaatggcagtgaagtgtcctatgaacgaggcgaggaatgggcatggcgctgcggtaccagcctggacgttgtgcttccaaagtacactatgtgtggtggagacaaagggtgtcgcggtttgcttttaattgctcacagttccttgggcttctcatttgtttttgaagttgtcagtttcttcaaatctcttttcaagtgacacattgcattacaaatgatggcacttaaccaatgtggcatttccatatttacaccaacaaaagaaatttacaagacataatagcatacaatcttgacatttagtaatagcaataaaacatgggcatccattttattttttctgtacaaactatcagaacataactttattcacattaaaaaaatcatctttaatttgatttgacctacatatcccccatttcatttcacccatttctcaaacctctcatcacgtcacccacaccttcaccagactacagaatctataagtaattagatctaacacctaaatagagcttagaaagtcctctcccaaacatttcctcacttccctgataattcctcaaaaaag

SEQ ID NO: 127832 - DNA, 613 bp, Homo Sapiens
tttttcctaaaaaacatctgcatttattttaaatcgcatcctcggtgtgtctgccccttttctgtccagctgtcaggtggcccaataacgccttggactccgtccccttgtcagtgccactggctgttcctggctctagttcccaggggagcctcaaactggggcctagcccaaaaagccaccggctagcatcacatagcttctccagctcaaatagcccaaggttggcatgtctgccgacctccaggaataaccgcagtcaccgtgcccaggcaacacatcctcgtgctatggggagaagcctctgctgggtgacccaccagccaaccctgggccaatttaatttagataaatgctcaaagttcaaacggccacaggaaacccctgatgtaacacctgttgtgccggccagctgtgtctcaggagctgactgcagacacctggtctgggtccctcaagcccagcagagcttgttatgtcccctaacacaaaggaggaaaatgtggctcctcgagaggaaggtgctgagcacctcaccccagggtgtcaccgaagatgggcagtgacagcaccgtatggactggcggcccacaggccccaacctcacctggcc

SEQ ID NO: 127833 - DNA, 988 bp, Homo Sapiens
ccaaggacagcgaagtttcatttatttgtgcaaatacaggcatgagcaagaatgttctaaacaatgtaacgatttccagcattgattacagaatttcctctgatcatttgatttggttatagatgaatttaaacttcaatttaagcttgacttttaaaactccccctctgcttcctgatgaaccagcataattcctaaaattacacctaaacaagtctgtcttgacacattggggtttgcctttagaaacatttagaatctagtatgggcaaggcggctggaacgaggtttgggatggcacaatgatttatgcttagttctgtttggaccactgatacaaaatcattgtcatttcatttttagggtttccataattgtagcaattatctctgaaacatttttgtccacacttatttggataaagttttctggagctgctgggggctccagagtctcaaactgggactgcaataattcagggggcataaaatgtccctctcttttgagtaagcgtccagagatgacctcaaacgacccgctcagatggaccaccaggagctgcatctcagcctgctttgcttcctttcccgactcctcacacttcagagctacaccatcttttccttgtgttaatatgtctctgtacgttttcttcagggctgaacaggctagaaccacacgctgtcccgaggctacatctcttagtaaaatgtcatgcaagttacagagccatggaatccggtcctggtcattgagcggtatgccttttcccatcttccttcgattttcctccgggtgataatcatcagcatcatagaatttccatcccagctcagatgccagcagggcgcccacggtggatttccccgagccgctcacgcccatcaccagcagcgcgcccggcgccgccatgacccaagctcggctccttcccgtcccccggccgtaatggccgaattcccgggcatatgtccggtaccgtcgactg

SEQ ID NO: 127834 - DNA, 653 bp, Homo Sapiens
ttttctgaagaacagaaatgtatttctcacagttccataggctagaagtccaagatcaaggtgccagcaggattggtgtctggtgagggtctggtctctgcatccaagatggtatcttgtgcactgtgtcttcaggaggagatgcactgtgtcctcacatggcagaaggtggaagggcaaaacaggggaagcccactccatccagtccttgtgtaaggatcctaaactcattcgtgaacactctcccttcatgactgaatcactaccttaaagccctacttcctaatcttatgacattggtgattaattttagggggacacattcagagcataacaccctatattcaatttcttaaaaattattttgttgttttgcttttctgtttttcaaatggcttaaagtgcacaaaattggattactcataatccttggctcatagcataccttggctcctatttcatccttgtctgtgcctgggcctctgtgtaaatgtatttgaataatatggtaatcacttgtgaacttacaacacaaccaaagaaccagggttctgaccctaacatctgctcctcctctgtcctttttcctgattttacccttcagcccgagggtaactactaccctgacattatgtttaggattctcttccttt

SEQ ID NO: 127835 - DNA, 505 bp, Homo Sapiens
tttaaatgtaataagaagtttattggatttctaaatataataaagtagttgcaactcttttacagaaaaaagaaatataatttccatattcattcttatagagcattgaaaaaacataattggtagagaaaactgatagaaggtaaatagaaaaacaggttttaatatagtcagataatgcataaacacaaaagaaaatacctaaatcacttgcttataacagattttattctcttattttcatactgaactatgtgtgctattttggatacatcagtgatggtttgtaatgtagtgaataaatgcaatttgctaagaatacaagaaaaaagagaaacctatattttaggaataccatggctctgtcagtatcacacatatgaaaatagacatattctttatatgtttttgtgtgcctttccctaagtcagggaatgttattcagactagcagctcatcacggtggggctatgattgtgcttatctagtacgaagtgctgctctt

SEQ ID NO: 127836 - DNA, 1849 bp, Homo Sapiens
  misc_feature (1745)..(1761): n is a, c, g, or t
ttttttcagccatagacacatctctatatttatatattagacgggtcagggaggtggcaggggcgccgggctctccacgccccccagctccacttctgctcaccacacacagaagcagcgagggcacgcgaagtgacagctttgacagggaggggattcggcccggcctggctcctcagggatgctagcccttgagactaaggaatgttccttcagggaaactagggtggggtttgaatgagatgaggggggcaggcatggccctgagtccctactcagcgccccccaccctccacctctgcccttcagcaggttggggcagccagaacccttccattccagaactgccagagactgggacgctggggaaggtaagggcgcagcagcagcagcgggagattgaactggggccacctgaggtcccgaggccccgtggggagggcgggtggggaggagaaggccttggcctgcctgaagctggaggcctcagcaaaggagagaggtggccaggcccatgctccaccccggcctgggctgccaaggtccgggctgggcacagtgtccattttctaacagtctggcgggagaggggcaggcaggaggcaggtccaggccccagggtgcagagatgtctgtctgggctagggggcctccagcactccgggctggaagcgtgctgtctcctggaagatgagctccttcagccgctccttaggtaggtcatccagctccatggcgaaggtgaagggctcctcggccactggctcatccgtcgggtcatagtactgctccaggtaggggtgagccagcgcttcctccactgtgatccgtttattggggttaaaggttaacatccggtccagcaggtcaagggctttggagtctgacttggggaaaagcttggcccaagccaccttggtcttggagggcagagactgtaggtagtttcgggccttcatgttgatgatacaattcaggtcctcctgggatggggagcccaggatgcccagaatgtggttgagctgatccaggtagtgcttgccagggaagatgggccggttagagagcatctcagccagaatgcagcccacagaccagatgtcgatggacttggtatagcccttggagttcagcatgatctctggggcccggtaccagcgcgtagccacatactccgtcaggaagccggtgtggtcatgctcaggatcggcaatccgggccaggccgaaatcacaaatcttaaggtcgcaggtggtgttgatgagcaggttggagggctttagatctcggtggagcacgttggcggagtggatgtacttgaggccccgcaggatctggtagaggaagtagcagatatggtcattgctcagctgctggcttttcagcaacttgtacaggtcagtctccatcaggtcctgcacaatgtagacatctctcatggcttccagggtggacgcccgcagaatgtctcggatgccgatgacattctcatggcggaagcgcagcaggatctggatctcccggagcgtgcgctggcagtaggtctgatgttcgaaggggctgatcttcttgatggccacgcgagtcttgcgcacgtggtcataggccgagctgaccatgccgtacgcgccctcgccgatgtactgcaactgcgtgtagcgcgggcccacgtcgaacggctgccccttcaccatctccacctcccccgggacccccgggccgaccccctcggttctacggggctnnnnnnnnnnnnnnnnntgagccgccgccgccgatcccgggaattccggaccggtaccagccgtgtaggaggagaggatgacattataagtaagtaaattattat

SEQ ID NO: 127837 - DNA, 684 bp, Homo Sapiens
  misc_feature (554)..(554): n is a, c, g, or t
ggctgtcacaataaagtttattatgaaaacaggctggtgtggggacatggggacagataagtacatttaggttgggtggctcaggtgaagtagtgcggcttcttcacattgatgccatactcgctgagggcaggggtcaagtcctccatggttagagtgtacttgcggtccttgctcttgctccgggagctgccggaggccgtgcccttcattttgcagtgctgtagggcatcattggcaatatctgagatgaatttctgggcagctaaggagatgagccgaattatgcgtgggtctgaggcctcaaagccagcacggttcaggtagtaaccagtcactgcatctgggatcgtaggcgtgtaatcttccagctgcatcaagaagtccaccaaaggcgtgctggacaccacgggcttcacgtctccgttggccgcgctcggcagtacgtaaaccccgttagatatggccccctccgggggcgccgcgccacccgccgacaccggagccgccccacgccgctcagctggctccccggcccgcgccgccaagggtcncgtgcccccagcagctgctccagccccaggtccccccgctgtccccgcggggctggccttgttctccgcggcggtgctggagggcaacgcggcgggagccgaaaccgggggcgcggggcccggggccgag

SEQ ID NO: 127838 - DNA, 1319 bp, Homo Sapiens
  misc_feature (966)..(1261): n is a, c, g, or t
ttttttttccccatactttttatttgttaatttcatcacccccctcttcttctgatgtggtccccaccacctctgacatgcacgcattggctagggcctctcacactgaggctccacgcgaagggaagatgcaaagtccagtccctccaggagctagtgatggaagtcttgggaaaggagagtcccaagttcaagaagacagctagggtagaagggagggaggtcctcaaggggtagaggacaggagtccaaggaggtggctcaggtgcggggtggcgcctcaggagagcccagaaatcttccaggcagcactgtctggaacagggctgtgcactgacggtaccggcattttcatccccaacctcagtggcccccatgcccacctggggtgggatctcaggcagaggttttgtcccctctgaggctcccccacaacacgcctctgttgttccagctttgctgtgtgaccctggtccccggtgaggtaaaccaccactgagctttatccctgcagcctgggggtcctattcacctctgggctgtctcagggtgccatctgtctctttccagctgcttccctcgccagcgctatcaatccccccattcaatttctgctgttgaaatattcagtgtttctgtatccctagttggacctgagtgaagagatgtctgaagggcatctcatgtcaagaacagactctgatcttcctcacaagcctcagtctgccccattcaattaacgatcccctcagccacccacagttcaggccacaaagctaggggtcatcgtggttttgtctcctccctcaccctgacatccacaccatcatttatattcttccatacacatcccacatctgagccagactccctcattgccagcaccctactccagcccaccatccctgctgcccctcttgtccctccggtccattctccacagcacaactgagtgacctcttaaannnnnnnnnnnnnnnnnnnnnnnnnnnnnnnnnnnnnnnnnnnnnnnnnnnnnnnnnnnnnnnnnnnnnnnnnnnnnnnnnnnnnnnnnnnnnnnnnnnnnnnnnnnnnnnnnnnnnnnnnnnnnnnnnnnnnnnnnnnnnnnnnnnnnnnnnnnnnnnnnnnnnnnnnnnnnnnnnnnnnnnnnnnnnnnnnnnnnnnnnnnnnnnnnnnnnnnnnnnnnnnnnnnnnnnnnnnnnnnnnnnnnnnnnnnnnnnnnnnnnnnnnnnnnnnnnnnnnnnnnnnnnnnnnnnnnnnnctcttaaattcttaaataggtacatcggatcctgtcactcccctacagccgcggccgc

SEQ ID NO: 127839 - DNA, 556 bp, Homo Sapiens
  misc_feature (50)..(62): n is a, c, g, or t
acggtttttaaataactttataatttcctggtggatttagtttgtgaatnnnnnnnnnnnnntgaacaaagtgtttacaataattatcaaggcaaagttgaatataacacaatttctttgtaatgtcattatcctgtcagtaacacaactccagcaggaacacacacatacagctgaaggcagcgggtgcacgtgcatcccagacaccaccatggaggctgctactgttaccaaaaggaactcaagctacaagggggcaggtgctcctcagctcctccactaaagtgcaacacttctcttctgacgcatcagggagcagtcacaggccccactggatatcctgcaatgcccggcaggtgcctgggctagtcctgcgatgggccagcaggccagagtgggtggtgctgccctcaggatgtgtagctgcagtagatggatgcaatactggtgtggtgtggaatgaggggctggacccagagggcctgctttggccggggtgaattctctggcttcagtagggttcacttcctttcctgacagtggcttctctggggtc

SEQ ID NO: 127840 - DNA, 1809 bp, Homo Sapiens
  misc_feature (969)..(979): n is a, c, g, or t
  misc_feature (1674)..(1674): n is a, c, g, or t
tttttagtgtggaattgttttttttaaaactgtgtgtaatacaaatccagccaaaacaatagtgcaaaaagttacaaagcaacaatctcttgggctaatgcagtataggctatacagaaacagccacgatgaaatgtgcagatcaggcacggtgaataccaaggaaccaaggagacggttaatatttcaacccacagtttgtgttttggattttttcccccaaaatttccatacaacaaacagacatctagatcaacccagcaagctatggtggaagtgtgcagtccagaagagcccatggagaaacaagtctcctgaggccatgaagatccgcaacaggctgagtgagagtagcacttggaacatagccacgttctgtggtggaggaggtgggcctcgttagactgctcagattactggaacctcgttatcacatcccattctacaagtttttcactgaatgtttcctgacatctataaatgagggtgcctgcccatgttaatgctgattaaaaaacacaagtacacaaatctatctccttcattgctggtgtatggacccagaacaccatcacaaaatatttccttggcctaaaagatcactggattaacaaggagttttaacagaggaacaggagtgctgtactgagaggctttcgaagggaaacacaggtaccgccatttccgatgagtttctgaaaatgctagaaaaatgacagactgccaaagacagctgtcatgctgttctccatgataacggcactaatattaaaaaaaataagaacttttaatgattgtaatgtatacagtttgggctgtttggcaaacccctgcagatgtgcattaatgatgctttatttaaaaacaaaaaaccaaatacagtccatgttgaaattgatcagtgtaagttaaatggtggtttttaggctggacccatgatttaagctgtacccatccagctcaaaccgnnnnnnnnnnntcatttgactgttaaagcaattgttcagagtcttgaagaagaaaccaggcaggaaaatgccaataatgatgattggcgaaatcaaaatcgaaaacaaagaacctgtttatcaagccgccgacaaagaaatcttgcatggagactacaagtctggagtttctgggatgaaattgtacaggaatctcagtccacagtttcctcaatcgctgcggagacggagctgtcactgaatctgacagagccctgcactccccggtccgccgaccctttctgtaatccagtcttcactgtagcctgaggaactgtttcaacctgctcctttttgatcttcttctttggcacaacctcagtggatttctctgattcagaacgagttctaattgatcttctctgttgcttcttttctactgagcctgtagaaccagatgttgcttcaggagatgatacactctgcgttggcttttcatttctctggtttggtgtagaaattataagcctgtcttgccccctgacacttatttctgttttgttaccaattccctttgttgaataaacaaattgatcgataaatttcccatcccctgtagcattctgaagagcaaacacttgttcaattttcacaactggagacatgttacacttctgcaaatccaggctccctttgtgcatcgtaatggaagctggtaaggatttcncttgctgccgcagttttccaggctattttaacaggcggtggctcttcctcttccgcacttgtgtcggcctctggctatgtctccgaatttcagtacttgagagtgaggaggccacctcccctgcattggtctgtt

SEQ ID NO: 127841 - DNA, 872 bp, Homo Sapiens
cttgtccaaaatcatctgtgatgtgggggaagttttatttgttttatgtttttgctactacgggtgcttttattgcaacagtgacttctttcctgtggactctgagatcttatcaagtctgaacagcagggttgagaagagtcctgaatgccgcctgttgcttacccaagtccccgtgaggccaatcagtgtcatctgctgaggatggagatggggccgaaggagctattcaggggtgaggcaggccgctccctgaccgaggggcctcctccacagcctgctgcctgccgcctgccgcctccagcctggctgagcacattggacagtctgctgactcaaggagatggggaggggagctggtggtctacactgaaaaggggccggctaagtcagcttcagtggagagaggaacaaaccaggaaagccatggaggaggcagctcaggctggctgcccatgtgcagagaatggcacactggctccgcagacagcaagtgcacagagaggctgtggggtgttattattcaggcttggactcttcctgcctccaattcatttcttgctgatgacccggcagctacatgcacgggttccaacagtcagtccctcagcccaagcactctgtggtgctgagcagccatcagggtaagcagagtccggggctcagagtccgttggtgtcgatagctgtcacagaagcaggtgttgaggaacgcgatgtggttgccgaggtcttgtcgagggctgggctgggcacgctgcagtcggcggacctggcagaggagcccctgcctacaggaagcagcggccggccctggccgtgggggctctggccatgcaggttctgaccacagaggcggtggtgccgctccca

SEQ ID NO: 127842 - DNA, 693 bp, Homo Sapiens
  misc_feature (682)..(682): n is a, c, g, or t
tttttttggatttaagcgaacaatttgttataatgaaccagaaatacaagattccactgaaactgaacagttgacagaatatggttgaacttaaaccttcaagggaaacaagggcaaaacaaagctaatgagtggaaaagtccaagattagtttgggataaacatgaggatataattgcattttagcatggctatcttctgacctcttccagcagttcgtctgccatcattctcccttctgacacacctaccaaatcaaatggcttctgatcctctatattgcagtataaaccaaccctatagtacccctctggtcatgatacaaacccagaaggaaagtctgtaaatctcatacaaaggtagaaagtgcaattcaacccaacacgctggttatggtatatgtgctgtcaatgtacatggtagcaacttgaatcaaaccagagctgctaccacatgtaagcaacctcttatgctgccctgtagtgatgtcaatgttctcagtttactaaattatcaatgtggaagaacgcatttttgagctccagaccttctaaacattttaaacaggctatcgaagaggatgtaacagaaccctatttcagaaacctaaggatcaggggaggaaggaacactgaccggtttttcctgggatgtttcctgtgggggcaacagggatgaacanaagaatgttag

SEQ ID NO: 127843 - DNA, 666 bp, Homo Sapiens
  misc_feature (62)..(99): n is a, c, g, or t
catttaaaaacatcacttctgtatttcaaaggaaaaataaaagaccctcccaaccctgtccnnnnnnnnnnnnnnnnnnnnnnnnnnnnnnnnnnnnnncctattagaaaccataaggaagcactgagagtttgagtattacattcttcaagtatgctgttcggattttttatttttaggttggtaactatacacatataaaaaaaccttaaaagtgcggccaagggattttgcttaaaattaagtatttagagggctacttaaaaatactgtagtaggactgtgcagtgatcctttgggggatgatgctttcacttttgtatcctcgtcaaggttaaggggcaggttcaaaagtgatcatacttccaggattagcgtaagtggccaacttgggtgagaaagccagagagatccatgtgttcttccacggacaacgaaaatccaccccgaatccaaaaattcagacatggaatgtggtaggatttcacagtaaagttagtctgggatagggagaggtgatgagcccagacaaggcagggtgttaggtttaactggtttgccctcatcaggttttcgcatctttttagtgggttttagtgcagtccttcaagccacaatttagattgcccttcggtgtgctccagattgttggttcatattaaagga

SEQ ID NO: 127844 - DNA, 1048 bp, Homo Sapiens
  misc_feature (716)..(717): n is a, c, g, or t
  misc_feature (732)..(732): n is a, c, g, or t
  misc_feature (767)..(767): n is a, c, g, or t
  misc_feature (820)..(820): n is a, c, g, or t
  misc_feature (822)..(822): n is a, c, g, or t
  misc_feature (832)..(832): n is a, c, g, or t
  misc_feature (874)..(874): n is a, c, g, or t
  misc_feature (894)..(894): n is a, c, g, or t
  misc_feature (923)..(923): n is a, c, g, or t
  misc_feature (934)..(934): n is a, c, g, or t
  misc_feature (937)..(937): n is a, c, g, or t
  misc_feature (941)..(941): n is a, c, g, or t
  misc_feature (949)..(949): n is a, c, g, or t
  misc_feature (952)..(953): n is a, c, g, or t
  misc_feature (980)..(980): n is a, c, g, or t
  misc_feature (982)..(982): n is a, c, g, or t
  misc_feature (984)..(986): n is a, c, g, or t
  misc_feature (1011)..(1011): n is a, c, g, or t
  misc_feature (1017)..(1018): n is a, c, g, or t
ttttggggaagaaacagtctgtactttcatttattaaatgcagctttcgctggtcacattgcaactcaatacaaacagcccagcagagggtagggcattaactcttgttctcatcaatgtaaacacaatattaatattgaagattaaagaaaatgggtaaaaagtccagtgtctcctcaatctgtgtgaaggtgaaggtggttgcctacccttggacaggtcccaaagggagactgaggttgtcacctcttcccatccacagtgaagcaggcaagaaccagaggaacccaatcactttcttcctgtaggtctccagatggatacgtgaatcttcagaactgggctttcatgaattatgaaagttcttcgaaaggcctgagaggttcgtaccttgtgtgtgcactgaagtagttccttcaaagccctttcccatgaatcagtcactgccaatagaaaatgtgaccggtgtaaaacagccagccctcgtaattccgcagtccccatcgctatagcccctggattctggagagtagggagttcaaagtcacgggagcctcggtgatcatcctgaaggaagctgcccatgtttaaatatcggccgaagatgcttgacctccttcctgggccactgctgatagagggtggttggtagaggcagctgattttcctttagagcctcaaaggatcagattttctattttggattgccagcccannaaataacaaaccccnaagaaaacaaacaaacaggagtgacttggggatangggaaccacacccactccaggacctctggttacatgtcccattgggttttccnangtggtggttnaatcatcggtttgcctccgttttgatgccagctacattgcangggcaaggggaagtttcacnttataagacatttcacttctatttcctgngacgatacccntanaccntgactccnttnnctccccagtatgatgggaagcatattntnannnagcatcagacatcctaaagctgccntgatcnntgtgcttgcattagatgataccttttatcc

SEQ ID NO: 127845 - DNA, 651 bp, Homo Sapiens
aatttccaatagtatcttttattttttctctggggaaaacaaaagccaagttctgtgtttaacagatgctttctgcaataatacaatctagtggagtattacagaagagcatgggactaaggacaggctatctggattctggccccagctctgacttgcagcataatacctgggcaaaccccctctgttctccactctgtgtaacggggtgattaggactagattcactgcttatctgggaaaggcaggatctgtgcacaagaaatcgtacccaagtgagccgctgttactgccggcatgtgtcgcatccctttggtatgcttgggttgggagaagatctctgtggtccagacttctccgagaccagcagcttccactctgcaggcacttaggattggaaagtaccttgaaggccacctatccaaacctctccatgctgctcttgtcactccctccctcccattatatacacatgccatgttccttctggactttgaaacttgctttattctttctcctgcttgaattgttcaaatgcctcctcttgaaactctgactcatccaggcccttttggttctcctcccaattgcccacccatccacatcacttctattctggaacacacatctggcaatgtggctgttcaattc

SEQ ID NO: 127846 - DNA, 1040 bp, Homo Sapiens
  misc_feature (43)..(43): n is a, c, g, or t
  misc_feature (61)..(61): n is a, c, g, or t
  misc_feature (74)..(75): n is a, c, g, or t
  misc_feature (94)..(94): n is a, c, g, or t
  misc_feature (177)..(177): n is a, c, g, or t
  misc_feature (267)..(267): n is a, c, g, or t
  misc_feature (344)..(344): n is a, c, g, or t
  misc_feature (413)..(413): n is a, c, g, or t
atgacagccgtcagggagacagtgaaggtcctatgatgaagcntatgaaatagtgagtgcntggaggtacgganngaaaggtatagtcgccatntgagaaaccagtcaccaatctcatagacgacagtggagaaaattacccatacagtctacagcttggaaatgcaccatatcacntccagttaacagcagagacgatagagtgttctgtaataagtacagcaaaatactactcgtaagcagtgctcaaagagacccctgacactntgtgaacatccttaagatgctgatctcagcttgcttttcaaacatacacaatatatagaccaggttcagaaggttcntgaaaggccccctgtctgaagaaacagaagcatcggacagtgttgatggaggtcacgattctgtcattntggatccagagcgacttagagcctgggctagatgaggaggacacggactttgaggaggaagatgacaaccccgactgggtgtcagagctgaagaagcgagctggatggcaaggcctgtgcgacagataatgcctgaggaaatgttcctgagtcacgctgaggagagccttcactcaggagttcatgctgagatgatcatgagttcatgcgacgtatattttcctttggaaacagaatgaagcagaggaaactcttaatacttaaaatcgttcttgattagtatcgtgagtttgaaaagtctagaactcctgtaagtttttgaactcaagggagaaggtatagtggaatgagtgtgagcatcgggctttgcagtcccatagaacagaaatgggatgctagcgtgccactacctacttgtgtgattgtgggaaattacttaacctcttcaagccccaatttcctcaaccataaaatgaagataataatgcctacctcagagggatgctgaccacagacctttatagcagcccgtatgatattattcacattatgatatgtgtttattattatgtgactctttttacatttcctaaaggtttgagaattaaatatatttaattatgattt

SEQ ID NO: 127847 - DNA, 657 bp, Homo Sapiens
  misc_feature (639)..(639): n is a, c, g, or t
ttttatcttctcacatctttattatgtattttataatcctagctcaaaaatcactcttgtacttttagatcacaaatttgcctttaagtaacacataatacacttaaggcagatttgccttacaggtggcctcagcttctaaacaccactacactgctttatataaaaaacaaaaatcacatagaagagaatctagtgacatctttcttggtattttaaacttaaaaactgcataataaattgagttcccataaaatttcgcccttgagataggaaacaaacactactactattttatagttgcctttatctgacttgattgatgcagttataatagtattaataacataatctttaaatttgtgagggaaaaccaatactttatattcactcctcataaaaggttcaacagcaagcataatgaggagccattataaaatcatattgctaagtattactttaactcataattctgcttatataagtgtatgcatatcacagttaacaaatactatttaattatcaagacatatgcaaaagtattctttgattgcattaatagcaggaggctagacagcattaaagtttccttctctgatcttctggtctttagtacaaactgagaattttgaaactatnttggtgatcccagtcttt

SEQ ID NO: 127848 - DNA, 672 bp, Homo Sapiens
ttttttcattaccaggttactatttattgttccttgaagctttaatatagttaagtatgaaatgcagaatcaagaagagatatgtacccacccaccctggcaatttacaaagaatcaagaggctgattgacagttgaacgattcttcgcccttctatagtaccttttacagaaagccttataagtgtgttatcaaaaccacctgtcaccccttgttaaaaatgctctgccttttaaaagttgtaaattaaaacttaacgctgttaataaaatcattgcctcatttttctttctaactagattgaaatttcaggcccagaattctctagttgtcttcagagctccctctggcaggaaagaagacctgtcctcatcccgcataggagtagggagcaattcctttgacccccagaccagttatcttgaaaattccaccagcttcaggttgcctcaaaagaccctcggggtccatcccatcccgggcgcaggtcacatacatttcagagtaattcttccctccaaagcagcatgaagttgttttatcaacaggcaacttcacagtttgaagtcttttcccagcaaagtacctcccggcgggatccaccttcccatcattgaagcgattgtttttccttgtcgttatccaccgtggccaagacactgctgattgttc

SEQ ID NO: 127849 - DNA, 834 bp, Homo Sapiens
  misc_feature (764)..(772): n is a, c, g, or t
tataattcattgtggtaagaatgattgaaatgcagatttaacaatcttataatctattgaatgccatttttgataaagcactggaggtcttattgccaaactgattgtaatgaggcagtaagggtgaaaacattgtacatgttgtgaagaaagtatttaaatccaacttttgaacagatttaacaaacatgaggaacttttttatttagaaggataattttgaaatgaagatgaaaatgtattcatcttaattgttttttcaaatttaagggaataatttataccatcttttcagacaagaatgtacagcaaaaataaggggaacagtagtatactgagagtgtgtgtatgtatagtgtatgcctttccaagcttgccagtctttttggctttgaacactgcccatcagctacagtcattactgttcccccacccacacctatcttttaagaagtcttagttcacagtgaaaggaatgatgactttgaaattatggatttatattaatggcactataaaccaatggtaatggtaatttttaaacttgctaaatattgagaaactaaactactaagttaataaattatatatagcagtgtagctgttctctctagatggtgtctcacaatggatttctgttgcttgactattttcttagtgaatatttatactaaggtagtgactgagatttggtgatctggctgagtattttgaaacacattttgaataatatggcttagtgttaacggggacttaaatatgannnnnnnnncttactcatttcaccttccctgtactgtatgtttggaattgatcataaaacatctccaaaag

SEQ ID NO: 127850 - DNA, 647 bp, Homo Sapiens
aaatttttgttaaacatgtactagcatgtcatgtattttacatcaatattgcaaatttaatacaaaccacagtacaaaaaaatttgaaagcttcctaaaggcactgagaaagcagtagagaaagttgcatttatagtgcataagttttaaaaattcaacaagttggtctaggtattgaaaacttttttcttccagtagaaactgcaaaaatataagttgtattgatctcctcccttccatcccattcccaccttatatttgactttaatactttttcagctatatagggaaaagctacatacacagaaaaacatgaacctgtaattagtgctaacaatgacattttagagagaagtgatacatccacactttctatgttccatagtcttccccactgttttccaagagggttgtggctataaaataaccaaagtgctgacttggggagtttttgttgccgttgaggaagggatgtcggacacctcgctgatcccaggctctcagggccgcagcctcctgtagggtccccacaccacaaaaccggcagagccaacacccacgtgctgagtgcagcgtcaacacagcgtggcctgcctggcagcaaccaccactcaatctggcacctgtcaccaggagggccttgggca

SEQ ID NO: 127851 - DNA, 1271 bp, Homo Sapiens
  misc_feature (94)..(94): n is a, c, g, or t
  misc_feature (1217)..(1217): n is a, c, g, or t
cccccctccccgaagggaatggtttgtggaacaggtttcctcggggccccaggggcccacaccacgcggccgtctaccgtcgcccgtgtcgccntttttggggggccccggcggatctttctcccttacataatattgccttcataaagcgccccagccctcaaagcttctttttaaaaaaggaggccaaaagttattttccagaaggggtaagataaagggcatgagatgaatttcaggtaaaatggatctatttctttcgtgggttttgaggaccccattttagacactgaatagaggctgttctacattataatcatagctcggggtttcctaggatggggggaaaaaaagtcttttgcctttacttcttactaaatttctataaagtattttaaaatcaatttaaaaaccaaatctgtacctctcccctctatcacagtttttgtaagtaattaagaattttacccgtacgattgcacagcaactatggaagagagaggtagatgattcggccaccctctcacaaggaaacccccaaatactttagggcattaaacacaaggcttttgttatccaaaagtaattagttgcagagtacaaaaacattttgggagcagaatgtacataaacatgagtcataaacagccgaaaccaagaacactaacagtaagttcataaagaaatgcacaaattctatgtatcttacaaaaatgatcctcacagatgttgaatccaagattatacaatagaaaatatttatatgttttacatttaatataaaaattcttaacaaataaaaaaaggccttgatgatagacaagaagaaattttagggaatacattaattttcaggatgacccgaggataatacatcttaaatactcagctcctgttctaggcaaaggccaaatgcaggcattttctcagggttcatcattggtgttaagagaaaaccaggttaaggaagactcaagcaagctgggaaaggaagtaaaaattaagccaaaaaagaattctgccaagcacaacataccctatctaaaaaaatttaggaacataaatcaaagacagtcgtgagtatacatcaagaaaattcatattgatgagtttatggtcttggtgataaatatcaaaacaggaagtcagttaaaacaagtgtgcaaataagtaatggggactgggggaagaagaggagagaatacctatacaatctntgaagggtaacactgcaaggaggaatttagtcatttcatagctcccagtccacc

SEQ ID NO: 127852 - DNA, 966 bp, Homo Sapiens
aattgattttattttcattttttattgaaagcttcatcaaagaaaacagaagtttaaacctaacatccactgatctacagaaagcccaagggatgggggagatggttgctaatttgactgtggtacagatgaagaaattaaaaataaaaccagaaacaccttagaattacagaactttccatgacagtcagagacagcagtacaaaaatgctcttaaataaagttcaaaattgaatgatgtttcagaagttccatgaagttgaatatggactgaaacaagggttttaaaagaagctgtgtcccgtgtgtttgttatagagactgaatatctcatagcagatactaccacatatatttttttaaattaagattccatttttcttcttcttcttttgaaataaatggaagcatttgtgtcccagaatagagaaaactttttcaaatatctttttgaaataatttttacagttcctgaaaagcatggaataacttattttgtttatatatgaagagataacatatttgagggaggaggaaaaaacatctttctcaataatcttagaccagagggtttgaaacaaaatataacattaaagttacactttggacattgtttaaatttgatgtgatcataaaaataatccacgggggtgtcaaagtcattcggccttaataagtaacgcagtcaaaatgtaatgaaaacaatgcaatagttttggtcaaagaaagatttaaaaatatgaatatgactgtaccaagagctaccgttatactctcattgcagaagtcgtgttgatccgtgctactggttcaaatttagtggagtgaaggaaacaaaaatagctttcttttgagggaagctgaattctttgctatgatttttttcccatatattctgcaagaatttagccaactccccggccgtaatggccgaattcccgggcatatgtccggtaccgtcgactg

SEQ ID NO: 127853 - DNA, 1266 bp, Homo Sapiens
ttttttttgagagataaataaaggcctttatatacacagaagcatgacgcagcacgggcaggggggctggcagctgcagcagtgggcttggcaggtaaggcagggccaagtgctcctgtcaatgggagaagatcccccggaaccgggctttgtcctcttcgtccttctgccggatccgtgcctccagggcccgcagctctcggctcaccacaggcgccagggctgggtccagctccagcactttggcaaagtcagcctgggcctcctgggcattccacacggccgcgtgggccttgccccgcttgaagtaggccttgacgttgtcgtcgtacttgttgaggatggaagagcagtggtccagcacctcgtagtactcctcgaccaccagcttgcactggcagtagttgagcagcagcggcgtgatctgcttgtccagctggatccattcaggggacccaggctgttccttcatctgcaggttcttgaggcaggcaatggcatcgtagtacttggcagcagcctccttcacatgcccctcgcggtacaaccggttgccctcctggtggataagtggcactgcctttgccttctcttcgtctgtcatggcccatgggtcctgctggtacgtgccagggctctccaccttcagcatctccatgtggaagatgaggggctgggggttctgctgcagggcgtccaggtcagcatggcccagggagctgtgttcacgcatctgtgcaacaccgcagcagtgccgctggccctccagggggtccttgcccaccgcgatgttgcggagactcttggccaccagcgggtacaggaccacatgcttgatgtcacagaggaactgggcaatctccccttctcgcatggtgcacacgatggtctcccacacaggcagcttgaacttcttgccaatgatgagctccatgggcttgccacgagcccggctgtcgtccagcacggtgccctcgtcgtcactgtgcagcgtccggtagtggaacgtggccttggtcccatcttgaaagtccgggagctctcctcggccttcctgtatcacacgtttttggatcccgtcctcccggagtcttgcgatgatatccgccatcctccttccccgctgctccctttcggcaacttccggactcgctcggtagcttccggacttgcttcggcaactcctagcacctcggcagcttccgagctagcgccattttggtgaggcggacgcgtgggtcgacgatatcccgggaattccggacc

SEQ ID NO: 127854 - DNA, 1885 bp, Homo Sapiens
  misc_feature (63)..(63): n is a, c, g, or t
  misc_feature (1056)..(1098): n is a, c, g, or t
  misc_feature (1611)..(1611): n is a, c, g, or t
  misc_feature (1661)..(1661): n is a, c, g, or t
  misc_feature (1678)..(1678): n is a, c, g, or t
  misc_feature (1703)..(1703): n is a, c, g, or t
  misc_feature (1731)..(1731): n is a, c, g, or t
  misc_feature (1742)..(1742): n is a, c, g, or t
  misc_feature (1747)..(1747): n is a, c, g, or t
  misc_feature (1766)..(1766): n is a, c, g, or t
  misc_feature (1793)..(1793): n is a, c, g, or t
tgttattccccgaagatacactggtagaggtggctacctgcatgaggggcactcctgtgtgangatgcaagggtagctgaggatgaatgttaaatggattgcgttggatgttcatcaaaggagcatgaacacccactggatatgggaagatattcataggctggtgttgtgcattcatttgttgctgcattacattcatttgcggttgcatcatatttataggtagctgagaaccatcaacttgctggtttgtttggtcttttaggctagaatcctgtccagatgtttcctcctcttgtttcatccatccagactgtggacctgaagaatttctgcctcgtcgtgagtagtagttttgtacatctgctggcaaagtctttctcacggcccagctggatgcagatgtccatccagatctatctgctggtgtatcaaatgagaactcctgttcactttttcgcttataggattgctgttccacaaacttgaaagattcactccctgaactgtttgaattccctgagaggggttttcgattttgccaccgattttcattctgatctttataggcaaaactacttctgtaagtgcctctgccacggttgcctctgcctctaccacggttagatacccaaccagaaccaaagtttttattccaagaatttcctgaattttcatttctattttcttcccaatgagactctttcaacttttctggatttctggttcttggatcaggcccagagtttattttttctgttatccaattgggacagtcatttctatgtttgtcagcagaatttggatcatcagcatctagatggatgtcatttttttcttttcttgtattttcattctgtttctctgggtcattctttctgtaccgatcatttcctcgtggacatctccaaccatcatttgcccatcttcccttccaccggggagagtaactatctctgtcaattctaccaaatgatgaactcttactttttgttctacatcttgagggggacctagaatgagatctggacctagaccactttctggttctccttnnnnnnnnnnnnnnnnnnnnnnnnnnnnnnnnnnnnnnnnnnntgctctgggacctggatttttctcctggggaagaatctttcactcttggctgagatcttttgttctctctagaagtttctcttcttggggacagtgattcagatcttctgctttccctagtagtatccctttttggagaccgagactgagattgcctcctttctcttgcaatatccttttttggggactgagaacgggattttttccggcctctggctgactcattcttaggagatggtgattgagacttcctgctttctttcccagtttctcttctgggagatggagactggggccgcttcttttcttgtggagtgtctttgttgggtgaccaagttgtagatggagaatgaaatctagatcttcgagtacgaggctttttggttttatctatggtatcttttgggctttcagatggttgagacacagtttcaaccttttcatccgcaagatcagaagacggcatattattttccagacagtgtgtcaccagaatttcattcatttgtttangatcagcatttacagatgggtcaacttcagattcattttggtcactgcanatgatcacactccatangtatcatttcatgttgtctcactanatgctctgatctgttcatgtgtgtttangcactctgtanattangatgtcggtcagcctcgtngcgattctggctgagggcaattcctanatgagtcgataattcgatcagtatactgttctgttgaatgtatcgtcacatcacaacatacagcggacaaagtgtagctgggtgcatgatga

SEQ ID NO: 127855 - DNA, 2449 bp, Homo Sapiens
ttccagggtggttagagtccctgggggaactcccaggaagagggggcccgggcccccggtcttccccccgccgaagtgggccctggggggaccaggcttttagaagttgggggagggaagttcgtaggcgcaggggtgaggggcctttcctcatggccttgctgggccggcttcgctgaagctgtacggctcctgggggcagactgagcaggctgttgtggttccgcatgaaggggtagaaggcccccagctgggtccagcgcacacacagctcctttgaggtgttgcccagtaagccgcagacgtcggccccgacccagaggcacccccagcaggttaaactgcaggatttctggcacggaggaggcgagctgctcccaggagctccacacgtcccccgtccagtggccggcgtatcggccgtggccagcaaaggtcgagcgggagatcacaaatgggcgtgtcccccgagccttcaccagcgccctgtgggaggcgatggcttcggtcaggccgtagaggttgtgcaggttgtagtgtgtggagagaaactggtggctggaggcacagatggtggccgcctggagggtccccccaaccaccccaggcacgtagggtgggttctccagctcattgttggggcagccgtcctcagagcccctgatgaagttggaaggctcgttcatgtcaatccacatgccgtcgaagggcacctggtcatggaactcagccaccatgtcctcccaccaggccagggctgtggggttggtgaagtcggggaaggcagtggacccgggccataccttcccaatcagcggctggccggtctcgttggtgatgaaaacccccctccgcagaccctcgtcgtagggcctgtagctcccggcagggcccgagctgctgatggcaggatccacgatcatcatgtagcgccggccgccctggtgcagctcctgcaccatggccgggaagtcccggaagccatccttgttgaacgtgaagtccctccgggagtccatgtagtccaggtcgttccattggacgtccagggggaagtgggccctggtcatgttctccaccacctggcgggtgatagcggtggaggagtagccccagcggcacaggtggaagcccaggccccagtatggcggcatgaacgggtatcccacaacgtccaggtactgctgcaccacgctcttgggctctgggcccaggaagatgtagacatccaggatcccacctgtcgacctccagctaagggcagggctcggctgcaggaccacatccatggcattgctgtttagcaggaacaccccgtgtgccgacccgccgtcctccagcgccaggtagaaagggtgagacccgtagaggttcgcaccgggcgtgggcgcaaggtcccggttccacagggtgatcctggtccagctggtgctgagcatcaggggactgaggtgctcggcgaggcctgtgatatactgcgagggcagcgaggtggacagctgaaggaactggtccgcaaagaacaggggcgccaccgtcgtgttcagcagcacgcggccgtccagctgccggtgcacgatcaccccgaagggctcctcagagaactccacgctgtagagtggggacggtgcccggctgtggacacgcggggtctccaagggcacctcgtagcgcctgttagctggatctttgatcgtgaagtggaggcggttctcagtctccatcatcacgtccagccgcagggtcaggatgtccttggggaagaaggtgggggtggtacgggtcagggtggccgtgtagcccatttcagaggagctcaggttctccagcttgtagctggggtagctgggtgggaagaagcaccagggctgccccatctgggctccctgcagcccctgctttgcagggatgtagcagcagccgcgggcctcgcactgttcctgggtgatggccttgtcaggggcgcaatcgaagcggctgttgggggggacgtcgcactgtgtgggcactgctctgggacggccggggtgtgcctgggcatcccggggccctggtctgctggctccctgctggtgagctgggtgagtctcctccaggactggggaggagccactcagctctcggggaaccagcaggaaatcatggagtaggatgtgccccaggagtgcagcggttgccaaggacacgagggcgcagacggccaggagccggtgggagcagggcgggtgcctcactcccatggttggagatggcctggacagctcctacaggcctccgctcacgtgcgctcagtttccccgtcagctgcggcacgcgcagagagtccctcgctgaacaacgggcggacgaggagaacctccgcgcacgcgcgccctggccgcccgcggagactccggggtcgcctcgtgccgaattcggcgcgccgtcgacttcatactctctcgcccct

SEQ ID NO: 127856 - DNA, 2201 bp, Homo Sapiens
  misc_feature (61)..(79): n is a, c, g, or t
  misc_feature (953)..(953): n is a, c, g, or t
  misc_feature (2173)..(2174): n is a, c, g, or t
gtgccaagctaaaattaaccctcaactaaagggaataagcttgcggccgcatacgcggtcnnnnnnnnnnnnnnnnnnnctgattccaaatgccccttttattaaaaataattgcacttaagatttagaatctcccaagtcctgtgaattttcctgagttcccaggcttgctcggggaccggcaggcatccagccctctgggcagccgggcagcggtcgcgttggggcagagcagcaggcgcgaagcaggagctcaggtgcataccccacacctccacctgagcacccccttctccggtgctgggaacagatggaggggggtggctaatactacccgcatgccggcaacaggtgaggagggcaaaccttacaatcttattaacacagagcagccctccagggccccggcccacagtgcgatctagggagaaagctctcctagacacgttgggggccagagccccggcccaggaggtggaaacaagcgatgcggcggcttggaatggttagtgcccagctccaggtgacacatgcaacccccaggcccgcacacagctgctgcccgcacacaggctctgcttccctggggaaccagcctccctctggagagactaacacactccgcccggctaacaccagctgacgagaaactgctctcccatcaacagcgagacacagatgtccaggaccttggtgtcggggctgtaggtgaagttggagacagggacaccgttggagaggacctgctggggcgccgtggccacgcccaggacagtcaccttctgcagctgcaggccagctccctcactggtcacacgtaccagctcattcacgatcgtgttattcctggccaggaagatgacctgtgtgtaggcccctcgctccagcacttccaggctctctccatcgtcccagaacagctcccctcggggctctccacccttggtcagggnccacagccagggccatgggctgctggcgggactctgtggttgtgaggccagggccctgcatgggtatgatgtgcccagcccggaggtggactttgatggtgtccaggggggccggcagcgtcacccactgcccctcgctgtggatggctggctcacggggagctgcaggtgggggtgggaggctgccaagggcctctattggcaccgtctgcaggtcgtaccatgtgcccaaggggaagtagccagtcacttcggccttcccggcctggagcactggggtgatgagcagggcctccccccacaggagctggtggtccacagtccaggtgctagagtccttggggaactccaggaagaggggccgggccacggtctcccccgcgacgtgggcctggtggaacagtgtgtagaggtgggggaggagtgcgtagcgcagggtgagggccttcctcatggcctgctgggccggctcgctgaagctgtacggctcctggggcagactgagcaggctgttgtggttccgcatgaaggggtagaaggcccccagctgggtccagcgcacacacagctcctctgaggtgttgcccaggaagccgcagacgtcggccccgaccagaggcacccccagcaggttaaactgcaggatttctggcacggaggaggcgagctgctcccaggagctccacacgtcccccgtccagtggccggcgtatcggccgtggccagcaaaggtcgagcgggagatcacaaatgggcgtgtcccccgagccttcaccagcgccctgtgggaggcgatggcttcggtcaggccgtagaggttgtgcaggttgtagtgtgtggagagaaactggtggctggaggcacagatggtggccgcctggagggtccccccaaccaccccaggcacgtagggtgggttctccagctcattgttggggcagccgtcctcagagcccctgatgaagttggaaggctcgttcatgtcaatccacatgccgtcgaagggcacctggtcatggaactcagccaccatgtcctcccaccaggccagggctgtggggttggtgaagtcggggaaggcagtggacccgggccataccttcccaatcagcggctggccggtctcgttggtgatgaaaacccccctccgcagaccctcgtcgtagggccctcgtgccgagattcgccacccaggcctcgctacctaggaccgtataggnngaaggtgcgaaaaagacaaatggaaag

SEQ ID NO: 127857 - DNA, 807 bp, Homo Sapiens
actggtaacaacacatttatttacgtaccctgttgtgtgaccgggaggtgtttttcactttccaataattgattcggttataacaattaaaattccagaaggtaaactagtaatttattgttgctcataagcataggtaaacagacatggtaccacaataaaggaatcttaaacacttctaaccttttggaataggtttgaatatggaccaatatactttgccaatggacctaatagattaccaatatacttctaaatgtcatggttctcttcagacacaacagaagaaatctggatctaatttttaaacttcagaaatttaaccaagatgcttaggaagatgcaaaaggacagcagtacttaagcctgtcatatttatcaccaatataactgtattgctattaaaagtaaaatcatggtagggagcagccaactaattgctagtctcagttcatagatttagtattttttgaaaataattcacctcagatggcaggctatacaagtttaaagtagttttaacttaaccttttgtgtactagtgaaagcaattcagatagatcccaagtcaaagaaccaaacagtgtatcaagttgggtttcatatcagaaatcagccatttccaaacaactgcatcgtataggacgttttctttcagactgccttttattcctggcttcaaatcttactcacagtatatgtttttagagagtttggtaagtgtaacaaatgggtactcattgctagagcaggatataagaatgtgctgatcaccaaatatgagagtacatttggactacttctaag

SEQ ID NO: 127858 - DNA, 626 bp, Homo Sapiens
ttttaatatgtgtcaaaactttaataattttcatctattgtttgaacaaatgaggatttgttttcctacatgaattgtccaagatggtaggtagagaatccaatatgagttcaggatcccaaggaaactccagcccgttcattcagaagcagtgtctgcagaggctgtatatttagggcagcccgtcccactgtcactggggcaggccaaacatagttaggagggtggacagatcccgcgcgtcggctgccccataggcatcgctctggcctaacatagacaatgccaaacgcagggtgctccagatgttctccgacatggcacctccttcaccccgggggccccggcttttcctctgcatgttcagggcctccagaaagtgctccacagcctcccggtgagccccgaggttgatgcagctgatgcccaggttatagcgggaccggatatagccaggctggagctcgagggcccggcggtacgcagcttctgcttcttcactcttgtttccattggcccgggtgggcgcctagcttatttcacagcaaatagtcattgggacgaacgctgagggcagctgtgaagcagtccacggccttgtcatactccccactcaggttgaaaag

SEQ ID NO: 127859 - DNA, 443 bp, Homo Sapiens
tttttaaaatatattccatatttattcagaatatcataatcaatgcaaacacagaactctcttctcacctgtaaaagttaagtacaatactatgggctagatacataatatttcagtcgagtcttcagtattagcttgtaaaaacaaaatctacaattatagatatccatcatacaaaatatatatacaaaagcataattgtagtgtagaaagataaagttaacaaaatacaacttatgtaatttactttacacaaaaatgtattctagttaattttttccaagagcttcaccaattagtcgaatagcaatactcttgccttcatctgtttgaatgacaagcaaagcttcaaatttgcctgcggacttcggtttgaactgcacgggcatgttgatgtaatgctgggctctcaaagagtacttggaatgtttgacatagaatgg

SEQ ID NO: 127860 - DNA, 479 bp, Homo Sapiens
ggatcatatgaattttagagcaaaaactgcacagcccattaatgatagggttgggacaagttgttttaatctttccagtgcaatatgctgtctggactgagtaaaacgggcatttagggtgttcccgaaccctttcttaggtagatagtttttgcaggcagtatacaaagctgtatgtatgatagtttagacctcttattttcctttttatatattaatagttactggatagccaggaatacatacgtatgcaatactgttttaatccaattttacgtttttctctcctttgtgttattttctcattaaataatagcatccaagaaatcataaatacatttaagctgaatgtggcttgaccgagctctttcctcaacacctgagccaggcactgtgctgcctgggacagggtcacgggtgctgtcatgacatgctgctgtcatgtgcctctctctttccagagcccagcattacatcaa

SEQ ID NO: 127861 - DNA, 986 bp, Homo Sapiens
  misc_feature (62)..(87): n is a, c, g, or t
gcagtgctaagcgtgaattaccctcactaaagggaataagcttgcggccgcatacgcgctcnnnnnnnnnnnnnnnnnnnnnnnnnncaaacttctaaacctttattactgattagtacaaacacaaacggagcaatgacaacagcagtgaggagaggccctgacaacgagggccgcccctgcccggggtgaggctgcacagcgccagctccaggctgggccagcttggcccgcactggcaacacaggcttgaccttggccacagctcagcagtagaaaggttcttggacagggtgccaggacacacgctggggctgctgtcacaggacaatcttaaaggagctggcaaagtctggagaacgggagatgacgtgctggaactcagagaggttgatggttccatccctgtcaatgtcagactcctccaggatgttgtcgatgagctgcttcatctcagacgcactaagccgtgtgtcctcgccctctcccgtgaggcagttcaccagccggctcaggtcttctctgttcaaggttccgtcatcatcaaagtcaaagatgcggaaggcataatgggacttgatgtctggcgtggctgtgtcactgaacacactgaggagatccaggaagtcctcaaagctaaggctgtctttggctggggatgtggagaagaccctgcagattcgctccttgaaggggttggccttgagctctggaaggctgagaatctgctcgaagggcacttgtgcccgaagtgacgactccacgctccgctgctcctggggaagcagctcacaaaaccgcctgtgggctaggaggatctcctgcttcgtcaggaacgtcaagtcctggtactcggccagcagctccttggacaggcgactgcccgagccccccatcgccccgccgcgcgcacagctccgccaactcgcctcgagcgccctcgtgccgaattcgccacccaggcctcgtaccttagccctattttt

SEQ ID NO: 127862 - DNA, 574 bp, Homo Sapiens
ttttttttctaaatgaagtgcttttaattttcagaccaaacatttttaatataaaaacattttgataatatacaaacagcaatcacaacagcatccacatggcagcaaggggaccagggcacagagagggggagcgggctggggagggacagttttcagggtcccagttgcttccctggcttgaaatcaccctggtcctagcagaggacaggttaaggctgccagaggcagagggtccctgaccctggcccggagacagactgcccaggcaggccctctgataccatcttccaaccatggcagcctccaggaaaagccagatccatttaggagataacaggaaggtggctgtgattgacaggaaaggcaacatggttcctcagcatcctgctgatcacacctctgggaggggctgctggattgaagaggacctaagaatcttcctgggagcaggacagaaatgggatctaagtctacctactaactaacattcccgcctgtgacaccagaaagctggagtgggtctgctcagatgtacaggaagagaaaggaatgacaaagcctttggctcagc

SEQ ID NO: 127863 - DNA, 761 bp, Homo Sapiens
gcgggggttagggacagggtctcactatgttgcccaggctggcctaatcttaattctctaagacatgcctttgagagacaaaggtctttttctcctcttctaacacagtactgtaagaactgaatattacttgaaaaccttaagaagtgaccttgactctcaatttgaatggctgaactccccccaagtataaagaacggccttgtgggaagcaggaagtggaaacaggccccacctgggagaaatctggcttcatgggcgggttctcacgcagctcagggttgaggtactcgttgttgacgtagtagcccactcggatgaactcctgtccatggtaggtgcaggtgatgaggaccacagtcacacccacggcatcagtctctgggatgagggatgggttgggggcgtcggcctgaaagacaaacatgtgtctccctgctggcacagggcccaccagcaccgagtctaggatctgatcaaattcctcactctcagccgagccaacataaatgatcttccactccaggtcgtccgccagggcttcactgcactcgaagctgatctcgaaccggaaggggctgtggaaagggctcgggttctccaggaccgccacgttcagcaccgacaccttggccatcgcctcgcctcgccgcgccgcagcaggggcaggggctgtggctgtggcggaggccgcgcctgggtccggtgggggtcagtggggtagggctgaccaggtccactcccgcctcttccctcgtgcc

SEQ ID NO: 127864 - DNA, 1154 bp, Homo Sapiens
gtggagccttgaccaggccctggcccaaggaaaccctctaggtgggcccagggaggtctgtgggaaaagcttggatccaatgtactccaagggtgcaccagtggcacagtggccttagttagattttatgaggccgaaaagaccccaagtcagaatttagacctggagtccctgcttcttataggcctgtagaggaaaaagcgagatcatccttctggccaggactaggggagaccccaaggcctgttctttcctaggggctgagtttgacagacctggattgcagctgatggcccccaaagtcctctagatgggccctgcaggactcgctgggaggcctggttgcccctcccggcgtgctgggacactctgggttcctgcagttagatgcagtccatggagttctcagggaggaggccagggatgcagccagggagccccaagcccttgataggagtgcagttgagtgggaggccgcagcccagggaggggtcctgggtctctatggcctccagcctgtccatgttgttgtcccagttgatatggaagcgggtcacccgggggttcgaggccaagatgttccgctggagctgggagaaatctggcttcatgggcgggttctcacgcagctcagggttgaggtactcgttgttgacgtagtagcccactcggatgaactcctgtccatggtaggtgcaggtgatgaggaccacagtcacacccacggcatcagtctctgggatgagggatgggttgggggcgtcggcctgaaagacaaacatgtgtctccctgctggcacagggcccaccagcaccgagtctaggatctgatcaaattcctcactctcagccgagccaacataaatgatcttccactccaggtcgtccgccagggcttcactgcactcgaagctgatctcgaaccggaaggggctgtggaaagggctcgggttctccaggaccgccacgttcagcaccgacaccttggccatcgcctcgcctcgccgcgccgcagcaggggcaggggctgtggctgtggcggaggccgcgcctgggtccggtggggtcagtggggtagggctgaccaggtccactcccgcctcttctctccctcgtgccgattagaacccagcctcgtacctagccgaagtttt

SEQ ID NO: 127865 - DNA, 2467 bp, Homo Sapiens
  misc_feature (33)..(33): n is a, c, g, or t
  misc_feature (519)..(652): n is a, c, g, or t
cttcttttagaaatgattggccaataaatgatncctttttttgttcgaccgctatttctcgggggggaaattttattttttgggcgaaaaggggggctttttttccgtggcgggtttgatttccaccacccccttggggtctgctcccccccggggggagtttcaccagtttcaattacaccttggaaaataggggcgggggggtggcacgattttttacgcagcggcagatctcctagtaaagttaaccaaggggcccaggcccccaccgaatatagttttataaaccccttgggtgaccggcggggatgttctttgttagggttaatgaattacaatcagtctcgggactgtttttcaggacgggaaaaaaacatagtatttcatctctgttcggtctgcccgccggtacacagcagtaatgaaatcactacttccttgtggaggatggtcagacacgatcgagttttctatggctgttttttattttcgatgtccactttcagcaggcatattcannnnnnnnnnnnnnnnnnnnnnnnnnnnnnnnnnnnnnnnnnnnnnnnnnnnnnnnnnnnnnnnnnnnnnnnnnnnnnnnnnnnnnnnnnnnnnnnnnnnnnnnnnnnnnnnnnnnnnnnnnnnnnnnnnnnnncataaatctttcttttattccaagtttcaagtatgtgtaagtgtctgtgatgacacatggtgctcagtgagcgccctgtcacccaggaccctggttatagcaccgttgaatcaaaaacccacagaattggaacaacaggaagatgagtcacttacacagtgggttggtttttccttagatttgtacttccaagggcccagatgtccaatattaaatgccaataaatttgtgcttcaaaagtctgtgaaaatataataatagtatcttgaaaaacaaggggtgggggctgtggatagggaagcaccaagtctgagctcaccaaatcagaaaacacgtggcaccattatctatgtgactataatagactggagggtttcattggaagagaggtctagatattcaagtttgctgaaaatgacctaagaggaggagaaatggggttcggcctgaccctctctgggggggctgatgagcccgcatttgtccacgtgtcactggagaagagcgcggctccactgtgtctgtggtgagctcggtggcttgaatgggacaagctgatgacaacctgtctgtgggcctcatcccggtcaagactggctcttggtgctgctccagcagctctgtggacaaaccccacccccgcaaggccttctcaggccccaagggtcaggtagcagccccccatgaatgatgggagggtccctttcctcctgagcttagacacagctgtaggggtctggacagggtgggggccgggctgggtgagggcacgtggcattcgttcagactcagttgttggggggaagtccccatggaaagatgtggtgtggcctggaagacagggagttgaccacgcagggcttctttacttgcggggacagctggttgtttaagagcccgctgaagtgctcaaactttttttccgtcttttcgctgaagggaaccaccctatgtggcagttgtacatccagatgcggtggccgtcatagcggctcctgcatttcatgatgttgttggagtaatcggattctgcaacctcgaagttggggttaataacaacctggaacaggtagtctccagggggcacgtcagtgatgtcaacccactggcagtcgatgtcatggcggtacatgtcccagcagcccatggtgatgccctgatcgccgaagttggcacactcgtaattcttctggatgtctccttcacattctgtgtcctccaagcataagctggctttgtggcccatctgccaccttggtgccattgaggttcagcaggtcatagtgggtgaacacctccatgctgtggtagtgcctgtgacagtcgtgccagatccacgcgtggcggccgttcttgggccggaagtcgtactggccattgttgtggatctgggaggagaagcgcaggagccggcggtagcctgtggtggggtcggtctgcgcggctgaggccgagaggcagttctcctccatggcacactgcagcaggaacatgggccggtcctccaggtaggtggtctgctgcaccatctccgcattgaggaccaggtcaggggcggtttctgagcaggcaactccggccccgtactgcactccgccctgggggcaggccacgtcctccccgtcgtggcggcagtgcgccagggacagctccgttcccgagcacttcactccactcatgaccactttgttgctgttgacatctccgtgccaataccaggtctcctggaaggcgttgctggcgaatcccaggcccagctggcggcagaccaccatggcctccacgatgccccagttttggccacacaccatcccc

SEQ ID NO: 127866 - DNA, 502 bp, Homo Sapiens
  misc_feature (20)..(20): n is a, c, g, or t
  misc_feature (56)..(56): n is a, c, g, or t
ctccctcccgcttttctccncactacatcatagacagcgatctgtggttggggtgncggtcatctctcttgcccccagtttttctcccttaggatttcattctaccttcctctattgcttggctcatggcaaggcttcagagtctcttgaggaataactggtgggactctggtcccctcgggagcccggtggggagggaggggaggagctctcactttctgagcaggcaactccggccccgtactgcactccgccctgggggcaggccacgtcctccccgtcgtggcggcagtgcgccagggacagctccgttcccgagcacttcactccactcatgaccactttgttgctgttgacatctccgtgccaataccaggtctcctggaaggcgttgctggcgaatcccaggcccagctggcggcagaccaccatggcctccacgatgccccagttttggccacacaccatcccccacacaagggacccgtttctctccaccagc

SEQ ID NO: 127867 - DNA, 1041 bp, Homo Sapiens
  misc_feature (88)..(147): n is a, c, g, or t
gccctcccccactgagaaattgaaggggggaagggtgttcccctttttcccctccccggagaggttttagggacccccagcctgttannnnnnnnnnnnnnnnnnnnnnnnnnnnnnnnnnnnnnnnnnnnnnnnnnnnnnnnnnnnatttcgtttcaggcttcagtttgttgggggggaagtccccattggaagatgtggtgtggccctgaaagaccggaagttgaccccggcaggtttttttttctgcggggacaggctggttgtttaagagccccgctgaagtgctcaaactttttttcccgtctcttcgctgaaggaaccacctatgtggcagttgtacatccagatgcggtgggccgtcatagcggctcctgcatttcatgatgttgttggagtaatcggattctgcaacctcgaagttgggggttaataacaacctggaacaggtagtctccagggggcacgtcagtgatgtcaacccactggcagtcgatgtcatggcggtacatgtcccagcagcccatggtgatgccctgatcgccgaagttggcacactcgtaattcttctggatgtctccttcacattctgtgtcctccaagcagaagctggccttgtggccctctgccaccttggtgccattgaggttcagcaggtcatagtgggtgaacacctccatgctgtggtagtgcctgtgacagtcgtgccagatccacgcgtggcggccgttcttgggccggaagtcggactggccattgttgtggatctgggaggagaagcgcaggagccggcggtagcccgtggtggggtcggtctgcgcggctgaggccgagaggcagttctcctccatggcacactgcagcaggaacatgggccggtcctccaggtaggtggtctgctgcaccatctccgcattgaggaccaggtcaggggcggtttctgagcaggcaactccggccccgtactgcactccgccctgggggcaggccacgtcctccccgtcgtggcggcagtgcgcccgccacccaggcctcgcttcc

SEQ ID NO: 127868 - DNA, 694 bp, Homo Sapiens
cacctcttaagcactcaatagatgttatttattattaaaatgacaaacatgtcactgccattgccctgccctctctggaactcaactctaaaaactgcttttattgttactttagaaatcataaaaatctcattaaggtcacatatttttgatccccaactaccatgcagctcagtctccatattactgaaaaaaagtttggatcacgttacttttggccatttctaaaaatcaaattaacactcaggggacagagatttgtcatcacagaagatatgcagaaaaataggcacaagaccttgaagtgaatcccaaagaggcgctccaaccacagatggagtaaccaccaccacagctggtcaagggtgacagcagccacatgatgggtgttctttcaaagttagtcacatgcctgcagtttgtgttgtctagagggaaattgattaacccagggaaggtcatcccagctggtcttacctcctagaccctgcagccaggattactgtgcctcattaacaaactgcttccttccaacttggccaaggtaccatgagttactgaggtgcctcaccctagaaccttcccagtctcttcccaggcatatttattcctaaaccttcatcctgtcagcatcaactccctactctgtagggctgagagtcaggaggtcagatgagcttctcagagagataga

SEQ ID NO: 127869 - DNA, 1005 bp, Homo Sapiens
ttttttttagattttgtctacattttattctttcactcaacagaatagaagttttgcatttcagagtaggtatgagatggccactacctcgttccggccctggcacccagacagcaggactccaaagagggtcggcctcctaggctgccccggactaggggcagcaggaggcagtcatttggcaaggacattgcagggagagggagaggggacccctgacctgcctctggccgccgaacccggggccctcccctggctctctttggtatctcagaaaacaaaggctgtccctgtctttgtcagccctagaccaggtctgtggcccatcttcaccagctcccctggagggtggggccacctcacaaggccttttagcagcccgggaccagctcacaggggcctaccaccagccaggcaggtggggcgcgccacccgggacagtgaggccagctgcgggtgggcctgggctcatttcttgtagtgattgggggcgtcggcaaaagcaaacttgaggcggtaggcctcggccagcaacaggctgatgtcctcatcatcccagtgggctgtgggcaggttctggaggaagagcagcagctcttgaaaatctttttcttctagtatttccttcctccatctcacgagaaaagcagcgcacacgtacaagtggaaatgagaaaagccgtccggttcagactggtaggtgtcccacaggcggatggtacaacgcaggggcacctccctcatcagcaggttgttcatccagcggaaggcaaactgcaggtatctcacttcgtgttggtccaagtgccggtgcacttgctcatcaatccggctcccgaattcttctaggcattttcactttcatttgaatccccggtttgggcacaggtgttgttgtccttaaatgccatccagcagcttgctcatgcacccagtaggtgtccgcctcgatgttggacagacaactcttcgggccgcccgaacgttcaccgggttccctcctct

SEQ ID NO: 127870 - DNA, 1041 bp, Homo Sapiens
  misc_feature (721)..(721): n is a, c, g, or t
  misc_feature (794)..(794): n is a, c, g, or t
  misc_feature (817)..(817): n is a, c, g, or t
  misc_feature (824)..(824): n is a, c, g, or t
  misc_feature (833)..(833): n is a, c, g, or t
  misc_feature (915)..(915): n is a, c, g, or t
  misc_feature (917)..(917): n is a, c, g, or t
  misc_feature (945)..(945): n is a, c, g, or t
  misc_feature (962)..(962): n is a, c, g, or t
  misc_feature (967)..(968): n is a, c, g, or t
  misc_feature (992)..(992): n is a, c, g, or t
ttttttggattttataatagtttatatttgcacacaaattctgccacattgttcagtaccaccaaagtaaaattcttgaatctttcattgaaaatgaaaaacccatctgtcacctgttcccagtaaaaaactgattgttctatgaaatcggctgttttagtcagataggaactgaagtttgaaagacagcctttccaagttgccaggtcatcaaataatgaccattctaggaacatggtaggaccaaagacaatgacaaggccaagcagaaggattagcaaaaataacttataaaagctccagggaatcttgctaatgaatgtgccagtgtcttgaggcaaagaaagtttatccacatcgactagttttatgtcttcccactgactggtatcaaagttcttcattaaagggcttgcaggcaaattagagggaggtaaaggagtttccttgattactttgattttctctctaaactcctgcatctgttgcagaaatacaatgggttctgacacatctttgaaagcctcagcaatgttaaaggccatccgttgctcctgcaagatggtgttgagtttgttgatctctgggtcatatgcttgcataacagcaagtttcatggtctcaaagtcagacagaatttcattcttcttttgatccagtgtgtgttgtaacttctcaaaaaatccttcactttatctgaatctttagtcagtaactgtanggatttctcttactagtttccaaggtatccaagcgagaaagacatctccccgacgccaggtctcaaagctctnggaagagggactcaaaggcatcnctttccntgagcatangcatcttcaatagaacagaaacatgtttggtgtgctcccacgagtagacagatcccacaatcagctgatatcagtcaggcananatgttgagaggtgccccagtgtcctttnatactggattttggaanaatcnntgatctgtaacttttcaaacaccntcagggaggtatactgcagctataattccatagctgagtttcctacgaa

SEQ ID NO: 127871 - DNA, 1880 bp, Homo Sapiens
tttctggcatatagaaacaatttattgccgggggcaataggggtaagagaagccagaaatttttgcagccagcacccaccccacccccaacttctactttacaaaagaaatttttacaatcaccagccctctgtacagagctcccccatccggatcccttctcactgtacacagctgcctggctccctctggtccctgcttcagaggaggcctgggcctgtggccagctgaccttggagttggtctgagcccggagctcgccttggtgctgggcaccagtgggcccctgccaggcctgtcctctcctttttgagctgtcctcagccccatctcccttagagtgctttgtgggagctgcagtgggggcggggtgggctatcagccccagtcctgctgccgtcttggcactgcagtgggcagtgtctggtcaccacttccccctcttgctccagtccttgggagtgaagtgcagacacttggagtcgatccgcaggagccgcttgagcatggcccgctcatggccatccacgatgtcctctgacagtgtgaggatgtactggcccttgtagtagttgatgagattgaggtactgcagagtggagatgacatcctccttcttgatgctggtgatttcactaatctcattgatggtgatctgtggcctctccccgctctccgacttcagccccatcaggatctccaggatggtctgggaccagtagcttcgataggataggaggccaaggtctgagaggggcttctcaggggtccctgttttcccttccactttggagagttcatagctgaactcgatcagcagcttgccgtagccccggcgctggtagggaggcagggttaggatgcaggccacattgtagtcttccgttgattctttctccttggagaagtagcccacgatgtggaagcccttacagtcatactctgtcatgacgtagaagaggaaagggtctgtgtcatagtacagtgtcttatggtcaaggaaacacttggccaaaagacacaggttctgggaataactcttgttcttacgtccatcaatctcaaagaaggagatggtgcccttgcggtaaatctcattgcctggaggatgtcgtaggtcacacttggtcaaatgacgctgaagacacttgagactacggccgtacttgaggcagaactcgcacaggtagaggacaggcaatgtggtgagttcctgtgggtacggggagaagtaccacggcttgaggcggtgccggcccagctcaatgcactcaatgttcttcatccgggtgacgatgtcgtcgtggcttcgatcagacaccaggctgccagtcatgcgtggtgctgacggtattccatcagagctgtcctgggagtcctcatcagtgcccaaacaattcgattttcgcttccgtcctggctgggctgccactgccctacgggcggctccattctggggaaaaaccgaggccggggctgtctcgctgggcactggagttgctggtgaaaccacctccaccttccgtttcacctctctctctggagagccaggacgggacccaggaagtccgttcttagtgggggtcttggcctctttcttggggaactggatcttctttaggtccagccgctcatgcgtcacccattcatccagacgtttgttgaagtcaatgtaatggacgtagaaaagcttccggccactgatgtccttcacgctcaggatctcggccaggggccactcatcttcgttgtcctggttccgccgcagcacgggtaggcggcagccctcgattatctcccccacctccgccatcttccctccctccactccccggccgtaatggccgaattcccgggcatatgtccggtaccgtcgactg

SEQ ID NO: 127872 - DNA, 774 bp, Homo Sapiens
ggaaataccgttgaggcgtccgcccactcaagcaccaaattcttcaccggggacgagtcgtcgtggcttcgatcagacaccaggctgccagtcatgcgtggtgctgacggtattccatcagagctgtcctgggagtcctcatcagtgcccaaacattcgattttcgcttccgtcctggctgggctgccactgccctacgggcggctccattctggggaaaaaccgaggccggggctgtctcgctgggcactggagttgctggtgaaaccacctccaccttccgtttcgttgagcggtggttgggctgcaggcaggagctggaggagagcggctggtcaggctcgccaccgggaatggcctcccgctccttgggcaggttgaagcggagtgtgatctggaccgggattggcaaggtcttcccgctggcctgcgccgaggccggcacctctctctctggagagccaggacgggacccaggaagtccgttcttagtgggggtcttggcctctttcttggggaactggatcttctttaggtccagccgctcatgcgtcacccattcatccagacgtttgttgaagtcaatgtaatggacgtagaaaagcttccggccactgatgtccttcacgctcaggatctcggccaggggccactcatcttcgttgtcctggttccgccgcagcacgggtaggcggcagccctcgattatctcccccacctccgccatcttcccctcgtgccgattcaaccacccaggcctcgctacctagccga

SEQ ID NO: 127873 - DNA, 1079 bp, Homo Sapiens
  misc_feature (58)..(81): n is a, c, g, or t
gtgccaagctaaaattaccctcactaaagggaataagcttgcggccgcctgctcaggnnnnnnnnnnnnnnnnnnnnnnnngcattataaacttttatgcattttattcaaaccaattttctttaagtaaaaacttaacagtgtcatcaaaaccacactgatacaaagattccattttcctcttgcttgggggaaaaagggcttggttgagtctcaccaggtttgccagggacaacatgatatcctgcttggcgatattaacatacagatctagctgccctttgtcctgcggggagatgtccagtcgtccactgaagggggagatggttactgtccggccgacgggcaggatgggaagagcgttggtgaggcctccgtccacccacttctgccctttgtattccactagcttcagtcctgcataaatgggcacaaaactgctggctaggaggaccttaatgaggtcctccctggaggaaaaagtggagactaagtgattttctctggttttggcgttggtgatggatacgtgcagtcggttctgggccagctcgtgagcgctgggaggaagaatcgactccatcccacttcttagtcgggccatgaagtcataaccgggcgttactgccccgaaagactgccttctgatttcttcggcaaacttgtaggtaaattggttacattcctctattttttctggtgctgttagcagaacagaagcaaccaacgatcccgcagacgccccagcgaaggctttgacatccttcacaagttttttgccatgtctgcaaagtgcagatgctgcccccaagtggtaaatgcccagaaatccacacgctgcaaatgataggttgatgtgcttcattctagctgtagcacatgcagcccgggacactccgtgttgacgagtcctttaaccagatggcgggcgggcgtcatcacgcattccgcacaaggcctcgtgcgattctggctcgaggcaatcctaaggatcgataatcgatcagcaactgttctggtgaatgtacgtcacatcaacaatacacgagaaatgtaactggggctagatgacaccaata

SEQ ID NO: 127874 - DNA, 1006 bp, Homo Sapiens
  misc_feature (980)..(980): n is a, c, g, or t
ctgaaacgttcttgttgttatgagccttttgttttgttctcgttaaatgcactcgacccaaaattggtttggcatatcgaaaaggagaccaaggagggaggggctggggcgtgggaggtggggaggaggcccgaatggacagaaagttgaggataagagaagaggaacatagagacagccagaaagacatggggaaagagtgttggagacagagaaaggggaaggcaagggaaagccaaaagaaaccaaaatccagagaaaaagaattaacaagatttaggagcaaacgagttcaggagcctaaggaagggagtaggagaggaaaccaagacccttctctgtaccgtcccagctggggtgggggcgtcaaggcaccaggtctggttaggttggggggacacctgggctctgggggcggctttgcactggactgcagtgatgtccagccccagcagggggccctgccacacagctctgaggcctggaagccacccggcgatgccggctggaacaggacccgatacaccctctctccctttgattgtccgagtctggagagatacaaggaaggctgggcagggaggaagttggcctctctgtgtgcctcagccccctggaactctcctggccctcctcctggtgtcgggggcagccacaggctgggctgcttcccgggacaggccagctcctcgcctgctcatgcctcctgcccgctcttcacagacctctgaccacccctccacacaacagagctcccagcctagtgcagtccgggaagggccatggaactgtcccttgccctcctcagagtcgtctggcaagactgtaccctggcctcacttctcctccccatctagacttcacccatggtcttctggtgtaatgggttaggcctttctaccagaaaaagccagagttggaacccaaccccacctcttccccacacctgttcccttacacgggacaaaccaccatcttgncctcgtgccgattcaccacccggccc

SEQ ID NO: 127875 - DNA, 1327 bp, Homo Sapiens
  misc_feature (137)..(147): n is a, c, g, or t
  misc_feature (194)..(239): n is a, c, g, or t
  misc_feature (372)..(469): n is a, c, g, or t
  misc_feature (501)..(542): n is a, c, g, or t
  misc_feature (545)..(554): n is a, c, g, or t
  misc_feature (580)..(593): n is a, c, g, or t
  misc_feature (602)..(711): n is a, c, g, or t
actatatatcgctccaaccagacttggggggtgttttctacggggagaaaaaaacccggggccgctttttttctccttaaaggggggtttttttgtgagaaataatattattttttgttttacaccaccaaaccccnnnnnnnnnnntttcccccccttttttaattaaaaaggggcgcccaaataggacaaannnnnnnnnnnnnnnnnnnnnnnnnnnnnnnnnnnnnnnnnnnnnnagggcccaaggggtggatccccggggggtttcagttctcacaaccccgttgggagggttcccagtcggccgaaaggtttaaaaaattccacccttcctccaaaaagggcccggtgggggggaaatttaaattnnnnnnnnnnnnnnnnnnnnnnnnnnnnnnnnnnnnnnnnnnnnnnnnnnnnnnnnnnnnnnnnnnnnnnnnnnnnnnnnnnnnnnnnnnnnnnnnnnggggggaatccaacccttgttcttgcccgggnnnnnnnnnnnnnnnnnnnnnnnnnnnnnnnnnnnnnnnnnnggnnnnnnnnnnaaaaaaaggttttaaaaaattttttnnnnnnnnnnnnnncccccaagnnnnnnnnnnnnnnnnnnnnnnnnnnnnnnnnnnnnnnnnnnnnnnnnnnnnnnnnnnnnnnnnnnnnnnnnnnnnnnnnnnnnnnnnnnnnnnnnnnnnnnnnnnnnnncagaaacgtgtattctttttcttttaatagtaaacctctttacaacaaatatagtgaaagagttttcaaacaaaactcataagaatctcgaggactttgtcttttcttattgtgtagaatactaagaaagcatcaccatacagcacgaaaagaaatattgaaaacaaatcaacagcctcacacttggactcgccctgccccaggacccaggaagagccccaggagtgtgggtgattgtcaggtgtgggggtggggcacctccatggcccatcctgcccctcccttcctcttcctcaccacctccctccctctggagaatggggaagaggagagaatccagattctccattccagcctccctccccccatacaaataccattccttctaccaactgctttaaggggattccaaagagtcagttaaaaatatatagagatatagatatttctagatacacttttacatttctgtctctccaaacaaataaataatcagcaagagaaggtgcattacttccttcctgtccaaggtagggagggctgggagggggtcaggggtcagtcttgctgcactgagtgtgctgttgagggggggagaatggtgtgttccactgag

SEQ ID NO: 127876 - DNA, 1131 bp, Homo Sapiens
ttttatcagaaacgtgtattctttttcttttaatagtaaacctctttacaacaaatatagtgaaagagttttcaaacaaaactcataagaatctcgaggactttgtcttttcttattgtgtagaatactaagaaagcatcaccatacagcacgaaaagaaatattgaaaacaaatcaacagcctcacacttggactcgccctgccccaggacccaggaagagccccaggagtgtgggtgattgtcaggtgtgggggtggggcacctccatggcccatcctgcccctcccttcctcttcctcaccacctccctccctctggagaatggggaagaggagagaatccagattctccattccagcctccctccccccatacaaataccattccttctaccaactgctttaaggggtggggagaggcagcagaggggagaacaaggagttcccaggctccatgtctcctcccctccgcgaaagcctaaacttacccctcaccccaccccaggggattccaaagagtcagttaaaaatatatagagatatagatatttctagatacacttttacatttctgtctctccaaacaaataaataatcagcaagagaaggtgcattacttccttcctgtccaaggtagggagggctgggagggggtcaggggtcagtcttgctgcactgagtgtgctgtcgagggggggagactggtgtgttcaactgaggtggtgagggggggtgtcctcttgacccaactgttccctgaaagctgtggaaaacctgagagaggcagaagggccattagaatgactccagtgagtactatggcaagtgccagttactcaagaggagtgagtgaacggcaaattggctagagaggacaccggacccaatggagaccacgaaaacccggggaaaatccgcagaccggaaacagcctgattgtagaggaacaaacataggcgcaaaagagtcaccctaaataaggcccaagggcacaaaacaagaacaggggagaaaatgtacaccgacccgcgcgccagacaaaaaagcgcacgcgaacacacccacggcacatgagcagcacaactcgagacggacagggacataacggaccaagagccgctgaaaaccca

SEQ ID NO: 127877 - DNA, 942 bp, Homo Sapiens
ttacaaaaaaatcaagtttttatttcaaatatttgaatctaatagatcattatttaggtttatactctgtgaatatatatatgatattgtatttaattaatatctgagtaatctcaattaccattttctaggaaggatagagtgtaagagctaaacatttcatgtagaaatattaactttcaaaagttataataccagagttttagagtgaaggagtatttaaaatgtgtctttctttgggagagaatcattttgttctttactaacaataatttgaaaattggtaatttaatatcttgtgaatatgaaaatattatggtatagattagcttctaggagaagttaagtgtagcatgatttcttgaagattaaaaaaacatttaactttttaaagataatatgcatattgaatattatttgaacataatagtaaagaaaattatctttgagcttttttgaatatatggcatttgcaaaataacattagctcttatgcatgaaataaattgtaactagatttaataggacaagatataatttatataaaaattaataaggccttagttaatatttggtagtaaaatggacaatgaatcagagatcataattcaaagcagtttttcaaaggaagtttcattaataaatgcaaaaactcatatgtcctttttctcaaattgacaatgagtattaaaaaatgtacaaaaacctttataaatcagttatacagaagataaactataatttgaaaagcaaaagtatacaaccagagctacaggccttacagcttaattcatacaggtatgagtttagatagtctcaatcaatatacagacttcagatttcctgaggagactttcactaatccactaccacactcctgatttttgttcctgtttcctcattgacttcatgttttttgaaagcactggcagccctcgtgcc

SEQ ID NO: 127878 - DNA, 1485 bp, Homo Sapiens
  misc_feature (1320)..(1320): n is a, c, g, or t
cagtttttcaaaggaagtttcattaataaatgcaaaaactcatatgtcctttttctcaaattgacaatgagtattaaaaaatgtacaaaaacctttataaatcagttatacagaagataaactataatttgaaaagcaaaagtatacaaccagagctacaggccttacagcttaattcatacaggtatgagtttagatagtctcaatcaatatacagacttcagatttcctgaggagactttcactaatccactaccacactcctgatttttgttcctggctgccagtgctttcaaaaaacatgaagtcaatgaggaaacaggcaccaatcattacagctttcattttaacatcaaggtctaaagggaactggattccaaagttatcagcgtctgtaaatgcctctctcaaaattccagtccagtgcttggaaattttgccaaccacacactgttcatcaagagatttaatctcaaaatcaacatctccacaacagctgcacacaacacatggaccacttatttttagtacatcctctcttttctcattttgaattgtaaactttggtagacatgggtgccaagtctgaataacataacctattggtacaccaggaggagcttggatttctatctcctgaaggcagcagggacaacaacagctgctacatcttagtggtctctccagagttatgacttcttgacccatattatcaataatcctcaaggtaaaaggtctagatggcccacagcaatttcgggtacagcaatcagtatcttccgctgcaaagtaaaccctctgtccaaagctgttcttaatttcatatttgttattagtttcaaaacctgttaaaacttccagaagttcaatttgctgatgaatcagtatctgatctatctgacttaaatattctaatccaggtggacagtttaatggaggctgtggcgctggcatccatggtacccctgcagctccaactggctgattatatactggctgattatacactggctgatttgggacaggaaagccagctgggccaggacctgaatggccggctggtgggggtgggtagctgacctggggcccagggtagccactatatcctggaggtccttggaatgctgtcggtggatactgaggaggatacccaactggcaagtttgtttccgggtgagaagcattcatctgtgagttttgtttgtccatgattaaaacagttctctggctgccgctgtttccgctcccgagcgagacaaggtccagagagccggggccaggcgatggcttcctcttctgcgcctctagactgtcgggcancagctgctgcgcaaccttctcagaagtcagccggaaaagggtctgggagtaacctttgcgccaacacccgcggctcctggtttcgtttcctgaatcttacgtacacaacacggtttccttttcccggttcccgcgctggcgctcggatcccgggaattccggacc

SEQ ID NO: 127879 - DNA, 971 bp, Homo Sapiens
tataatgttaaaggtcattttgaaatattacgctttactggaatcatttcagaatgtacttagagaaagcatttataatcaagattaaataagtccgtacttacaatgaggaatcaggcaccagtcattacagctttcagtgttaacatcaaggtctaaagggaactggattccaaagttatcagcgtctgtaatgcctctctcaaaattccattccagtgctttgaaattttgcccaaccacacactgttcatcaagagatttaatctcaaaatcgacatctccacaacagctgcacacaacacatggaccactttatttttagtacatcctctcttgttctcattttgaattgtaaactttggtagacatgggtggcaagtctgaataacataacctattggtacaccaggaggagcttggatttctatctcctgaaggcagcagggacaacaacagctgctacatcttagtggtctctccagagttatgacttcttgacccatattatcaataatcctcaaggtaaaaggtctagatggcccacagcaatttcgggtacagcaatcagtatcttccgctgcaaagtaaaccctctgtccaaagctgttcttaatttcatatttgttattagtttcaaaacctgttaaaacttccagaagttcaatttgctgatgaatcagtatctgatctatcttggaatgctgtcggtggatactgaggaggatacccaactggcaagtttgtttccgggtgagaagcattcatctgtgagttttgtttgtccatgattaaaacagttctctggctgccgctgtttccgctcccgagcgagacaaggtccagagagccggggccaggcgatggcttcctcttctgcgcctctagactgccgggcacagctgttgcgcaaccttctcccccggccgtaatggccgaattcccgggcatatgtccggtaccgtcgactg

SEQ ID NO: 127880 - DNA, 1360 bp, Homo Sapiens
atgtgataaaagtttgagatgcacagttttattaatgctatatctgcccaaattccaggccaggattcaaggccctttctgcttaattcagcaagactgttgaaaacaaaaaaggattcaaggccctgtggtcggcgtggtcaggcgatggttgctgtctccctgtccttctgccccaggtggtaatgaacctcaggaagtgcccttagtctctctgcagcctgctcaggggtgaggtccctctgagcctgagcaagcatttcgtagccaaccatgaatttccggacagtggcagagcgcaggagcggagggtagtaatgagcgtgcagctgccaatggttccagttggccccagcctctgatcctgtgggagccccatgccagcccatggagtagggaaaggacgtctcaaagaggttgtcatacttggtcaagagcttcttcatgatggaggctagatcatcacgctcagcaggggtcagctcaggtagccgccgcacatgccgacggggcagcagcagtgtctggtagggccatgttgcccagaaggggaccagtactaaccagtgctcactggttaggaccagacgttccttcctgagtagctcctggcggctgtactccattagcaggggctctccatgctgactcttataggcctgctgagatcgctcctcacgctgggcaatatctggcaggaaactgctggcccatacctggcagtgggggtgggggttagaacagcccatcatggcacctttgttttcaaagatctgcacccaagggtactgggcacccagctcctctgtgactgaggcccatgcatcaacaacagcccggatctcagggaccgacatgagtggcagcgttacatccgaccaggggtggaagcacatgaccttacagactcctcgagcagactttgcttggaaaaggggatgatcactgggtcctggactgggggcatcaggctgcagagctgggaagtcgttgtcaaacaggaaggtgctatcgtactggggattcacctctccgttggctcggatggccccaggacacagagggttgagagggtcatggcggggcactgtcttcagaagctggggctccacttgaccctgccagggccgcttcatgcggtgagctgacaccagcacccactcatcctgcagcgggttgtagcggatatgctgatggtcgtttgcccggaaggttgctgctgcggcgtccgcctctgacgcctgctggcgttgctgaggatcggttccactgcgcgacatgaggccaccgggggatccgctggaaaatctgcagggccgtgcctcacctttcactttctcatcccgggaattccggaccg

SEQ ID NO: 127881 - DNA, 867 bp, Homo Sapiens
tcccgggatcggggaggggtggtgtggacggagaaagtgaaaggtgaggcacggccctgcagattttccagcggatcccccggtggcctcatgtcgcgcagtggaaccgatcctcagcaacgccagcaggcgtcagaggcggacgccgcagcagcaaccttccgggcaaacgaccatcagcatatccgctacaacccgctgcaggatgagtgggtgctggtgtcagctcaccgcatgaagcggccctggcagggtcaagtggagccccagcttctgaagacagtgccccgccatgaccctctcaaccctctgtgtcctggggccatccgagccaacggagaggtgaatccccagtacgatagcaccttcctgtttgacaacgacttcccagctctgcagcctgatgcccccagtccaggtaacctggctccaactgctgctggggaggagggtggctagacctcttgagggacttctgctgcagagagtgatactcctttacctcaggacccagtgatcatccccttttccaagcaaagtctgctcgaggagtctggtaactatggatttcccctcttacaactttcaaaccagagttggagactcagcattggggttcggccctgcccgtagcacagccaagccctacctctcggttatcttttctcccgtcaccacccagtacggtcatgtgcttccaccccctggtcggatgtaacgctgccactcatgtcggtccctgagatcccgggctgttgttgatgcatgggcctcagtcacagaggagctgggtgcccagtaccttggctgccggttgtgaggtcgcccttcccctggatgggcagggacggcggtgatgaagcttcg

SEQ ID NO: 127882 - DNA, 861 bp, Homo Sapiens
ttccttcctgagtagctcctggcgctgtactccattacaggggctctccatgctgactcttataggcctcgctgagatctgctccttcacgcttgggcaatatctggcaggattcttgctggcccatacctgtcagtgtggtttgggggttagatacagcccatcatggcacctttgtctttccaagatctatcagatagggatacggagctctgttagtcccaagacaccaatgtcaactccctcctgaccacatcctgcacccaagggtactgggcacccagctccatctgtgactgaggcccatgcatccacaacagcccggatctcaagggaccagacatcgagtggcagcgttacatccgaccacggggtggaagcacatgaccttacagagctcctcgagcagactttgcttggaaaaggggatgatcacctgggtccatggatctgggggcactcaggctgccatggagtactgggaacgtcgcttgctcaaacatggaagcgtgctactcgtacctgtggcgatgtcacctctaccgcttggctcggatggccccaggacacagaggcgttgagagggtcactgtgcggggcactgtcttcacgaagcatggggctccacttgaccctgccagggccgcttcatgcggtgagctgaacaccagcacccactcatcctgcagcgggttgtagcggatatgactgatggtcgctttgcccggaaggttgctcgctgcggcgtccgcctctgacgcctgctggcgttgctgaggatcggttccactgcgcgacactgaggccaccgggggatccgctggaaaatctgcagggccgtgcctcacctttcactttctc

SEQ ID NO: 127883 - DNA, 1362 bp, Homo Sapiens
aatttctctttctttatttttttctgtgagactgtcctttattgtgtatacaggttccagcgtcagggctctcccacggccccctccccagtcctcccccaaggggcccagagtggtgggagtgagaggccaccctaaggcacactgaccagagaggcatggagggaggaggctgacttgccctggggacccctgctaactgagacccacccttcccctccaccctgcttctgtatgtgggagacgaaaccaagagtcattgggggcagcaggcatttcccagggttaaggctgatggaaggtccctatcccagatgggagatgggggcttttcctatgactccccccatcccccagctggaagacgtggggaggggtgcatagccttagagaggtagaatgaggggaaatactcctcagtgcccagaggtggggagttgagagcagctgttgacaccctgggttcagatctaaccttcagtgacaaagcacagcactcagtggctcggggatgtttccccgttaatgaaaatggagattgtaaatctgatttgagaaagctctgaatttggcctcaaccaatggtaatgctgagtatttgaaggacaacgataggggtgtgtgtgttacacaccaccgagccctatgattcatagattaaagagggggatggatggagagctgactgcccggaggggaaggtggcaagaagctggggtccaacctcgaggacccaaagccccatccatgccctggcttccatctctgttaggtgatcctgtctgcatgggagcaagcccccaaagaacacaggcctgtgggagggagaaggaccagccccacccccaaccccaacgtggcctttgcctggaggccccagcaggcgcaggacggcaggagtttcatgcagtttatcacgaaccagctgtattggaaaaaccccatctatatacagatgtggcatggctctgccctggcacagccagctggctgggggcacggggtgggcaggcagcctgctcgctggcgtggggcttggaggctggtagaggggaagtttaccgtcacggctgtctcctcttggccttgctgagccctcgggcaattagttccacttagataggcacccttgcctgtgaccttccctctgtctctcccactccccttggccaagagggttccaggtccctggtccccttgccctgcagagacttcatagatcagagggtttgtctgcctgtctgtcctgcagagcttgcccatatgtcctgctggtcccattcccctgacccacagtgggttctttagatcttccttccctgaccccagcccctgtactctggattaagtatcccgggaatt

SEQ ID NO: 127884 - DNA, 749 bp, Homo Sapiens
agtgctaggaattacaagtgtgagccaccacatccagccagtgtctttgaaaacaatcaaatataatccttaatgtttctttacattgtcatcaagtattagtaacagtgacttctagtgaacaccttgatccttaaaccacaggtctaagttcagttttgtgattcctttcatttttacactcaaccctgaatatggacaagaccggttagtgtgacctgttattttaggaattacaactttaaaaattcctaatagccacaatctaaatgtgcaattcaaagcttttaacaatttccatgttctaaagtttctaagagtcttgaggttatgctagggctcctggttaaagtaactgccaactgggactgtatgtcacctaagtcaggataactccctggtgaagttacttttatttcaggttctgtattatatttctcttagccatattatacccgtaactgtcctttttacagaaacccttccatcttaagagcctgcaaggaagtcatatactgcccaaaaatgcccacataagttgtccatttataaaaagcaatgtaattgacatattgcatggcttccgtaacttcttagctatcttggcttgttcctaacaggaacaggttgtaggctatgtgagaatactaaagacaaaatgcccaatgccagagctctcagtaaataaacaggctgtctgaaaagtgtctttcttgaacatgcttaactttaaggctgaccttcctgac

SEQ ID NO: 127885 - DNA, 1272 bp, Homo Sapiens
  misc_feature (77)..(168): n is a, c, g, or t
  misc_feature (170)..(171): n is a, c, g, or t
  misc_feature (173)..(176): n is a, c, g, or t
  misc_feature (224)..(250): n is a, c, g, or t
  misc_feature (1169)..(1201): n is a, c, g, or t
aaaattattattagggtatgatgaagaggggagtgggatgagggaattaaagagatattagggtggaaggggaggannnnnnnnnnnnnnnnnnnnnnnnnnnnnnnnnnnnnnnnnnnnnnnnnnnnnnnnnnnnnnnnnnnnnnnnnnnnnnnnnnnnnnnnnnnngnngnnnnggtttatcaaacactgacattttattttctgaagttttatcatttttnnnnnnnnnnnnnnnnnnnnnnnnnnngcaggtatcaaaaacagcaaagagtttatagaatttctgcaccagtttgcacataagtcagtgattacaaaactggcatccaatgtaaatactaagcacaagctcacttccctcttggtcaggtggtttgttttagagctactcgatatttataactttttataagcaccggtcattttttgagaactgatttggtttgtccaacaaagtaaacaattttttgctgtgtggcagtttctttttttagaaaacactgagctaaaacacagaatgtgtatttgtttggatctgaaccaaatcttttgagatcccaactaccctgaagaacactgaagacatttacggggcatattaaatggtatcttaaatactagttgtatacctcataatgtctaaggcagctattatatttctaaagaaagtagcatttcattcagaggctgcccagagtttaaattacaccatagtttttctttctttctgcaaatcattctttctgatttgcagttttttccaaacagagccatattagtggaacaaaagtttgatgttcatgcccaacaagctctgatattttatggatacatttgtataaagcaagacttcttgctctgaaccctgggtgaccacaaataaattgaggggccatgattattggatgctgagagaaagtagcatacttaaacccacagtacagataatcaggaggcaagcaaaaacaaagctataacttggcagtggtattcacccaccacttattccaaaaacatattttgcttattaaataagggaaatatggtccagttttgcaatgttaatagctgccagtctctcatattttttataaatatcatttcctgactagcaatgagctaggaaactggcctcaaattctgaccaaatctctcagtattagttnnnnnnnnnnnnnnnnnnnnnnnnnnnnnnnnncagccaacaggggttaaaagttgcacaattaaacttgaatgtaaattatactatatacagattggtataaa

SEQ ID NO: 127886 - DNA, 701 bp, Homo Sapiens
cctttcccagaatatgaaaaaaggcaagaagggcaaaggttgagagaaaccagatggtaccccacaggggcagcggtggcatttggttgttttggtctttgtaccagcaattcccactcccgagggcagataatccacttcctgccagactacacagtttttcttgcagtcaagacacgaacaatggaccctactcctccagcagcaagtgccttttcatgccattgcagtaacatagcactgctattgtcagacgggctctcaaatcctttataaatatacttcattaggagatccacaccattcttgtccagagattgaactgccttttctatatcattagctttaaaagagatgagcaccttcaagacaatgctgcctgcccggtccttcactgcctgactcttggtgttgataggggggttcttcagagctgcctgtagggcagctgtcatgtttccttgccgcaggcaggagtccacctcgccctcgtcgggcccggcctggccgtcgcccccatcttcttcgtccacgaacttgttctcgtcatattcatccacgtccaccttccggaagcgggccgacgacactgtgttcttcgacatcccaatcccgaccagcggcaaaggcctcttcttggcgctgcctctacctcagcaagcccagcccagcaacccactacccggcgcctgattcacttc

SEQ ID NO: 127887 - DNA, 1373 bp, Homo Sapiens
  misc_feature (380)..(412): n is a, c, g, or t
tttttatgccccaaacaaagctttggatatttttaagggatccctttgatttaaagccaggacttcctggttcggacccctggggtgcccccaaattaaattgaggggccatgattattggatgcggagagaaagtagcatacttaaacccccagtacagatatcaggagggcaagcaaaaacaaagctatacttaggcagtggtatcaccccaccacttattccaaaaacatatttgcttataaataagggaaatatggtccagttttgcaatgttaatagctgccagtctctcatattttttataaatatcatttcctgactagcaatgagctaggaaactggcctcaaattctgaccaaatctctcagtattagttnnnnnnnnnnnnnnnnnnnnnnnnnnnnnnnnncagccaacaggggttaaaagttgcacaattaaacttgaatgtaaattatactatatacagattggtataaacatcactgaaatggttttgaaaggatgaaacacttctattttaacacaatttcttctatattatcccaattttcattaaaggacaactgatatgtaatttttttctttacagatatgaaaaagcaagaaggcaaagctgagagaaacagatgctacccacagggcagcggtggcatttggttgttttggtctttgtaccagcaattcccactcccgaggcagataatccacttcctgccagactacacagtttttcttgcagtcaagacacgaacaatggaccctactcctccagcagcaagtgccttttcatgccattgcagtaacatagcactgctattgtcagacgggctctcaaatcctttataaatatacttcattaggagatccacaccattcttgtccagagattgaactgccttttctatatcattagctttaaaagagatgagcaccttcaagacaatgctgcctgcccggtccttcactgcctgactcttggtgttgataggggggttcttcagagctgcctgtagggcagctgtcatgtttccttgccgcaggcaggagtccacctcgccctcgtcgggcccggcctggccgtcgcccccatcttcttcgtccacgaacttgttctcgtcatattcatccacgtccaccttccggaagcgggccgacgacactgtgttcttcgacatcccaatcccgaccagcggcaaaggcctcttcttggcgctgcctctacctcagcaagcccagcccagcaacccactacccggcgcctgattcacttccctcttccgctctggggcgtcgccgactgccgcggctcggaccgttctgggcctgcgcgctagccccgtttcttcctcctcaggttcgcgctcccc

SEQ ID NO: 127888 - DNA, 873 bp, Homo Sapiens
ttttttggtacccaaagtgtcctttattctttatcatcctatttgagttttattgtttttacacagctgggaaatgcttaaggtacaaattaataaattttaaactcagtatggaaaatacatttaataaattaaagcaaaaaccaaagatctgaggagatccaagagatcaagacaatctgtaaccagagtctgaagtatccaaggagctactctttttgaggcatattctcctcagcttccagttatcatttgataaacacatcagcaaaaggttcagtgttttaaacaaatgtagactttattttgtactgtacaaagtgctaatgtcagtagatccattaaaatatagaatatttaagaaagatcattaataaaagtaatggtcattcaatttaatgttacagtttacagcgttttactgctagtgttttaagtcagcatgagcagtatcaaagtacttatgtagctagtttctaaaactttacagaaaacccagtacaattccaagtgcttatagccaatataagcatatttcatattagaaatagttatccatatgttaacaagaaactatggtcctcaaatatgccaattttagagtctaataactactgatagtaactatgtaaatattttggaataaacagttatttatgcaagccacacttcagctgagatgatcactagacatctgtttccagagcttcaacaatgtgtgcagcagaaggacgatctttagggtcttcattagtgcatacagagaagagttcaattactttctggtatgattcatccagttcttccatattaataggtggcctagttcccaaggctgcatagtatgcttcatcatcaaaatcactttcatca

SEQ ID NO: 127889 - DNA, 714 bp, Homo Sapiens
cgggcttcaaatcaagtttaataaataaaacagcaaaggggggttcaaggcagttatcacttcacagtgtggtccttggtggggtgagggatggtcgagtccaactcggaaaggggctcgagcacaagaggccggacgacacccggggcagggcgcgccgccgcccacggaggaccccactccaacgtgtaaacagaaacagaaacgaacgagagggccagggaggagggggaccaggactccaagccatcttgctaggaagcttcccacagaaggaagacctgcagggctggggaaacaggctggagtctggcccctgcgtggccagcagggccggctcctccggaggctccctgccttggtaccgggggaggacagcaaaggggatgtaaatcacctgtctcctcaaacccacgcctggggttgctgagggaccccaccccaaccgctcaggatcggggagcagggatggagggggaagaggcaggtgggggtgtaaagtgcggcttttcctgaagtggagacgatggggtgggaaggcgaggctggggtgggggccggacagcgaggtatatggctctgtgccccacggggttggcactgagtagcagctgcccacgacccccagggctggggcagcccgcggccctgccgggtgtggagagacagagccaagcagggagctgaggggcgcccggcggaggctgctggtgc

SEQ ID NO: 127890 - DNA, 824 bp, Homo Sapiens
  misc_feature (724)..(744): n is a, c, g, or t
  misc_feature (774)..(783): n is a, c, g, or t
caaacacacaaactacttttatttttaatcaaaatgtgaatcatcatagtgaataaaaattcatgagtcagaatagcatgcaattttttattgttttctaaatctatttgtacacttaatatgctagtattaatttcacaaacagtataaagaatgtactccaatgatattacgcggcaactactcacctgaaaaagaaaacattgtctctgaaataattcctaattatacaattttgcaaataagcactataaatgttaaaatgttaagacttcagtgtataatgtcaataacatcctgcctttttaaaattgcttaaaacatttgttaaagatcatgcaaaataaacactgtattaaaatgctagattacactcaaacatcaaggcaatgaaacacaaaagagcaactatttagcacaatgactggcccagtaaataacttaatcagcatattaataaaaacccactgagtgataaacatcgaaaatgtaacactgaatctagataatagcgcatctgcgatctcaccatctaccgtcctaactgtgacttggggtaaaccaccagaattcattctacataaatgagctatgttaaaacgataacaatatttcattgcatgatgacagggtacatttctagtccacacagtacttcaatgtgaccattctcttaactcggctaataattaatggaaagtacacttttacagtcacagcactnnnnnnnnnnnnnnnnnnnnntttacccttgctttgttacatgtttccaannnnnnnnnnaaaagtattcctttcttatgatcttccccagactacatgct

SEQ ID NO: 127891 - DNA, 2500 bp, Homo Sapiens
  misc_feature (770)..(784): n is a, c, g, or t
  misc_feature (2383)..(2417): n is a, c, g, or t
  misc_feature (2420)..(2458): n is a, c, g, or t
tttttttactggatcttaaagtggaaaacatgtttattaacattcaaactcccctcatacaaggccatataaaaatccttagcattttgattatacattagtctacactttctacatagttacaatgatgtataatttagcttttcataatacagtgtttcaatacatcattagttctgttaaacataagtcacttactttcaaatccaatacttgaacagtttcctctgtacatagtttagcagggctaattagcataagatgctatttattaagaggtatatgatctgagtattaacagttgctgaagtttggtatttttatgcagcattttctttttgctttgataacactacagaacccttaaggacactgaaaattagtaagtaaagttcagaaacattagctgctcaatcaaatctctacataacactatagtaattaaaacgtttaaaaaaagtgttgaaatctgcactagtatagaccgctcctgtcaggataagactgctttggaacagaaagggaaaaaacagctttgagtttctttgtgctgataggaggaaaggctgaattaccttgttgcctctccctaatgattggcaggtcaggtaaatgccagaacatattccaactcaacaactctaggtaactttatggaggtggaagctgggttagttcatgctaggtggctgtagcactgacctcatgtataaaacgcaaaacacttaaatactgtgatctaggtcttaattgcaagctatactgaggannnnnnnnnnnnnnnatgttttggctatactttcattccaaaagaagagctgaattgatgcttgagttacagcaccagtctattattagtgaatgaagtatattcttggcagataaataccagatcaaaagtcctgtttcagtaatttgattaaactgtagaatactaaaaaataagttatttctacagaaatctttgaagggagcaaaaaatcaaattacagtatatacctaatcattttaaagggaaataaaccaatcatcttctgaaagtcaaacagtatttgctatgttgtaatcccgttcaccattaggctgcaactggaccacgacatcatgttcattaatttcattttctgcatcactactgtcagtatcttcattgtcgtcttcctcatagtctgaagattctgtcatgttctgatgtgagcgggattccgataaagccccaaatgactgggcactgacagaagctaaaggtctcagtaaaggggtatgttctgtcacttcattttcttcttgactactgtctgtgtcagagtctgaatcgccttgagaaggaacaactttttgcttgcacactggacaggtttttttggttttagttagccaagggtctacacacttgcaatgataagcatgggaacagggaaggattctgagtttgtctccatcttcatactcatccaaacaaatggcacatacatcatactcatctcctttcttgaatttatgtacaggaagtttcttaagttgatctttacgaagtctgtttcttctagctctatgtctatcctggacaaattttgtgatcatgaaaatgactatcaagatgagacagatgcccactatgataaggaagggaattaggtagtattccaaaggaagactaaattctggaactaagataaggtggccccctttttcatatgtgaattcatctttcagagaattagctgatgattcaccaataaagacagatggaatgtcaattttctttagtacctcaatgtcgttggatcccatgctaatgaggtcatcagaatcaacattgtgaactatggctgccttgtatcctgctctctgtgcatttaaaacctttatatcaaaattacaatcaagtcttctaattaacacgatgaaagtgccagatgaattgtcttttactggtggaggcactatgggttcacaggcattctctggttttgagttaatcaaaaaaccctttaaaccttcagctggaagtctataaccaaatcttgcagggaggtcatcaaatgtctgagatgcattttcaaagttatatgctaaaatgtctgcttctacaggcagtaggtttaagaatgcaaagagctggacagtcaagatggtgtagacttgtgtggctgacagcatgagcatccctatggagagcagcatctcgttgtaaaatcaccttgaagtccggcccccgcaacacaaacagtcttgccagccgcgtcgctgcgggagaagtccctaccctgatttcatgactgaatatccgcaccgacccccacagcccggagtactagcagggacgacccccggccgtaatggccgaattcccgggcatatgtccggtaccgtcgactgnnnnnnnnnnnnnnnnnnnnnnnnnnnnnnnnnnncgnnnnnnnnnnnnnnnnnnnnnnnnnnnnnnnnnnnnnnncttgcaaccgagctaggcgccctataagtgatctaatacatt

SEQ ID NO: 127892 - DNA, 782 bp, Homo Sapiens
cgagcggttatagctgggcctgcagggacccacggctcgcctccagcctcctgcgctccggtacctgggcgtccaactccactgcgcgcccaaacccagccgagccggttcgtggcccgccccgccgggcggccgtcgacgcgagcgccctggcgtggcgcccaggggagcggggggctcccgcgagccggccgcggctggcactgctgctgcttctgctcctgctgccgctgccctccggcgcgtggtacaagcacgtggcgagtccccgctaccacacggtgggccgcgccgctggcctgctcatggggctgcgtcgctcaccctatctgtggcgccgcgcgctgcgcgcggccgccgggcccctggccagggacaccctctcccccgaacccgcagcccgcgaggctcctctcctgctgccctcgtgggttcaggagctgtgggagacgcgacgcaggagctcccaggcagggatccccgtccgtgcgccccggagcccgcgcgccccagagcctgcgctggaaccggagtccctggacttcagcggagctggccagagacttcggagagacgtctcccgcccagcggtggaccccgcagcaaaccgccttggcctgccctgcctggcccccggaccgttctgacagcgtcccccgcccgcccgtggcgcctccgcgcctgacccaggaggagtggccgcgcgcttccaggagccgctcatagaccccgcctgccgtccggtcaataaaatccgcctgactcctgcgcccccgcatgcg

SEQ ID NO: 127893 - DNA, 935 bp, Homo Sapiens
ccagcgcgccacacaagagaaaaacacccacacgcgcaacacagcgctcagcaccccacacccacagtacacagcgcgagcgccgtcagacgggaggccgagacgagctgacaggcgacacaaaaccgcgagcagcgtgtcacgccgggcgacgacaagcgccgagcacaaacacgcacggcgtgcacgaaggaaagcagaccgccagtagaacagctgcggcgaacaacgtacgccgaaaacagacacgagcccaacacaacaaggggcccaccgccagcgggaggaggcaggcgtgcccgtcacatcgaacccatagatcactcgaacgccccggcccaccgggcaggcgagaagcagggaacttcaggggagggcaccggagcgagagagagagcaagcgtgacagaaagaccggcgtctaactgatgtgcgcggatcgcgggacccgcgggcggcggggagaagtccacggcagcgaccccgacgaagtgggtgtcggcgggcccgagggcgttatacggcggcgtcgccggcgggtctggaggtctcggtgccatcctccccgccggagcccgtcgtccggccccgccgcgccggctccccgtcttcggggccggccggattcccgtcgcctccgccgcgccggtccgcgccgccgggcacggccccgctcgctctccccggccttcccgctagggcgtctcgagggtcgggggccggacgccggtcccctcccccgcctcctcgtccgcccccccgccgtccaggtacctagcgcgttccggcgcggaggtttaaagaccccttggggggatcgcccgtccgcccgtgggtcgggggcggtggtgggcccgcgggggagtcccgtcgggaggggcccggcccctcccgcgcctccaccgcggactccgctccccggccggggccgcgcc

SEQ ID NO: 127894 - DNA, 1826 bp, Homo Sapiens
  misc_feature (159)..(161): n is a, c, g, or t
  misc_feature (182)..(182): n is a, c, g, or t
  misc_feature (185)..(224): n is a, c, g, or t
  misc_feature (226)..(228): n is a, c, g, or t
  misc_feature (231)..(231): n is a, c, g, or t
  misc_feature (235)..(239): n is a, c, g, or t
  misc_feature (1158)..(1166): n is a, c, g, or t
  misc_feature (1715)..(1749): n is a, c, g, or t
ggtggggagttcccagacccttatttcctggccccggttttttcttgggggaacaagttttgggcccaggttccctttccccaggggggcccgcggggcccaaaggaaatggtttttagaaagattttttggggggcggaggcggggcccacaaagggnnntttgggttgtggtggttgttntgnnnnnnnnnnnnnnnnnnnnnnnnnnnnnnnnnnnnnnnntnnnttntttnnnnngagtgaacaatttttattgaaaccctcaaagattaaagaggaccaaatggtgagtttgggtaccataacagaaaatctcacctaactgtaccatcattcacaggaatgaacaaacccaaacacgacaaaattcaaattctcatgtaattgctacaagtgaatgtaaatgaactaatcattttatcataaccttcctttaatcatacgaaaaagggaatttacatggcataacaaaagatatgcaaaacttaatgaaaacacaattctcttaaatttcttaaacttatttttaaaggatgcagaatgcacttgaaatgattaaatgacttaagctgattcatttttttttattgcaaactgttttaacatcagcttaacccccatgcacggtattcaaaaagaacacagctttcgaattagaaagatcacttaaattaaaaagagaaattaagtactaaaattaggaaaacgctggatttcttttgaaaggaatcttcaagtaccaatacgtatagagaaatactaattttggttacagtttcctccttactgttaaatatacaaactataatacctttcaaaataaaatacccacataagatagctttaataagaaatattcaagccagaacttggaaaaacattaagcaagaaatttactgggctgataatgtcttaatttgtgatcattcaaacatttgatgatgtgtctcctcttgtagaccccaggctctctcccttttggtccccacagttaagagacattcagttggttgtgcttgagacaacctgtgataatttcattcagaggaaaaatattttgcaatataatgacagaccaagaaggaagagaaggtgggtgctctggagaaaacttatatgagaaaaacacaaaattatcacttgaaaataaaaagannnnnnnnnccaaaggaatgctgcacccatttcacttaagattagaaatccaggttaaaggcactgggatgtactcctcaccatgaatagactctcaattacatttattcgcatgtctgagtctattgcaatcagcctgcttgctgagtgcttccatgacactcttacataaaaacctaatgtaaattaaacatgtttgaaaccgtttataatgtaactagttttataaaaatatccagagttgctaataaagcaccaagaaaaagagaacctcagggggaggactcagatccttcctacaaggtcaccctttttataatattctctaataggacctccagaatgacaacagtcatctttgacatgtcctacctagataatcttagggatgtagaacattgctgtggtgactatacccaaatgccacttttcattataaatagttaagagacatgttacaagatttcatggcttactcttaaaaaggtaaaataggtgcaattttcccccggccgtaatggccgaattcccgggcatatgtccggtaccgtcgactgnnnnnnnnnnnnnnnnnnnnnnnnnnnnnnnnnnncggccgcttcctcgctcactactcgctgcgctcgtcgttcggctgcaaagacgctagcgccctataatgagtcttaa

SEQ ID NO: 127895 - DNA, 1183 bp, Homo Sapiens
  misc_feature (500)..(541): n is a, c, g, or t
  misc_feature (708)..(708): n is a, c, g, or t
ttttgactatccacatttctttaatgtaagtcaaagcccatcacaatgcatcctgttacaatggaaatcttatttttggaagtccacttaattattttgagcaacattatatacaacccaacagatacaattaattgacaacttgttgaaatgttagagctaaaccacaaagagtaactgagtaatgttgacaaccccaatatttattctcatactgtgctcaacattagatgatctataaaattcaactggcaaagggagatcaaagaattgtgcttcatcttgagcttgaattggatgacaaggagattaggaaatcctaagtggaaaaatattcaaatcattgtgctttctatatatttttcttaccacctatttccagttataaaccttacatctgtgcctctgcataccatttaagtacaatactaaacattctttaaaatcattttctactaactataaaaggtacactcagataactgtaaaatcatttccgnnnnnnnnnnnnnnnnnnnnnnnnnnnnnnnnnnnnnnnnnnaagaataaatcaagtaagacacagctttcgtttacctaaacatgcataatccaacctgaatataaactgcacttaattggtgaattacacatgaaatacaaagggaatgcaattttacatatgtaaaatgattgctagctatagcaatttaacagtcaaatttatcnagaacattgtacattaaaaaacacaaacaacaacttaaagccaaatatctatagtaaaccaaggaaaattctgatatggaatggtttgactaaaagcaaagaataaggcacctgctatgaatttagcacaaccataaaacagaattagttaaccaagacacttgtttcaaaaagggaaacaagtacagagactgattaactgggtgagaaaggcaagtaacaatttagttaaaaacctgctggcccaaggtcagttgattcattccttattccagaatagttaagttcctgaaagtcctccatgtttgagggtatcagaagccccctgtgaggttcacgctgtgtatagactaggtagcagatttcccttctgttcctcttaaaacagcttattttaaaagaaatatcctgaggcaattaccaaagcatacacaagcagctttctttctaacgcattaatacatagacactgctc

SEQ ID NO: 127896 - DNA, 2508 bp, Homo Sapiens
  misc_feature (1267)..(1275): n is a, c, g, or t
tttttcaaatattcagggaactttatttttaaagaataaatcaagtaagacacagctttcgtttacctaaacatgcataatccaacctgaatataaactgcacttaattggtgaattacacatgaaatacaaagggaatgcaattttacatatgtaaaatgattgctagctatagcaatttaacagtcaaatttatcagaacattgtacattaaaaaacacaaacaacaacttaaagccaaatatctatagtaaaccaaggaaaattctgatatggaatggtttgactaaaagcaaagaataaggcacctgctatgaatttagcacaaccataaaacagaattagttaaccaagacacttgtttcaaaaagggaaacaagtacagagactgattaactgggtgagaaaggcaagtaacaatttagttaaaaacctgctggcccaaggtcagttgattcattccttattccagaatagttaagttcctgaaagtccttaaccactctgctcccttactgttctccatgtttgagggtatcagaagccccctgtgaggttcacgctgtgtatagactaggtagcagatttcccttctgttcctcttaaaacagcttattttaaaagaaatatcctgaggcaattaacaaagcaaacacaagcagctttctttccaacgcattaatacatagacactgctcaggttttttttcaccaagttatggctaagtatacaaatagccaatacttgcagttttcaacagtactagaaaacccaaaacctgccctatgaccctcacccttaccattagtaaaacgtaaatttgatcaatcataacctataaagtcatataacaaagggaagactaaagactgatcattatcagtaaatccagttcaattccagatgccactttaggctgatgtgtctagtaccctaatgattgaaaaatcattaatctagaaaaagcatttgcaaactaaggataacttcgcagttgatgtgcctttttttgctattaaaagtgctatttaacatgctaaaaatgtcttatggcacattggactcaacagcatgttctgatgaggcatccatttttagcagtatttttccctagaattttgtttggcatagtaaacccctttgatatattaaaatagttctggtgaaataaatgtaacataaacaaccttccctgactgacttcactccaccacggtagcttttagtgaaaccacagtaactgattaagtcagaaaacgatcaagnnnnnnnnnatggcatcttgggttactatactcactcatgcaaaatccaaggtagtgtaatggaaacaatattggtaaaatagatgttgtggctataagcatctccctttatattagacatttagaagcttttaaaactttttagatgctaaaggttgtggcaaaactaggctgtgtagttgttccatttataagcaccttattacaggacagttacatgaacctataagggagtgtgctttcagttcaaaagagtaataaagtgcctagctatataaaaaccacaagacttcaaattgtaatttaagctaactgcagttatacatttgggttaccaaattctagaccctgtctatgcagagttagactaattgttcataactgttttaataaccaccatataaaactttactcttaattgactgaataaagtagggtccacttactgtatcttaacaatcaaattttattgctttattcatgtggtgttttttgcaaggcactgtggtatggactagaaaacttggaatgactcatgaagaaaccttggaatgacacatgaagcatgataggaaagtcattctgaggcaggatgctttactgaattgttttcaaccagggtatcaaacatcaggaatgagttcaagttaaaattcacaggagaatggaaacatcttaaggtcagtcacttcacatgcccatcctgatactttgaataatctggaaaattgcagaaccacagacaacaaaaatgaagagagccaataaccagggtcctacagacgccttctcttcgggggcatttctcgaggtcttggcgacgttgccgcgctgggtgatgttcttgctgtgcttctcgttggccatacggatcctttgcttggcgaccatcttcgcggcgccaccacctgccccggccacccctcggactcgctcactcgcctgcctcctctggagccgctgcgaggctcggctcgtggtgcccgcgccgccggagcgccgaggttctcaggccagacgctagctacggccgctgggcctgggcgccgcaagcgcgaggtctgagcacaagccgggcgccggccgccgactgactgaccgagcggggcaggtgcgcaggaggaagagaactggccgccgggtcgttctcgcgccgccgtcgccgccgctttggccgccgccgtgagcgcggagtgaaagaggaaggaaacgcaacgcaacaacgggaatgtcctcgtcgga

SEQ ID NO: 127897 - DNA, 1615 bp, Homo Sapiens
  misc_feature (769)..(824): n is a, c, g, or t
tttataactaaagcgtttatttccattcaattcactaactgattgctctgcttgggtgtctgtgttggttcacaggagggagtctgtggccagatccctagactgagggcgtccccatggccaagacctttaggcccagcaaaggtctggtggggggaaggaggtgggagagaaatcacacactttctctccagggaagggaagaggcatgcttgcccgtgtctctgagcgcaccctctggagggcagggtatcacagtgaatgatccgggtcctggcctccgatgcagcctggtttaggctcccagagggaaaactgggttttgaccatctgagggcactcaggagcctcaaaggggcctatttgcctgggaagtactagatagattggggcaggagagtgggaagtgggcaaggacttccagccctgcagcctcagagcccacttcctcctcaatctgtccctttcatcaacagtcctggagtgggaagctcctccaccttggcgcctccccctccacacccaaatctcactccagtctctgaatggcccagatggccccatggcagtgggctttggtgaggcctggtggcaggtgggaggagggaagagtgtcaatgaaaaccgtataaaaaaatccagaaatgtgcatataaaatctcgcccttggtgtattgcctaagtcagtaagcagaaagcaccttcttcctggagaaggatcaagtcctcaaaaggtaggaaatgtcaaagtgtcacttcattgtcattnnnnnnnnnnnnnnnnnnnnnnnnnnnnnnnnnnnnnnnnnnnnnnnnnnnnnnnnaccctgtgaccaaaatacccccgagtccaggaattgctgtaaacaaacccagatgcaggatcaacccttctcagcggcagtcggagctgacggcagtcactgcagtatcagtcctcgaggcaggggctggcgggagtgggcaccaggagggccaggctgccaggctgtgcgcgtgatatgtacctggagctgcagacctgggggttgcccatcctcaggaaggctgacctttctggggtccccgcgttctccctgacccaggaggacaaaagcccctttcagccctgtgagccaacaggagaaacagtgtctttcattggagtttctaaaatactctccaaagacagaaaaattcttctgtttgcccagtggtggcaggaatagattttcccagaggggttctcagggtggctgtctgtccatctgtcccgtcctccaggcgcttggttgttgagtgaggcctagaggagcagcagggacaggagccaagggcggcccctgtctctccccttcacatttgtttttctgaaagtgtttcttggctctggccaggtcaccttcccagagggagttggagagaaactgcttttgtctccgattggacacatcgcatgaatctcccaagcccttttttatcccccgcaagaacagtcattgctttccttatgagaatcctctttaaaaaatattccttgtatttcccgccccctcccaggatctgttttcttttttcccattccctttttgtttccgcctcgtgccgaattaaacaccccggcctcgtactagcc

SEQ ID NO: 127898 - DNA, 737 bp, Homo Sapiens
  misc_feature (118)..(133): n is a, c, g, or t
  misc_feature (650)..(650): n is a, c, g, or t
  misc_feature (656)..(656): n is a, c, g, or t
  misc_feature (676)..(676): n is a, c, g, or t
ttttttttaatgctgcatttcttggttttatttgaaacagtgcatatttttagcattttatggtaggattttacacttgtcatttacacaaattacaaggttctgcttcaagtttttnnnnnnnnnnnnnnnnttcagcccatgtgcagcacaagaatatgcaaaactactttacattatacacactttttatcaaaggagatacaaaattctggcttgttgttttagacaaatacaagaagcttcaaactagacacaaagggttaacattaattctcaaatataagtctgcacttttgtgttgtagttctctgagatgtgaataccaaattcctaagggattttaatgttttcctttgaaaaggaaaactaaaaaaattcccgtaaacaagtccctccccatcagcttggtctttccacaaccctactcttgcttcccttagtgccagacacttgcatcatgttacaaaattggggtgggccacttacatcatacaaggagcaaatccttttaacttctctcctgcaaaaatctaaacaggaatatattgatgcagatggttctgctacattttatttaatatgatgtaacacttggtaatctagtaaactgtgatgccgggcaattaatcaaagggaggaagagacanaggtcnctatcaatgcactttttgtntggtgacacactggaaaccttaggaatcaagttgtctgatgctaagagaatttaactctct

SEQ ID NO: 127899 - DNA, 1634 bp, Homo Sapiens
ctggttaattcccatcagataacatccaccacagaaaagtaccaaccaagcagatggaatgacttagccaaataatgttaaccaggctttgttgctggcaccccaatgctggcaaagtgatcaatgaacggaggagccatggtggagcaaatgcaagggttcaacgtcatggactcatcaagtctgatctaactactgcatcagtgaatgtccagcttgccagcaacagagaccaacacttagcctgatgtcaccattcctcaaggaaaccgtctagccacttggtgcagcaaacctctgtggctcaaggaaatctcagttggatgtcctgtctcatctactcaagaccagtaagcaacacttacttaaaaagaacatattctctttatttctgcttgggatacaaatgttcagtttggatgatgagaatgaggcaagtactggagacaatggctggctctcctgtttgtcccaataaactccaatggaggaagaagctaaacaggttttggatggtttcggtctactgcatctagcttatcaaatctacagcctggtacttctggaacaggacttccctgccccagtgatgacagttaaagatggcaaaaatgaagaattcaacatgtatacgcagtgcagtctgatgtcttcagatgttctctaaaattctgtatttggtcagagctgggagtgagatcagggtgcttgcacatttctgctccactgctcccgattctgctttgctgccttggagggagagtagatttagatctgggggctggtgggggccatagccttggcagcttgctgggctaaccagtacttatatcttttggtcttgggcttctcaaagttcacgacagacataggcactctcacagtatcaagcccatttaccgtcacctcacaccaatactcgccccaccgtgtgataggctctgctggtaactttaatgtatgtggggcaaccacaacaccaagattcttaaagaagtggcgggcaactatttcagggttcagctcccatttgacattgttcttcatccctacctccaggcgacagctttttagaaatttcactgtcgcctcacctgccttggtctggatcttctctaattttccttcttgtctcagcaatttctcctcttcaaacagcttcttgttttcaggggatgcatatacagccagtccctgaggaaggagtcgattccggcctaaagatttcttcactgagaccaggtcaccccggactccaacattctccaccgactgcgtcaggatgagctccaggttttctttgggccgatgcttcgtgtcctccaccagcttatagacgcgatgtcgccggtgcaggcgcggcttccggccctccccggccagcggtaccttccaccagcgctccacgatgaccgtgccccgattttgagaaaggctgaagttgcaggccaggtcaggggcgttcccttcatgtcgcggccgcagtagctcctggacgcctccccgaagcagccgtccagcgcccgcccgcagcagagctctgcccggggccgtgacaacgggcgccgccatgttcaccctcgtgccgaattcgccacccaggcctcgctacctaaggaccggatagtactgcc

SEQ ID NO: 127900 - DNA, 740 bp, Homo Sapiens
ttttgatgattgcactaccctttattcctaggatggaaagtgtcctgaatcacatcccgggcccctgattccatgtgtcaaggcttccagcccctcaaagcgttggaataagcatgttcaaggaggctcactgggcaggtggccaacatccctttcaaggggatacaccataaagatgacattgtccaagggagggagggcagggtgatctggtctgaccacctcaaagcccatgtagctgaaggcccgcagcagggcacctctgtcgttccgatcattctggaagttcacaaacacagagtccacatttgtcttctcttccacgtactccagggttgcagtcaaactttcccggttgccttgatccaaggcctgatatgggatatccaggaagagtcgacggtcacagagaaggccgtgccaatgggcagaggtctgggaggtaaggcggaagtgaaagtctaactgtactgggtcctggtggagcagggggtcagtagccagcaccgtcaagttcccagccgaatacagttctttaagctggtcgtggttaccctgctcggtgcttttgccctcctggaggcctactagggactcaggagcactggaggcaggaacggggctggagtgtcaagtcctcctcttccttataagtgatgcgtcgctttcctggccgccagggcacggtcatcgcctcgtgccgaatttaacacccagcctcgtacctagcctataggttg

SEQ ID NO: 127901 - DNA, 586 bp, Homo Sapiens
atattcactaggaacaagatttaagagactgctaattagtttctttagaacttgatgtataaatttaatatcccctgtatagagggagttgtcgtcccatggaggatttcagtatctgtggcacaaattgtcaggctcctctccccacacactgttaatgatgttgctgcctttatgttttaattttcaatgctggaggccagtgtcacaatcacaatagtttttatggcttcctcttctcacatatagagttggattgtttccacaaagaaaaagcaaggcaaatagttgagggggacgggctagaaaaagctgatgccaaaccggaccagcctgagaggaagcgcctcggcccgggccttactctccaccgactgcgtcaggatgagctccaggttttctttgggccgatgcttcgtgtcctccaccagcttatagacgcgatgtcgccggtgcaggcgcggcttccggccctccccggccagcggtaccttccaccagcgctccacgatgaccgtgccccgattttgagaaaggctgaagttgcaggacaggtcaggggcgttcccttcatgtcgcggccgca

SEQ ID NO: 127902 - DNA, 1146 bp, Homo Sapiens
ttttttttcttttacactggccacagagcgtttattgacaccaccactcctgaaaattgggatttcttattaggttcccctaaaagttcccatgttgattacatgtaaatagtcacatatatacaatgaaggcagtttcttcagaggcaaccagggtttatagtgctaggtaaatgtcatctcttttgtgctactgactcattgtcaaacgtctctgcactgttttcagcctctccacgttgcctctgtcctgcttcttagttccttctttgtgacaaaccaaaagaataagaggatttagaacaggactgcttttcccctatgatttaaaaattccaatgactttcgcccttgggagaaatttccaaggaaatctctctcgctcgctctctccgttttcctttgtgagcttctgggggagggttagtggtgactttttgatacgaaaaaatgcattttgtgcagctggtgaggtataatccaaagcaaaagcaggggcaaaaatggacttcctgaagttatctctgctcctgctggttatcctccagaatctgtcatgttgactgagagtgcgtgcttgctttctcaggcctcctggccaatagcacaggtctgctggaaatcacccacatggtttttcattgcctgtgcagtcaggtgatgcctctatgtttttggaggtccacctctgttgtttcttaaccttcccagccttcccacagttgtcccctgtattgatcatagcttcttccatctttaagtcccaggtccatgtttcgagtccggggggttacgctgcttgtaacccttgcagctcctcagctccatgagctgtacgtgtagctggttgaggacatccctgtccagtgtgttcactgcattcatcagctggtaggggtctgtgttgagatcaaagtactttaggaagccagttgcaaattcacagaagaggaaattgtgagtctcattgatggtcctcatgctccagtacgtgttattgttggcgctggtgcaggcacagaaaggccccagtgtccagaaaggcgccgtctgccagtgctggttgttgtgggtgaagcacgtgaggcgtggcatgctgcacgtgtcgttgttctgcaggcgcttgagcagcttgcggagtttctt

SEQ ID NO: 127903 - DNA, 1068 bp, Homo Sapiens
  misc_feature (43)..(101): n is a, c, g, or t
gtaaaatgcccatttgctgggtactttctttctccttatcttnnnnnnnnnnnnnnnnnnnnnnnnnnnnnnnnnnnnnnnnnnnnnnnnnnnnnnnnnnnctctaagaaggcgagtggcgggaggccagggaagcccgacgtggtggggcgctgcctcccgctccgtggcctccttcctccctggcccctcagtgggctccccaggccccacaggtgggtccaagagagacggggccggaggggtgcaggctgggacgcaggaaaaaggcccgccagcccgctggggctcagttcaggctcgggcccagtgagcaggggcaccaggtccatgatcttccaggttcagtccccacaggcccatgacccaggcggaggccagccgtcacaggtgcagctcgtgggttttgatgtgctcaagctgctctcggagctgtaggaaggagggccgcatggcggcgtccaggtgccagcagttcttcatgacttcatagactgcgggcgggcagccgtcgggggcatccatcttgtagcccttctccacccgagggacgacgtccttcaggggaattcttggataaggcactcgcccaaaggagtagatttcccagagaaggattccgaaactccacacgtcagacttagtggagaatttcttctctctcagggcctcaggggctgtccacttgactggcagcttgcccgtgtcctgggtgctggacgcctccttggtgagaccaaagtcgctgaccttggccacgttgtcctcagacaccagcacattgcgggcagccaggtctcgatgcacgaaattgttgccctcccaggtattccatggcctcgcagacatctagcgagaacttgaggagacagtctccgcccagcactgaccgacccctagaccgcaggtagtccacaaggctccccttggccatgtactcagtgacgatgtagagcccgcccttctcctccacgatcacgcccaggagctgcaccaggttgctatgccgcagttgcgtcatgactgaggcttcagccaggaaggcctggcgagaggaagcctcgtgcc

SEQ ID NO: 127904 - DNA, 955 bp, Homo Sapiens
  misc_feature (349)..(416): n is a, c, g, or t
tttttttcggtggaggaagcgccgaggcgggcggcggtgtcctcatggcgtggtttattacgattccatctcacaaggcgggtgggcgggtggcagcggcacacgaaatccaagcccctgacagacgtctgcctcgggcgcatgcaaacagtgcaacatggtcaagcgcaaacacggggcgaccgaggagacacgggacatgggacacagaatggggaatgaggctggggcgaggggtccctagagaggggcccggtcccccccaccctcacgggcaggacaggaaaaataagattcgtacttcttgtaaaatgcccatttgctgggtactttctttctccttatcttnnnnnnnnnnnnnnnnnnnnnnnnnnnnnnnnnnnnnnnnnnnnnnnnnnnnnnnnnnnnnnnnnnnnggcgagtggcgggaggccagggaagcccgacgtggtggggcgctgcctcccgctccgtggcctccttcctccctggcccctcagtgggctccccaggccccacaggtgggtccaagagagacggggccggaggggtgcaggctgggacgcaggaaaaaggcccgccagcccgctggggctcagttcaggctcgggcccagtgagcaggggcaccaggtccatgatcttccaggttcagtccccacaggcccatgaacccaggcggaggccacccgtcacaggtgcagcttcggggggttttgatgtggctcaagctgctcctcgagctggtaggaaaggagggccccatggcggcggtcaaggtgccagcagttcttcatgacttctaagactggggggcggcacccgtccggggccaatccttccttggaacccttcttccccccaggggaaaaacggtcctttaggggaaatctttggattaaggccctccccccaaagggatcacttttcccccaaaaaaagattccgcgaatccc

SEQ ID NO: 127905 - DNA, 1049 bp, Homo Sapiens
  misc_feature (733)..(733): n is a, c, g, or t
  misc_feature (778)..(778): n is a, c, g, or t
  misc_feature (877)..(877): n is a, c, g, or t
  misc_feature (910)..(910): n is a, c, g, or t
ctgtcttctttctttttgattgtaaatgttttaatagaaatacacaatctttcactttctcagacagcaataaaggggtttgtaacaatcactaagaatacagaattttgccacgaggatgcagcataatctactgcaaagctgatctgcccaattacacgtagtcagctgcaagaatatcagaaatcaatacaaacaagtattgacaggtgttacagacatgcaaaatatccttcaatgcaacgaatttttaagaaatcagctagcctatattaatcagatgttttaggtcaaaccaagtttccatcttgggctcagtgaaatagtattaactcattgagtctcctttcccccaggaatgttgggaatggcagaacagaaagagctatcactccttaaattcttttatgcaagtgttactccaacacttattttacttggtttacttggaatgtatgagaggaaactgatgttttttacaatggccaactgtatgtctaaattttcagttctcctttttgtgagtttcctgccagaaatccttgttaaaggatcagcgggtgttcaccccgaagttcttgctgttttcagtgtcctactgcagacaggtttaaaaagccaactgaacagcagcagaatgaagtatttttgaggtctattcaaaaatgtacagtcccaccactcactagaacaagtacacaagtaaatggactcagccagtgcaggagatggnaaggctgccttttttatgttttgtgcacagccttacagtttggangtgtgtttgggctactctaatatttctagtttgtcaaggctgtacactgtactgccagttgacctcatactgtgttcctttggatccctgcacactccntgcgattctgggctcgagggcaattcctaaaangaagcgtataaatcgtatcagtcaaactgttccgtgtgaaatgttatcgtcaaattccaccacatacaaccggacaaaatgtaagctggggtgctatgatgactaatcaataattggtggcgcacgcgcttcatcggaa

SEQ ID NO: 127906 - DNA, 805 bp, Homo Sapiens
  misc_feature (121)..(125): n is a, c, g, or t
  misc_feature (127)..(145): n is a, c, g, or t
  misc_feature (148)..(148): n is a, c, g, or t
gtctaggaaaaccaggctatggacccatgttcccccttaccctactgggggcccgcggcgcccaaaaggaaatggtcctagaaaggcttctcgaggggccggaggcggccgaccatgtttnnnnntnnnnnnnnnnnnnnnnnnntcnacttctctgagggatttattggttcctgtgaaatctgtgaaggccacaaacactccatagccagagaatgacaacatacgattttcttttcagtcttgtagtatccacagtagtgatgtctgtccatgtacaagtgtctgtccagaacacccattaaattccatgcctgctctgtgtgtcacggggaaagggacagagacagaagacagattcactggtggtactttcaaacaacgcggtaggccttccctttggggtctgccatgacaacgataccccaggtggcaatgctgaggccgatgaccatctgcgtaatggtccatggactcggggggtatcccatcttcatgggcttccgtgccacccagtacacgtacccgcccgcccccatcagccccaacccagaaagcacgcgacagctccagcaggtcttcaacaggcggtgttctgctggggaggtcggcgctccgggtgtagctgggggcgcaggtttggcgggcgcggcggcggtaccgggaggcgcagtgatataggactcaaaaggctgggacaaccgagaccccatgctctggaactcggcctcaaccttgggcgtctttggttcaaactggcgtaacgcctcgtgccgaattcaacacccagcctcgtacctagccg

SEQ ID NO: 127907 - DNA, 1209 bp, Homo Sapiens
  misc_feature (578)..(578): n is a, c, g, or t
ggactgaacgtttggccgatgttatgctccacttcatattggttctgccctggtggcatggctgtccattcttgatcaaccaggtgatgtcctcgcggtgttagtgtgccccttgcaaatctatggggtcttcgttcgggtggttgagcttactctgcccagtgcagtgttctctctcacattagctgtgacgtttcgaaaaggtgagggagttggaaatgccctgccaaggtatcgtgcaatgtcaatacccccgaaatgtttaccgacgtctaagatatggcagatgcccaacccgtgttaggtgtccagttgtgggacccatgatggagagaaattgaacggtactcgtgtgaatgatggaggtaaatagctaatttttcgcgttggttgtaccatagtgctggtatttacaaagtttttgcaaagttatcctactatatactgacatatttaggtttattagagataatatgacatgcaattatataagacatactattatgtttatatataatgcttaattaagcaattatatttagatataagttatactgttccttccccagataagacanagaacctgttttacttctctgagggatttattggttcctgtgaaatctgtgaaggccacaaacactccatagccagagaatgacaacatacgattttcttttcagtcttgtagtatccacagtagtgatgtctgtccatgtacaagtgtctgtccagaacacccattaaattccatgcctgctctgtgtgtcacggggaaagggacagagacagaagacagattcactggtggtactttcaaacaacgcggtaggccttccctttggggtctgccatgacaacgataccccaggtggcaatgctgaggccgatgaccatctgcgtaatggtccatggactcggggggtatcccatcttcatgggcttccgtgccacccagtacacgtacccgcccgcccccatcagccccaacccagaaagcacgcgacagctccagcaggtcttcaaaaggcggtgttctgctggggaggtcggcgctccgggtgtagctgggggcgcaggtttggcgggcgcggcggcggtaccgggaggcgcagtgatataggactcaaaaggctgggacaaccgagaccccatgctctggaactcggcctcaaccttgggcgtctttggttcaaactggcgtaaacg

SEQ ID NO: 127908 - DNA, 656 bp, Homo Sapiens
cattaacaactttcttttattaaaaatgtacataagtaaaaggaacatggtttaattgtgcaaagagtaagaaatacagatgagcaaataacacgtattaaagccacctacgatataccacccagaagtaaccaggctgttgaatttttagagactggggtgcaaacacattttttcactcccttgtgcatatatctgggagctctgccatatacagacacagacgcggtgtccacaggcgatgcctctgctgggaatgctgcaagcaggagtctatcctttcctggtactggctcgggggccctcctcagcgcccaggtcactctagcatccaggagtccaaaggcccggctgtgcaggctgcagaggtgatcttggtgtgttttcctccaataggctacaaactctggcacccatggctggtggctggcattcaactctccagcagccagggagtccattttcttgtttctctgctggccatcctcaggacttgcggcggggagtggggggcccagggtgtgctgccacctcgcccggcgcgggttgcggccccagggcccgcgctccaggctggcggccgctgcattctgcgcccctcgcctgaaacggcagctgcgccagtcctggccacgaccgccctcgtgccgaattct

SEQ ID NO: 127909 - DNA, 565 bp, Homo Sapiens
ctagcatactctgtcaaactacaggcagctgggacaagacaggacatggggctcacagacaggtattccacaacctgggccctgtcaaccctcccagaaatgcatgggccatgaacctcctgctgtgggaggggcagtgcagagaagtctcaataagcttctcttggccctctgggatctccaccatccacagtgtgtagggctgagctgcaggctgggtcttcaggtggtgtccctgcacatctgctttgcagcgtggcgtctatagagcaagagtgaacaggaaggggcctcgggcctcctgtagctctgctgggcagggacgctgcggggcctcagctgggcttccttggctaaagggcacagagtggcgtaggcttggtgtgttttcctccaataggctacaaactctggcacccatggctggtggctggcattcaactctccagcagccagggagtccattttcttgtttctctgctggccatcctcaggacttgcggcggggagtggggggcccagggtgtgctgccacctcgcccggcgcgggttgcggccccagggc

SEQ ID NO: 127910 - DNA, 777 bp, Homo Sapiens
  misc_feature (168)..(182): n is a, c, g, or t
aggtggaagatatttgagccgggagagaaagggggacccgggccttttcgggaagccagttttcggcgccgggggcaattcggagggagggggaaagttctcccggcacgggtgaacacggggctaatatttgggggcccgtggggggcgccgcccaagtgcggcgannnnnnnnnnnnnnncggagtacgagaaagggcaactgtacaggttttttttctcaggctccggggtgtgaaaggtaagttctagccctagattatgtattttttctcttgtcattaacaactttcttttattaaaaatgtacataagtaaaaggaacatggtttaattgtgcaaagagtaagaaatacagatgagcaaataacacgtattaaagccacctacgatataccacccagaagtaaccaggctgttgaatttttagagactggggtgcaaacacattttttcactcccttgtgcatatatctgggagctctgccatatacagacacagacgcggtgtccacaggcgatgcctctgctgggaatgctgcaagcaggagtctatcctttcctggtactggctcgggggccctcctcagcgcccaggtcactctagcatccaggagtccaaaggcccggctgtgcaggctgcagaggtgatctagagtagattaggaggtgcaaaaggcttggagataggctgaccaactgttccagtttgcttaggactgaggagtttcccaggatttgggactttcagtgccaaaactgggaaagtcccaggca

SEQ ID NO: 127911 - DNA, 1026 bp, Homo Sapiens
  misc_feature (882)..(916): n is a, c, g, or t
  misc_feature (920)..(971): n is a, c, g, or t
cagagctttgggggattttattgagagcagtttttgcgtaccaaaagggtgttgggcttgcatctgtcattggcaggtgtcactgctggtggtctctttactgccatcagttggtcggccaagactgcaacaaccacgatagccacaagcagcagtaaaatcaccatgatcatcccacaagaggctgactttctgtccaccatgtttacccgcctggtttcattgcgaagtttttcatctgtgttctccactaggttggcaaggtcgtcaattatctcattttgttcatccaattcattcccaatttcctgccccatttgtttttggcgacttatgatagaggaaagggcatcaaggcctgcatcctgttcttggataattttctgctgctgttgccggatttcatcaaaacccaagcctctggtctcctctggctcctcaaagagccaagggttgggtgctcctcgcttagcctcttcactcatcaggctggacctgattagatctggttcggcaccctcattcttaaaggatgccagaagtagtctctctcgagttacaagatcatccaagaggttctgtcttcggtccccttcaagctgtgttatctgatgtgttgacacagctcttagcaataagtccttcaaaagggcgatcttttccttcaggttctgcaacaaagctctgattgtcacggtaagctttggtgccttttcaccttttcgttcatattgatttcgttgttgaattttctcagcaatttcttgggcaatttgacaagtagaatcgtatgtggagaaccaggggtccggtgccatcctgcagactccccccggccgtaatggccgaattcccgggcatatgtccggtaccgtcgactgnnnnnnnnnnnnnnnnnnnnnnnnnnnnnnnnnnncggnnnnnnnnnnnnnnnnnnnnnnnnnnnnnnnnnnnnnnnnnnnnnnnnnnnntagcgccctataggagtataacgtgaacgcgatacgcaacgggttccgcgggggg

SEQ ID NO: 127912 - DNA, 645 bp, Homo Sapiens
ttttttttgagctttgggggaatttattgagagcaggttttgcgtaccaaaagggtgttgggcttgcatctgtcattgccaggtgtcactgctggtggtctctttactgccatcagttggtcggccagactgcaacaaccacgatagccacaagcagcagtaaaatcaccatgatcatcccacaagaggctgactttctgtccaccatgtttacccgcctggtttcattgcgaagtttttcatctgtgttctccactaggttggcaaggtcgtcaattatctcattttgttcatccaattcattcccaatttcctgccccatttgtttttggcgacttatgatagaggaaagggcatcaaggcctgcatcctgttcttggataattttctgctgctgttgccggatttcatcaaaacccaagcctctggtctcctctggctcaaaaaagagccaagggttgggtgctcctcgcttagcctcttcactcatcaggctggacctttggtgccttttcaccttttcgttcatattgatttcgttgttgaattttctcagcaatttcttgggcaatttgacaagtagaatcgtatgtggagaaccaggggtccggtgccatcctgcagactccgcccccccctcggccc

SEQ ID NO: 127913 - DNA, 988 bp, Homo Sapiens
  misc_feature (151)..(159): n is a, c, g, or t
  misc_feature (919)..(919): n is a, c, g, or t
ttttttttgacatgacaaaagcgtgcatttaatttgatgctttgcagagatacatgaccaaagttgtatgcatggcttgtcttttgggatggtcccagctgtttattttaaaagaaaaaaattaaaatagagccaacaaatgcaattaagnnnnnnnnngtcttgagacacaaggggacctacatgttctggtctaagaagcatgcaagtattacaaagcattccagatacagtatgacagaggaacagtgaacaagcattggaacgatgctctttctttcagaaacgggaagtctaacagttatgttttcacaatggtagtgattaaaccatctttatttttaaggaattttataggaagaattttagcaccatcattaaaggaaaaataataatacctttttagccctgcctatctccagtcttggaataataacagaagcatagcacctttcagtatctaaaatataaacaagaatagtaagtccatcccagcttctagagatgaggtagctcatgctaagaaatgttgggtcatttttcctatgaaagttcaaaggccaaatggtctaattccaatcatcacatttgattagagtcagctccacaactcagtttctagatctttttcttcattataggcttcaggatgatgagattgtacatgtggaagagtctcaatttagagtccttggacatatgtttgtaaagttctatatgtcaattattttgcattcaatatcttcttaaataagaaagtgtaaatgtattaaatggtatatactagtgtgacttctatcaatattgatagattgatcaagaggagaaagatatctttaaatttgaatgagaaagatgtctaaacttatagtcttttacaaaatttaagaagtcgaagtaaattcactttgttctccanaatgccactgaatatataccccggccgtaatggccgaattcccgggcatatgtccggtaccgtcgactg

SEQ ID NO: 127914 - DNA, 724 bp, Homo Sapiens
  misc_feature (175)..(191): n is a, c, g, or t
ttagagataaagaattcgctttattgtataaatgacaatttcaacaagggtacaaattagatataattatataaactgaatatttacatccaatttacatccatcattctattaatgagcactttaaatatataatacaattcagaatgataaagatatctacattaaggcatcnnnnnnnnnnnnnnnnngaaagcaaagacaggaagtctacttgcccactcagtaattaacaaagatttatgtaaaattcccacaaattgatctcagaatcagaatcagcattttctattagcaaaaactgtgaaatactagtaattgtgctttatataaagctgtttgaggcaatctgcataggaaatattatcaagattcataattgcacaaatctgaaaggccttacatgtcttatcacatgttacactgctgtcataactcacaaagaagtaattgtagtattttataaactgcttactgtctaggattgtaaattgtttagctaatccatataaactttccggctgcaaatcttcaatgtcgtaggtctgggtcaggatatactccagcttccagatggactctccctttagattcgcctctgtcagattcaagtaatactgcaacatatccttttttatctgaaagaaccataatgctgtctctgtgagtgtgtccataaaattgtcctgcaatgacatcactggtatttttgaaaaatatctat

SEQ ID NO: 127915 - DNA, 885 bp, Homo Sapiens
tttttttttgggcagcagaatcaggtttattggagggattgggggtaggatgagcacggcatggggcttgaggtgtgtggagggagctcagcaggcccagaagcccccttccaccggcaaagtggaacccgtggtcatgccacttcggtcactcagcagaaagaggatggcgttcaccacgtgctctacctcagcaaacttgccaagtgggattcggttcagcatagtcttggccttgtgggggtcactccaggtggcctggcccatggacgtcatcaccactgtggggtttactgcattcactcggatcttgtggggcccgagctctagggccatcaccttggtcagcatgtccagggcacccttggtggagcagtagacgctatggttagttactgcccgctgggagcactggctggagacattcacgatggcccctgggactccccgggctattaagcccactggccacaatctgcgacacctggatgaccagcacgcaggttcacctcaaaggatctgtcaaaggcctccttggtgacctccaggaagggctgcagcagggcgacagcggggttgttcaccagcaggttcacaggggcccacgctgcccagcgcccgcatcaggtggcacatcaccaagtcaacccatggtccaacgcaacacagggttcatatccccgggcactcgcggacaaggctgtcaagatccgcctgagtccggctcacagccaccacccgcgcgcccgtcgcgtgcagcgcactggaccgtgccgcgccactataccatttgcactgccaccaggtgaccagcacccgcggcccgcgaggacagctccacctcgtgccgaattaacacccagcctcgtacctagccctaacgtc

SEQ ID NO: 127916 - DNA, 957 bp, Homo Sapiens
ggttctttggcccgggggttcccaccacttgggcccccaaagccccccaggtaccctggtggccagcttagggaatagcacaatagtctggggcagcagaatcaggtttattggagggattgggggtaggatgagcacggcatggggcttgaggtgtgtggagggagctcagcaggcccagaagcccccttccaccggcaaagtggaacccgtggtcatgccacttcggtcactcagcagaaagaggatggcgttcaccacgtgctctacctcagcaaacttgccaagtgggattcggttcagcatagtcttggccttgtgggggtcactccaggtggcctggcccatggacgtcatcaccactgtggggtttactgcattcactcggatcttgtggggcccgagctctagggccatcaccttggtcagcatgtccagggcacccttggtggagcagtagacgctatggttagttactgcccgctgggagcactggctggagacattcacgatggcccctgggactccccgggctattaagcccctggccacaatctgcgacacctggatgaccgcacgcaggttcacctcaaaggatctgtcaaaggcctccttggtgacctccaggaagggctgcagcagggcgacagcggcgttgttcaccagcaggtccacggggcccacgctgcccagcgcccgctcggtggcctcccagtcacccaggtccacgcacacgggttctatccccgggcactcgcggacaaggctgtcaagatccgcctgagtccggctcacagccaccacccgcgcgcccgtcgcgtgcagcgcctggaccgtgccgcgccctatacctttgcctgccccggtgaccagcacccggcggccccgcgaggaacagctcccctcgtgccgaattcgccacccaggcctcgctaccaatacccgttatagttactg

SEQ ID NO: 127917 - DNA, 870 bp, Homo Sapiens
cggatttctgttcaccatatcttggcctttgtggttcacttccaggtgccttggccccatgggacgtcaatcaccactgtggtttttactgcattcactcggatcctactaccgtgacagcctggggttcatccagggcaagtggcgtgtcctagcttggggtaggtacccagtctctgctcaccttgtggggctcgagctctagggccatcaccttggtcagcatgtccaggcacccttgtggagcctacgaagagaacccaagctgcttgggctggggtcgctgatgagggcgagtctgggtctgggttgggctgagggcacagctggggcactcacagtagacgctatggttagttactgcccgctgggagcactggctggagacattcacgatggcccctgggactccccgggctattaagcccctggccacaatctggaatcgcagcgagaccgtgaggcagagctggcatcactcacgagaattcccgtccagcccacagggcagctcacctgtgacacctggatgaccgcacgcaggttcacctcaaaggatctgtcaaaggcctccttggtgacctccaggaagggctgcagcagggcgacagcggcgttgttcaccagcaggtccacggggcccacgctgcccagcgcccgctcggtggcctcccagtcacccaggtccacgcacacgggttctatccccgggcactcgcggacaaggctgtcaagatccgcctgagtccggctcacagccaccacccgcgcgcccgtcgcgtgcagcgcctggaccgtgccgcgccctatacctttgcctgccccggtgaccagcacccggcggcccgcgaggaacagctccatgtcggc

SEQ ID NO: 127918 - DNA, 1176 bp, Homo Sapiens
caaaaatgagtttcttaggattcaattgcccacagtacctaagccatccctgaggcttcgcaagggaaagaagtgactaatcataggctgatctttttctcacttttttcctcacataaaataagtttttttatgataaagtccttggagttgctgtgcctatttttcatgtgtagtatcttatttttatttctcagtctagtcaactctgctgaatgtgtatataaggtgtcattcatagaatttccacaggcttaaggcctaaccattgatggccaggggctttctagaactgaaacaacttcacagatttttgggggtcatgattacccatttttaagatttggttatatatgtgaataatcagtacaaaaagtaactgattttaatacaaaccaatgatatattttaaatgttattgtacagaatgtcacttaacttttaaatttttttctgcttgctgccagtataacatgcatacaatattttctccgtagtcacgatcatctttgatataacaaaacttattttaattctagcatctacagcttgtttagatgcaccgtctttatgaatgatgaaactgctaacagtagttcttaaagacactgtaggacgtgaaggaagagatagactcttggtccagctgcctttgtctttagtatataacagtgaagattctgcagaatatcagttcactgggacttattctacaaggctagatgaacagtgtagtgctattcccacccgtaccatgcatttcgagaagcactggagattactggaaagtatgaaagcacagtatgttgctgggaatggttttcgaaaagtgtcctgtgtgttaagctcaaatcttcgtcatgtgagagtatttgaaatggacatagatgatgaatgggagctcgatgagtcttcagatgaagaggaggaggccagtaataagcctgtaaaaataaaggaagaagtgttgtcggagtcagaggcagagaaccaacaagctggtgctgccgctttagctccagagatagtcattaaagtggaaaaacttgaccctgagctagactcctaatctagcttgccattattgtgtgtgtaattatggccaaaaggacataggagatggactaagatgtcttggaccacctttgtgtaacaaagaaataaacagtaaatttt

SEQ ID NO: 127919 - DNA, 1000 bp, Homo Sapiens
  misc_feature (686)..(686): n is a, c, g, or t
  misc_feature (698)..(698): n is a, c, g, or t
  misc_feature (724)..(724): n is a, c, g, or t
  misc_feature (727)..(727): n is a, c, g, or t
  misc_feature (733)..(733): n is a, c, g, or t
  misc_feature (737)..(738): n is a, c, g, or t
  misc_feature (785)..(785): n is a, c, g, or t
  misc_feature (821)..(821): n is a, c, g, or t
  misc_feature (863)..(863): n is a, c, g, or t
  misc_feature (877)..(877): n is a, c, g, or t
  misc_feature (940)..(940): n is a, c, g, or t
  misc_feature (944)..(944): n is a, c, g, or t
  misc_feature (946)..(946): n is a, c, g, or t
atgaaaaaataaaatttactgtttatttctttgttacacaaaggtggtccaagacatcttagtccatctcctatgtccttttggccataattacacacacaataatggcaagctagattaggagtctagctcagggtcaagtttttccactttaatgactatctctggagctaaagcggcagcaccagcttgttggttctctgcctctgactccgacaacacttcttcctttatttttacaggcttattactggcctcctcctcttcatctgaagactcatcgagctcccattcatcatctatgtccatttcaaatactctcacatgacgaagatttgagcttaacacacaggacacttttcgaaaaccattcccagcaacatactgtgctttcatactttccagtaatctccagtgcttctcaaaatgcatggtacgggtgggaatagcactacactgttcatctagccttgtagaataagtcccagtgaactgatattctgcagaatcttcactgttatatactaaagacaaaggcagctggaccaagagtctatctcttccttcacgtcctacagtgtctttaagaactactgttacagtttcatcatcataaaactgtgcatctaaacaactgtagatgcttcttctgactttttctgttgtggcatatgtaaagctcccanatttaatagcanttagtccattactcacagatcttcanganagaggnggannaaaagaactctgtggaacaactggatagtcataatctaaaggcttanagacatgatgtcaggtcagtcatgtactccttaganactgagacttgtttaatgctagatagataacaatttggttanatcaacagtcacanagacattggatagaataccaattattctttttggtacacgtggctcaacattttctcaatcangttnanacatttttagctacaatggcgtctaatatgattattttcagactctacttcatt

SEQ ID NO: 127920 - DNA, 1137 bp, Homo Sapiens
caccatgatctctacagtattttattttaaaaaccacttacattgaatcacttagctggtaaaaaactcttattacgatacatatacttatgttaagcagtttgttctttttcagctgggtatgatatcccaacggcttgtgactattaaacaaggtctatttatgacatcaaaaacaaaaaccagtaaacagctagcatcaaaaagtttattacaactgtttttaaagtcagctatgatcttgacaaatattacgggtaagtctgtagcaagtttctaatttctgagatacaaaagacaataaatacagattaaaattcagcctacaaacaagattctacatctaattactggtaccgtagcttagtttcaatatttcaaacatatgtataattcttaagatgctacaaaaactcatataataaagttattgttcactgacaaccaactaacagttcttcactgacaatatacaagtgtgcagtgccttcgagccttcaggtgagccccccaagggcctgctggtgccggggacaatcagagacagcgatgtgacggcactggtcctttctggcaggaggactggtttaggagcagctgctgaaaacactcaacaggacagagagctgatttcccaactgcccaataaatgatcctatttactagacaggattcttgtagaaaacaggattgtcgctgtatacttatctgagtgctacacgggacacctttgccccaacacagtatggcctgctgacgtagatgctttatttcatcacgctaaatgtcctctaatggtgaattcttcaatccttcattctcttctagagacattcttcatcgctttcaagctacattgtcattaaaataagtcttgtgaaatttttgccaaaaataatcgtattacttcttcttaacagagattaattcttcattgactaaaattctgtgtggaagtttcaggccaagctcctttgtcttggtttaattcttgggtacagtcccagcaagttacgtggaacatatccctccttatcattaaggcgcgcccaccaccattcgatttcatcttcgtcttccctgtggatgattgtcatgcagtctccttctttcatgggcagctcatcatcattctga

SEQ ID NO: 127921 - DNA, 717 bp, Homo Sapiens
aaaactaaaaacgtagatacttttttcctatacagtttcacaagacttaaatatgctgtaaacaacagggaggagactagagcctgtcacacctctggtttttatggtcacctgtcaaaatccttcctgaggtggcctcctgaggggagaggaactggagacagggacagggaagaggcctatcccatacatatgtcatggtctttcctctgcagaagtttctggaaatgacccaacttgggaaatgctcaggggttctgaaaagaggaagaacatttatttgcctaagtgagacaaagtctttacttccagggtttgccttgcaggtgaccactgctgagggagcgggggtttgagtggctggcggggccgccacctggcagattctgagcgcttcgggcaccaggcaccttggactctcttccggaggagttagcttggttcagtcggctaggatgatctgcaggcccttgctcctcttccagataatattctatcttttttaagtcttctggggtaaatctccatttattctcagctggtaggggtggccctttggggctggatcgtttccgggcagacccaggaggaagggcctgctggcaagatgctggcagggaaccagtaatcagtccttccgggaatttctgagctaagacttttagacctccggaaagcatgaagaggttttcaaatccacgctcgcacatggtggtg

SEQ ID NO: 127922 - DNA, 830 bp, Homo Sapiens
ttttcttcttttaaggtatttttattgctagtacaagattgcaggatctaggcaaataatataacaattaaatgtgcaaatctcatgaaggtaaactacctttctgttctgtaatatttacccaaatagtcaaggctcaaacttgttaaactgtggagttactaaagaaggggggattttccaaattgtagaaacaagagtagtcagattttcccatccctactagctttctaggttaaattcaatgatgtgaaaacaagcatagggtagagtccatatgatattcatacaggaagaatgtccactggggaagctctttcggccctcattcaccacgtccttatcccctgtacacatcaagtcagaatgggctagcccatcagggaagcagcggtagaagaaatctgggcgtggcctccctacgatcagttttattgtgttggtaaagacgccattcagagccagggcaaggctggcagccaggcaggcttgtctgctgtctcttgtgtctgccttcttgagaaatttggccaggaagatcagagacagtggagagagaaatgcaataacaaacatcggcttggtggggaaatactccgcctccacgtaggggttccggtagagccacatctcctccggctggatgagtctctggaacggggggagcagctccgtcaccaggaaggccgcgaacagcgcgagccgcacgcccacttcggccccaaaggccaccgccgccgccgccggacgcgtgggtcgacgatatcccgggaataccggaccggtaccagcctgctttttgtaaacctggtctataggtcaccatacgg

SEQ ID NO: 127923 - DNA, 995 bp, Homo Sapiens
  misc_feature (670)..(670): n is a, c, g, or t
  misc_feature (730)..(730): n is a, c, g, or t
  misc_feature (763)..(763): n is a, c, g, or t
  misc_feature (796)..(796): n is a, c, g, or t
  misc_feature (837)..(837): n is a, c, g, or t
  misc_feature (875)..(875): n is a, c, g, or t
  misc_feature (933)..(933): n is a, c, g, or t
ttttctatcaaattggcaaatattttatttcctaaagtgagaaatacacaagcatcacttgtattataagcgtacacttcattttaaagatcctgtttaaacaaaatgctccccagccatcaagagacgcacacagcggtcgtccacaccagcagggccgccagccatggggcctcaggttagcataagagccgagcctcagcctgatggatggcacctgcccgtcagcggtagccacacttagaaaaacactcaggtccagccccaggtgtgagtcctctaacaccaaagcacagactcatcaggtgtgaggacgcacatcaggtgtgaagaacacactggaaggttcccctttgaaggatctaaggaactcctctggagatttggaaactgccagcagtgagcactgtcacagcggctactggccttgctgctccgtgggaggaatgtggggtctctcctgtgtttcgctctcctaagcgaggcctcatctgctctgacaccacccacaggacctttagcgtgaaatgacttttctgacttatcttcaagatcgtctctgcccctggtcctggttcctgcttttgtcgggcttgagctaaaagcgtgtggtaacacaaaagccaaggttctgaagagcacagagctgggaagggcgcgccctccctgngtggcgcgggcagggcacgtacaggtgtgcagacactcggtccacgtggtggcgtcgatnaggtacccgctgcacaggcggcaggtgatgtgngcgttgatgtccacagcttgatcttcctggtcnacatcttggcttctcgctagacgtcgcgtgtccgtcctctngcgggcatggaggttcaggcagactccacgcgacgctnctcctggctcgcagcggatcgctctgcacctcttcgggcctggtcttttcatttctgncagacgctgggtcctgctaatgtgacctgcgtctgggctgcggcacaaggacgcggtcgccc

SEQ ID NO: 127924 - DNA, 1194 bp, Homo Sapiens
tttgtattataagcgtacacttcattttaaagatcctgtttaaacaaaatgctccccagccatcaagagacgcacacagcggtcgtccacaccagcagggccgccagccatggggcctcaggttagcataagagccgagcctcagcctgatggatggcacctgcccgtcagcggtagccacacttagaaaaacactcaggtccagccccaggtgtgagtcctctaacaccaaagcacagactcatcaggtgtgaggacgcacatcaggtgtgaagaacacactggaaggttcccctttgaaggatctaaggaactcctctggagatttggaaactgccagcagtgagcactgtcacagcggctactggccttgctgctccgtgggaggaatgtggggtctctcctgtgtttcgctctcctaagcgaggcctcatctgctctgacaccacccacaggacctttagcgtgaaatgacttttctgacttatcttcaagatcgtctctgcccctggtcctggttcctgcttttgtcgggcttgagaggtgtgcagacactcggtcaccgtggtggcgtcgatgaggttgccgctgcacaggcggcctggtgatgtgggcgttgatgtcccacagcttggatgttcctggtcgaacaatcttgggctttctggtcacagagacttcccaagtcggatgggtccccgttctcgctccctgcctgcggggctgtgaggttcgggagacctgatgcatactgaggacacgggagcctccgctagacgtccgcgtggtccgtcgctctgccggggcatggaggcttcaggccagcactcccacgcgacgctgcctcctggctccgcacgcggactcgcttctgcaccctgccgtccgggcctggctctgttgtggcccagtgtgtctgagcacgacgcctggggtccctgctacattgtgacgcctgcggtctcggggctgcgggcgagcaaggcgcacgcggggtaccgcgccggaggggggagggggcgccgctccctctgggtcccccccaagaggaggagaaaaaagcccgtccggagtttaaaacaaagaggcggaaatgcccgagccgagccgagcgccgcgtcgggggcgccgcgctcggagcatccccggccgtaatggccgaattcccgggcatatgtccggtaccgtcgactg

SEQ ID NO: 127925 - DNA, 2054 bp, Homo Sapiens
gtctgggcataagcccgaagccaccaccagcaaatcctccccacggatgccaggagagctctgatcctaaccaccaccaccgctcccttcagcaaaatcaaaacagggaaagaaaacataggaaaccaaacggcggcactcaacaatttgggggaacaagtaatttttaaaagtaagagttgttccgtaaaccagcactgagctggtcacacggcctctggtctacctgctgagcatgtcagaaatcccgacgtggcgtctggggccccgtttccagggctgggtgtgtcagccacaggtgagcgacagttctgagtgagtccaagtgccgacctcacacaatgaaaggcgaaccagtcagggagctgctgttgtgtttcataaggtgggaaattaaatacaatggttaaatcataatgttaatggaaacctcttttggtttgcttttaaattaattttttatataacttctaaatcttcaagaagctaaaggcaacataaatattgtcattcaccatgaaaagacattttttcaataacttaggaaggattcaataaaagtccaactacacttgaggcttatcatgaaacctaaaattcataaactaaactgaagtgaattcagattttcaagacctggaaagcaagcagagggagctcgtgtcagaaggtgactcagaaccgtgttgcctggagcatcactctccctgcaaggctgaagcacggggtggggcgggggagaggacgatcggctctgggagactgtgaagtgttttcatcctctgtaaacgtggtgctggtagtgtcttgttgagtgtgaattctctctcatacaaaagttataaatattctctattcagaagtctggtccacatgacacccagaggcaatgttcttaagcgcggcggccgggagcacccaagggtgcgagggcccagtctgtgggcgctgtgtggcaccattcacagcaagtccatcttgggtctgtagtgcagcaggagcggcgccttcttgaatctccacctagtgacaaccacgaacttgagtgtgtggtccttgcccaggatctcctcgttgcataaaatgtccagctcgttaaaggatgaaaggttgagttttttggcgatgaacttcttcagatgcaagacggtcgcctgggctgagcagcggatccacttccgcttcagcccgcgcagtttgctgctgttacactccaggcagatgctcacctgctcgtcgctgcggtggtagtcgttgtcgtcctccggcttctcctccgcggcctctttgtttgaactgtcgtctgctttggtttcaccattccgatgggaatctaagtgctgttttgcagagcaggtctcccccttgatgtctcccggcacctccatgcccaatttgtgatagaactccctctgctttctcatttccgcttcttggaggcctggtaccaatttgtaaacaatatcttgcatggttctgtcatgaccgatgtactgcagggggtggctctggtggatcacaatcctgcaggtggggcaggtgttgttctcctccaggtacttcaccaggcagctcctgcagaaggtgtgcagacactcggtcaccgtggtggcgtcgatgaggtacccgctgcacaggcggcaggtgatgtgggcgttgatgtcccacagcttgatcttcctggtcaacatctttggcttctccgctagacgtccgcgtgtccgtccctctgccggggcatggaggcttcaggccagcactcccacgcgacgctgcctcctggctccgcacgcggactcgcttctgcaccctccttccggcctggctctttttccattttctgagcacgacgcctggggtccctgctacattgtgacgcctgcggtctcggggctgcgggcgagcaaggcgcacgcggggtccgcgccggaggggggagggggcgccgctccctctgggtcccccccaagaggaggagaaaaaagcccgtccggagtttaaaacaaagaggcggaaatgcccgagccgagcacgagcgccgcgtcgggggcgcc

SEQ ID NO: 127926 - DNA, 893 bp, Homo Sapiens
  misc_feature (30)..(30): n is a, c, g, or t
  misc_feature (98)..(98): n is a, c, g, or t
  misc_feature (120)..(120): n is a, c, g, or t
tcactccaaacagtcatatcattcttagtnttttgtgttacagtcagaatcattagtttgccattagctacttctggaaacagtgattcaaaatcttntcgcagcaattctggacatgtntgtattgcacactctactctggcactttcaaagtaagtttctgcactgttaatttcttgttcaacaggtgcatcattaccctgaaattcattcacatattgtgccatcacaaactcatgtctttcacttgataaaggttctgctagaacatcaggcaaagttttatgaaccaggcttttcttctgtgaagcagtcccattgaggtgacaatcaaaacctatgttcccaggaagctggaacctctgatcttgaggtccaaagggtcccatagtttcatcaggccacactgttcgagagcatatatctggaggtgcagcagccagatgagactcatccgaacctgatgatcctgcagtcgaaaaggctttgggattgacaacccttttaactaaagagcaaaatcctgggagataggaaaccagtctggctctgttacaaagcacattggccatctccgctggagaagatagttcgcaaaatagctttcctttggtaaagttatttctgggaaagaacacaacaaaacagaggagtgatcgattaaactctaacaacagacaactgaggtaacgtccactcttcgaaggtgtgtcgtccaccacgtcaggaccaaagtccaagctctccccgtaccctaaggaggccagaactcgtccccatgccaggcacagatcccccagcccggagccggcagtgcagctcagagcccttccggtttacagccgcggaaaaacaactcggaccagatccgggaggggaatgggggcggccgc

SEQ ID NO: 127927 - DNA, 2035 bp, Homo Sapiens
  misc_feature (30)..(30): n is a, c, g, or t
  misc_feature (71)..(86): n is a, c, g, or t
  misc_feature (131)..(131): n is a, c, g, or t
  misc_feature (142)..(142): n is a, c, g, or t
ggtgggccacaaaatagcggggaagccggngaacaggaacggggtggagaaagggagagttgaccacgagnnnnnnnnnnnnnnnntggagggagacggaaaacgggggtctcaagtggctgacgccgcgnggtgcgcaaanacctcagggggaaaggacccgaaaagagcggtggggaaataatgaggcaggcctccccgtagtatcggtggtaaaggattccccccaggataacaaaaggggccgtgtccaaaaaggggttgcgccaatttcgaggggagattttgtggtttttccaagggaacacgtgcggtcgagggtttgaacggccggcaccgcgtgccgggattatgagtcaaaaggtgagggtgaaaggggaagtctccgaagggcgagtggggtgtcaataggggcccaagggattctcgccttaagaaagaaccaggggtattggggcatattgtgcggctgtaccctgggtaggggccccgcggcggcccaagcgaatgggtttgggaaaaggttgcttcgaagagtcggggcgggccggcagggggttaaggacggggcgctggggagggtggtccagtgtggtattgtaaccaaatgtgtgatttattttgggaagaaaataattaaaactgaggcctttttccaataaagaggagaaataacaatagcagatcataccctggttacaagctaattaccacatcctatacaatgtggatgtgttcaacgtgtattcaatgatatgaataaatgaacatttgcaattttaaaatcccaaatcacttgccaatgttgcaaattcataaatgctgaaataaatacttagaaataagtatattttaaaaactttagtctgacagtgtttatagatcaacccaaatattacatacaaatagtacagcaaatgaatggatatttctgctaatttccacttaatttcttcataatatggctgtctggtgttgcattagtgaagatactccctacaactacatgggtaccccagagactatgacgaatcactttacagcatccaaggtcatcaacagagaatcctaaatgtcggtagcgttcatcagtttcaaaaagagtgttgtttgtatatggtccaaaaaatgccaaaccagatgatgggtcaataaagtcagcccaataaccctcagctcgaagagcatagcaaatttccttagcaccattgatgaacttttctaagagcacttctctttcaatttctacttcttcactccaaacagtcatatcattcttagttttttgtgttacagtcagaatcattagtttgccattagctacttctggaaacagtgattcaaaatcttttcgcagcaattctggacatgtttgtattgcacactctactctggcactttcaaagtaagtttctgcactgttaatttcttgttcaacaggtgcatcattaccctgaaattcattcacatattgtgccatcacaaactcatgtctttcacttgataaaggttctgctagaacatcaggcaaagttttatgaaccaggcttttcttctgtgaagcagtcccattgaggtgacaatcaaaacctatgttcccaggaagctggaacctctgatcttgaggtccaaagggtcccatagtttcatcaggccacactgttcgagagcatatatctggaggtgcagcagccacatgagactcatccgaacctgatgatcctgcagtcgaaaaggctttgggattgacaacccttttaactaaagagcaaaatcctgggagataggaaaccagtctggctctgttacaaagcacattggccatctccgctggagaagatagttcgcaaaatagctttcctttggtaaagttatttcagtcaccaccactgtctccagctgtcccagaaccggactcttcctgccatcaaaatggcggcggcgacggcagcggtggtagcacctacgctggcggtgagcaggcccccggccgtaatggccgaattcccgggcatatgtccggtaccgtcgactg

SEQ ID NO: 127928 - DNA, 754 bp, Homo Sapiens
  misc_feature (644)..(678): n is a, c, g, or t
  misc_feature (706)..(706): n is a, c, g, or t
tcaaaatcttttcgcagcaattctggacatgtttgtattgcacactctactctggccactttcaaagtaagtttctgcactgttaatttcttgttcaacaggtgcatcattaccctgaaattcattcacatattgtgcccatcacatactcatgtctttcacttgataaaggttctgctagtacatcaggcaaagttttatgaaccaggcttttcttctgtgaagcagtcccattgaggtgaccatccaaacctatgttcccaggaagctggaacctctgatcttgaggtccaaagggtcccatagtttcatcaggccacactgttcgagagcatatatctggaggtgcagcagccacatgagactcatccgaacctgatgatcctgcagtcgaaaaggctttgggattgacaacccttttaactaaagagcaaaatcctgggagataggaaaccagtctggctctgttacaaagcacattggccatctccgctggagaagatagttcgcaaaatagctttcctttggtaaagttatttcagtcaccaccactgtctccagctgtcccagaaccggactcttcctgccatccccccggccgtaatggccgaattcccgggcatatgtccggtaccgtcgactgnnnnnnnnnnnnnnnnnnnnnnnnnnnnnnnnnnncgccgcttcctcgctcactactcgctgnctcgtcgttcggctgtaccgactagcgccctatatgagtctataatct

SEQ ID NO: 127929 - DNA, 728 bp, Homo Sapiens
tttgagaaaatctgtcacaaggcaaaattttattttttcaagttacaaaaataggagcatgtcaaaaatacagtctagtccttatacgagtagttccagccatttaaaagttatacagagtttggaaaaagcagtttatatacaagtcttaaaacacaacaatcatgaacaatgcacaccgttcaatgtagttattgctagttatatgcagcttttagttaccattgttcttctctgtaagggaaaggacagcatttggacattctgattgttgctgctgaagctgtggttttggaaaatcaatccaaaataagaataagctcactatgagtagaataaaacgtgtaagtttcaatcagtactacaagaaagcatggtttaaatttgagttccatacaattctacataactctattttgttactataacagaaatacagtgtatagttttgggcaagagtaaatgaattactggttttataattaagtgaaaagaaacagtttttgggttgcaatgtagaaacaaagctggcatatctagcttacaaacattaaaaaatggaaaagatatttaatgtttaagcaaaagctgaacctaggttatttacctttagaaattaagagataaagttaagcattttgttcttttgaggattatcatgaagatttgctattctctattttctttttaaaagaagagtatcacatagcgggacatattttgaacag

SEQ ID NO: 127930 - DNA, 2638 bp, Homo Sapiens
  misc_feature (1637)..(1645): n is a, c, g, or t
  misc_feature (1749)..(1791): n is a, c, g, or t
tgggattcgccagatgccccaggaagggtttatttaattcattccaacaaatgatcctataatgcatttatgcatttaaaagcacagagacacaagtcctcatatatgaagttgttatggttacagaaagaaaataaatatttgtgcacacagagatagcatgaaatcattctacagtgaaaataatagcctctggaaaaagctttgaaaatcagagatggtgccaccaccagacaacacaagtgctggggtacagggcagccctccatgcatctcatagcatttgcatggtttgtgagccccatttaatgacataaaatgagggcactgagggaggaaaagtgaacagacacacaacccgagagcacattgttatttgtttattttgtacaagtgatgtcataagcaaggattttgcctgtgttctagattatctccaataaataaataactatgtacaaatattttgagtttacaaaatagaagaggaaaacctttgtcttacaaaagttacatttctatgatacatttatttccatacactgaagcaggatttcattcctagcttagctgaaccaaagaccttgcagaccctgtgtggcagtgtctagagctgtgtacctagccttttctaccaaagagcaaagctacacaaagaaaattcctcagtttcttgaaaataagggcctgacttggcctgctacttataactgatctatatttcatgtattccagaaaattggaagcagtctggaatggttgtcctcaaattactgagcagacacaccccctgcagatcttgttaaatatagattctcatgaactggatggggtggagcctaggattctgcatttctaaccagctcccatgggcagggcagcttccaattcttgttcaggggccacattccaaaaggcctctctgaaatggtagaaattctctgaggacctgattaaggctaggccctaattgggcatcctccaggatccattcccaagctcccaattccacaagaccagtagagctggttttattttggtctaccagtgacaaggaacagtgacagtcaattgctaattggcatgaatcatgcagtttgaagctttcttgaactgtctcctgggaggtgtttgtctcttctctcaatctagagcaaccttctgaacattttcaacactgtcaaaaataagtaataataacaaaaaaggaaattgcataagaagattagcaacaattaccatttttcagtacaaatcaaaacagcaacaaaattcaggctcactgtttaaaagtaaagataaatacctctttgggtgtaatttctatgacagtccagcaacatcaatttaataccttttacatctcaacctttgtttaaaattattttgctctgggaatctgaaatttcaggataaattagcaaatctggtgaaaaagcaaatggccatttttatttttagtgtttttgtttctgtttcatgtaggggttctgtctgagcagacagctaagagcaaaagaagtagggtcaggcacaggtagggtgactcaggtgagttggcccagttcctgggaggagaaaactaggaagaatggggaataagtggggcttgcttcataaatgtgagagggctaggnnnnnnnnnttcaccaagatagtttacctgtcacatgacaagtgggagtttgtagagagagagagaccggagagctgtgcaaagtggatactggagacatacaggtaagaacnnnnnnnnnnnnnnnnnnnnnnnnnnnnnnnnnnnnnnnnnnnttttagtcatccctagcccacgaggtcaaggtctgcccagaaggctgccgaccaataacgctcaccctcctgcgcccggtagtgaggacctgggacaaatcgcagtctgtgtcttcgttacaaaattgccatcattgcccagtggtccagtgacgtcacggaagaggccgaggctcattctcctccctctaatcaccccctcgccagttagccatggaatagaagatcacacgcttggggggttcggggagggtcttctccagctgtaatgccagctaaggtgctttggtagcaaagctggggttgaggaggcacaggctcctggacggagccaggctcctggacggaggccgctcagagtctctgcggcgtccgctcggtccgcacgtgctgcagcactacctccttggaaggggccgcgcacttgtactccatcttggccctggcggcgccctgcttcttgcgcaggtggcagaggagcagccaaaagcgccaccaccaggcacaggctcgcgatggagatgcctatgagcaagcccgaatgcacgagccccacggccggaggagtcaaggtggagccgggcgtcgggctgggcgggggctcgccagagccgctgtcgccaccgtccaccttgccggagtcacagtcggtgccaatgtggcgggcaagggccgagtcgggcccgcagatgcactcgaaggtaccggggaggttgtggcacaccccggagcagaagccgccgttttcgcactcgtcgatgtccgtgcagatgaaaccgtcgtccaggatgtagcctcccggccgtaatggccgaattcccgggcatatgtccggtaccgtcgactg

SEQ ID NO: 127931 - DNA, 957 bp, Homo Sapiens
  misc_feature (543)..(579): n is a, c, g, or t
  misc_feature (920)..(920): n is a, c, g, or t
  misc_feature (945)..(945): n is a, c, g, or t
gtatatggtactcatccatgtttctgtttatatataggataacaaattcaggaacaatgggaaagtaatatatgaaaccttaataggaaatacaatagagattacaaaacaccaccatttgattttttatgcaaatacttcaatattccaatatttttactcacttgctaaataaagcacatgactcgaaatgctaaataattctgttagtctaaatcttttaaagaataaaatgttggtgaaaaaccaaaattgtttagtaaggtatgtatgaccttgtttattatctatcatagacatcaagatgatcatagttaataccaatttaagctttacagaatactgttttaggcccaatattgatatattaaatgaaggtatcagagaatcttgtatttatggcatcaggttataaagatctattcaaaaccatttttgtcaaagtttaaacactggaacaaaagtcaaattgtttctaaatgagacacaaaatgattcttgctaatagtacaaattttgtcccatgggtaatactattgtctnnnnnnnnnnnnnnnnnnnnnnnnnnnnnnnnnnnnnagattcaggaaacacatgggcaggtttgttagctgagtatactgtgtgatgttgaggtttggggtacgtatgatcctgtcacccaggtagtgagcacagtccccagtaggtaagtttttcagctcttgctcccgctccccaccctacctcgccagtgtctattattcccatgggtactcaggtattactattttcaagtttttttttttacatgagactactgaaagcaaaagtatgtcatgcttataggttactctgtacatttatcattctattaataaacatcttaagtaattaagtagtatattaaggccataaaccaagtcattatcttctatcanaggactactgttattcaatcatctnagaaatcatttt

SEQ ID NO: 127932 - DNA, 1427 bp, Homo Sapiens
  misc_feature (1048)..(1048): n is a, c, g, or t
  misc_feature (1051)..(1051): n is a, c, g, or t
  misc_feature (1111)..(1111): n is a, c, g, or t
  misc_feature (1196)..(1196): n is a, c, g, or t
  misc_feature (1242)..(1242): n is a, c, g, or t
  misc_feature (1259)..(1259): n is a, c, g, or t
gtaaataaaatttattagaatgcaatcacaccccttcatttactcatcatttatggttactgttggtctaccacggcaaagttgcaaagttcaaacagaggcattgtggcctgtaaatcactaaaagtattcactaactggctctttatggaaaaatgttggtgacccctgctccagggtagtgtttctcaaactataatgtgcatacagattttccagagagattgttaaaatggagattctggttcatgggtgatgccaataccactggtccaaggactgcgtggggtagcctggaagaagagcacctaggatagtgttgtgtaacaaggtcagggcccttgtggtttgtttctcttggtctctacatgatcatttatgattcagcagctctcaaatcctgggccagacacagttgaagagtaaatcattttattaagaaacctgggcccacattccttcagctcagcctcaccttaggcacacctctccaagttccctagaggaattctacagaattgtgagtgctcatggtttcttaccgttctaagtgtctgtggtgacccttcacccacctgtccctctaggcagcctccaagcccagcttttttattttctcggtggctctgcaggatgctaaatctggagaagcaaggctactccagccagaacccacttggatgggttttccttagtcttcaggttgaaagtccacacgtaggtgggtccccgctgactagtcttgtacacaggacaggaatagacactgcggcagtcctgcttatctgcaggaatggccttgatgaacatcacaggcatagggggtgtcagatccttcagctttgcctctgtaatgatcccagcctgtgtgtcccagcaggcaccttccatgaagaggccatggatgtaggccccttcccgaggaggactcctaaactcttctctgttcttcttcgtcatgtcacattgcagggccatctggtccagtggccactcattcttgcgagccgtggactgcatgatggcagtcaggaacgactgggggttngangaagcctgtcagccacacagtggagggcattgtaaagtcacccgtccaagcctctagctncttgattctgttgaggaggtctggaaacaggctgcaggctgctgtggagggtaggtcgtctagccacgactctggacatatcgantacaggcattctgtagtctcatgtggctggcatatcagtccccttnagcgagtccactcctcnaaggtgactctcttggaggaatcatcggcaactctggaagcactcatgtaggggcgtctcacttggcacactctggagtaaccgtcgtcacgccatatctcaaatgctgctttctcctgtgggcgctctcctgctgttcccagtgatcaacagggagatttttgttgg

SEQ ID NO: 127933 - DNA, 1006 bp, Homo Sapiens
  misc_feature (900)..(900): n is a, c, g, or t
  misc_feature (904)..(904): n is a, c, g, or t
ttttcaaattactagaattttattagccaagggatagcagctggaggagaaataacaaaaaaatacatcttaagaatccttaagtacagtgcatatttacaatttaagtgtcatattttagaaggccactgtccatcagctcagtaaatgtaccagcttctaaagccatgatgccataggtccatttgttgatgaaattcctacccactgtcctcgggcatctgactctggtctctgcactggcatcaagagaacgctgctcggtggtttaaggctaacaccttacagggtaacactgtaacactggccctggagccaggtgcttttctccatgaaaacttccaccttggtagctcagccgacatagacaacacacaaagcgcagctctgcacttctgtccttatcttcacacagtgacatccacaccaggtggccaaacagaagagaaggcagaggcccaccaagagctgatgctgcgcagtccttgggggatcatcctccggtctcactggggacgaacccaggttctggagcctctcccctgacagacagcttgtcaccggcacttatgggtcctctgggatttcagacaatacccaacttctgtaggttcagaaagtgctttcaagcaggcagtggcaccacacccggtgggacacacctcctgggtccgaaacactccatcatgtggctggtgtggcaccgtgccacaggtcaggcagaattgggcgatccccgcacagcacgtgacagatggacactggaacgtgaagctttgcagatggccactgcgtgcacggactcactccgggagtggtgcagtacacgccgactcgatcctttgtgagggtcaggaggacggggacaacttcacactcagtcgctctctctaaacccanggtngaggatccccaagcatcttaagctcaatgctggtatggggggtcagagctttattttatagctgccgtttcctagggatacggggtagacccagcgggttcg

SEQ ID NO: 127934 - DNA, 1293 bp, Homo Sapiens
  misc_feature (185)..(185): n is a, c, g, or t
ttggccccgggaacacaagggctttttcttccatgaaaaccttccccctttgggtagctcagccggccatgggccacccacccaaaggcgcagcttctgcacttctgtccttatttttccacccagtgccatcccaccaccagggtggccaaacagaagagaagggcagaggcccaccaagagcntgatgctgcgcagtccttgggggatcatcctccggtctcactggggacgaacccaggttctggagcctctcccctgacagacagcttgtcaccggcacttatgggtcctctgggatttcagacaatacccaacttctgtaggttcagaaagtgctttcaagcaggcagtggcacccacacccggtgggacacacctcctgggtccgaaaccactccatcatgtggctggtgtggccaccgtgcccacaggtcaggcagaaattggacgatccccgcacagccacgtgacagatggcacactggaacgtgaagcctttgcagatggcacactgcgtgccacggacctcactccggcagtggctgcagtacacgccgaactcgatccctttgtgagggtcaggaggacaggagacaaacttcaacacttcagctcgcttctctctcagaccccaacggtagaggatttccccatagcatttcttaaagtcatcaaattgctgggtattggcggggtccaggagccttttatttttatcatgctggtcgcgttctcgctcacggggatcactgtaggtcagactcccaaagcggagctcttctggtgaggattctccccaaggggaggacaagtgctctgcctctcttcccgctatgttccagccgccagtgttgagccctgggtctgacatactggagcaggaaccagaagaggtaaagctaggctggacaagatcctttcttccaacgagcaaggcagaggcggcattcttctgacatgtttcctgaatatcattcacattcaatatgtacagctctcccagcgatttgtgaacaggcaggaggcaagcatatcctggatgatgactttcccagcagccttgatctgtcgattgccagagtctgatccctcacgcttacttttccatcgtcttgatttccgctccttgtagtagaaggagctgatggagacctgctctttctcgctgcgagtggggctcccactgtataaacgaaggttcccaggggcctctgcgacgcgtgggtcgacgatatcccgggatatccggccggtaccagcctggcttttttgtaccactgttctatagcc

SEQ ID NO: 127935 - DNA, 991 bp, Homo Sapiens
  misc_feature (821)..(825): n is a, c, g, or t
  misc_feature (828)..(830): n is a, c, g, or t
ccacgagttttccggtgatacgggctgcacgatctctctgcatgaaacagagccccttcataagttttcatctttatttttaaggttatactcctctgaataacccttgagcctcatcacgaaaggtttgtttatagtatttttactatagcttcatccttgataacgtcctaatttccttctggacaacctccttgaccaatggcatattgagatctatgtgacatgaggatatttctcagtaccactttgttactggtacctgatgcacacggattgcgaccagagcatgatgcctccatcaagtggtaatatgtttgcagcctgctgtccagccaagagtgacagatacttctagtgacttccccggtgtccactctcatcttcttcccatatcaagagaatccaggttctgtcagattagtaaagtgtgctgatacttttaaaaaatctcttacaggttttcttgcagctggtaccatccatgtctcacagccctggccactgacagatcagcagatgtcaccacatgggcttctgagaaagctcttgaatggggatcgttcttaaacatgaattcctccctgtatgttttgttctttgctttacttttcaccttgcaaagagatccagtacctagtattggaagatccaccttaacgaccgtgcatatgaaaaccacagtctaaggaagtgactgcagaaagctcacagcgaccctggcctcccctgtggcctctttgagtgtctgcagcagccctggacttccagacttctatcacatgagaaaaaataaaactgattattggtttagccccccnnnnnccnnngaaaacgaaaaaacaccttggcggcccccctcggcccctcaaaaagttttctaaaaccattcgctttggccgggggggccccagtaagtcaaatggacatgtgggcccagccgtgctcccctaaaaccaccgcggggcctagggaccagggccctgggaat

SEQ ID NO: 127936 - DNA, 126 bp, Homo Sapiens
tttttgcctttttgtctgtctttatttacagcaaagtacataatatgtggtcactttgtaaccactaacaataaaggtagggtggtaaaaagaaaagggagaggagcaagcatcttaaaagggggg

SEQ ID NO: 127937 - DNA, 809 bp, Homo Sapiens
  misc_feature (712)..(712): n is a, c, g, or t
  misc_feature (727)..(727): n is a, c, g, or t
  misc_feature (796)..(796): n is a, c, g, or t
ttttagggcagaacagttttaagctgaacttttatttcctctcttttgaaatattctgattcaggttttgactgtggagaaaagagtaacaagaatgtcagcagaggcatttcgtatcctaattttaacatgatacttaaaattctacctacatttgttaaatgctattatttcgtatgtaaatcataatgcacatttattgagagctacattttaagtacaagtttgtatttatttaatcttatgtaccctatgaggaaggtattggtatcatcctctgttttacaggtggggagactatagcatagcagcatttagataacttgcctaaagtcccacagctcacaaatggggaggaaagatttgaacttggtgccagagcatatgtttaaccctggcaataagtgtctaagcatgctggtctccccagtaagcagcaagctgcccaagatatcagacttcttttctttataaaactacttaaatgatgctgcttgcaatggcactcaaagttgctgaccaacccccaaaagaagaataatgctgacataaaaggctatgaattaaagaggtaccttgtgaagaacagagattttacagtatcatcttacttattatttgtaacaaaaatggaaaacttacagtaatgacctgcattgagaatttgatatgaatcatcaacatagttatgttgatatgtatatactatgtntgatgatcatgtcanactcatattatataactcatgatatcaacatatatattgattcgtatcataacatgagttagatatganatgagacatagat

SEQ ID NO: 127938 - DNA, 1050 bp, Homo Sapiens
ggtggatagttaacttgttttatcagcttgtttagacaggtcttcacgtgctgttcctgctttgctttctttggttatcgttctttacttgttcgcgggataagtcccgccatccgctattttgactaattagagggttccacttttgccggcattcgcaactcgtctcaggtgattccacccacgtggcctcccgatagtacaggattacagttggaccacagcgcggcctcagtgtaatatctttgaagaggaggtacaatggtgaatcaataggttcatctttaatctttaacacgtacatgcagatccatagtatccttgtagtgttgtaaatacttttgcttttgaaaactttttcattgtcctaaatcaccctgactctgaccagtctttcagttctccaaaagcccaatttaattgtatagttttgtcatggcttcatataataaagagcctattttaagttgaaagtagtagtcagaaaattgttaatttcctaaagctcaggaaactagggtgtcactttttttgcactgcagcatatacactaactagcttattaaaatttacaaaatgtctttttgaatgtatcaaggatatatttagtttgagtggaatttgtcagcagatatcagtaacttattgccgcttatattgtacaatgttaaacttcaattcctgtaacctggttagtattaatgtcagtgactaaaaaacttagagttagttttagggcactttttattttgagagcatgaagtgtggaatgtgtcactacgattgttgataaagctgaggccacttgcaacttgattttttaaatgaaatagataaagtctttttgaataatatagtatgcactgctatttgcttgattatgtaatgtcaaaagtttaactatattccaagtacaaaaacatactggattacattgaggatgttgaatagcattcatgatggctttgttttggtttggggcagctgtcaccagctaaagcaatgttgttaaaattagctcaataaaaatgtctttaaaatgtaaaaaaa

SEQ ID NO: 127939 - DNA, 769 bp, Homo Sapiens
  misc_feature (47)..(47): n is a, c, g, or t
cgctgctcctccaggcacgtcccggacctgtgggccccagagagggnacatttccctcctgggagagaaggagatcagggcaactcggagagggctgcgagcatttccctcccgggagaggagatcagggcgacctgcacgcactgcgtagagcctggaagggaagtgagaaaccagccgaccggccctgcccctcttcccgggatcacttaatgaaccacgtgttttgacatcatgtaaacctaagcacgtagagatgattcggatttgacaaaataacatttgagtatccgattcgccatcaccccctaccccagaaataggacaattcacttcattgaccaggatgatcacatggaaggcggcgcagaggcagctgtgtgggctgcagatttcctgtgtggggttcagcgtagaaaacgcacctccatcccgcccttcccacagcattcctccatcttagatagatggtactctccaaaggccctaccagagggaacacggcctactgagcggacagaatgatgccaaaatattgcttatgtctctacatggtattgtaatgaatatctgctttaatatagctatcatttcttttccaaaattacttctctctatctggaatttaattaatcgaaatgaatttatctgaatataggaagcatatgcctacttgtaatttctaactccttatgtttgaagagaaacctccggtgtgagatatacaaatatatttaattgtgtcatattaaacttctgatttcacaaa

SEQ ID NO: 127940 - DNA, 633 bp, Homo Sapiens
  misc_feature (136)..(251): n is a, c, g, or t
gggggggagtccaacccctgtcttggcccggtgttccttgggaaccggttcgtgcccagtttcctttcctttgggggccccgggcccaaaaaaaggttttaaaaaattttttaggggcgggggggcggcccaaaannnnnnnnnnnnnnnnnnnnnnnnnnnnnnnnnnnnnnnnnnnnnnnnnnnnnnnnnnnnnnnnnnnnnnnnnnnnnnnnnnnnnnnnnnnnnnnnnnnnnnnnnnnnnnnnnnnntaggtcaaggtgagtttattgtccaaatagcataacctaattgcattcaaaaccattttcaaatccatctttaaactagtcagaaaacaggttattatttttttaaatcacttaacactgaacagataagacctcttaaaaggcagctgactatatcatgtcaccatcatagccaatacaacatttttgccatacttcctaaaaaccttttcgcatacactgatcatgctacttatcagcactttctaacatcctgaccaaacagacacccacacctcttatagagtacactgtgagagaataacatggacttgatatggcatcacacttgttttaaagcaaaattaatttgaaaaagaaatgaaaataaatagtccaggac

SEQ ID NO: 127941 - DNA, 673 bp, Homo Sapiens
tcggcacgaggataaccactaggggacacataggcactctccatgccctgggtaacgctggagaggagggacgctgtctcttcttgttctggtgtcatcgccttgattgctctttcctgatctttggttaacataaaacccacttggcatctggagtgacccaagggatgcagtatcaaagttctcagacactgaatctgctcctaccagtggtccaaaatctgactcgtccaggtttccagcagattttgctttgtagttatagcctaaagctttggattgcaatgagcccgaggttcccaagctgtctgtagactgtgctctcctgagtccatctttaaacatgtcattgtccgatttactgaaaggatctccagatggcaacagcaagcctgcatctaaggaatgaactgagccacgggtgctgtctaaatgctcctgaaatgtgaaaatacatatggccaagttagacaattctctgcgtttttaaagacaaaaactataataaatgtattccgccactcattacacatgataatcattaatgtgctaccttcacagactcattgaacaaacactaagtgtcatttctacatgctggacacaaaaccaggccctcaggatacaactgtgagcaagatataatccctgacctcgagatacatacggcttc

SEQ ID NO: 127942 - DNA, 1572 bp, Homo Sapiens
ggctccgattcggtctctgcttcttcgtcctcgattatttttatggctgtctatgatgaggttctgttctttgtcgctcgcattctgcttgtttacctccctctgttttggtgtgttcgctgtgtatgcagccgctgttctcgtgtcttattttgtttaatccacttttgtattctctcccgtgcgtctcactcccttttgttcttatctccttctgtctgggaagcccctcgtgttctctgacggtagaattttagggtcctggttttatggaccgttcagtatttctggtactctgattttttccctgcttttctctatgaagtcttcccagttccctgcttacctttcatgtcgtctctaactggtcaattaccttccttagcattcagcgtaattttttcacctggtctctcgtttcagccctcctgaatctgaattccctgtaactgtttttcgtaattggaacacatatcaccaacgtctaccaagtttatttccagcattatgtacctctttctgcaagagattccattctgtttcactaactaaacgataaccactaggggacacataggcactctccatgccctgggtaacgctggagtaggagggacgctgtctcttcttgttctggtgtcatcgccttgattgctctttcctgatctttggttaacataaacccacttggcatctggagtgacccaagggatgcagtatcaaagttctcagacactgaatctgctcctaccagtggtccaaaatctgactcgtccaggtttccagcagattttgctttgtagttatagcctaaagctttggattgcaatgagcccgaggttcccaagctgtctgtagactgtgctctcctgagtccatctttaaacatgtcattgtccgatttactgaaaggatctccagatggcaacagcaagcctgcatctaaggaatgaactgagccacgggtgctgtctaaatgctcctcttcatttgataactgggctgaagattcttcttgagttaaagcacacactactggtatttttatttcttcctcaacatctgcttttttgtgatcctttctcttattgagtctttgttgttcatcatcctcctgatctttcttcttcagttcttcaacttgtcggagctgttctgaagttagcacaatctccattcgctgcatgtctctcatcagtaaacgctgagattccagaaactggtcattggccttctgccacgtatgttttaactggttgtgttgttgtcgctcttgctccaagagatggcaaacttcatgcaattctttccgcagtttctcagcatcttcctgtagaacagatttctgagtattcaaaacagctacatacatctctagatcagtcctacaagatttctcagcttccagataatgattcagttctttaacctttgaggcctccagctctttaattttgtcttcagcctctgtcagtttatccttcaaagctgcaatttccttttccattggcatcacaacggaccgaagtttctcagcatcctcttgggcctttttcatttcattcctcgttc

SEQ ID NO: 127943 - DNA, 1306 bp, Homo Sapiens
  misc_feature (1229)..(1263): n is a, c, g, or t
taggtactcaatcaacatttattggaagaataatgaattaacagaagctatcttctgccctctcagggatttgcaggaagcacccaacagcccctgcattactgagatctggggtgccaccaatggctttgggcataatgcccctcctccataaggtccctacctgattcagcgagtttgtatacagcctcactggcctgctccacagcgttgggcatgtaggggaccagcgatccctggggcaaacgggcagtcaggtaggccaagcattcctccaggggtccttcttcctctgagtctagagtcagcttcacctgatagtagttgctgccccagtcagggtaggaacccaggccaagcctacgtccaaagtgggcctgggcctcagccagaatgggggcgatggaggcttcatcagcagccacatatagctcctttgagtggaactgaacagctgggttttggaatagtcccttcatcccctccagcacccgccgcagcagctctggaatgcctgggaagaggtagacgtttcggacggagaccagagggaatctgaaaggttgaccagtgcaaggatctgtgccataatgcaggcgggcagaggagggcaccaatgatagcttctcccagccttcccctcctagggctttggtggctgcttccaacttggggtgtggcttcagctcatctccaaaggcctgtgccactgcctcaaaggtcacatcatcatgagtggggccgatgccccctgctgtgaggacatgggtgaagcggttggagaaagaagtgacctcagctgcaatggtggctacctcatcaggtacaactgagactcggcaaacctggacccctagggagcgcagtgtccggcacagaaagaaggtgttggtgtcctgagtgtgtcccttaaggatctcatctccaacaatgatgatgccagccgtcacgctgcgccccggagaaagttcagaggccctagatgtcatggtcctgccttctctgcccctctgcaaggccctccagtagccacccagacccccaaataggggtcgcaagcacggggggcctgccaggtctacagggcactgggggccatagcctgggaacagggggtcctgggtcgagggaacctgcctgttctgccccttcaccggctctttcccttgttcctttcccccggccgtaatggccgaattcccgggcatatgtccggtaccgtcgactgnnnnnnnnnnnnnnnnnnnnnnnnnnnnnnnnnnncgccgcttcctcgctcatacactccgctgcgctcggtcagtat

SEQ ID NO: 127944 - DNA, 539 bp, Homo Sapiens
ttttttcacagtgagaggcacggtttattgccaggttataccctaggacggtgtccttccctccctcctagggtgggaggtcatgtgcgggagttccgctcctcttcttcgttctccagtagataggctggacggtatgtggggtgtcctcctgggctcaggcacttcagggccgggttccgcacggtattctcccgactccccagtgatgtgtatcctcggtcatacaggatacagtatgggacaaacagctgacgcagaaaatcccagatgtctctgtaggtccagtccagcagtgggttgatgcgcatgaatgcgggccagcctgggtcagtggggctgaaagggcagaggctacaggagtaggggtcagtccggcgggtgcccataaggacagcctccagctgggggtgccgtgcctgcagttcacccagggcctgcttcatgctgccctcagcttccaacatctgcagattatacctcttgatagtgtcctgtagaaactgttcagctcaggaaaagggagatgctgcggatat

SEQ ID NO: 127945 - DNA, 1388 bp, Homo Sapiens
ggccgtcccaaagggggtcccttttccttcctgtcggggggttctaggagtccaagctttccgccgtgtatagttagtgtgccggcccccagtccagggttggggaacccaaggccccaggctttcgttccaaaagtggggctggggccttcagcccagaatggggggcgatggagggtttcatcggcagcccacatatagttcctttgagttggaactgaacagctgggtttttggaatagtcccttcatccccctccagcaccccgcggcagcagctcttggaatgcctgggaagaggtagacgtttcggacggaagaccagagggaatctgaaaggttgaccagtgcaaggatctgtgccataatgcaggcgggcagaggagggcaccaatgatagcttctcccagccttcccctcctagggctttggtggctgcttccaacttggggtgtggcttcagctcatctccaaaggcctgtgccactgcctcaaaggtcacatcatcatgagtggggccgatgccccctgctgtgaggacatgggtgaagcggttggagaaagaagtgacctcagctgcaatggtggctacctcatcaggtacaactgagactcggcaaacctggacccctagggagcgcagtgtccggcacagaaagaaggtgttggtgtcctgagtgtgtcccttaaggatctcatctccaacaatgatgatgccagccgtcacgctgcgccccggagaaagttcagaggccctagatgtcatggtcctgccttctctgcccctctgcaaggccctccagtagccacccagacccccaaataggggtcgcaagcacggggggcctgccaggtctacagggcactgggggccatagcctgggaacagggggtcctgggtcgagggaacctggagaagccagaaaagacaatgggggagagcaggcgtgcgcgtgcttccttcgaggaagaccctagtcttctctaaccagatccttgacaagcgactcctttgttcctgcctctggaataaacgtgttcccaaatcccaacccatgtccttttaaatgtcttgcttagctctagtcttaaaaacttcttctctcttgagaacctaccactttaagtgtcttccgtttgctgagctggtctcctcaagtgtctgctctaccttgggcatccgtacccctttaaatgtctaccttatcctgggccttggcccttttcaatgcattcgctctccaccccggaccaaaatcccgtctctttctacttcaggcttctgcaccctttctagcccagaatcccttcttcccaccaagcttcagattactgagccctcttagactctcacctgcctgttctgccccttcaccggctcctcgtgcc

SEQ ID NO: 127946 - DNA, 555 bp, Homo Sapiens
  misc_feature (404)..(404): n is a, c, g, or t
  misc_feature (435)..(435): n is a, c, g, or t
  misc_feature (465)..(465): n is a, c, g, or t
ttcacagtgagaggcacggtttattgccaggttataccctaggacggtgtccttccctccctcctagggtgggaggtcatgtgcgggagttccgctcctcttcttcgttctccagtagataggctggacggtatgtggggtgtcctcctgggctcaggcacttcagggccgggttccgcacggtattctcccgactccccagtgatgtgtatctttcccacttctacccctgctgtcctgggaaggggaccatccatggctcttctgctcccttggcctctgagggagggcttgctatctgattctctggtatagcttgctcagcagtgggttgatgcgcatgaatgcgggccagcctgggtcagtggggctgaaagggcagaggctacaggagtaggggtcantccggcgggtgcccataaggacagcctccanctgggggtgccgtgcctgcagttcacccanggcctgcttcatgctgccctcagcttccaacatctgcagattatacctcttgataatgtccttagaaaactgtccagcttagggaaaggg

SEQ ID NO: 127947 - DNA, 653 bp, Homo Sapiens
gcgccatccaggtttgtgtttattcgatacaggcccagaacccagccctccttcagagaagtggccgagctgggggaacagaataaataaaggccgccgaggtgtgatggggactggacgggccggtctggggcgaggcaagggtgcccaggaggcattgaccccaacctcagctgtccacggctggccccactcccagcaggctccgggggcagtgtgagcgcccacaaggagcagggctcggactcctgccacctccaagtcctttcttttccttcctgccctccctttccttcctaaggcaggtccagagaccaagctctccctttggccggggagccgggaggggagggaggtggagggggccattgtccaggtcccaggccatgaccctggtgcctgtcctgggcaggagcccaggttcgctgtgcgaggacagaggagcagggaggcaggcgccccaagccagcaggcctttatgcgtcgcccccttgcgcggcggccccgccccgctcccaggctccgtcctcccacgcaccctgcccccggcaccacagccgcggggcactcaggagtcacaccagcttccacccttgtccaagggcccagcagcccctcgtgtatccctggacggctccccagctgccgtgtct

SEQ ID NO: 127948 - DNA, 1418 bp, Homo Sapiens
  misc_feature (1344)..(1378): n is a, c, g, or t
gacagggtttttttattggggttggattgtgtgccgttcataataagaatctatttattttatatttaagttcataagtcacatccacattatgttcctggtaaaaattctgaaaggacacagcaaagagcagaaagggacacctccatagagtgtctatggacccatttttgctttccaactcctaatagaaatgcctgacccagcaccctctgggaaaatcaacctttgattcaaagagatgttgttcagcaatgattacagtcacagtcacagccacatgccatcagcctatcaggaaatctgaggggaggcagacaaccagaaggagagttgcttcctctctcaccaggaagcaactctagctccaaaccagatgggtgattcagcgccacatggagaaagataattcagccattgtgtttttaggattaagaagcactcattcactcgcggaagcctttaaatgtcactggtgcctggaaccaaatgtagtcttcccaagccgtggttcggatggaaggtctgccacatgacagggtcacagtcagtttatggccccggctgggcactcgatagttgagcttgggtcgaaaccaatcttctccacagttgcggtgtccctgtgccatgacgacggtgcccatgagtggaggagcctgaagctcgctaaaggcatcagccatgaatatggctcggaagagacggcgcaaacaagctgctgtgctcaggctctggtccacgctgtagggggccagcagagacaagtcgagttcatagaactccttggggcttagggcattgcccccaaggagaatcagcactcgcggtactagtgtccgtgcaaagaagtcctccaggtggctgaggacactctccagttctgccagggcttgttggcatttcctgctgctcacctcagtggtggcccgaggtttcttcttcagcatctcctctgcctggggagaaggttttcggtaaaagtgcttaagctgttcatagggcagagggagctgctggcgttgatacatgatatgctttagaagttcacaagtaaactgacagcagccttcctggctcacaggcccaggaaacaccactggtaccatgcagtctcttgggcaaaaggcctccgaagcgttgagaggttcctgcgtagagcttgtctcaagtagttctatctgggaggcgtgagtttcttcggacttctcataccactccaaatcagggactgcggctgaggacagaacctccgcctccggcgccgccatcacgacctcccctccgctactccccggccgtaatggccgaattcccgggcatatgtccggtaccgtcgactgnnnnnnnnnnnnnnnnnnnnnnnnnnnnnnnnnnncggccgcttcctcgctcaaacgtctcgctgcgctcgtcgt

SEQ ID NO: 127949 - DNA, 1340 bp, Homo Sapiens
  misc_feature (797)..(797): n is a, c, g, or t
  misc_feature (1091)..(1091): n is a, c, g, or t
  misc_feature (1236)..(1236): n is a, c, g, or t
tgaatgaaagaatccagcagatatttattaagcaagatgaaagtgaaattacaaacacaggtcaacttttaaactcagcactctgttggagtggaggtgcacggtccttcatcataggcagcctatgcgagatgcatcttaggaagggagctttcgctgctcagaaatcaaagctccatcggaggtgtcctactggaggcatcagacaacaagctaaatgacgttagggctacacaacacaaaggggaaagttgacaacaattcaggggctttgagtagtcaagacaattagcttagtacttcaggtcaataaatgctacaatttatgggcaattagctgtaaaatggcctacagctgaaacactattcttgtcttatttcacgatttcatggagattaaagataatctaaacagattaaggccttaatctttaatccaggtgagtaattttgtttgtagtaaaaagcataagaaataattctcagcatattatgtaaaagaaaaagcagtgaaaaccttgtttggtcttccagtggcaaggatagttgaacaacttcaagaagctgagagaagtttgttcccaatttacaagtattttgacatatagataaacaaaagcaaaaccagttaaaccttaaaagatcatctgaataagatcctgacaattataattttacatccatgtgaatttcaagcaattgttaatggggaccaagcagggctgcattaagaaaaccacttttcactgatctctcccccacatatttttaatttgtcttgctttgtttattttgtntatgcaagtcctttctcttcatgaaacaagtgtaaggctctaaggctaaaataatagttatttttgtgggccccaaatagctacttttgaatttctttctttagtatatctcaaatctggggaacatggaacttgaagactcctaaccatgaagcatttggaaaaatacatatcattcacttttcaccaaccattgttcttatttaatatcgacctccacccgagactccacattgcatagatcacaattatagactcgtcatgtactaccactctagtacactactctcacanacagcttctgcatgcctcaaccagtgcggttctctctcaatctcgctagagaattccagagtcatcatcatcatatagatcctcgaattcttctcaatatgcaatactagtctgtaataacaccatatatctactattactccancaggaccacgtcggcacactattcgttatcgctactagcaaagtcctatctccgagccgtcgatggcacgaattcaccgggcatatgtccggtaccgtcgactg

SEQ ID NO: 127950 - DNA, 1513 bp, Homo Sapiens
  misc_feature (79)..(94): n is a, c, g, or t
  misc_feature (233)..(245): n is a, c, g, or t
  misc_feature (430)..(439): n is a, c, g, or t
  misc_feature (719)..(731): n is a, c, g, or t
  misc_feature (1360)..(1374): n is a, c, g, or t
ttttttcgtaggagacaggtatttatttgccaggcacacgggggaatgcgaggaatagaaatgcttgcatactcttgannnnnnnnnnnnnnnnggggtaaaaaacacaccctcccctcccaccccaaaaaacatcaaattccttccttttccccaaatccctggatcttggaatgaaagccacccttccccaatctgtcctcacctccttcagcccatccaagttatgcacnnnnnnnnnnnnnttagtgagaaatttggggatttgcacaacaaaaaattagataatgttttccaaaactaggtcttctatgctgtgtcaaaaaaagtttcctacagactgaggatattcacacgacaggagcctgggggttaaatgagcctttattagaatgttgtagcagttgtgtttgaaggcggtggccctacnnnnnnnnnnttaaattaaagtccctaactgcatgggtaggaaaaccagggctggagctcaattggaaccagtggagcccagaactcatggagacatacgtatgtacgtgggcacgggacgccctcgcactggcatgaagccggcccagcctgcaagagacacggaacggcttctgcctttcctcacggaaccagtttttaaagagtgggacgggaaagaaacaaaaatgaaactaaaagcagacctgatccttttaaaaacatttttgtagactctaaagggaattacnnnnnnnnnnnnngtctgaaagcaaatcctgacagcaacccctaggtttaaggacaggttctaaactagacccaaacggaaatcctgacatctgtgcgcagcggctcgccgcacacctggacggcacctcctgacctgcacacacctgtgcacgctcacctcccaggagcaaggcccagggtggcttaagattgcgtccatcgaaatgaatagaaaaaaggaaaaaatttaatgaaattaaccccaccaggagaaccccgcgacagtcccccctccagctttctgctcagggctgctgccgaccggatcctctccttctcccttaatgggcagcttctggaatccctgcttctctggctgggtctgttcttcagtttgttcttctgctaagtctggaaggtgcgggggcgggggtctccagaacaagcagcaatggaggcgttcagctggagcgagggctgcctcggccatccctgcatctgtccgtcagtcacgggggcgggccggccgtccctgccaggggctgtggcaccatgagccgcccaccctccagggcacagggccagcgggatgatgcagcgtacaacagggaccccagggtctgcacggtttacttttaactccatcatcatgaggtgattnnnnnnnnnnnnnnntctttcaacttatagatcgccatgggaaggcagtcaaagattgggagcctaagacagggaaaagcaaaaaaatgaaacaccccgctcggttcagaagccccgggcgctggccttgcccatgcgcatcacagtgtccagg

SEQ ID NO: 127951 - DNA, 729 bp, Homo Sapiens
  misc_feature (629)..(629): n is a, c, g, or t
tttgcgtggtattgcaaaataaatttatttgaagataaactgtcttataaaaggtcagaggcaatttgagatcccagattcagcttgtctcataaaaagattcaacttcaagtagcacaatttcttgtctgcttttaatcctgaacattcttgaagcacgaaacagccaactgtttacacaacacatctgtgacatctgactctggcaccagtggcgccgcagctttcagctctgaggccccacgggctgcagccctcagctttgggagggcccagatcaggccactgtgacctctggctttgccagcaacaacaggtcccagcatcccagcccttccctcccctggcacctcccaaaagcacaagaatgcaaaccgagactggcccaccactgaggcaggggtggactcccgcttgagtgtgccaacagggcgggtggactgtcctggtgacttcctggtgggcctggccaaccaagaggccaagtggcctcaccaggccttacctggctgcctggcagcccggagaggaaggaggaaggacgctcacggtgcgacagctctggccacgctggcgggagctacgtgatgatcctggcgatggcttgcagggaggggaagtcgtcgtcncgggcagcatgcagcgcctggtggctgctggcatcgccatgcgcgagcacctgctggcaggtggggcacacacggcagtccaggcccgcctgctgggtgg

SEQ ID NO: 127952 - DNA, 937 bp, Homo Sapiens
tttttggcaaattaagagtgtgtttatttacaggaaaatcatgagaagcaggaacaaacagggctgtaggggaggtgggctggcagtgaggccaggtgtctgtgtaaacaggcattggctggatagagggaacacaggagccaggctgcgggaagaggtttcctttctctggcagctctggctgaggccccaggagggacatcaagcgaatattttctggagctcccccaggcgtgggtccttgtagagcttttcctccagagccaggtacttcagtggggccagttccttgtgtcgattgaggcgctgctccaggatgcggatgcggaacatggcctgagagcagtaactcaggtacaggtcttcatcctcgggtgtcagcgtcacctggttctcctggtaccactgctgcttcttttgcagctcctgggtctccttctcaaagcgggcctggatgaggttggccttgttgatgagccgctgcttgaagtcgctgaggcactcatccttgaggcgcaccgcctgccagcatgttagtttctctcctggcgggagctgggccaggaatggggccaggtagtccagctgggtctccacctgccgcaggtgctcttcgtgcatcatgcgctccatggcctcccgatattccttgctcttctcattccgcttggtgtcatagatggagatggtcagtgtgtgcgccgcctcctcttcctctcgaagcttcagaatctccagcacctccagctctgactcccagacctgatgtctggacagcttctcctccctcttcaggtgcatcatggcctcgtactggtagagcagcttcttggtgtgctccatgggctccacctcgaagctgatgcacatgtcgggcgtcatgatgatcttgttgcctttgctgtccacctcggtgcgccgcaggaactcgcgctcc

SEQ ID NO: 127953 - DNA, 1710 bp, Homo Sapiens
  misc_feature (835)..(859): n is a, c, g, or t
  misc_feature (1599)..(1633): n is a, c, g, or t
ccttttaaatgcttcttttatttcattggttgtacattgggtgagtgaactgaatattacaaccaaaacatagtattgatacaaattagactcctgtttacactgtaaggtaatgaatgagggaattctttaagtgttacagaaagatttagtagaaatgttaccagtggtatggctgaaagaatatttcggtgaagtgctgttatatcctgaaaaccaagagtgaaatgtagttcccatacaagtggagagttagtctcttaactacagtatttgttgaactgatatcttcatgtcttggatattggtgatttttgttttttaattaaacaaagcatttaagatttattcatcatagtcagacttctgaatataaacaaacttttggcaaataatatttatacagaaaaatagttttagatcctctcaaatcccagaattattctataaaattacattataaataaataaaaagcaaaatctgttgtacatatatttgtacatctatgcatttgccttgcctcctccttattgtaaatggcatatttatgactctttgcatattgtaatcacaattctggaaaatggatatcatagtaaaaaatacagtcttctatatttgcttggggttacaggtgatgtttttgatgctccattattaaagggctgaaaatagttgtgtgctaataattttaaaaatcaaaatcatgaaactaaagaatacaaagaaagacaatgttacgacaattaatctaccaaaatatttcagtgattcccataatttaccttttagtaatgtatactatgttttcaatgagtttaaatgaagttaacnnnnnnnnnnnnnnnnnnnnnnnnncaagtttgaatgttttaggcaagttgtagcgtaactacattgttatagttgagaaaatttacaaatatcaataatacataaagatgaaactaccaaagtaatacaagttagatacaatacttttcccacagaattaaaacaaatgcaacgatacaagcactatgtaagaatacatttagcgtgtgactttcttttagatagggttatcagatctacgatataagataaatagatagtaattcgactttgaccaacatgaattaaaatgcagatttctttttttcctcaaacaaataatgatacggttggtgcatctagttttcagaacaggcgatgatcccaaatttaaaatattttacattcaatctcaaaagtcaaaatacttcaatcactaatatgttcacaaagaaaatggatgtttgaaacaattacacataatattcatttataacagctgttttgttttttaaacaataatttaaaaactatgtaggtactgtataggctatgtgcaacatataaaatgtgaaatatgaaatatttggtacgatagtgcttaaaataaactttaaaacaaactttctgaacaaatttaattgtatcgctattaccttgaagatcaaccaagtatttaaaaaagtaaacaacattaaaatatgtttcatccatatatagtatatatatgtatgcccggccgtaatggccgaattcccgggcatatgtccggtaccgtcgactgnnnnnnnnnnnnnnnnnnnnnnnnnnnnnnnnnnncggccgcttcctcgctcactactccgctgcgctcgtcgttcggctgctcacgctgaggccctatagtgatgtatcag

SEQ ID NO: 127954 - DNA, 657 bp, Homo Sapiens
  misc_feature (621)..(621): n is a, c, g, or t
  misc_feature (630)..(630): n is a, c, g, or t
aaaaacctaaatatttatttatttgcattatatttacaaaggtgggaaggagaccaaaggagaccccaagaacacccccacacctggctgaccaggccccttgcactgcagaggaggcagacacagctggaaggaacaggatttatgttgcatacttgaactacagcgagtgtaagactggtcctatttacagggcagaaacactgcaggtggagcgcgggggtggcagggtgggcaccagagtcctggccaagggtacccttgcctgccatcttccccacctctcccagatgcatctctgaggccccgctgggattctccggggggaacgaggcccactcacatgatgctcgctggggtgaagacagggcccacgcacagggtgtctgtgatctcccagccgcaggacagaggcttgcacacaccctccacgtcatcctcctgttcttcagccattcagctgcctttgcagcgcttccctaggggtgagagaggggtgctgcaagtagccagcatgggactggcagggccctgtacctggagacgcagccccattgggcaggagggctctcacgtgagcccgagctcagctgagggcaggggcagggacaggctgctgantccctcccnaactgcttcctactcccgtgtggtcag

SEQ ID NO: 127955 - DNA, 549 bp, Homo Sapiens
  misc_feature (225)..(247): n is a, c, g, or t
aacttaaaacaaaatagtaatttatttacaatagcaaagatgtcaaaaataacaggaacaatatataacaaatccaagatttttatgaaaaaggcaaacagtatatacacgaaacaaaagatgaaacaaaatccatagggtaaacttaatttgaccttagctaaacagttacagaatgtggcaaaatggttatgatttatttaagtaaccctgggccaattaaannnnnnnnnnnnnnnnnnnnnnnatctttttcaacccttctcttttaaatgctgaatcttcctctcaactcagttaacctttgaagaatgtaaccatgggaggccacacgagatttaggaagtgcaggctatttacatgtgcgctaaaggcatacttgttgacttggcaggctcacacttttaaaacagcaaatggaaggtataaactgtctggggtcctatttttctctcactgttcatttctgattttttgtgataatttctttcttatctaccacacaaaatgctgaaccagtcatcttttaggttcctcaagtgctctaaa

SEQ ID NO: 127956 - DNA, 1497 bp, Homo Sapiens
  misc_feature (93)..(93): n is a, c, g, or t
  misc_feature (186)..(186): n is a, c, g, or t
  misc_feature (293)..(307): n is a, c, g, or t
  misc_feature (454)..(465): n is a, c, g, or t
  misc_feature (633)..(635): n is a, c, g, or t
  misc_feature (638)..(639): n is a, c, g, or t
  misc_feature (642)..(645): n is a, c, g, or t
  misc_feature (647)..(649): n is a, c, g, or t
  misc_feature (652)..(652): n is a, c, g, or t
  misc_feature (654)..(658): n is a, c, g, or t
  misc_feature (1344)..(1379): n is a, c, g, or t
cgagagattggtattttgttaaggacacgggttgtggtttgttggcccaccaggggggcggaaaggaattattattgtatttgtaccggcganaggggagtaggaaacaaagagaggttggtgatttaatacctcgcccttggcgggaagctttcacatgtgttttatcaaagaggcggcggtgtntttaggggagagggttgggtgctcccataggggggggcgaaggaggaaagtgcatttggagaagattccgacccccccctttttctcatgaaataaaatggtcaccnnnnnnnnnnnnnnnaaatatttttgaattgtgggggggtcgcgggttaggggaaatccccgtgtgtggtaaagattccccgtaaaaatgccccctgagaggaacttccctttggggggattttttttcaaaaaaccttctcgtggtttcccccccgggggnnnnnnnnnnnnggggggggaattcccaagccctttgtgtccagggccccgggtttttccttgggaaacccaggttatggggcccaggttccctctttcccttatgtggggcccggcgcggcccaaaaggaatgggtttagaaaagctttctcgagggcccgagggcggccggacaaggnnnttnnttnnnngnnnttntnnnnngttttactcaaatggtttttattttcctatctgacatttctaacaaaacgccaggtagacggagttaaaaagaatccaccgcacgaaaggtaaacaaagcagaccctcagaaactccctggcaaggatgttcccctccccagattggcccagtttcaccagcaactggtctcagctcagccttatgcctttccactgacaccccccacccctccacattctcgtgattcagaccaggaacttctcggctgattgtgtccgtgtgtctgagggaggggcacgctggaacctgggaacctactgggcacctctaatgcagatgagaaaaacttgagaatgtgaaagtagatcagtccccgctcccacccgaaggtgcagagacgcgggacattaaccagcagcacgcgggggtgaagtaactcaggccactctcctccccactgcccagggcgggtgcacgccccaggacctcctcccaggccccacacccacgcaaggcgacaggaagctccccacgcctgccccatgacgcaacgatgaccgcttatacaagtatgtcagcggagggggaaggggagtgcctggaattctccgaggttggaaacgcaaaaccaactcttgaaaaaccttgaaagggccagcacagcccacagtacaaaatgaagtccgaccctgaggagatctttnnnnnnnnnnnnnnnnnnnnnnnnnnnnnnnnnnnncccaagcctcccttctcccagtccagaaggagagcgaaaggttcacgtcccagtccactaagacagcacctgtgggcgcaggtctctgcggaaggcgcccgcgcccccggctcagact

SEQ ID NO: 127957 - DNA, 1835 bp, Homo Sapiens
  misc_feature (1146)..(1181): n is a, c, g, or t
  misc_feature (1483)..(1483): n is a, c, g, or t
ggtaccggtccggaattcccgggcatgtgtcactgcgtgggttggtttgtgtagagaggcgtgagcgagcccgttgtccggagtgcacctgctgcctgttctgtccctcccgggagcccccgccgctgtcgccgtcgagtcgccatggaagtgcagaaagaggcacagcgcatcatgaccctgtcggtgtggaagatgtatcactcccgcatgcagcgcggtggcctgcggctgcaccggagtctgcagctgtcgctggtcatgcgcagcgcccgggagctctacctctcggccaaggtggaggccctcgagcccgaggtgtcgttgccggccgccctcccctctgaccctcgcctgcacccgccccgagaagccgagtccacggccgagacagcgacccccgacggtgagcacccgtttccggagccaatggacacgcaggaggcgccgacagccgaggagacctccgcctgctgtgccccgcgccccgccaaagtcagccgcaaacgacgcagcagcagcctgagcgacggcggggacgctggactggtcccgagcaagaaagcccgtctggaagaaaaggaagaagaggagggagcgtcatccgaagtcgccgatcgcctgcagccccctccggcgcaagcggagggcgcctttcccaacctggcccgcgtcctgcagaggcgcttctccggcctcctgaactgcagccccgcggcccctccgacggcgccgcccgcgtgcgaggcaaagcccgcttgccgcccggcggacagcatgctcaacgtgctcgtgcgggccgtggtggccttctgaggaccccgagcggcgctgccggagcccagagcgcgcgtcgaaccgtcggcccgagggcgcagacctgaggcgaggccacccccctccatcctgggggaagcgcccgcgaaaaccgtggagagaagccgccgcccgggctgctgagaggcccggagagggactctgtccccggggagccatcgccttcagtgtgcagggacggcaccgtaggagtctgagccgggggcgcgggcgccttccgcagagacctgcgcccacaggtgctgtcttagtggactgggacgtgaacctttcgctctccttctggactgggagaagggaggcttgggnnnnnnnnnnnnnnnnnnnnnnnnnnnnnnnnnnnnaacagatctcctcagggtcggacttcattttgtactgtgggctgtgctggccctttcaaggtttttcaagagttggttttgcgtttccaacctcggagaattccaggcactccccttccccctccgctgacatacttgtataagcggtcatcgttgcgtcatggggcaggcgtggggagcttcctgtcgccttgcgtgggtgtggggcctgggaggaggtcctggggcgtgcacccgccctgggcagtggggaggagagtggcctgagttacttcatccccgcgtgctgctggttaatgtcncgcgtctctgcaccttcgggtgggagcggggactgatctactttcacattctcaagttttctcatctgcattagaggtgcccagtaggttcccaggttccagcgtgcccgtcctcagacaccgggcccatcaggcgagaagtccctggtctgaatccgcgcatgtggacggtggggggggtccggggaacggggtaagcgtgagttggaccgttgtggtgacctgggccactgggcgagggacacatccgtcccggagttccggagggctcgcttgtaccttccgggggggaacttttagccggcgaccgggttgttccatgtctgctggagtcaacccgtggggacaccgc

SEQ ID NO: 127958 - DNA, 756 bp, Homo Sapiens
  misc_feature (729)..(729): n is a, c, g, or t
tttttcaagaataacttgttttattaccatgatttgtgaaaagcaacagggtagacagttcaaggaaggacacagacagtgccctgttttaggttccaaatttcttctttttaatgggtggtgggagctgagcaatgatgtcatccagaggccgttctactgccacgagtgttctttcatccaaaagatccatgaagagtagaggcttatatatcttagaaattttaaaagcatgagctgtgcgcctccggatgacatctgattcattcgtgggaggaaatggattgtagagtaaggttttgtcatttggaaggggcaatgacttgtcaatgatgcagaacatgtaggcatcatggagaaggatgtgcatcggtctcttgggatgaaaactgatgtgtgtgataggagtatccctttggagccaaaggtggtgaaagccctgcttctggacagtccggctccaatctgtatactgtttgtctgggatgctgtactcaaatacctgctggtccgaatgagcgatgacaaggttgttggtattgggggcaatagccatagcagtcactgggaaattgtaagcaggcaccgtgcagtgaagctttagctgttttacgttgtagacatggactccagcactggtacctgatgcagctagccaattcccatctggactgactgccaaaagacacatggcctccactgttcctgactgaggctggaaacatgcangtgcttgaagctcctcctgacagctga

SEQ ID NO: 127959 - DNA, 696 bp, Homo Sapiens
gtaaaacagctaaagcttcactgcacggtgcctgcttacaatttcccagtgactgctatggctattgcccccaataccaacaaccttgtcatcgctcattcggaccagcaggtatttgagtacagcatcccagacaaacagtatacagattggagccggactgtccagaagcagggctttcaccacctttggctccaaagggatactcctatcacacacatcagttttcatcccaagagaccgatgcacatccttctccatgatgcctacatgttctgcatcattgacaagtcattggtgagttcttcactgctacctcccaaatcttcttctgaatcttaaagttctaaaagcaacaagtacaataaggtaagaggacagagactcagaataaaggtagctagtaaatcagaatacaggtagctagtacatttcttggaggagaggggcttttgttttacagattccctggtttgtgttcccacagttcttcgggaggctctcggggaaggggctggcctttgtatactggcttttgctgatttgactatttgtctactttgcgagtaagcacataaatcttacacagaaaagtgattaggccagtattcggaaggtgaccctcatccggaagtatcattgatttggctaacttgctttcaactttgaactctggggtatctgaataacctggtt

SEQ ID NO: 127960 - DNA, 466 bp, Homo Sapiens
caggcaccgtgcagtgaagctttagctgttttacgttgtagacatggactccagcactggtacctgatgcagctagccaattcccatctggactgactgccaaaagacacatggcctccactgttcctgtgaggacaaaacagttacatctctgaattcacacagtgtccacagccagacctgccctggagatgatggcaaaagccaaggagaccattagagttttaaatcactgccaggataatttgctgatcactgtgcaaattacttctagatgttaatgtttctacttttttcatctacttatttaaccatcccgcctgtaaagaaggtccagagagataaaacagaagttattacttcctcaggcctaagacactgcttactacaggaatagagaatgacggcagcatctgccactaaaatatatactttaattgtttcaaactcctttcctaccaaatgg

SEQ ID NO: 127961 - DNA, 703 bp, Homo Sapiens
ctgacctgagagaattctttttattacgagtgaacagatgaactaaggtaagcgggtctcagccttccgctggtgcagcatctccacgcagggcctcagccccgtcctggccttgcctgaggactgcaccatgggtgttccttgggcatggaggaggcagcaggaaggggtgacaggagcaggagcaggtgcagggcacctcacaccacaggcctcccccacctctgagctgccaacagccaagactcctggcgaggccgggagaggaggggtgagagggaaggagggtctctgtgaaagcaagccccacccccagagcagagcagagacccaggtctgcaaatcacaccctccccccacgagttcctcctttgaggccagcagcacccgagggagggcaggggctgcacggagaccagagaaaggaaaaccccacagaagaaaactcaaagcatcagtcccatgcgtgtctgctgaacgagtgaatgggcccaaaggctcttctctacaaacgggacgcatccatccgacagggggccacaggacacggccggggccgtctgcgtctgtgcctgtgcagcccacaccagtgcagcccggggccctctcagacctcaccacacgcgtgcccagcacatgtgtgcacacgcagatggaggagagaaacacaccaccgtctctttgccacgtgtgcccctgtccg

SEQ ID NO: 127962 - DNA, 1150 bp, Homo Sapiens
  misc_feature (239)..(296): n is a, c, g, or t
  misc_feature (650)..(702): n is a, c, g, or t
  misc_feature (706)..(706): n is a, c, g, or t
aagttgaaaaaccatttatttcaccggaaagaaaaaaagggatccaactctataggtctagcctttggaccaaaaagagaccctgggagcagtgagactctcaccaaggtcattcccaaatccaacagccgcaggaggcaggaggcagggaggagacagcacagcccccaccacagtttctgcacacaatgaggcctgctgggagaagagaacatgaatgggaagctacagaagtattnnnnnnnnnnnnnnnnnnnnnnnnnnnnnnnnnnnnnnnnnnnnnnnnnnnnnnnnnngtctgaacttagcaaggtaaattaaggtccacggttcctgagggactgaacgcacagagccgagaacgtcccggagatggggtaccacgaagggtgtattctcatgcacaaccgcagctcggaatttcagcccacacacatcccacctcaagctttaaaaggctgagtaccgcgcccgatcggcatactgctcccgctcatacccgggccatgtcgtacagagaattccgcgcggctgctgaagcttgggacaactcactctcatgcccgtagccgtagccctctccaacagtggggactggggctgtagcgcgacgcagggggctccgatcccgcccgtaatatgaagtggannnnnnnnnnnnnnnnnnnnnnnnnnnnnnnnnnnnnnnnnnnnnnnnnnnnnctcntgaggtcggcaacaggtgtctatcgtagggatcgagagaggtggaggtgaggtgactggccatggctgtattctggacttgtggcagctgggacagggtctgctctgcgtaattatacacggaggcagctgcagctgccactgcctcataggaccgggcagcacggcagcgcttgtagtaggcatcgagcgctccgtacgcgttgttgtaatacaatgaatccccatagctcatggtgtaaggcgtacgcactgctccgtattgctcattatattgctcggtcaagtctgccacgcggcctgaacgatctatcggacactctttggaccagtgcccctctttcccgcaccgatagcagccgctctggtctcccatcccgggcgcagtcctaagccggctggtggacaactgcacgtgcattcgtttgccttgaaactctgtgcc

SEQ ID NO: 127963 - DNA, 1005 bp, Homo Sapiens
  misc_feature (48)..(48): n is a, c, g, or t
  misc_feature (217)..(237): n is a, c, g, or t
cttaactcaaatacaatcccttgtacaggatatataaagcaacaagantgaaccctttaaagagtttgtgtaaggtaggacagttaacaaggattctggtcctataagtgtcgcttgacatgtttttgagaggttcttcacgtaaaatgcagaattctgatcctgtgctgagggcaataaattcagagtgaggaactctgaactgtgctctactacnnnnnnnnnnnnnnnnnnnnnggcccagtaacttcagaaagccttcaaagaaaagggttttctgcactgataagcacaaaagccgtaggggctccgaataaaaggtgagtggcttttctccaggagacatttgcctaaggtaaagcccctaagtcccatgcattcgtacatcataagaagtccatcacccacacttatttcgttcatcaccagccagccaacagctgttatctttaccaaacctctccttttacttatccaaccattttctgcacacagccttgtgttcagccctctacccaaagagggtggttcaccttgaaactctgtgttatcaaggcccctgatggcctccactgcatcctctgcccgctccatgtgtacgaaggcataatctttcacgatgtcacattcgatgaccggaccatactcctcaaacttggctcgaagctccttattggtgcaggtgggactgatgttgcccacatgcaactttgttgaggttttgctcttattcttgctggcttccacgttgatgttcaccccatgaagcttgtaatggtgcaggttgcgtatggcatcctcagctgccgtcttgtcttctatgtgcacaaagccgtaattcttaatgatgtcacattccagcaccttcccatactgctcgaagagtgagcgaatctcctgctctgtagcctcccggggcaggtttccgatgaacagcttcaccatcctgacaagagcccgcacagaaaccagcagggcctcctcctcgcggcgcggacgcttctg

SEQ ID NO: 127964 - DNA, 945 bp, Homo Sapiens
ttttttttaagttgaaaaaccatttatttcaccggaaagaaaaaaagtgatccaactctataggtctagcctttggaccaaaaagagaccctggagcagtgagactctcaccaaggtcattcccaaatccaacagccgcaggaggcaggaggcagggaggagacagcacagcccccaccacagtttctgcacacaatgaggcctgctgggagaagagaacatgaatgggaagctacagaagtattgaaggacagaagaacaggaaaatgggcaggagaggaaaggaaaggaaaggaagagaaggtctgaacttagcaaggtaaattaaggtccacggttcctgagggactgaacgcacagagccgagaacgtcccggagatggggtaccacgaagggtgtattctcatgcacaaccgcagctcggaatttcagcccacacacatcccaccttgaaactctgtgttatcaaggcccctgatggcctccactgcatcctctgcccgctccatgtgtacgaaggcataatctttcacgatgtcacattcgatgaccggaccatactcctcaaacttggctcgaagctccttattggtgcaggtgggactgatgttgcccacatgcaactttgttgaggttttgctcttattcttgctggcttccacgttgatgttcaccccatgaagcttgtaatggtgcaggttgcgtatggcatcctcagctgccgtcttgtcttctatgtgcacaaagccgtaattcttaatgatgtcacattccagcaccttcccatactgctcgaagagtgagcgaatctcctgctctgtagcctcccggggcaggtttccgatgaacagcttcaccatcctgacaagagcccgcacagaaaccagcagggcctcctcctcgcggcgcggacgcttctgacaaaacgctaaaatggcggcccc

SEQ ID NO: 127965 - DNA, 1065 bp, Homo Sapiens
aagggccgaggctgagggctgggctccaccatatgggccgagtgaagaagctgcagcagactgggagctaggactagccagctggcccctgtatggtgccccaagggagacagagggctgagcgcggtaagaggctgcctgggctgtcatgggctgagtccgatagccaacacccaaagaggcagaaggctgggccctgtaggcagctcccagtgacccggccggctgggcccgggtaggttgctggctgggccgtcagagggagccacataagaggctcggggaggtgaacggcgcagagggctgcggtcgcgaccaaagaagggtggtgtggctgacgggcttgcccatcaaagccaccagtgctgttggccaaagcctgctggtagtcgaaggtggcagagaagccaccagttccagggaaggccgtatccccagcccctggtttcttggtcttgtccccagactggacagccaggccaggccccttcttctgacccttggtggagagttccacgttgatgcgcttgcccttcacttctttgccgttgagctgcgcgattgcggctttggcatctgcttccttctccatgtgaacaaacgcgtagtctttcaccacgtcacactcgatgacgcgtccgcggcgctcgaagaggctgcgcagttcctggctcgtgcatgcagccgacacattgcccacgaaaatcttccaagtattaagaggccttgggcgcgacatctccaccacgagcgcgcgccccggccgcagctcgtggccgtgcagggcttcgatggcgcgcagcgcgcccgcgttctcgcgcatgtgcacgaaggcgaactgtttcatgacggcgcagctcatgaccgtgccgtagggcgcaaagagggctgccagctcctccggagtcgtatccgccccgtcgacgttgcccacgaatatcttcattttgtcgccgcagccaccttcctggagagcccggacctctcctccagcgacaggcaagacgtccgaacgaccggccctcgtgccgaattaacacccagcctcgtacctagccgttagtt

SEQ ID NO: 127966 - DNA, 1050 bp, Homo Sapiens
gcaccttcgcttaattcttcgccgttcttgccacgctccaatggggagtcaaacctggccgcctccattagagatggccccccacccatcatggtatgcacagccagattggcatacgttctttcataggccccagagatgagattgaggtgctgtcacaagtttgcttgacttgagcaaatggcacaggtctcctcctgcgtagttgtatcagaagcgctgccgccgctgctactgcctcataagagcggacccggtatctgcttatagtagtcgagtgctccaatatgcatcgttgtaatacatggattccccgtagcccatggtgtaaggtgttcgaactgctccatattgttcattatactgctcagtaaagtctgccacacgacccgtacgatctactgggcactctgttggaccagtgcccttctttcccacaccgatagcagccactctggtctcccataccaggggcagtccgaagccggcttgtggacaactgcacatgcatttttttgccttgaacctctgtgttgtcaaggcccctgatggcctccactgcatcctctgcccgctccatgtgtacgaaggcataatctttcacgatgtcacattcgatgaccggaccatactcctcaaacttggctcgaagctcttggttggtacaagtggggctgatgttacccacgtgtaacttggttgaagctttgctcttattcttgctggcttccacgttgatgttcaccccatgaagcttgtaatggtgcaggttgcgtatggcatcctcagctgccgtcttgtcttctatgtgcacaaagccgtaattcttaatgatgtcacattccagcaccttcccatactgctcgaagagtgagcgaatctcctgctctgtagcctcccggggaaggtttccgatgaacagcttcaccatcctgacaagagcctccgggtggcggcagcgacggcggctcccacgtcagagagaaccttacaaaatggcgacggccgctcgagcctggacgcgaccgggacactttctcgcgcgccagc

SEQ ID NO: 127967 - DNA, 1105 bp, Homo Sapiens
  misc_feature (97)..(152): n is a, c, g, or t
tctcatgcccgtaaccgttagccctttccaacagtgggaactggggctgtagcgcgacgccaggggctccggatcccgcccgtaatatgaagtggannnnnnnnnnnnnnnnnnnnnnnnnnnnnnnnnnnnnnnnnnnnnnnnnnnnnnnncctgaggtcggcaacaggtgtctatcgtagggatcgagagagttggaggtgagtgactggccatgcctgtattctggacttgtggcagctgggacagggtctgctctgcgtaattatacacggaggcagctgcagctgccactgcctcataggaccgggcagcacggcagcgcttgtagtaggcatcgagcgctccgtacgcgttgttgtaatacaatgaatccccatagctcatggtgtaaggcgtacgcactgctccgtattgctcattatattgctcggtcaagtctgccacgcggcctgaacgatctatcggacactctttggaccagtgcccctctttcccgcaccgatagcagccgctctggtctcccatcccgggcgcagtcctaagccggctggtggacaactgcacgtgcattcgtttgccttgaaactctgtgttatcaaggcccctgatggcctccactgcatcctctgcccgctccatgtgtacgaaggcataatctttcacgatgtcacattcgatgaccggaccatactcctcaaacttggctcgaagctccttattggtgcaggtgggactgatgttgcccacatgcaactttgttgaggttttgctcttattcttgctggcttccacgttgatgttcaccccatgaagcttgtaatggtgcaggttgcgtatggcatcctcagctgccgtcttgtcttctatgtgcacaaagccgtaattcttaatgatgtcacattccagcaccttcccatactgctcgaagagtgagcgaatctcctgctctgtagcctcccggggcaggtttccgatgaacagcttcaccatcctgacaagagcccgcacagaaaccagcagggcctcctcctcgcggcgcggacgcttctgacaaaacgctcctcgtgccgatttacacccagcctctacctagccttatttt

SEQ ID NO: 127968 - DNA, 756 bp, Homo Sapiens
  misc_feature (663)..(707): n is a, c, g, or t
ttggatgaaaaaccatttatttcaccggaaagaaaaaaagtgatccaactctataggtctagcctttggaccaaaaagagaccctggagcagtgagactctcaccaaggtcattcccaaatccaacagccgcaggaggcaggaggcagggaggagacagcacagcccccaccacagtttctgcacacaatgaggcctgctgggagaagagaacatgaatgggaagctacagaagtattgaaggacagaagaacaggaaaatgggcaggagaggaaaggaaaggaaaggaagagaaggtctgaacttagcaaggtaaattaaggtccacggttcctgagggactgaacgcacagagccgagaacgtcccggagatggggtaccacgaagggtgtattctcatgcacaaccgcagctcggaatttcagcccacacacatcccacctcaagctttaaaaggctgagtaccgcgcccgatcggcatactgctcccagctcataccgggccatgtcgtacagagaattccgcgcaggctgctgaagcttgggacaactcactctcatgcccgtaacacgtagccctctccaacagtggggactggggctgtagcgcgacgcagggggctccgatacccgcccgtaatatgaagtggaagctgcagtannnnnnnnnnnnnnnnnnnnnnnnnnnnnnnnnnnnnnnnnnnnncctgaggtcggccacaggtgtctttcgtagggatcgagagaggtggacg

SEQ ID NO: 127969 - DNA, 1532 bp, Homo Sapiens
  misc_feature (1264)..(1308): n is a, c, g, or t
cggtcgttcggacgtcttgcctgtcgctggaggagaggtccgggctctccaggaaggtggctgcggcgacaaaatgaagatattcgtgggcaacgtcgacggggcggatacgactccggaggagctggcagccctctttgcgccctacggcacggtcatgagctgcgccgtcatgaaacagttcgccttcgtgcacatgcgcgagaacgcgggcgcgctgcgcgccatcgaagccctgcacggccacgagctgcggccggggcgcgcgctcgtggtggagatgtcgcgcccaaggcctcttaatacttggaagattttcgtgggcaatgtgtcggctgcatgcacgagccaggaactgcgcagcctcttcgagcgccgcggacgcgtcatcgagtgtgacgtggtgaaaggctcttgtcaggatggtgaagctgttcatcggaaacctgccccgggaggctacagagcaggagattcgctcactcttcgagcagtatgggaaggtgctggaatgtgacatcattaagaattacggctttgtgcacatagaagacaagacggcagctgaggatgccatacgcaacctgcaccattacaagcttcatggggtgaacatcaacgtggaagccagcaagaataagagcaaaacctcaacaaagttgcatgtgggcaacatcagtcccacctgcaccaataaggagcttcgagccaagtttgaggagtatggtccggtcatcgaatgtgacatcgtgaaagattatgccttcgtacacatggagcgggcagaggatgcagtggaggccatcaggggccttgataacacagagtttcaaggcaaacgaatgcacgtgcagttgtccaccagccggcttaggactgcgcccgggatgggagaccagagcggctgctatcggtgcgggaaagaggggcactggtccaaagagtgtccgatagatcgttcaggccgcgtggcagacttgaccgagcaatataatgagcaatacggagcagtgcgtacgccttacaccatgagctatggggattcattgtattacaacaacgcgtacggagcgctcgatgcctactacaagcgctgccgtgctgcccggtcctatgaggcagtggcagctgcagctgcctccgtgtataattacgcagagcagaccctgtcccagctgccacaagtccagaatacagccatggccagtcacctcacctccacctctctcgatccctacgatagacacctgttgccgacctcagnnnnnnnnnnnnnnnnnnnnnnnnnnnnnnnnnnnnnnnnnnnnnttactgcagcttccacttcatattacgggcgggatcggagccccctgcgtcgcgctacagccccagtccccactgttggagagggctacggttacgggcatgagagtgagttgtcccaagcttcagcagccgcgcggaattctctgtacgacatggcccccggtatgagcgggagcagtatgccccgatcggggcgcggtactccagcctttttaaagcttgga

SEQ ID NO: 127970 - DNA, 1072 bp, Homo Sapiens
  misc_feature (102)..(103): n is a, c, g, or t
ctgaaggggacttgaaccgccaccagagcccggagaacgttccccgggagatggggggtacccaggaaaggggggtatttttccatgccacacccggcaggnngggaattttcaggccccacacacatccccgctttcaagctttaaaaaggccggagtaccgcggccggatcggtcatactggtccccgctcataccggggccatgtcgtacagagaattccgcgcggctgcggaagcttgggacaaactcactctcatgcccgtaaccgtagccctctccaacagtggggactggggctgtagcgcgacgcagggggctccgatcccgcccgtaatatgaagtggaagctgcagtaacagcagcagcggctgctgctgcagcagcagctgtggcagcagctcctgaggtcggcaacaggtgtctatcgtagggatcgagagaggtggaggtgaggtgactggccatggctgtattctggacttgtggcagctgggacagggtctgctctgcgtaattatacacggaggcagctgcagctgccactgcctcataggaccgggcagcacggcagcgcttgtagtaggcatcgagcgctccgtacgcgttgttgtaatacaatgaatccccatagctcatggtgtaaggcgtacgcactgctccgtattgctcattatattgctcggtcaagtctgccacgcggcctgaacgatctatcggacactctttggaccagtgcccctctttcccgcaccgatagcagccgctctggtctcccatcccgggcgcagtcctaagccggctggtggacaactgcacgtgcattcgtttgccttgaaactctgtgttatcaaggcccctgatggcctccactgcatcctctgcccgctccatgtgtacgaaggcataatctttcacgatgtcacattcgatgaccggaccatactcctcaaacttggctcgaagctccttattggtgcaggtgggactgatgttgcccacatgcaactttgttgaggttttgctcttattcctcgtgcggaattcgccacccaggcctcgctaccttgga

SEQ ID NO: 127971 - DNA, 396 bp, Homo Sapiens
agaatcaaattgactcccactaccagaagccctgaaaaatagccatgagggccaaggaactctatgtattttaaagttaagcagttaggacttctctctagcctgtgagccatcctagtaaccttcccctagccctgcaaaagcaagcaagcaagcagggcagcctaattggagccctttaggctgcaggagggatggcaagaccagaagagggaacaccccacccctctcacctcaagctttaaaaggctgagtaccgcgcccgatcggcatactgctcccgctcataccgggccatgtcgtacagagaattccgcgcggctgctgaagcttgggacaactcactctcatgcccgtaaccgtagcctctcccagcagtgtggcctggtcatcttt

SEQ ID NO: 127972 - DNA, 853 bp, Homo Sapiens
  misc_feature (51)..(101): n is a, c, g, or t
acaccaaccgctttttattatcgagtttcaaaaacctttcacaagatggtnnnnnnnnnnnnnnnnnnnnnnnnnnnnnnnnnnnnnnnnnnnnnnnnnnnctttacaaccacagctaatgtaattttttccattgttcccagtcagctccaaacccattgtgtgcaaagcccatttttttccatgcatctaaatgatagatacaggctatgaaattctttattctatttgtagcagcttatgcaggtgcagccaaacacaaagcttcaggacaaattgtacaaactttacaatgtgggatttaaatttaaaatatgaaacataaaaatctacacaaaactgataaaaatcaagcacagataccaggattgaaacttataataatccatgtgtgaaagggagtcttgtttcctttcaagtgctttattctgctatggaacagtcaaaatgaagatgtaaagctttgtggttagtttaaattatacactctgtagatactataccaattttaaaagttatacatagaccaacagatgtccctcagttcatctggattgataagacactccagctggattgctgagaacaaatcaggcaaatgtggaaagaaaatccacctgtgcaatttgtttgcagagtttactgatgggcacactgcactccaggtccatgatggctgctgctttcttcatcagagctatcattataggcttcacgcctctgaccacctcctgagcctcgagtgctatcaaattcctgaagctctacctcctctgtttctccaattatgttaggaacttccggtctagatggcagaagatcttctagttcagaaagcttgtctgggttgatc

SEQ ID NO: 127973 - DNA, 1524 bp, Homo Sapiens
ttttattctttcaacattttattttttagtttctgaaatacaaatcaaaatacatttttgttacatgtcattttaacaagcttgacattcttttcaatacaggatgacacaaaataggtactttaaaacttccttttaagaaaaccatacattttatttcagagtaaacaacccatcaaaaacaaatacataggtatatgggctattgtttttcagtattttagagcacaccatccaacttaaaatgtggtccactaaaatatgtaaatatccctcctatcacaaaaataaattaaacctcatggttaaaaaaaacagaaacgtttggcgtaggcctgagtgagcttgaaaaacaagttaggatgttttaactgtatggaggaacattacagaatccacatagaaacatctggcagaacaactagcttgttgctattggagctgttctgtttcagagagggatataaggtacatgggagggtgctgaagactcacaacagccacagaattagttactccaaattaaccagaattcaatatagaagaatatacgacaacagtagaacaatctcaacagttattcgatgcctggaaaacaagctgtaagcttcgaacaagtaactcagcaggaacaagagtcaacatgtttataagactttgaaggtgagaaaacttcatcattcatagatgatgtcttgtgcacaaatacattagtttgtaggacactggggacaacaacacaacatacaaagtaagaataaatccaagctgtttaaccttccaccattctcttgagtattaaacccaggccacctttggccacttgcaggggtgtcttttcttctttattctcaatgtaaatacttgctccttgggacaccagcagttttgcttcttccactctctcctcatcacaggctaagtgtagaggagtgttaccctcagtgtcttggatgtttgtggatgctttgtagtacagaaggatatgaatcatcttcaagttacccttggctgctgcccggtgcattgctgtagcctcataatggtccttagcatctggattagccccgccttccagtaacatgacagcgatctcatgcctgtttttcgaagctgcataatgtaagggagtacagccattttgattgacagcattcacttgagcaccttttcccagaagggcttttacaatctcatcccggccagcagaagccgcaatatgaagaggagaccaacctgcatcgtctttatcattcactggcactccaagttgcaacaaaaattcaacaatttctgtatgtccagctgagcatgcccagtgcaatgcagttctgctgtcctggtcagttctagtagccagggatttatcggccagaatactctccttcaactcttccagcttcccgctgtaggccaggttgcagaccattaggttagacacacacccctccatttcgctgtcccagcaactacttgtcgcgcgagcaacgcccgcctcacgtcgccggctccggctacgccccc

SEQ ID NO: 127974 - DNA, 1062 bp, Homo Sapiens
ttacggctaggtacgaggctgggtgttgaattcggcacgagggttaggtgacgctgcggggcgggcggacagactgcgggacggacggtggacgctgggacgcgtttgtagctccggccccgccgttccgacccccgccgccgtcgccgccatgacggggctagcactgctctactccggggtcttcgtggccttctgggcctgcgcgctggccgtgggagtctgctacaccatttttgatttgggcttccgctttgatgtggcatggttcctgacggagacttcgcccttcatgtggtccaacctgggcattggcctagctatctccctgtctgtggttggggcagcctggggcatctatattaccggctcctccatcattggtggaggagtgaaggcccccaggatcaagaccaagaacctggtcagcatcatcttctgtgaggctgtggccatctacggcatcatcatggcaattgtcattagcaacatggctgagcctttcagtgccacagaccccaaggccatcggccatcggaactaccatgcaggctactccatgtttggggctggcctcaccgtaggcctgtctaacctcttctgtggagtctgcgtgggcatcgtgggcagtggggctgccctggccgatgctcagaaccccagcctctttgtaaagattctcatcgtggagatctttggcagcgccattggcctctttggggtcatcgtcgcaattcttcagacctccagagtgaagatgggtgactagatgatatgtgtgggtggggccgtgcctcacttttatttattgctggttttcctgggacagctggagctgtgtcccttagcctttcagaggcttggtgttcagggccctccctgcactcccctcttgctgcgtggttgatttgggaggcactgcagtccaggccgagtcctcagtggcggggagcaggctgctgctgctgactctgtgcagctgcgcacctgtgtcccccacctccaaccttcaccattttttcctaaggggtttgggaaattaaccttgggaatttgtctggg

SEQ ID NO: 127975 - DNA, 1020 bp, Homo Sapiens
ggttttgacccagacaaataccaagtttatttcacaaacactaggaagatgggttgagggtggaggtgggggacacaggtgcgcagctgcacagagtcagcagcagcagcctgctccccgcactgaggactcggcctggactgcagtgcctccaaatcaacacgcagcaagaggggagtgcagggagggccctgaacaccaagcctctgaaaggctaagggacacagctccagctgtcccaggaaaaccagcaataaataaaagtgaggcacggccccacccacacatatcatctagtcacccatcttcactctggaggtctgaagaattgcgacgatgaccccaaagaggccaatggcgctgccaaagatctccacgatgagaatctttacaaagaggctggggttctgagcatcggccagggcagccccactgcccacgatgcccacgcagactccacagaagaggttagacaggcctacggtgaggccagccccaaacatggagtagcctgcatggtagttccgatggccgatggccttggggtctgtggcactgaaaggctcagccatgttgctaatgacaattgccatgatgatgccgtagatggccacagcctcacagaagatgatgctgaccaggttcttggtcttgatcctgggggccttcactcctccaccaatgatggaggagccggtaatatagatgccccaggctgccccaaccacagacagggagatagctaggccaatgcccaggttggaccacatgaagggcgaagtctccgtcaggaaccatgccacatcaaagcggaagcccaaatcaaaaatggtgtagcagactcccacggccagcgcgcaggcccagaaggccacgaagaccccggagtagagcagtgctagccccgtcatggcggcgacgcggcgggggtcggaacggcggggccggagctacaaacgcgtcccagcgtccaccgtcctcgtgccgaattcgacacccagcctcgctacctagccttaa

SEQ ID NO: 127976 - DNA, 915 bp, Homo Sapiens
  misc_feature (788)..(788): n is a, c, g, or t
gacgctgcggggcgggcggacagactgcgggacggacggtggacgctgggacgcgtttgtgagctccggccccgccgttccgacccccgccgccgtcgccgccatgacggggctagcactgctctactccggggtcttcgtggccttctgggcctgcgcgctggccgtgggagtctgctacaccatttttgatttgggcttccgctttgatgtggcatggttcctgacggagacttcgcccttcatgtggtccaacctgggcattggcctagctatctccctgtctgtggttggggcagcctggggcatctatattaccggctcctccatcattggtggaggagtgaaggcccccaggatcaagaccaagaacctggtcagcatcatcttctgtgaggctgtggccatctacggcatcatcatggcaattgtcattagcaacatggctgagcctttcagtgccacagaccccaaggccatcggccatcggaactaccatgcaggctactccatgtttggggctggcctcaccgtaggcctgtctaacctcttctgtggagtctgcgtgggcatcgtgggcagtggggctgccctggccgatgctcagaaccccagcctctttgtaaagattctcatcgtggagatctttggcagcgccattggcctctttggggtcatcgtcgcaattcttcaggtgatgaatccccttgggaagcctctgtgtccttgtccccaaagctagccttaccctccttctggaagaagctgaagttgctctccttctctanctataactatagattcccccaaacagttccacctcctcatttccatcttctggttttctcctacaggggctctctattttgtctctgatttggtgtcactggacaacagccctgttctttttccccc

SEQ ID NO: 127977 - DNA, 1095 bp, Homo Sapiens
  misc_feature (201)..(252): n is a, c, g, or t
  misc_feature (259)..(259): n is a, c, g, or t
taccgtcggccgcagacgggcctagccgcacgcgctcgggctaggttagtcgggcgcgcaagcgcactagcagtcgcggccgaggggaaatcgagaccgctgttgggtaccgggaaccgccccgcctcaaagaggctgtcaaccccgcatcggttatccattgatgcgctcttgcctcgcgaccgagtacttggtggcgtnnnnnnnnnnnnnnnnnnnnnnnnnnnnnnnnnnnnnnnnnnnnnnnnnnnnagtagantaagtaggggagggtgatcatctgaaggggtttagagaaaatgtctcgggacggggccccgggcgcggtcggggggcgcgaccccgccgggctcggtcacggcgcactgggttccgcatggggggcggcccagggggcggggattgttccctgggtttcggcccccccttggggcccccgcccgggtagtgtatccactggtcaggcgctagcacgtgggccggcagggtcacgccaccgtcaagcccggaatccgaggcgggaccgagggagcaagcgttcccggcagatcccgccggcccagtccgttccgctgtttacccaacaagctgtgggtgggggagggcaaagcgactgggaaaagaggaaccggagcagccggcttgtgaccgagcgggccggtcaggagcaagaaaggggggacagcagtgagacgtgggagcgaggggagacagcgatagtggcaggacgggggagtgctgccctcgcggcccctacccgcccgcacccctcctcaagcagctggaaatccgggtctcctttgtcggagtcagaggccctcgcaggcgcaagtccccagagcctcgggtgcagagcgcgcggggggccagtattccccgcaggccacttccccgccgagttccgacccggccagctcggccgcgatgctgctcccgcccgccaggacccggcctcacccacggccagcgcgcaggcccagaaggccacgaagaccccggagtagagcagtgctagccccgtcatggcggcgacggcggcgggggtcggaacggcggggccggagctacaaacgcgtcccagcgtccaccgtccga

SEQ ID NO: 127978 - DNA, 896 bp, Homo Sapiens
caaaaatcattaaccttgagtgagtcaagttcatctgcagactgaaaaaaataaagtgtaacagaattttgatttaaaaaacgctttcaaaaaagcatttcaaaatgctctaagtatgtttcaaaaatacacttaaaaatatgtttccaacacactgaagggatttaactaagatccacaattacagttacgatacaaactgtaagctaaaaggcagcaacttaagctgagacagttactaacatccctcgagcagcgttttttgttgcgattcggcgccgcacccgtcaccccgccctccggggaggaacctagaaaggaagggtggtacatttctaaaccaggccacccacacatgaatcaagcggcatcacaggctgtcaacaaccgggtctctattttctctcctcctccggcgccccgcccgtgcgggacatcagctcccaggatgcgtcaatcgcagatcgcccaagcgtaagaggtggcgagaggccaccacggttgcccaacagttgcgttcccaggctgcctggtgtgacgcagcagcccccgcccggaccctgaggcctggcgctccgactgagccgaggcctgtgctacccgacactccttgcgacccggccccttaggcttattcagcgcggcccttcccggcttcccgagtcccatcgcagtctctccccacccccgttcctccccggttccttgtcagtgtccgccgcgatgtccttgcgcaaccatcccaagtgacattagcgcccatacccgcacggagcgagcctgaagctcccacttcccggaattcaacgccgggccgctaagggcgggcacccaagcgaggatcagcggactaagccgcgaccagagtccagcggtctccgcgcagtcagagtccg

SEQ ID NO: 127979 - DNA, 1027 bp, Homo Sapiens
ccactactgtttttacacagtttattcagaagtttaaaagttaaaatgtgggcattttcccctgaaacaaatcatcccctgccactccccaacacaaagactctcccaacaccgcagttccttctctttacccaggcttaccacacattcttgcaaaacacacaggagtcaacaccccaactatttggtaatacaaagagactacaaagtcacacaaaagaatctcatttacttccttttcactagcaggctatgaatgaaagactgagaggcaaacacatcaccttcatccagagttgacacttccctaaccttttttcttcctctaagaggttaaaatccaaagtagtttcactgacaactgtaactctgatattccatttttctcttctgaatggctaagctaggacatactttcctttcaaagctgatcttcagaacctcaagactggcagaaagcaggctcccagctgcagctcggccacaatactttgcaacaggcaaagttcccacataggtgcaaatgatgctttaagagttatcaaaactttttaaaaaataatgcattaatatggagcctccacatttttctgacgaaattcctctaaaggtggtggcagctgtgaaacagaaggcactttgtgctaaaattcagagggtctctcaagagagaacgccacagcagagagacccaatccgcctaagttgcaggcgaccctttagggtggggaggagtatcccccaggaaggcatctgcaaaggaaaaaattgtaatcatgattccaaggcaaaatggctaaagttgggagagaagaaataccaagagagaagacaaaacatggctgtgccaaggactgaggagtgagctttacaaggacttgtcagctggctctgtacttctattgggctggttccttcaccatttccaaaggggttctggagaccttgcaggaacaggaacagcaccttagccaagagggttccaggcctcctgcctaggcctgggctctcctcgttaggttccccc

SEQ ID NO: 127980 - DNA, 995 bp, Homo Sapiens
gtgagtggttatttgcaaggctataacttttttaatgacagattttcctaaaagaaaccactataacatctgtccaagtactccagagaaaacaaaaaatacataaagattaaaagtctattactttaacagcacattgccaaacacggacaactaggataaatgccaagaaaccttaaaaaataactttaaaagatgcaacgttcaagccattcaaacgcgtaggttccacaaacaacaggaaaacaagtccaagagcagttctacttgtgcatgatggtaactcagactgtacttcatcaaagttcattcaggtgtttcataggcgtctgagcagagtttgttttttcttccttgcttggagatgtgtacacagattagaggagaggaaagtcttccagatgctgatgtaagcacagcaggcttggttccccttgataaagtatgaaggcagatttagttgactcaagctttatcagtttccctagtgaaaagtcttatgcatgctgaaatagacgagttactgaatttgtcatgcgaagtatttacataaagtgaggtcagtaacccgacagaataaaaaaggtagttgttaaattattgtataaccttttacaacttgaataactttgtgggtaagtgacactgacgttcaaactcctcaaacatacattaacaagaaactatttactgcgtgaagaggcacacatcatgtaaaacatacacgtcatgggagggattcctgcatagcaggaaagtcgctaccactacataacaaatggctatgccaacagtcaaagctgccacgaaagggtacaacattagaattcccctaaaatctcaaggagtgtttgcaatagcacagatagatgcctttcggagagtaagtacatgttttgttcagaagggtatttttcactggaaaatctgaacatcatgtaaataaatcaatgttctaactggataagatttaaggcaatgctactcagacctga

SEQ ID NO: 127981 - DNA, 2256 bp, Homo Sapiens
  misc_feature (116)..(116): n is a, c, g, or t
  misc_feature (792)..(829): n is a, c, g, or t
ggccacaagaaggcactgagcagctgtgtggtgatgagcgagcaggatgtagagcgccacttctctctgggcgagttgaagatgctgtttatccttgatgaactagcctcagtgancacacatgacaggttgcactgccgacgttgtgtcaacagccgtcagatccggccaccccctgatggttctgactgcacttcagacctggcagggtggaaccactgcactgataagtgggggctccgggatgaggtactccaggctgcctgggatgctgcctccactgccatcaccttcgtcttccaccagcgttctcatgaggagcagcggggcctccgctgataaccagctggtctgggtgtagctcttagaggaaggagatagggaaaaggggctccttgctccacagggccctgttgaattttgttctctgggagaaaatcatcaagaagggctgcatgatgtttgcccaaaatttattttataagaaaaacttttttggttaaaaaaaagaataaaggtatgaaagggtttgaggcctgagagcagtgtggtaagcccagcagggaagaagccccctatacttctctaaagcctgggtgcctgcttgaggagggaaggcaggaacccaggggcaggggaggggatctcttcagcaattatgatgaccactgtaacctcctggcccagggttcccaggatactgagtaaggggcccaaagactataaacccagctgtgagaatgcctgtttgctgggcctcatcaaggcctccaggacctcagtgcaagggannnnnnnnnnnnnnnnnnnnnnnnnnnnnnnnnnnnnngatagaactggtggttggggttctgggcagcccatgcttcagcccctgcaagctgatggtaccgagcatgagactgtgaggtacgggccccatcacatggtgctaacataatctgcgaaggcctgggatgagtcccatgagtcgctaaccacatggcaggtagcccggagccgccggatggcttccctggctgtgactgcatcctggtccagccagttttggaagaggcgcaggtgaccaaaggctccacggccccagcgctccagccgcttggcgaactccagaagcccatctggcttgatgcagttggaactgatgtccagctgacagagagaggaggatgaatcctctgagaaaacatctgccaaggccagcaggccagcattccccaggcggttccctggcagccggaggcccttcagtgtggagttgcccttcatagcagcaaccatctcaggcagaaattgggctgggcgcttctcaaacagacggcagaaggagaaggtaatctcttgcagagtcagattctgtagcaaaaagagcacctcgctctgacagtcagcgagattcatgtcatggaagctcagtcttttcagggctaggttgtactctttgagtgtttgcaaaacaagcccaaaatcctggggagaggcaaaggtggcactatccagggacagctgctgcagagaacccgaggccttcagaacggagcacagcagtggggctggctgggctccccgtggaaatcccatctccaactgctccaggcagttttctggtatctcctcatcgcctattatgtggctagggggccctgcattccctggcacaccagggttgtcccgctggcttgggtggtcaacacgaatagagaggacccgtagcaggggcagtgctcgcacgatagcacgtgtcagctccaggatgggcagtggtgagaacaggtcactgagatgcagggcacggaggcgacatccagccgtggcctgacagggcccgcaggctgtctagcaggcggaaagatgttagagcccaggccattgtaggagagtgtgaggctctcccagtgacacccaggagctcagcaggtggcatagtgtcagggctgcctctgtggagagtggaactgtgaatagctccaaggtggagatgctgcggaatctttgtgaagcttccagtgctggaagccccaggcagctgggatctgatccatccagagctccacaagccacttccccaatctccatctcttcgccatcctccttctcgccagccacaataaaaacgaagtcatacaggtcttcagactctgcaccaggcccctgacgggtgcgagcacccttcttccctgcagctcgcttgaaacgctttaggggcttaggctgtggggctgagctagctggtgcccctttgtatgaggatgtaga

SEQ ID NO: 127982 - DNA, 2031 bp, Homo Sapiens
cacaaaccagatattatctatgctaaaggtaaggcagcttccgccccaggttccgggctggtgtcaccgataaagaccgtgcaggcatgctgcagaagccgttcagtccggatggcagtggagacagtcactagagcaggcccggagcgacatccagcttgcctgacaggcccgcaggctgtctagcaggcggaggatgtagagcccaggccattttaggagagtgtgaggctctccagtgacacccaggagctcagcaggtggcatagtgtcagggctgcctctgtggagagtggaactgtgaatagctccaaggtggagatgctgcggaatctttgtgaagcttccagtgctggaagccccaggcagctgggatctgatccatccaaagctccacaagccacttccccaatctccatctcttcgccatcctccttctcgccagccacaataaaaacgaagtcatacaggtcttcagactctgcaccaggcccctgacgggtgcgagcacccttcttccctgcagctcgcttgaaacgctttaggggcttaggctgtggggctgagctagctggtgcccgtttgtatgaggatgtagaagaagaggcagaggaggtggctgctggagcagaaggtgaccgcttggtgccaggagcctcatgggaggtggctggggggtgcagctccctcttaaggtctgttccgcctgctgtcaggctctcctgtgtgctccggcgtgttacccgagtggcaggtgcagctctgggcatctgcttggcttcactcttacgccggctggccatcagggctgcagcacatcgctcagcagcatcccggcggggccgacgtgagcccaataagagggacccttcatctcgggatggggcccggcctcgggaggcctctccacagaggcggcagggtgggccaccaggccctggttgccagaagccagcactcatggtgagaataaggatgaaaagggctgactcaggcacaggccaggagtatagcgacacttgactgacagccccatggtgaatgagctgatgcaacagctgccgaagtgactgctgagcagccacatcagagaacagcaggtggcggaacttgagagtgtgcagggagctggccagggtctccagaaccctgcggttgggctcagccaccagctcggttgcaccctgcagcatgttacagatggtgagctgtcggacatggcgggagctgtgcagaagaggtgagaaccgctgatcacaaagacgcctgtcagaagacacatcaatggtcccacgtagaacatgggaaaaaaaggcctccataaacttggctcgccaacatgtcacactttccaaactggaaggccttgtcttcatcagttcatcccagagtcggcgccagatggcctgagttgagaggcctttcttgagggcagtttcctcaatcctctccaagtaatatatattgagcagaggtaggatgctttgaagtattgggcctgggagggcccacaccccgctctccagaacccccatatgggcgctcaccgcccgcccgcacagctcgaacagggcggggggagcgttggggcccgaggccgagctcttcgctggcgccgcctcccgggacgtggcctccatggtcgttgccgccgctacctcacagaaccagcaactccgggcgcgccaggcctcgggcgccgccatcttggggaggtgcgcgagcccgagagtgtcgcccgcggaccgccatcttgaaaaggtcagcagttaggacggctccataagcgatatggggaagaatgtgaattattctaaagaaatttcgaagaaattagcacactttccaagtctcttaggagctactattttagataaactcctagatcaattatacttgggtgtggtatgactaaggggatgtttcttagcaaagcctcctcgggtgcaaacatcagctacccctaacctctgcctgcggctggcctcgtgccgaattcggcgcgccgtcgacttcatactctctccccct

SEQ ID NO: 127983 - DNA, 336 bp, Homo Sapiens
atgttagcaccatgtgatggggcccgtacctcacagtctcatgctcggtaccatcagcttgcaggggctgaagcatgggctgcccagaaccccaaccaccagttctatctttctctttctgtcaccttttttctcttttttcctttttcccttgcactgaggtcctggaggccttgatgaggcccagcaaacaggcattctcacagctgggtttatagtctttgggccccttactcagtatcctgggaaccctgggccaggaggttacagtggtcatcataattgctgaagagatcccctcccctgcccctgggttcctgccttccctcctcaagc

SEQ ID NO: 127984 - DNA, 1486 bp, Homo Sapiens
tttttttgcttataaaaaccattttaaattaaaaaagggaggaagcatcagtgcacacagatggggacacaggggcagagggcccagccccaagtacagtgtggtcaccccacagcccagtgggcaccagggcagactcccctcgcagcacagacagctgaggcccgggtgctggttcctctaggtacagctttggtccttgtgggctcagaggtctgcctttcggaaacttgctctgttcaaggagttcctgaggccgggtggggtgggtgccatcagctggggcaggcgctgggtaagcaggggctgcagagcctcccgcaggcggcagtagttgcgctccagctcacggtggtactccttctggtccggcccaatcagggccttatttttccgcagcgcatcctcacatttcttgcagaagtccttgaagcagagccgcaatttgttgtgatgccggaagagcttggggtcttccgggatctctgctaaaaacacctgggccacctccaggggaccctggttcacggtgggccctacagagccctgaagcaccatctgtagcatcttagcatctggtgggtcctgctcggtggcaaaggccagctcccgtgtcttcttctgcatgtcctcgatggccacctccactggcgtcagcaccgtctcctcccggtggcacacacggatgcgagtcttgatgtaggggaaggcgtggtcggtgctgagcagcgtcttacgcttgtgttgctcgggcagctccccgtgtgcgcgcccatccggcgtgaacggcgtgcagaacaggaatgtgcgaagcccatagttgcggtcaaagtaggtcacccggtccttgagctcgtaggtatcaaagtacggttccacatacgtgatctggatgtaggccttttgtgagtcaagcttggacttgtccacagggttagagtctttgataatctcaacgacgtcgtcgccaaatctctccgtgtagaactcctccagccggtgtgagatctctgccagcttcgtgatcgatggctccttgtacacaaactcctgctcatccaggtcaccgaagtgggcgccgtagaagcccacgcggaaatacgtcccgaacacgcgctcccagccggaactctggtgcatgatcttggtgaaggcctcctgcagtttgccgtgcaccgcggccagcttcttgtagtcacggtgggcttccaggatggggatgaggttcttgtagacctcattcaccgcctcgtagagcccgcccatggtgaagtagccggctgcctgttccagcaaccctaccagccccagctcagtgaagtgcttcccggagcagaagccctcctcgtcgggcgacaggatgtcgtcggagatggcggactcctctagcacattggatgagatgttctggaaggaaacgcagcccacgggcaggtggcggtggtcctcgagcagggcgaggtactcagccacgagggcggccgca

SEQ ID NO: 127985 - DNA, 1283 bp, Homo Sapiens
  misc_feature (983)..(1022): n is a, c, g, or t
aaatagggcataccatttcttcctgacatttgtcagtgatgttgcctagaatcttcttacacacgctgagtacagaagatatttcaaattgttttcagtgaaaacaagtccttccataatagtaacaactccacagatttcctctctaaatttttatgcctgcttttagcaaccataaaattgtcataaaattaataaatttaggaaagaataaagatttatatattcattctttacatataaaaacacacagctgagttcttagagttgattcctcaagttatgaaatacttttgtacttaatccatttcttgattaaagtgattgagatggttttaatgttcttttgactgaagtctgaaactgggctcctgctttattgtctctgtgactgaaagttagaaactgagggttatctttgacacagaattgtgtgcaatattcttaaatactactgctctaaaagttggagaagtcttgcagttatcttagcattgtataaacagccttaagtatagcctaagaagagaattcctttttcttctttagtccttctgccattttttattttcagttatatgtgctgaaataattactggtaaaatttcagggttgtggattatcttccacacatgaattttctctctcctggcacgaatataaagcacatctcttaactgcatggtgccagtgctaatgcttcatcctgttgctggcagtgggatgtggacttagaaaatcaagttctagcattttagtaggttaacactgaagttgtggttgttaggttcacaccctgttttataaacaacatcaaaatggcagaaccattgctgactttaggttcacatgaggaatgtacttttaacaattcccagtactatcagtattgtgaaataattcctctgaaagataagaatcactggcttctatgcgcttcttttctctcatcatcatgttcttttaccccagtttccttacannnnnnnnnnnnnnnnnnnnnnnnnnnnnnnnnnnnnnnnagattgtgaggcaattattaaatcaaaattaattcatccaatacccctttactagaagttttactagaaaatgtattacattttattttttcttaatccagttctgcaaaaatgacctataaatttattcatgtacaattttggttacttgaattgttaaagaaaacattgtttttgactatgggagtcaactcaacatggcagaaccatttttgagatgatgatacaacaggtagtgaaacagcttaagaattccaaaaa

SEQ ID NO: 127986 - DNA, 941 bp, Homo Sapiens
  misc_feature (190)..(190): n is a, c, g, or t
  misc_feature (192)..(194): n is a, c, g, or t
  misc_feature (198)..(198): n is a, c, g, or t
  misc_feature (201)..(201): n is a, c, g, or t
  misc_feature (205)..(206): n is a, c, g, or t
ggggggggaaattctccaacccactttgttcaatgggccccaggattctcccttagggaaaccaggctaattgcccctgtgttcccctttacctttactggggccccgcgccccccaaaccgaattggtctaggaaaagctttttcgaggggccgagggcggcccgacaaggaaaaggtgtgtgggtgtntnnntttntgngtcnnagagaaaaaaggacatgaacgtttattgagtgcctgctggttctggccttgtgcagttttcatctataatagcccatgaatcctcacgccaaccctggaggtaggtatcatccccatttgtgtcggatgaggtataggaggctcagaaaggttaggtagtttgtccaaggacacagaaccaggaactggcaagctgggaccgagtgcttaagtctcagactcaatccttgctctctctcctatactgcctccaggaggacggggggagcaccagcagaagctgcagtccacacgcttcctgcccctgcaacccagcaggcaccaagagaagccggccccttcacacagaccctccccatctacccttggaggatgcatcagtggaagagattaagacataaatacaaaaataaatagcagggccaagtccccagcagcaaggatgtgccatctccacgctgcaggaaggtcactgtgccattcacagctgctgtgggaggaagccctgggggacctggaacaatggttgccaaaggctggagtgagtgggctcagtgggccccttctgggtctcacagattcaaaaaccaatgtttgggagagggagcagccgtgggcacaggcccccgcctccttcacctgctatatttaaccgtgtttggattccagagggattcaaaacagggggaccttcaaagttgggctttacgtgtccaagacttgatcttccctgtc

SEQ ID NO: 127987 - DNA, 816 bp, Homo Sapiens
ttatttttgaagtgaaactgtatgtacatacttatagcatgacaccaggcctataagtaaggtattttaaagtaaagctttcaaggaaagtacaaatcaggtattgaaattaaattgaagacatagctttactctcttctttgatcataactaaaataatattttagacaaaagctaaaacaaaaagaggatattatacagattgctgcttcttttccaaacacttctcaatatcatcaagcacctgaacggcagcctttggaattcgagtcccaggaccaaatacattggaaacaccaacttcaaacagaaattcataatcctgaggtggtatcacccctccacacatgacaagaatatctggccgtccaagggagttaagttctttgatgagttcaggaactagggttttatgaccagcagcgagggtgcttatgcccacagcatgcacatccgcatccacagcctgctgggccacttcacgaggagtctggaaaagagggcctatgtccacatcaaaaccaagatcagcaaatcctgtagcaataacttttgctcctctgtcatggccatcttgtcccatttttgctacaagaagacgaggtctgcgaccttcacgttccatgaatttatgaaccctcttgatagcagatgttatctctttactttctccaaattcctggcgatatgctccactcaccattcgatcattcgctttatgttcaccaaatacctttttcagggcatctgtgatttctccactgtactcttggccgagatgcatcactgcaagagcaggatatttcatctccgcta

SEQ ID NO: 127988 - DNA, 1370 bp, Homo Sapiens
  misc_feature (884)..(895): n is a, c, g, or t
gtctccaagattgacagcagactggagcagtataccagtgcaattgagggaacaaaaagcgcaaaacctacaaagccggcagcctcggttcttcctgttcctgctgaaggtgtacgcaacatcaagagtatgtgggagaaagggaatgtgttttcatcccccactgcagcaggcacaccaaataaggaaactgctggcttgaaggtaggggtttctagccgcatcaatgaatggctaactaaaaccccagatggaaacaagtcacctgctcccaaaccttctgacttgagaccaggagacgtatccagcaagcggaacctctgggaaaagcaatctgtggataaggtcacttcccccactaaggtttgagacagttccagaaagaacccaagctcaagacgcaggacgagctcagttgtagagggctaattcgctctgttttgtatttatgttgatttactaaattgggttcattatcttttatttttcaatatcccagtaaacccatgtatattatcactatatttaataatcacagtctagagatgttcatggtaaaagtactgcctttgcacaggagcctgtttctaaagaaacccatgctgtgaaatagagacttttctactgatcatcataactctgtatctgagcagtgataccaaccacatctgaagtcaacagaagatccaagtttaaaatttgctgcggaatgtgtgcagtatctagaaaaatgaaccgtagtttttggttttttaaatacagaagtcatgttgtttctgcactttataataaagcatggaagaaattatcttagtaggcaattgtaacactttttgaaagtaacccatttcagatttgaaatactgcaataatggttgtctttnnnnnnnnnnnngaaatgtactgttaaggtattactttttttcatgctgatgattcatatctaaattacattattatgttagctgacagtggtactgattttttaggttggttgttttgtggatttctttagtagtgatagtagcctgaaccacattttagataactcaattatgtatgtatgtgcatacacatatacaaacacactaatggtagaatgcttttttatgtgctagactattatatttagtagtatgtcattgtaactagccaatatcacagcttttgaaaaattaaaaaatcacactatattaatattttatatttgccaacagaaacatggcagataggtatcaatatgttttcaatgcctgatgacctataagaagaaagtattgaaaagaagagagattagaactgttagaaggagttgaaattttctaaaagacatagtatttagtttataattaaatgcattcttgaagtcc

SEQ ID NO: 127989 - DNA, 653 bp, Homo Sapiens
tcaagagcacgccccctgggcctttattcaccaggaccttctggaaccctccatggccccacaccaagcacggccccggcgcccaagctcggccacctgcagtctcctggggtggggctgtcggatttatggcatgctttctgggttctcattgctgagccaatcccaaagtaggggaaggggctggattcatcacccgcccctcggctttcgagctccagacaaggccgtcgctggggaggcgtctgtgctctcccgggctcctgcagctccagagggttcgggctctgaagcaggtgagggtgttgctaggctgctgtttcctactggctgccgccccgctcctgcttgtacagtctctgctcccggatggcttgttccaacaagggcaggttcatcccctccacacaggtcagcacgcgcgccttcaccacggagcctctgtcctgctgatgctggagctccccgaggacgatgtacagggagcccacctgggcgtggaagggctccaccaacttggtacagacaagaagctggtgctgatcggatccgtgctgagccatcagtgttactctgggctgaatcatgtcatagaggcacacgctgccaaatgttctcagcgtgctcccatcaggaacttggcctgcactaac

SEQ ID NO: 127990 - DNA, 984 bp, Homo Sapiens
ggtttgtgtttcttgttttccagccccccgcctttttcccggcgttgggagcccctgcccccccagccgcccgccccagctcgccacctgcatctcctgggtgggcttcgaatttttgcatcgcttctggttctcattgctgacccatcccaaagtaggggaagggctggattcatcacccgcccctcggctttcgagctccagacaagccgtcgctggggaggcgtctgtgctctcccgggctcctgcagctccagagggttcgggctctgaagcaggtgagggtgttgctaggctgctgtttcctactggctgccgccccgctcctgcttgtacagtctctgctcccggatggcttgttccaacaagggcaggttcatcccctccacacaggtcagcacgcgcgccttcaccacggagcctctgtcctgctgatgctggagctccccgaggacgatgtacagggagcccacctgggcgtggaagggctccaccaacttggtacagacaagaacctggtgctgatcggatccgtgctgagccatcagtgttactctggactgaatcatgtcatagaggcacaacctgccaaatgttctcagcgtgctcccatcaggaacttggcctgcactaacctcccaggggaggtaataggtcccaggtttgggcagcatcatgggctcctgttctaggcgtcgccggtcctcggatttcttctttccgcctcgcgtggtcacgtgacgggggaggggcgggatacaaaaagtgctttattttcccactccccggacgcccagcagggcagtttcttgaccttcggagcccctttcccgaggatccgctcgggagcctcccctggccaggagcaggggattagtctgccccgcgaccggccccagccacgacgcggacatcgccccctctgtctgggccgctgtcaccggacgcgtggtcgacgatatcccaggaattccggaccggtcc

SEQ ID NO: 127991 - DNA, 728 bp, Homo Sapiens
tcctccacagaagaaataattttattccatttgagaaaagtaaaggatacattctttgtctgacaaaagtgattttgtcatggaactccaaggcctgcctggtgaagtgacagtgacagatgttagaggaacctgtggccctcagtgacacagagagcacagacatttggctgggaaagcacttgcatgatcgaaacatttcctattgcagagattcagaagttctttttatcctgaagatcattctggtctctaatttaagattgaagatgatttaatttgctaatggaacccaggccagctgttttttcacacaactgaaaggagagaaatcggaaatcactcttacatggtgagacctttgatacttttctctaggcctcatgagtcaaaggccatcactgtccctccaccgagcatctgggcagtgtctgcctcctgtccagaactcttggaggccgggccagcagccatctcagcccctcccacccctccatgccacagggcagcaccaactcccaagtagtagcaggctctgtcccgcagtccccagcccatccacagcaccactgctgccttggcagcgagaagggctgggaaaactgcaagccccttcctccctcaggtgttctgatcgccttttacaacaagggtcgcctctagcccctccatcaagtctttggtcctggaacattgtgagttacattgcatatagtgttattctaagg

SEQ ID NO: 127992 - DNA, 723 bp, Homo Sapiens
  misc_feature (703)..(703): n is a, c, g, or t
ttttttttcacagtggagacaggtttaatgcattaaatataacatgaatcattcacaataacaagtttcgtgtttcagggaacttttgttaatacaacacagttggtcacacaaaatacaaatgcttctgttgatttgtcttggcaactcagatacatcaacagtgctaacagtttaacagctttgttctcatctgacagaaaataatggcagttctgcaaggcaaatgttaaacctgaccgtatgtatttattagttccacagtgttttgacagattataggagatggaactcagaggatgctgacacgctcaccgagggctttcatttctgtttcttcagtctcaggagtgtcactgtggctagcacttggattgatcaggtgtgtggggtactgcagcccctgctcgcctgcatacttctcccacctcaggtcatcactttcatgggtgatgtagcgctccccgattttgcattccagctctcgcaaatctaaccaggtctgatagtcctgtagccaagggtggctcaaggtcttatccacactgtagcgctttctcatttttacttgcagcaaattgttgataagatcaatggcttcatgagatatttccttccagggatttggtggatacatgaaagctgcattctgaatttggtcgtgtatgtcttcatcttcattaaatgggaatgtgccgcttangcttacatagatgatgaccc

SEQ ID NO: 127993 - DNA, 495 bp, Homo Sapiens
  misc_feature (478)..(478): n is a, c, g, or t
tttgttagttgcatctttattatacacgactttgttatacaactttttgtatttccctggtgtttatagttgtttcttctttattcctgaaaaaagatacttgtgcttcttttcttattctcactattttcatggcaatctgtaacatgaacaagttacatgtcctgatattgtatataataacccagtaaggtaggaattagcatcaccatatcagaaaagaaaactgagaccagaggattgctgtgaggatcaagcagtgcaatgactactcaagcaccccaagatataggtattatattgtatcaagtcaacatcttcatgagatatttccttccagggatttggtggatacatgaaagctgcattctgaatttggtcgtgtatgtcttcatcttcattaaatgggaatgtgccgcttaagcttacatagatgataaccccaacagaccacatatctagagagcgattgtacccnttgttccttaggacctc

SEQ ID NO: 127994 - DNA, 1330 bp, Homo Sapiens
aaaggcaaaaatcttttatttcaacttttagggtagccagcagcctcttctccacatctcagaagcacaaggagacaccctgatcaagaaggcaccggcagaagcggcatggccaccattaattgctttctcttccggtggaaggctgccttgctctcatgagagttgatctgcagcgggatataagcgtctagatgatacagctgctgggggccccccatcaccaggcggttctccccgatctccagcgacagccccagggctccatcctggagaggtggcggaatcaggtcaccctccccagcaacaggatgatcacctggaccaggcatggtagcctcacacgctgggaaactatatttgaagggtcagtttggggaggtcaatttcggccaagaggaggtcgggggcttccagccacaggttcaggtgaggcttttcagggcctgactcagctctcccgggggcgggcgtgtacaggtcccccagctcctggatccgaggacgctgctccgagcggatgttctgctgcgagatggagcccatgaatggccggttcttcatcatgcgccattccggattcagctgcaagttgtatttgtcttcaaggccctccctggcgatggtgatcacgagctccccgcaaagaaatcgcctgttctgcaatcctcccggtagaagtcgctgttgacagctacgtcgtagcggtacatgcctggccttttgcatccagttctgcatgaggctctcccagactcatggggatgcgaaacccagcttggtcctcctctagcatctgaagcagctcctcctcggtcacgtcggcgggaggagggatagagggggagtggcagatgttgatgaaaaccttcccttccgaggagttggtctttatgcagaaaccaggctgaggctggatttgtgtcgattctggtctggttgtctgggcttgctggagctccttcgaggcctgcagcagcagctcctcaaatcgcgccgaatcagcaccgatcgcctccgcctcgcttagccccattcccagcagcttcgggttcgccatggccctgggaaagagatctaggcgtcctcgagaccctcaacgtgggaaactttgcccaggatccgaaccccagtgcctgctctggccctcaatcgactccggatacctactatcctgttcaaaaacctaagactggcctaagactacatttccattcaagaccgaacaccatcgtcaaatccgtggggaatatgtgtctctagacgcactaccctccgtcctaccggacgcgtgggtcgacgatatcccgggaaatccggaccggtacca

SEQ ID NO: 127995 - DNA, 1167 bp, Homo Sapiens
  misc_feature (168)..(168): n is a, c, g, or t
ccagaagcgggccttggccccccaataatggcttttcttcttccgggggaaaaggccgcccttggctttcaagaggaggttgattcgccagcggggatttaaggcgtttaagatgatccaggctgttggggggccccccaatccaccaggcggttctcccccgatttnccaggggacagccccagggctccatccagtttggggggggtcaacttccggccaaggaggaggtccgggggttcccagcccacaggttcaggtgaggcttttcagggccctgactcagctctccccgggggcgggcgtgtacaggtcccccagctcctggatccgaggacgctgctccgagcggatgttctgctgcgagatggagcccatgaatggccggttcttcatcatgcgccattccggattcagctgcaagttgtatttgtcctcaaggccctccctggcgatggtgatcacgagctcccgcaagaaatcgctgttctgcatcctccggtagaagtcgctgttgacagctacgtcgtaggcggtacatccctggccttttgcatccagttctgcatgaggctctcccagactcatggggatgcgaaacccagcttggtcctcctctagcatctgaagcagctcctcctcggtcacgtcggcgggaggagggatagagggggagtggcagatgttgatgaaaaccttcccttccgaggagttggtctttatgcagaaaccaggctgaggctggatttgtgtcgattctggtctggttgtctgggcttgctggagctccttcgaggcctgcagcagcagctcctcaaatcgcgccgaatcagcaccgatcgcctccgcctcgcttagctccagtcccagcagcttcgggttcgccatggccctgggaaagagatctaggcgtcctcgagaccctcaacgtgggaaactttgcccaggatccgaaccccagtgcctgctctggccctcaatcgactccggatacctactatcctgttcaaaaacctaagactggcctaagactacatttccattcaagaccgaacaccatcgtcaaatccgttgggaatatgtgtctctagacgcactaccctcccctcgtgccgaattcgccacccaggcctcgctaccttaagaccgttagtagttactgccgtc

SEQ ID NO: 127996 - DNA, 1592 bp, Homo Sapiens
  misc_feature (215)..(238): n is a, c, g, or t
ttgcgcaagtctaaatgcagggtaacctggtgctatgcgaaggttattgagcttcccattatgggggatcccgggccgagtctagcccgcctgtgggggccaagcgaaatgctgggggtgcacggggaacagggtattggccactggggccctttgccagtgtccgtcgctggtgtgtccggcacaccccgatcactatgagtgtcctcgaggtnnnnnnnnnnnnnnnnnnnnnnnnaaaggcaaaaatcttttatttcaacttttagggtagccagcagcctcttctccacatctcagaagcacaaggagacaccctgatcaagaaggcaccggcagaagcggcatggccaccattaattgctttctcttccggtggaaggctgccttgctctcatgagagttgatctgcagcgggatataagcgtctagatgatacagctgctgggggccccccatcaccaggcggttctccccgatctccagcgacagccccagggctccatccagtttggggaggtcaatttcggccaagaggaggtcgggggcttccagccacaggttcaggtgaggcttttcagggcctgactcagctctcccgggggcgggcgtgtacaggtcccccagctcctggatccgaggacgctgctccgagcggatgttctgctgcgagatggagcccatgaatggccggttcttcatcatgcgccattccggattcagctgcaagttgtatttgtcctcaaggccctccctggcgatggtgatcacgagctcccgcaagaaatcgctgttctgcatcctccggtagaagtcgctgttgacagctacgtcgtaggcggtacatccctggccttttgcatccagttctgcatgaggctctcccagactcatggggatgcgaaacccagcttggtcctcctctagcatctgaagcagctcctcctcggtcacgtcggcgggaggagggatagagggggagtggcagatgttgatgaaaaccttcccttccgaggagttggtctttatgcagaaaccaggctgaggctggatttgtgtcgattctggtctggttgtctgggcttgctggagctccttcgaggcctgtataaaggaaaactacctccaggctcggagtctgtgccatcagacccctcatttgttcctcaaatggagcaattcttatgcatgagagctgcagcagcagctcctcaaatcgcgccgaatcagcaccgatcgcctccgcctcgcttagctccagtcccagcagcttcgggttcgccatggccctgggaaagagatctaggcgtcctcgagaccctcaacgtgggaaactttgcccaggatccgaaccccagtgcctgctctggccctcaatcgactccggatacctactatcctgttcaaaaacctaagactggcctaagactacatttccattcaagaccgaacaccatcgtcaaatccgttgggaatatgtgtctctagacgcactaccctccgtcctacgtgccgaactgtaaacgaagccacacttccggtctatcgcctcgtgccggagttcaacaccaggcctcgtacctagcctaatt

SEQ ID NO: 127997 - DNA, 1007 bp, Homo Sapiens
cactttacggccattttttggctcttaggttccccgaattttaaaccgggccaacacgggttccattcaagaacccaggtcacatggagccattcccaaggagtcggctccaccacagttcgttagctttcagcctaatccactctcccgggcggcgtgaacagtccccagctcctgatccgagacgctgctccgacgaatgttctgctgcgagatggagcccatgaatgccggttctttcaatcatgcgccattccggattcagctgcaagttgtatttggtcctcaaggccctccctggcgatggtgatcacgagctcccgcaagaaatcgctgttctgcatcctccggtagaagtcgctgttgacagctacgtcgtaggcggtacatccctggccttttgcatccagttctgcatgaggctctcccagactcatggggatgcgaaacccagcttggtcctcctctagcatctgaagcagctcctcctcggtcacgtcggcgggaggagggatagagggggagtggcagatgttgatgaaaaccttcccttccgaggagttggtctttatgcagaaaccaggctgaggctggatttgtgtcgattctggtctggttgtctgggcttgctggagctccttcgaggcctgcagcagcagctcctcaaatcgcgccgaatcagcaccgatcgcctccgcctcgcttagctccagtcccagcagcttcgggttcgccatggccctgggaaagagatctaggcgtcctcgagaccctcaacgtgggaaactttgcccaggatccgaaccccagtgcctgctctggccctcaatcgactccggatacctactatcctgttcaaaaacctaagactggcctaagactacatttccattcaagaccgaacaccatcgtcaaatccgttgggaatatgtgtctctagacgcactaccctccgtcctaccctcgtgccgaattcaacacccagcctcgtacctagccgtaagttt

SEQ ID NO: 127998 - DNA, 528 bp, Homo Sapiens
  misc_feature (145)..(162): n is a, c, g, or t
ttaacaaaacataattcagctataaataataaaaatgttgacaaccccacataaacatttaacactataaacattctaagcatacaagagtagtattctagttcaagttttatcttttttcagttcaagttttattattactttnnnnnnnnnnnnnnnnnngctgctacagcttaaccaattgctttcgctccactcaaagagcagggaaattttttccccatgccaacacacattcatgaaatgggatacttatgggcacaggtatttaaaactggaacaatccagtctccagacaagaagactcctttggtgtttttcaattcaacagtccaccgaaattgagtttaaataaaccacttattagaagaaatcttgtgccagacaatatgttctgaagtagcatcatacccaaaacaggtttagccttctgagaatgaaaagcaggcatccatgaatgctttgctgatacttaaaacattctatcatatgaacattcattaaggtgctggaaggaaatcttgggac

SEQ ID NO: 127999 - DNA, 1612 bp, Homo Sapiens
  misc_feature (52)..(52): n is a, c, g, or t
  misc_feature (872)..(881): n is a, c, g, or t
  misc_feature (1563)..(1563): n is a, c, g, or t
tccactgtcactggagatgagaacatttctgatagtgaaatagaacagtatntgcgtacccctcaggaagtagggactttcagagagcccaggctgctagacaggctgccacgagtgtccctaaccctccctgatggatatccactgggagcacttcatcctgttctgacagcttgataacattcctgttataaccaaggatggaagtgtacaccagtccgtaggtattgcttttcttgtttgaaggaaccaagaggggctctgccattagttggaccctgggtcctggagtaaagtcaggagtgcagggatgactataggtaggagagattcccatcccttggtgtgggagagcaagttgcctatgtccatgttctgtgagatggctttcctcatagatggatgggaaaatgtcaggctctttgctgctggtttgaattggacacactgctgcggctcctcctgcaggcctgagggggcttccctctgcttgtggagtggttggcattcccagcagtatcaaccctcagaggagcgggaactggggaattctggccctacgtgcattcacaggcaatgatgggtttgtgtgtatggtgtcatgagatcctctacctcataacaaaaggacagtgggtagactaaggcagtagctcaaagggctttgcaaaattttaatatattaaaacaagaggcatctgctagaaaacattctattgtataaaacccgagttcttaaaaacatgttttctttggcactttcattccctccctcccctttccccagcatattgcaaaaagctctccagtgctaaggcattggcagggtgtgtaaacagcagccagcatatgtggaagaataatacaaagcnnnnnnnnnncttctaatatgtctgtgcagcaagcataaataacaggacccattccaaggagtgtgtgtgggttttccccctcccctgtgtcctctgtcaccttggtgatgaggccagagtgatgtgaagactgggagggaaccctaggtcagaccttggtttcctgttgttcttcccaagacccagggttccctcggtttccatttggtcctgtagtgaaatgctggtggttggttttaggttggggaaaagacgggtgctggtgtttaaaaggagtaaaggcataggcccctcatgacctgcagggaccccagccactgcctctgggcttggcttgagctcctgggagtcgggaagctggtttgacattttgtaggtttctctctactgtggagctggagatcaaatgattgggatggttcttcctctggccttacggaggcaaggaagtgctcttccttagtcccgtggtgttgtaaggctgagactagggagatgggtcttgtaactgaaaagtaactgcttctccaaacaccacctgcagctttctggggcaccattgtttacaggactagctttagggcatgactagattctgccccagttccacctgccctctccctctactcccctcagttcacccacaggcacctggcagtcagctgttgaggtgcagggcctcagctttgtncacgtgtgccacctctgaaccctgctgtctggtttaagtaccactcctg

SEQ ID NO: 128000 - DNA, 1053 bp, Homo Sapiens
ttttaaagtaagggatcatgcctcatcaaacagtaatgaaacaaaggcctcgagccagcttctctaagaaatataaatcaaggtcctaaatcacttcactaatacttgggtgggaaagttgaaacgatatgtgcttcttggtagctgtgattctaattttctccaaaactgagttatctgccatcacacaaaatttgctaacagcctcactcattattacagattcatgtcactgcttgtgagagatgcttgctttcctcttctatgctcacaaaatcgcagccttgggcaattaatcctgataacaccaagagagacccaaatacttgctatatcatttaatgactcttggcagaaagcaaaaacacttcacttgaacatggtattataaaaatatgtattttactaactttcataggaaatttaactatttgatgaaatgcctttgtatgttacctgattttcatttgtacttaacaatttgtcttaaagatgatacataaaaatgagatgaaaatatataaccttccccataaaccaagatttaatcttggagattaaatgttgccccaagtgaaatagctaaattcaatggattttaattacttttatccccatgggctccccgtccccccacccccaccttaatttcttctattttccccttagattgcaatgattaatttgcaagtttggtcccatactatccatgaaactaaacaaaacatgtgacagcccaggtgattcgatgccaccttttgactaagcaggcaaagtgcccttaacgccagcctgggcccatgccctgacgcgagggtggtggtggagatggcccacgaccctctcagcagccacatgcttccatgcccttgggccatggtcctcctggtgatgggctgccgggcgtcttcggaggcagctcccgtccccactttccactctcaggttgtcctgaaccacactttcttgactctgaatataacagcagcctatggactccttttcacagggcagcagcaacttacaggatacatgttttcccttgatgaatct

SEQ ID NO: 128001 - DNA, 1276 bp, Homo Sapiens
tttttttgtcttctttgagtctttatttccttggtgaggcagggccccagggtggggtgggctgcctggctgaggctcctgtagacccaccaacctaggggcacttttctgggcaccacaggtaaggcactgcctgggggctggaggaggctggaggaggatgcccaagctccccacactcctcaccccagaccggggaagctggatatcctccgtgttgtcctctccccatagctggtctgaggctgtggtttacacgcaggcacaggtaggcgattctgagcatcaacgcagatggaggggagggtgagccgtcgtgggagaactggcccaagaccagcacctggctggtgtcgccagccccggctgcattggtgggtgaggcaggtctggctggagtctgggtctgcaggcctggccggggcaggttgtgggggaccaaggagccctgggtgtgaaccccactgtggaggcagcaggcacctagtggtgccactgggacacccggctccaggactccggatgtcacacatgcgtgagtcttggcgtctacacccccctcggggccagtgggtgagcagtggcccgtggtccccgccagagctcccccagagtggacttggctccgccggacacagtgccctgctctgagctgccgctggctgctccacgtctgagaccacgcgacgttgcctcatgaactgacgtggacagcagcaggggagacgctgggtggttctgtggccaagcacagcccgtgtcaggagcacaggccgtgccctttcccagggggcacactgggcatttctcaatggccttcacaggacgcaaaggggcacacagaggcagtggggaagctggagttcttgggctggcagggaatggtggcagccttcttggccttcatgaagggcctggcttgctgggctaaggtcacagtgttctgaggtccccacacgcactcagactagaccctccgtacacacccaggctagaccctccatactcacccaggctagaccctccatacacacccaggctagaccctccatactcacccaggctagaccctccatacacacccaggctagaccctccatactcacccaggctagaccctccgtactcacccaggttagatcctccgtacacacccaggctagaggcttggggctgagaaaagcagtcatgcctcttcaggaattaccagcagagaatgcccagccctcttgatagtagcatacgaagggggatgatcacggatcgctctagatca

SEQ ID NO: 128002 - DNA, 3315 bp, Homo Sapiens
  misc_feature (41)..(97): n is a, c, g, or t
  misc_feature (227)..(227): n is a, c, g, or t
  misc_feature (298)..(957): n is a, c, g, or t
  misc_feature (959)..(966): n is a, c, g, or t
  misc_feature (968)..(968): n is a, c, g, or t
  misc_feature (970)..(990): n is a, c, g, or t
  misc_feature (992)..(1030): n is a, c, g, or t
  misc_feature (1032)..(1072): n is a, c, g, or t
  misc_feature (1074)..(1084): n is a, c, g, or t
  misc_feature (1086)..(1093): n is a, c, g, or t
  misc_feature (1096)..(1136): n is a, c, g, or t
  misc_feature (1140)..(1140): n is a, c, g, or t
gcgggagatcaataataaagtggaaccggggaatgagaggnnnnnnnnnnnnnnnnnnnnnnnnnnnnnnnnnnnnnnnnnnnnnnnnnnnnnnnnntataaagagcccgcgttaaggtgagcgggtgaagactcagcagcaacattacaatttgcggaaagacggtgtataacaggtgggcggaggaaagcagggtagaacagagaggggaaactattataggganttacggggataaacggaagaacaaacggtagcacaaggtggatggagcgggaaagcgatataaatggaatnnnnnnnnnnnnnnnnnnnnnnnnnnnnnnnnnnnnnnnnnnnnnnnnnnnnnnnnnnnnnnnnnnnnnnnnnnnnnnnnnnnnnnnnnnnnnnnnnnnnnnnnnnnnnnnnnnnnnnnnnnnnnnnnnnnnnnnnnnnnnnnnnnnnnnnnnnnnnnnnnnnnnnnnnnnnnnnnnnnnnnnnnnnnnnnnnnnnnnnnnnnnnnnnnnnnnnnnnnnnnnnnnnnnnnnnnnnnnnnnnnnnnnnnnnnnnnnnnnnnnnnnnnnnnnnnnnnnnnnnnnnnnnnnnnnnnnnnnnnnnnnnnnnnnnnnnnnnnnnnnnnnnnnnnnnnnnnnnnnnnnnnnnnnnnnnnnnnnnnnnnnnnnnnnnnnnnnnnnnnnnnnnnnnnnnnnnnnnnnnnnnnnnnnnnnnnnnnnnnnnnnnnnnnnnnnnnnnnnnnnnnnnnnnnnnnnnnnnnnnnnnnnnnnnnnnnnnnnnnnnnnnnnnnnnnnnnnnnnnnnnnnnnnnnnnnnnnnnnnnnnnnnnnnnnnnnnnnnnnnnnnnnnnnnnnnnnnnnnnnnnnnnnnnnnnnnnnnnnnnnnnnnnnnnnnnnnnnnnnnnnnnnnnnnnnnnnnnnnnnnnnnnnnnnnnnnnnnnnnnnnnnnnnnnnnnnnnnnnnngnnnnnnnngngnnnnnnnnnnnnnnnnnnnnntnnnnnnnnnnnnnnnnnnnnnnnnnnnnnnnnnnnnnnngnnnnnnnnnnnnnnnnnnnnnnnnnnnnnnnnnnnnnnnnngnnnnnnnnnnngnnnnnnnngannnnnnnnnnnnnnnnnnnnnnnnnnnnnnnnnnnnnnnnntccncaccccacccaccctccctctccttccctcccggaggcaggcagccactgtgggtccctgccttgccggcagaggaaggaagggagggctgggcagggagagggaagagggaagagggaaggcgggggcgggcatggcgtgagcagggctggttctctgatgcctgcagctccaggtccagggacagcctctaggaggttcttggctcagcactcgtctccgaagcccccgctgccacccctggctcctccggaggcacctcccatgagaaggccggtctgctctggttgctccgaccccgagtggctcagccctggctcccctggcggcggagcccccttctcccgccgctggcggcagcaggggccccctttgcgtctcacgcagtagaagacagcaacgacgaggagcaggaggcccacgctgacggccacggccatgacggccactccagcctgggaggtctgggggctcacggtgccgaagtggaagacatggcgcttgttcccgtgggggttggaggcttcacaggagatgccatcgcggctcagggcgctggtcactttcagggtcagagagctgctcacccaaccctgccgtccggggattggctctgcggggctgccccccaattggctccagctgagtttggggtctggatggccgcgggcagagcagatgagtgtgacttcgtctccttccctccagctgccatctgccttgggctctatttccgctgtctttagctctggcgagccttggaccagcagcgtgaagttctgggtgcggctgaggaccgggactgtgggcagggaggcctcacatacgtaggtgccattggaatcgaaggtgatagaactgagcgacagcatggggccatcgcccaggggagtggagtcccttggtccagcgtagggcaggggtgggcaggccgtgcacggagcagttcacgactgcactgctgtttagaggtaaggaaagcaccttcccctcgctgagctccagggggtccagataggccacgcgcagctccagcgtcttggagagctgcacgtcatctgccgcgtcgtaatcctccactctgcagccataggtcccgctctggccccgggtcactccctccagggtcaagttcccctcgagattcacattcagcacttcctcctgctcatcctgaaggcggaaaagcgtatactccgggctggggctgccgtccccccggcagagcagctggaccagtgtcaaccctggggtacccagcttgttggggtggacgggctgcccacccagaaactgcacgtgctccgtgggatagtgcagggtgaggtggaaggtggggctgtccaggcggcccgtggcggccctcgggcaggctgtagtgggcggcacagtggaagctggcgtctcggtcatccttgcggagccgcaggtagagggtgctggtgagggagagcaggcccgaggcctcccggaccgtgcggctggtcatgtagccctctgggttcatctctacgggcacctccaggcgctgcccgttgcgataccacgtgatcttgggggccgggttcccgttccggctgttgcaggtggcgatctcctgggcagagtcctccatcacagacagtgtccctttgttgggggagacctcagtggcctctggctttgcaaacacgttgagccgcgcagtggcctcagcagtgcctgccgcccctgccctcaccacgcacacgtagtctcgctcgtcgcccacctgggcctcagccagcaccaggcgcccctgggagtccagctggtatgggggactgcggccccgggtgtcgtgcattgtgacctggagctcagagccctgcatctcagccgaggctaggcgggggcgagctcccgagcggtcggtaaggaaccattccagcatataatggtcgtgggttcccgtaggggtgcagtccagaatgacagactttcctcgcatcacctccaccagcgggggtacagacaagcgcacctccgcctgggcatctgggtgcgccgccagcaggactgcgagcaacagcagccgcggggccccgcgcgcctgggccggtgcgtccgggggctccatgttcacggcggcggcggagactgagcccgggctgccctcgtgccgaattcgccacccaggcctcgctacctaggacc

SEQ ID NO: 128003 - DNA, 403 bp, Homo Sapiens
cgaattccgagctcggtaacccgcaggtgtttttgggtaagggccgcaggcactgctgaggccactgcgcggctcaacgtgtttgcaaaaccagaggccactgaggtctcccccaacaaagggacactgtctgtgatggaggactctgcccaggagatcgccacactgcaacagcccggaacgggaacccggcccccaagatcacgtggtatcgcaacgggcagcgcctggaggtgcccgtagagatgaacccagagggctacatgaccagccgcacggtccgggaggcctcgggcctgctctccctcaccagcaccctctacctgcggcttccgcaaggatgacacgagacgtcagcttccagctgtgctacccacaaccacctacgggatcctctagatcg

SEQ ID NO: 128004 - DNA, 514 bp, Homo Sapiens
ttttttttcttgtttcaagtccaatttatttcacacaacacacaggctgctgagggaatccacctgcactgcactcagttgaacttccggcccagtgccgcgtcagagactaaaccatgggagaaagttcacaccctggcctgggccacccaccttcagctctctcctgtgcgtcaggacgcacgctggccccaagagcttcactcaacacggctgggtcctgggcggacgtgggcacagcacttgccaggcgcccctggcaggggctctcagtcctccgcaccgctctcctctccgctgtcttcgtcgtcgaccccaccctcggcgccctcaacctcctcactgtcctcttccgagtccgtctcctccagccactcctgagtttctgggtccatctccaccaaggccttccacgcctccatcctgtgcaggtccaggcagtgcaggtcgctgagggtgacctggcggtcgccggcctcaaacatgccccaatagacgtagagcaccccatgct

SEQ ID NO: 128005 - DNA, 981 bp, Homo Sapiens
aaggtttcagaggaagccgagtcccagcagcagtgggatacttcaaaaggagaacaagtttcccaaaacggtttgccagctgaacagggatctccacgggttagttaccgctctcaaacctaccaaaactacaaaaactttaatagcagacggacagccagtgaccagccatggtctggactgtgaagtttactaccatttgtcaagaatcaccctttccaaatcctctgggttttgactttttggcttccacttcacccaaaatgttaaaatttttacttaattcatagccttccttggtttcatatttgtttgcatttaattcatgtttgagtctcttaactgatggatgcccacttgccttaaagcagcatacttattttttgtttatttattgtgagctttttactttattaagattttacagcgaaacccttacatgagtaattgaaatgaaattaaatgagattacagcataatgaagaagacaactagaatctaacaggtatgacacattcagttattctaacagggcacagtactgtgctatatgtagccgcctttacagatgttattaacctatagtagtttactattaactaggaagactggtgtatgaggagggagacattctgtaataagattaaaacctaaagtcagctgtgtaacattccatgaaagatgcattcatttattgaagatgacaaaaaagggagtcagatatattctggaagctattttaattttaggcacacaatctcatacattttgagacccttgggtcatttattactttttacaaactagttcctctctttttttctgccaagtcctgaattgaaaactgtaggcttccttgcacagatgttgcagccagcctcaggagtaaagtgcccgctgactgctgccgccacctctgtctcgctccctgtcagtgctgctggcacgtgggacgcggcaggtgacagccgtcctcgttcc

SEQ ID NO: 128006 - DNA, 3879 bp, Homo Sapiens
  misc_feature (481)..(495): n is a, c, g, or t
  misc_feature (513)..(527): n is a, c, g, or t
catttttaccgtcatagcagttgtatgcaggtaacccgcacttcggtgtgttaattaagtgatgccagatacaaatggtttggtcttgtaagagtttaaagtggaactgcactggtggcttgcagcaagatcactaatatgcgatttggttaataaaggttagccccatttcgggcaattctaagagtcaagagtcagggttaccccccgaagtaaatggagagagaatggtgtcaggatattgggacaattttgcctctggtgagcaccacggaaatattgattaagcacccgctgccttgcatacccatcagcacctagaggcgggttatttccaaacacagcgctcaccaaattgagggacacggttaaaatactgagatctaatctaaatgaagttcacttaagaaaaaaaatctggccttccctactgcacctcaaacttttgtaaacttggagataaagtgtttaggtgtgtttnnnnnnnnnnnnnnngaaatgctctataaattnnnnnnnnnnnnnnntcaaccacattgaggaacattaggcacagagagtaatgtgttggttctgagcttgcatgctggaatttcactgaaaaggtaagagaagggcaggaggtgaaggaaaggagttcatttctttttgccaaaaaggctgaaccgcttctctttgtctttctctttgtccttttcccgcttgccgggactggactcgctggtgatggtgacgacgctggtggggagggtctgcgcgcggctggatgctggcgtgctctgggtgctggcagacacctcgtgtttatcagaggagatggcggaagagatagcctggatccatgtgttcatttcctcatcgtctttggcttggaagaggtactcattgccatcatttagtcttagcttgaatacgtgtttcttctttttgtaatcaagggccacttcgcagacagcttctttcaaactcacagggacctcgctgtggtagggaattccagaagcagcagtctttgcatctttgtagaaacccatttcttggttatttatgacacaataaacattgtgccaggacctgcttgaggctttcttattgtgggcctcccactcgtgtttccgattgaggaagccttccatctgggccgaaggtgtctcctgggttctggctggtaaggtggcggcactctgggctgggagggcagtcttggctttacgatcagaggtcggggaggggatggggctggactctttagagctcgtcctttgttctgtagcgccgttgaccatttcgcttgtgtccaccgtttctgccatccgtggagatccctgttcagctggcaaaccgttttgggaaacttgttctccttttgaagtatcccactgctgctgggactcggcttcctctgaaaccttcgtgctcggctcgggagaaggcggccgcctcttcctctcctcgttcctcttgctgtctgcgcacttccagtaactccaatgtagtcagcctttccagggcagagaacctctcatcccaggttgctgcagacttttcaaatgcctcgtggcgcttgatgagcttctccacctcgtccacgctctggcctatctctcggctggataggtacggctcctgtccaagcagccaggcctcggccacactggcgtctcttgagaactgatggacctccagaatcagtcttaaccattcccatcggtcttcccacttgtcgatcatttctttcctcttttccgtcaactgcagtaatttttccttgatctcctcagatgcatagtgttttctcgccaacagggatttcccaagttcaatgcaggttgtgaaactgtcattacgtgcatcaatttcagctttgatgccttgatgattattcattaagagttcaacagatgatacatcccttggcttctcctgggcctcgatctgccggatgacatcctccatccagagcatgaggtcgcgcaccatgctgaagaagcggaacttgtcccctgtgtccaccagccgcaccctgcggctctcacaggcgtccaggagggacttccaggcttccaggacctcgttctcgcgcttctggatatcgtcggccttgtcacccgcataggccgcctggaggcgggctgcatcctcctgcagctgcctcacctgtgtgcccagagcctggatgtcatgctcaaatgtagtgtgcattctctgtaaggtctccactgtgttctgatctctcccaagctcctcagggagtttcttgtgtttgtcctgtatacgcccaaagatctccttggcatcgtggtaaaacttgtgcagttcataggaagcggcaagaatctgtgttcttgtgtcaatgagctccaggaggtcggcccaggcttcattgaggccatccttccattcagcgatggtggcggcatctgaatgtccagagttgatgagctcatctgccaggtgattgaccgtgtccacgcgctcctgcccaatgttcccggtgtctcgggcaaactcccggaatcgttcttgtaacatcgtgacatgctcatagtcctgtcccagttcatgggaccctgcgaccacctccctctcagcgatccactgctccagttcgtccacctcccggttgagctggaataacctgtgtctctcatccagcttgcctcttctctcttcagcaaggtctttcagaccagcgtacagtttatccactttggactgccgcatgctaatgcgctcactttcaggatggctgtcggccaccagggcccggctggtcttggagagctgatgcacggtctctgcatagtcctccacagcttgttctaagatctggtgcttcttcaacatggagacagcactctgctcatccttggccttctcctctgacatcatgtacagctcctgctcgctcatccaggcttcggcctcagcagcgtcaaagtagtactgctgggccctgtgcgcctcctccagccgcctgtggcgtttctctgtctcctcaatgaggagaccccacagctgcttcaggtcggcaagcctctgtctgatggcctcagcgctgaggctgctgctgtcagtgacgatgttttggctcctctcaaagatgtcgtcaatgcgaggctggtgcccctggatttctttctggagggtctgatttttctttattaacagctgcacagtctggaggttgtggccatgatccgtggaagttgccaaaggcatcctctctccgacccacaagatctcgtcctccacatccctgttgaactgatggatctctttggaggccagcaggttatgcttcctctcgttcaagggctccagcaactccatgaacttggtctgcacggtgaggcgcttgctgtctacctcgtcggtgctcttcccttcctgactcagggcctgggcttggctttggagctcttcgatctccttcttccgcacttgcatctgattctccagcatctgttgctttttcagcaggatattgacactggtcaggtctttgccatagtcatcagactgaatctgactctccaggccgtgcagccatttgtctagatctgcacagctctgggtgaaaagttcggccttgtttgcatcaaagagccgctgggcctttgtctgggtagtggattcaaggacttcccacattttatgtaaaccagtgagtttctccttcaccacagcttccgtctcaggcttttctgaaatgagctgcattccttccttctcgattttgtcaagccattctttgttggatgcaagttctgccataaatgctcgtcagacacttgaggttcctcaaaaagagaaacttaaaaagaacatagacaagcacaaggccaagaaagagcacaggcggaagaaagagaagaa

SEQ ID NO: 128007 - DNA, 971 bp, Homo Sapiens
  misc_feature (196)..(209): n is a, c, g, or t
  misc_feature (232)..(232): n is a, c, g, or t
  misc_feature (336)..(336): n is a, c, g, or t
aggcagaagtttttttgtctaaaatgaattttgatgtgtttaaaggcagagaccccaataaatgatgcatactacccccagaaccataagaagctttggcatctatctatatacccatctacagtcagaagtagatagatatgtacatagagataaggaaaaactaaccaagatgctatatgacgttatcctgacnnnnnnnnnnnnnngacatgcatcatgaaataaaagnacaaatcagacttacttcatggagaacacatatcaaaacaggtttctgattccactaacacatctaaatatggcaaaagagcaagtgaatgtctcacaaggttntgatgtataatatggatttggttttgttttatcggtacaaggaaaccatctctgtcaccagcttttatttctaaggaaaaggatttttgtgaaaacattttcaattcctgctggtggcctgatagataccatcctaaaagcttcctttatcagagaattccacaaaaagtcttgagaaaatgaacaatgaatcagaagattaatccaagatgtacagtggagtttgtctacagagacactgacatgacttctgaagccagggggcatgcgagcgctcccaggcacggtccaccaagtgcaacgttcaagtaatcaggatgaaccacaatggcttctgttccatttgtttgaaaaattaaaacagtttgacatgctcatagtcctgtcccagttcatgggaccctgcgaccacctccctctcagcgatccactgctccaggtcgtccacctcccggtttgagctgggataacctgtgtctctcatccagcttgcgtcttctctcttcagcaaggtctttcagaccagcgtacagattatccactttggactgccgcatgcttatgcgctcactttcaggattggtgtcgggcaacatggcccggctggtcttgtagagctgatgcacggtctctgc

SEQ ID NO: 128008 - DNA, 1422 bp, Homo Sapiens
  misc_feature (588)..(596): n is a, c, g, or t
  misc_feature (681)..(692): n is a, c, g, or t
  misc_feature (968)..(993): n is a, c, g, or t
  misc_feature (1319)..(1319): n is a, c, g, or t
  misc_feature (1400)..(1400): n is a, c, g, or t
tgggcaagagtccaatgacaatttttatggcctggggcacccaagggcctttggttcagccaatttagaaacctatctcattagggaagatttagcaaagggagattatgaatctggccagctcaatctggcaaaataaattggtaagggaaccatggggaaggacaatgagatcatgctatcgagctgacaccaggcacaaggccagttgtaaaaaccaaatttgttcttaaaaatctgcagcaacagatattgaagggaaaagaggtgcctgctaaagatttaagccaagcagcacctggagatggtatcatcctcaaaagggcttaagtcactacaacgtgtttcaagcgtttcaaaggagggtaagactattcacaaggcctttgcataatgtacgagccaatttgagggcgccaatacgggacccctggggaaaccaatctgtcaaggaaactacgtaggagattagctataggccactaaaattggtaaggagcctaaattatgttcttttttaatggacgtattttaactatattcgctgctacaacaggagcccgtgacaaactagtacttctagtttcnnnnnnnnncaggctggccatgccagttcacacggacctacccttcatgagcataaaacaagtgacatacaccttgtttctttttctttgttcnnnnnnnnnnnnacaaacaagactagcttatagcaaattctctatagctaagggtcaatttaaaatccttggcttatatctccccctcactcaatgactacatgatgcaaactaattttattaacaccttaagcaaaacatactggaatttcacaaaatgtacaagatttcaatatttaaggaactggggttagaaagcagaagtggctttcaggtcttccagtctttctctcaagtaataaagctctgctgtgaatattcaaagctattgggaaattaccggtagannnnnnnnnnnnnnnnnnnnnnnnnnccactatgttgtttctctagatatgtaagcttactctattaaccaaaatctcagcttgaccattcttgataagtacctaatcgacatgtaactttttttctgccttaaatatgtataacaggacagagcccttaaatctgattcaattattaattcctgatttacaagtgctatggtgagctaacagaacttatcaatgcctttattgcactttactagccaaatttagaaggttggaattagtctctcctatctagtattctgtcagtttgcccagcttgtacttttaattttgcttctaatggtaatctgccctatcccttganataaaatattctacattttgggagggctaattcttcattgtgccaggctgtctcatgcactgcaggggtgagtgtctttangcttaaatgccaacagaagccc

SEQ ID NO: 128009 - DNA, 1146 bp, Homo Sapiens
  misc_feature (166)..(221): n is a, c, g, or t
  misc_feature (1012)..(1032): n is a, c, g, or t
tctttcatttagtttattaaaagagggacttacagtcgtgtaatatctatcactatcatcccttcaaggaagacgggtgtgaaatagctggaattataaacttaacccttccagctcatggccagcctcttcattttaccagtgaggacactaaagacacacaggnnnnnnnnnnnnnnnnnnnnnnnnnnnnnnnnnnnnnnnnnnnnnnnnnnnnnnnnccaccataattagctacaggcagagacagaacaaactccacgtcttctgatactgcacagcctccaaaatggctgagatatttctaagtatcagataagacggaactaaaatgaggattaaccacagattaacaccaacaatgatctacggcctgaaagcatttccatcacacaaataaatatagtgagaagaaggatattgaaataattttgaagactaaagttataagaggacacatatatgtatgtgacacatagaaatggaaagcaaagacaaacaagtgtctatatttgattcccatacctgacgaataatgttttgtaagctttgctaacttgtagatttcgtgactgagccaaaagccctgatctatgtgaaaaagtgcctgacttagatgtgactgaagaatgatattcaatatttggttatggttaaattggtcatttaagaagatcttcaatattctatcagtttctgggcctcaacatctaccaataacttcataggaagtaaaggcatatcaggagaattaaagagttaatggctttaggaaggatttttaaattcaatttagaataaataaaagcatttgtgaaaaagaagtacaaaagaggaattatacttgtgttttcaaaaactaggttgctgattcctttttctggtaggaaatgaaatgaaaacaactgtatttgcaattaaatagctgggtcaagtggtaactctctgtatatgctcttgaattattctatcatactttggcaaagttcttataactgaatggtgtttgccnnnnnnnnnnnnnnnnnnnnntaagaatcctgtgtaaactgaacttataaaaccatattaagcaaccatcctacacgagggcacaggcacctggcgcatgtacgcacatacatacacactaacgctcagcataac

SEQ ID NO: 128010 - DNA, 644 bp, Homo Sapiens
ttttcagagcaacaaaaataaaagcttttatttgttcatttgaatataaaacaggcgttatcacagatgtacaaagcgtactggtggtttaacatacaagaaggttgctgtcctttgcacataaaaattttgtttgaaactgtggctggttgagtacatgagtttctctaaccagtcaccacactctgaaataacgctgctaacattcaactgataaaagggaccatctcccttgggtaaagtgtcaagcaggattaaatatatataataaacaagcaccatgaggaatctgctcctgtttgattaggtctgtgtttatatgttcactgtgtaccctctttttgtgcaagttgattacacggttttgtctgacttcaaaagcacaaggtcacaagacaaacattttttacaatctcatgaatgatttatctacagtacaattttgaatacagaatgacccttctttattgctgaaactggtggtactaagtgtctcctttcctttctcttgcacaaccaaatttcaatctcagtccaccaactcttttgagcctaaactctaactaatcagagttgacaggatgcacaagaggcggctgctaactgccctcacaactgcactgcagcgtccacactccttgaat

SEQ ID NO: 128011 - DNA, 953 bp, Homo Sapiens
  misc_feature (171)..(171): n is a, c, g, or t
  misc_feature (173)..(173): n is a, c, g, or t
  misc_feature (178)..(180): n is a, c, g, or t
  misc_feature (182)..(182): n is a, c, g, or t
  misc_feature (184)..(187): n is a, c, g, or t
  misc_feature (190)..(194): n is a, c, g, or t
  misc_feature (197)..(200): n is a, c, g, or t
  misc_feature (826)..(860): n is a, c, g, or t
  misc_feature (864)..(902): n is a, c, g, or t
atttggtggagggattcccaaggcccttaggtccatgggcccagggattttcctatgggaaacagggtatgggccaattttcacttttccctttttgggcccgcggcgcccaaacggaaatgtttagagaaggctttttcgagggcccgagggcggccgaccatttttttntnttttnnntntnnnnttnnnnnaannnnaaagatttattggttaaatataatggtttgggttttttaagtttaagttatttatttaagccatctcctgccacaagcaaagggatgggagaccagtataccagtcatcatttgatacaagtaaagaaggtgagcttaaggtcccatatactttttctggtccatgtgcagagtaacggtccaaaccagtgctgtggtccctggtgcccgggtagtggtccagattctctttattcatcttcgtagccagttggaagtggattcacatgagggttatggaatagagtatggttaccatctccccagggaaacggcttggtcctgatgcggagatgggggtaggcgatgaactcgggtctctcgtgctctccgtggtgcgacttcaggtacacattcagcatgctgactgccaccccggggagcgcgacgaagaaggtgagagtcttccacatgcgagctgagccctcttcgccatgggcgccactcgacataggccgccccagctgtgggcgggaccgacccagcagccgagaaaccgaggacacaccaactaccgccatttttgatctggactccccggccgtaatggccgaattcccgggcatatgtccggtaccgtcgactgnnnnnnnnnnnnnnnnnnnnnnnnnnnnnnnnnnncggnnnnnnnnnnnnnnnnnnnnnnnnnnnnnnnnnnnnnnnactgaacaaagacccggacggcttagcggctcactattagtgagtctttca

SEQ ID NO: 128012 - DNA, 2512 bp, Homo Sapiens
tttcactgagtaaacacagtttattactgaactgcactttcaccttcacacagactatttcaaagagctggaacaagtgtggggtgggggttggggggaggggcagatgcccctcaggagccaggaccctcggccagcttccctggaccagggcaggggagggagcatcaggccgtccaatctccgggcaccagctctccacgtgcacgcgcactgcaagccagcagctcctcacacataaatacagacacgcttaacaaaaatagtatatcatcttcacaaggaataaaaactagtctcaaatatgtacagcagagagcccggggtggctgggacccctggggatgagacaggccaagggtggagcagaagagagagggaggcctgaagagctcctggccaggccactctggccttggcagcctggctgcccaggctggacaggcatggggcacagatctgcctggccaggcaggactggcccttctagtcagccctaccccaccccatgcagcaggctctccttcctgcccttcctgcctgaggtagggaagaccctggggctcccatagctgttcctgatagctccctttcacctcagggctgagtcccctgaacccaccatgaggagcagcccaaggcaaagatgccacaggctgctcttgtaggaagtgaggcagctgaggccataaacagctctggggcatctgtcttgggcccagttggtccctcagtatggtcatgggagccagggaggggaagggactagggtggtgctgaactgcaagggccaccctagctttggcatggggtgcttcctgtagctatagccccctccctcctgggtggggctggcctctagccagaggcttctggaggacatttggactgggagtgaggactctagccagtccagaggtgaggagggagtcctggtccttgcatctttatcccaagcagcctgaatccctagtcaaaagtggcccctaaatggctcttagggggtagggatggaaggaaagggaacccaggttagtgtggggagagtggggggaaaatgatcaattctgaggccacaaacatcaaaacaaaggcaatctagtctcctttctggggaagaggttctgaaaactttcaagctccctggcagaaaaacattttcagggaggctaaggggtaagggttgcaccaatcaggtagggccctcctgcccccagccacaaacccttccatacctgccagcctcctttggacagattttgtggaaattttgtgaattctgaggccaagggaactgaggtgtgggggtctcacagaagtgtgataaattctagaaaactagctgcaagggaccagatctgggcccaaccctgtgatgggcaggtgggcatgggctgcatgtagtggttctcctggtggcaatggcggctggacggaggatgtggtggagcagagaagggggtgggagggtagagtggatggtcagtgtctggtcatttccgactgaagagtgagcccagcagaaccacgccggccacagtcatgcccgtcaggaaccagcggttgaagcgttcctggccctttcggctctcggctgctgcattgttcccatagagttccacaaaagtatcccagccgccgttctcctggatccaaggctctaggtggtcattcaggtaagtggccatccaagctgcgatccgactcaccaatacctgcatctccttgtctacgctttccacgcacagtgccccgccgaaggagaaaaaggccacaatgcgaccccagtttaccccatcccggaagagttcattcactacctgttcaaagctctgatatgctgtccctggggtgatgtggagctgggatgtcaggtcactgaatgcccgccggtaccgcagttcaaactcgtcgcctgcctccctcagcgcttgctttactgctgccatggggatcacctcccgggcatccaaactgctgctgtggccagtggctccattcaccgcggggctgtctgccaggtgccaggatgggttgccattgatggcactgggggtctccatctccgattcagtcccttctggggcctcagtcctgttctcttccacatcactaaactgactccagctgtatcctttctgggaaagcttgtaggagagaaagtcaaccaccagctcccggttgctctgagacatttttataatagggatgggctcaaccagtccattgtccaaaacacctgctcactcactgagtctcgtctctggttagtgattctcttctaagatccaaagccaagataagattctgcgagccccgcgagccgtggggggccacatcccccttcatcggcccggtagcttccagacgcaagagctcttcgcggccgagttccgcgccgcggacccgggccggcctacctggctgccggcctacctggctgactgctcgcgccgtctctcccgaacaagccggcctcagtttcccctgaagatcccgggaattccggacc

SEQ ID NO: 128013 - DNA, 1020 bp, Homo Sapiens
cttcaggtaagtggcctcccaagctgggatccgactcacccaattcctgcatctcttgtttacgcttccacgcacagtgccccgccgaaggagaaaaaggccacaatgcgaccccagtttaccccatcccggaagagttcattcactacctgttcaaagctctgatatgctgtccctggggtgatgtggagctgggatgtcaggtcactgaatgcccgccggtaccgcagttcaaactcgtcgcctgcctccctcagcgcttgctttactgctgccatggggatcacctcccgggcatccaaactgctgctgtggccagtggctccattcaccgcggggctgtctgccaggtgccaggatgggttgccattgatggcactgggggtctccatctccgattcagtcccttctggggcctcagtcctgttctcttccacatcactaaactgactccagctgtatcctttctgggaaagcttgtaggagagaaagtcaaccaccagctcccggttgctctgagacatttttataatagggatgggctcaaccagtccattgtccaaaacacctgctcactcactgagtctcgtctctggttagtgattctcttctaagatccaaagccaagataagattctgaagggagagaaagagattcaaatccgccttaggcaaaggcaggcaggtgcagcccccggaagatcttttgtatcacaggtcgggagaggaggtggctgcggggatgccggtaactcagccggcctcgcggtggctggcaaaaaaaccagctccggccggagggatcatgcgacccggcaggctgggagcccagaaggcgacacaggaattgcgaagctcaggaaccagccccctcgcttgcttcctcctccatcgcccggatcgagggcggccgctccgcagccgcggcctcctgccacccgggagcccagccccctctctcttgcacgccccttggctctccgcctcctactgggagccaggatactctcccggagtggg

SEQ ID NO: 128014 - DNA, 1635 bp, Homo Sapiens
  misc_feature (1338)..(1338): n is a, c, g, or t
  misc_feature (1515)..(1515): n is a, c, g, or t
  misc_feature (1535)..(1535): n is a, c, g, or t
acgaagcgaggcctgggtggcgatttcggcacgaggagcaagcgagggggctggttcctgagcttcgcaattcctgtgtcgccttctgggctcccagcctgccgggtcgcatgatccctccggccggagctggtttttttgccagccaccgcgaggccggctgagttaccggcatccccgcagccacctcctctcccgacctgtgatacaaaagatcttccgggggctgcacctgcctgcctttgcctaaggcggatttgaataatcttatcttggctttggatcttagaagagaatcactaaccagagacgagactcagtgagtgagcaggtgttttggacaatggactggttgagcccatccctattataaaaatgtctcagagcaaccgggagctggtggttgactttctctcctacaagctttcccagaaaggatacagctggagtcagtttagtgatgtggaagagaacaggactgaggccccagaagggactgaatcggagatggagacccccagtgccatcaatggcaacccatcctggcacctggcagacagccccgcggtgaatggagccactggccacagcagcagtttggatgcccgggaggtgatccccatggcagcagtaaagcaagcgctgagggaggcaggcgacgagtttgaactgcggtaccggcgggcattcagtgacctgacatcccagctccacatcaccccagggacagcatatcagagctttgaacaggtagtgaatgaactcttccgggatggggtaaactggggtcgcattgtgggcctttttctccttcggcggggcactgtgcgtgggaaagcgtagacaaggagatgccaggtattggtgagtcggatcgcagcttggatggccacttacctgaatgaccacctagagccttggatccaggagaacggcggctgggatacttttgtggaactctatgggaacaatgcagcagccgagagccgaaagggccaggaacgcttcaaccgctggttcctgacgggcatgactgtggccggcgtggttctgctgggctcactcttcagtcggaaatgaccagacactgaccatccactctaccctcccacccccttctctgctccaccacatcctccgtccagccgccattgccaccaggagaaccactacatgcagcccatgcccacctgcccatcacagggttgggcccagatctggtcccttgcagctagttttctagaatttatcacacttctgtgagacccccacacctcagttcccttggcctcagaattcacaaaatttccacaaaatctgtccaaaagaggctggcangtatggaagggtttgtggctgggggcaggagggccctacctgattggtgcaacccttaccccttagcctcccctgaaatgttttttctgccagggaggcttgaaaagttttcagaacctcttccccagaaaaggagactagaattggcctttggttttgatggtttgggggcctcanaaattgaatcatttttcccnccaattttccccaaaattaaaccttgggtttccctttttcctttccatccccttaccccccttaaaaaccccattttaggggggcccactttttttgaac

SEQ ID NO: 128015 - DNA, 947 bp, Homo Sapiens
ttaggggatggaaggaaaagggaaacccccaggtttattgtggggaagagttgggggggaaaatgattcaatttctgaggcccacaaaccatcaaaaaccaagggcatttctagtctcctttctggggaagaggttctgaaaaactttcaagcttccctggcagaaaaacattttcagggagggtaaggggtaagggttgcaccaatcaggtagggccctcctgcccccagccacaaaccctttccatacctgccagcctcctttggacagattttgtggaaattttgtgaattctgaggccaagggaactgaggtgtgggggtctcacagaagtgtgataaattctagaaaactagctgcaagggaccagatctgggcccaaccctgtgatgggcaggtgggcatgggctgcatgtagtggttctcctggtggcaatggcggctggacggaggatgtggtggagcagagaagggggtgggagggtagagtggatggtcagtgtctggtcatttccgactgaagagtgagcccagcagaaccacgccggccacagtcatgcccgtcaggaaccagcggttgaagcgttcctggccctttcggctctcggctgctgcattgttcccatagagttccacaaaagtatcccagccgccgttctcctggatccaaggctctaggtggtcattcaggtaagtggccatccaagctgcgatccgactcaccaatacctgcatctccttgtctacgctttccacgcacagtgccccgccgaaggagaaaaaggccacaatgcgaccccagtttaccccatcccggaagagttcattcactacctgttcaaagctctgatatgctgtccctggggtgatgtggagctgggatgtcaggtcactgaatgcccgcctcgtgccgaattcgccacccaggcctcgctaccttggaccg

SEQ ID NO: 128016 - DNA, 749 bp, Homo Sapiens
tttttatctctggtataatgtttatttaaatagtaatcttaaaaaggctttatacaaatcatataaacacagtttgacattgttgtttattttttacattgaagaatcacagtaaaagctctcaagttcccgtgatctggctcagccagtgaatggtcgaatacctctaactgcaaaccctgaaaaagttaacctgctatgtgacaggttaactctttcccttgttttcttgtcattcatgcttattccttggaccctcatccctgtcaactcccctgccccaccaaagacagaaagcaaccctgtggccctgttgaccacctagtccgggagagtgtggaggtaatgtgtcattcagtacaaggcaaaaaggagatcaatactggcagtggggtttcccaaagggaatgactcaaggagatgggtcagctagcctacccacagataaagataacaaacacaccaaggtgtcccctggccaagtcaaaattgggcccagcgtctttctttctgtcttatgacagaccagcctccagccttggtgtggtatctacatgtagccctgcgtaccctgcttctttttagcattcaaggcccactcagggcctcaaattagccaatggtgaatatggatataggacttttagagggatgcaggttgagttgtacataacttagaggtgaagtgcaggtctgaaacagggctagactttggagaactgtaaatggccactgagcatgacagcatc

SEQ ID NO: 128017 - DNA, 696 bp, Homo Sapiens
  misc_feature (20)..(20): n is a, c, g, or t
  misc_feature (39)..(39): n is a, c, g, or t
actcaaattggtggctgttntcacacagatgtgttggtntgtggtccaacttctttatctgaaaaagccagtgagaaaacatttttgatttgatttttctaaactatctaccatattttaagtgtagcagctttgactttgcaataacgtggcaagtatctgatttctcctttgaggcagaggtttaagtgtaggcctgttacacttgtttgatacctttttcatgacagtctcagtatagatcagttggtacagaaatacatgaacacattttgatagggcttatttcacacaaagaagtttatggttatttgtgtggggtggtgttgttatatattattgtctttaagggaaaagaagctataagattcgctgacagccaaagtatcatttagaaaagtgaagcaacaagatttaggttgatgaaagatacatgagtttgcattttgacctgttcagtgtctgtcttccagcacggtgtgtacacttcttcaaaattgtacacagtttgctaattagaaatatcttggaaagcctcatggtcactaattttcaactagcatcaggtattttgaaaacgtgtgtctggatattaactcttgtttaaactgaatgtatgatattttgttagaatggaaaagtactatcttgttaatttaagtattttaaatatagttgtatatttttcttactctt

SEQ ID NO: 128018 - DNA, 786 bp, Homo Sapiens
  misc_feature (709)..(709): n is a, c, g, or t
ttttttggaaagacattttgcttttttattttctgtaaaactctgtaaataaaatacaaaaccaagggatgtggctgggcagcggcagggtggccaagccccagacactgatttgtggcaagggatgtgctgagccgaggctgggaggcacttgactgcaggcactgactctccaaccccaggggcaacagaagaatatattagattttcattgctaggaatctgtgggggaggggtatctggagccagcccttaccctccctgccagtgcctggtgagccctgaaagtggggggaaaggggcaccaggaacccatgggtgaatagtttagaatgctgtgctggccatgctgccaggcccaaagatgcggggcagggcgtccagggactcctccagccgtcgatgggcagactgtccctcttctccacactgctgtaggctttgccgggcagcttccctcacagcttctgtgtcagtttggcagaggtacaccaggggctcaatgccctcgggagccttgatgcagcctagggccaggcagccagccactcgagtctgcacgtcctcatcctccagctggtccaggaagcacaggagggccctctctcggaaggtagggcccagtgacaggctccggagctgggtgctgacagcagccatgaccttgttgttgccatggacgagcagggagctgagggcccgcagcccngtcccttcgcagacgcccctcgggcgccaatctcagggccttcagcacaacagcctgatcatccgaagcagttgccg

SEQ ID NO: 128019 - DNA, 1491 bp, Homo Sapiens
cagtcgacggtaccggacatatgcccgggaattcggccattacggccgggggatgattaagagattgccatttttatcttggaagaactagtggtaaaacatccaagagcactaggattgtgatacagaatttgtgaggtttggtggatccacgcccctctcccccactttcccatgatgaaatatcactaataaatcctgtatatttagatattatgctagccatgtaatcagatttatttaattgggtggggcaggtgtgtatttactttagaaaaaatgaaaaagacaagatttatgagaaatatttgaaggcagtacactctggccaactgttaccagttggtatttctacaagttcagaatattttaaacctgatttactagacctgggaattttcaacatggtctaattatttactcaaagacatagatgtgaaaattttaggcaaccttctaaatctttttcaccatggatgaaactataacttaaagaataatacttagaagggttaattggaaatcagagtttgaaataaaacttggaccactttgtatacactcttctcacttgacattttagctatataatatgtactttgagtataacatcaagctttaacaaatatttaaagacaaaaaaatcacgtcagtaaaatactaaaaggctcatttttatatttgttttagatgttttaaatagttgcaatggattaaaaatgatgatttaaaatgttgcttgtaatacagttttgcctgctaaattctccacattttgtaacctgttttatttctttgggtgtaaagcgtttttgcttagtattgtgatattgtatatgttttgtcccagttgtatagtaatgtttcagtccatcatccagctttggctgctgaaatcatacagctgtgaagacttgcctttgtttctgttagactgcttttcagttctgtattgagtatcttaagtactgtagaaaagatgtcacttcttcctttaaggctgttttgtaatatatataaggactggaattgtgtttttaaagaaaagcattcaagtatgacaatatactatctgtgttttcaccattcaaagtgctgtttagtagttgaaacttaaactatttaatgtcatttaataaagtgaccaaaatgtgttgtgctctttattgtattttcacagctttgaaaatctgtgcacatactgtttcatagaaaatgtatagcttttgttgtcctatataatggtggttcttttgcacatttagttatttaatattgagaggtcacgaagtttggttattgaatctgttatatactaaattctgtaaagggagatctctcatctcaaaaagaatttacataccaggaagtccatgtgtgtttgtgttagttttggatgtctttgtgtaatccagccccatttcctgtttcccaacagctgtaacactcattttaagtcaagcagggctaccaacccacacttgatagaaa

SEQ ID NO: 128020 - DNA, 746 bp, Homo Sapiens
cgcttgtggtttggcgtataggaacagacattttcagtaatggaagaaggagcttccaggctggggaagatcatcatttccagtggtagcttgacctgagatgatacctgaccaccacttctgggaaggcccagaatagacagaagagagagaacatactagagttgctagcccctaagagttgaacgaaatgggcaaggcccagctgaaataacaggaaacacatgaaaaatgccacgattgtaatgtctgtgaggagagagcaaggcagttcttcaggggaggggtcattgtcattcgaagatgtggctgtgggcttcaccagggaggagtggcagtttttggaccagtctcagaaggtcttgtacaaggaagtaatgttggagaactacatcaacctagtatcaatagggtatcgaggcaccaagccagattcgctcttcaagttggagcaaggagaacccccagggatagcagaaggagcagcccacagtcaaatctgtccagggtattcattcaggagaaggaccctacagatggagggaatgcaggaaagctaagaagaatcacacctcattgcagatctgcattaccgttggaaaacagcagcctcagaaccacagtagccatgaagaccatcagccttcaaccaccacccttgtatcagaggagacaaataagcttggaaatcctcaaaaagcctcatcctcagagcaatgtcattatatatcttgtcttacagctcc

SEQ ID NO: 128021 - DNA, 842 bp, Homo Sapiens
  misc_feature (59)..(93): n is a, c, g, or t
gtgccaagctaaaattaaccctcaactaaagggaataagcttgcggccgctgctcaggnnnnnnnnnnnnnnnnnnnnnnnnnnnnnnnnnnncacaaaagccatctctctttatttttcattcctgccgttcaaccagtttgtgcaagctgaggatgagtgggttttggaacgggaggcagagcatctggggacagaccctcctggaaatggtctatgcacactgctgaggctggttagacttgagaagcaattgacaataaactctacagaactggaaatgttcaaaagtgtcaaggtggcttctggctgttttcctgcctccctgtgggggtcagttacacccatcagtcctgtgcaaaggtcctgggactggcccaggggcagccggattcttcgctggggacaggagctgtcctgctcacccagcagaagcatgccaatggacaggtgctcgggtgtgtgcccaggtgctgtggcccccaaactccgtggctcctcaagcatgtcttcatcctgtctctatgtccgccctttgaaagtgttcatgcaggtgtaggttcctgagaatttgtggatctcctcgagtgcagcctgtggaagtatgcttttcaagataacgagggcatgcattgtccatgggaggaggaggagggcctggttgagctgcacagcttccactgtcctccgggccaccgtctccggcttcagtgggggaaagaggttgggaaacctgactctcatgccctggaacatctcggtgctggtgtggaagggcagcactgtggtggcgctgactcccggacagtccagcagccccagggtcagcctagtgccgaaat

SEQ ID NO: 128022 - DNA, 488 bp, Homo Sapiens
cacaaaagccatctctctttatttttcattcctgccgttcaaccagtttgtgcaagctgaggatgagtgggttttggaacgggaggcagagcatctggggacagaccctcctggaaatggtctatgcacactgctgaggctggttagacttgagaagcaattgacaataaactctacagaactggaaatgttcaaaagtgtcaaggtggcttctggctgttttcctgcctccctgtgggggtcagttacacccatcagtcctgtgcaaaggtcctgggactggcccaggggcagccggattcttcgctggggacaggagctgtcctgctcacccagcagaagcatgccaatggacaggtgctcgggtgtgtgcccaggtgctgtggcccccaaactccgtggctcctcaagcatgtcttcatcctgtctctatgtccgcccttctgtcgtcttctcgcagccgtatagtagtagtagtaggcggccgc

SEQ ID NO: 128023 - DNA, 491 bp, Homo Sapiens
gttaaactttcaaaaattattttattttttataattttctaacacatggtgttagaaaatgaattttggcaccgtgattaagaatttcttttcaagtttaacctttacattaaaaacagtagctacaataaggatatttcaaccttacttagagaagtgataaaacatcaagtcaacaagtatttttgttggagaatttttttataagcgggatagagggaagttaacatagacactcagaagaataaaatggaaattatgccaggaagataaaaaagcaaataaccctccccccaaaaaaagaataaggagcgagacaaagggcaaaacggaagaagcaaggctcaacaactttgttttcctgatataaaattcaagtacttaaaaagttttttaaaaaataattaaatgcactactcatctcaatgaaatttttcgttttcctattttctagaactttctaaaaaaggaaacaaagcaaaaacaacaac

SEQ ID NO: 128024 - DNA, 1864 bp, Homo Sapiens
  misc_feature (95)..(141): n is a, c, g, or t
  misc_feature (304)..(341): n is a, c, g, or t
attaaaagcgggggtataggaaggggaaaagttataaccttagggccccttccggagggaattaaaatggggaaattattgcccagggaagaatnnnnnnnnnnnnnnnnnnnnnnnnnnnnnnnnnnnnnnnnnnnnnnnggaggcgagaccaaagggcaaaaacggaaagaagccaaggcctcaacaacttttgttttcctgatataaaattccaagtacttaaaaagttttttaaaaaataattaaatgcactactcatctcaatgaaatttttcgttttcctattttctagaactttctnnnnnnnnnnnnnnnnnnnnnnnnnnnnnnnnnnnnnnctgtttgacttaaggacacttgctgatcttgacacttgataatactttaagaaatggaaaggttttcctaaatctaatacctgcttaatataatccactttggaagattcatctgaaagaaacatagggtttgatttttaatactaatataaaataatctgccttccaatcaaaacaaaaatgttttcaactgtatacgctcctcggttgtgttttgtaccattttcttgaggaaaacgttgtgtaattctttgtgtgttcccttagtaactactgtaaataagacctgcataggtgttcagaaaaatacttagttgcatacaaatccagttagaatctgattttcaaggttttacaacatggtaattttcatttatatccattttgtctacatttcctctatattttgataaataaaaatcttcccatgctttttttaaataagaaaatattattagtccttgttatttgtacctaaatattttatcaatttgaaacacaaattcataaattgtcattattctcagaggcaacaagcatagaaataaatatttaagttttttctttcttttcttcttcaatctgtgttttaaggctcagagcagacattaagaaatatcaaacaattttttataaaaagtttttcaaatgtttggcccaaagtgaagttgttctgttgatgttatttaaatattcctctcatcttctcagccacaacttcaaagacgtgttcatgccagtcattcacccaaaataaatttcaattcaatgaaaagtaaataacttagggatctataaatgacactgcaatgtatcttgttccatttttaacaggaagtccttcatgcaaatgtgtgagtctcccaggatgcatgaagctccagccttttcgtggtgactcaatagagcaattgtaccttagaaatttgcaaccacctccctgaaagtcttctcccacgttattaagtgcaatgtttatggtaaatgtagaagcatcatgatgaggacgaagagaacgctgtcgttcaggggagtattttactacaaaattcagtagtgcaaatcccttcgtataatagcctgcaaagaccttcagtgtaactggtgcaatgaactcccggataaaatgaagccatacattctccagatcaacttgcttcatgtggatatcatcagttgggacattttcataaccaccagatatacggctatcatgatgttttcccccagaccatttgccgtaatgttccatttcttctaccaattcatcacaggctttttcagaaaatatggggaaccaaaagacatctggacagggctgttcaactatattttcagtgaaaatctttgaataatcacggtttatatacttttccttccagtccacaggattttcaaaaatctgccagaggtcattgttataatgggaagtattgtaattagcagtggataatagccttccaaattcatgtctattagaaatgtacataaatacacccatttctctagcatttcggcaaaga

SEQ ID NO: 128025 - DNA, 1253 bp, Homo Sapiens
agacctgtacagtttttattacataaaatatcacaaaattcacaagtacaacactgcttattttcttgcttgaagatcagatctctggtttatttaatatcaacattcaccacagctgaaggaaattaaactgaacctttaaaaggtaccgcatacggacctggttggggttatatacaatatattcattgtagttgagggtataaccatctggattcagaattcctgtgtcacttgctggtcctaatggcactgtactcccattcagggtgacgaagtgggcagaactgggagccatcttgcccagccccttggtgctatgtttaccttgaagcaatccttcggccttaggattggcctctagtagttcattacactgacctagagctacctctgataagagcagcagtcctgtattctttaggcgagaggcaaagcagtaattggcactcttggaagacatgtcagcaaagtagattcctttcccaaacatgtaacctgtgatgggagcttcaggtggggcaattcgaagcccatggctcaagattcccacccagttactcatcctggaaccatgccatagaagcatcctgttatgaaggtcctctctgaaggcttctttctcaccatccttctccacttcaaacaaatccagcaaggtcatggtatagtcgctgtgtgtgggagcatgggtagattgtaggtactgggaaatcactttgaactcataactttcatggtcaagggggcgcaaggcacaatgtaggtttctatagtgttggtccaatgggtgttctgggctttgtagctctgttttcaccagcttaatagcaatttcaatgtctcccaaagcctctagtaattgtattttttctgacagttccttctgtgtccggattagtggaggagtacggagtccaaagtcatgcggaatcctggtgtagaattcattgcatgcttccatgagagctcgtccatgctggccagcccgaatacaatcctcaatcttcttaagagactggtaacctgccttgatttgtgccactgtcagcttcccaagtggggctttcttggtattatacttcatttccatcatcatttcttccatggcctgaacattacagatcaactttattaactcctgtacccgaagatctagctgtgactctggcttcaagggagatttaagagattcctctttccggacgcgtgggcggacgcgtgggtcgacgatatcccgggaattccggacc

SEQ ID NO: 128026 - DNA, 562 bp, Homo Sapiens
  misc_feature (544)..(544): n is a, c, g, or t
ttagacctgtacagtttttattacataaaatatcacaaaattcacaagtacaacactgcttattttcttgcttgaagatcagatctctggtttatttaatatcaacattcaccacagctgaaggaaattaaactgaacctttaaaaggtaccgcatacggacctggttggggttatatacaatatattcattgtagttgagggtataaccatctggattcagaattcctgtgtcacttgctggtcctaatggcactgtactcccattcctgccaaatggaaaaaaagtgtgtcaacatcagtctctggttcagaagctgcaatagagaacgtagtcttatctggccaaaaggagtcttctagtcctcctggttctgagtacttacagggtgacgaagtgggcagaactgggagccatcttgcccagccccttggtgctatgtttaccttgaagcaatccttcggccttaggattggcctctagtagttcattacactgacctagagctacctgctgagtagagcagcagtcctgtattctttangcgagagggcaagcagta

SEQ ID NO: 128027 - DNA, 1288 bp, Homo Sapiens
acatctgaatgtttcatttgtctatggatttccacctgattactccagaaagtaattacttaagatggggggtgatttcagcatcacccaccctcctatatggccaggcctccgagcatgtacagtaaggcacagtcaccacaccttgggaagggcctccctgcaggtgtgcactgcaggcctcagccctgtgctggttagagttatggagcaacagccgctttcctaagcagaagtgaggcaagctacttccgcacagattgtgaaacagggtttaggtttctcccctcgtggacgagaggccaagggtgtgccccatcagcctgccttcccagcaggtcacagaccatccccactctggctggcctggaagggtttgaccagagcggatcatgcagtgaccagggccagggcggctggcaggggcggcctccgtttccattctgtctcctaagcagcctgggagatgtgggcctaagcttcggtgaggacgagagtctgtcttggaattgggcctcacaggggagagtccagagacagggccaggaaaagaaggtgagggtgtaacgtcattcagagaccagctgcacccagggctcacctcctggaggcacctagagtgagcagggggctaagtcagccgacagtgtggctgcacagcccaggcctgtcccagcagaaggcatgaaccatcagcaaatgagtctcttttccaagaaacgaaaaggtcttgttcagagccggggccttgggagtgtcctgatgtttcaaccactgcgccctgccttcctgtctcgacgcccagggttccaactccaaggtggaatggccaacgtgtggcctcagtgtggtggccgtctggggtgggtgtgggctgcccgcctagtgaccctgggaggcagaagtttctttgcctttagggacaaacttcagcgagctgctgaatattcagaatcgggactgccccggcttggggccgtcgttcaggaactcgtggcccaacccattgccacacttgccacaggacaccttcaaggcttcagatctattgtgctccggacgcttggccacgctgtcggcgtgaatggtctcggtgaacgccggccatggagacgagtgtgcatacttcgagcggctggagaacagctcatagccacacttggcacacacgtaaacgccaggttcaaagtgattctggaaaacctcgcccccgaagaagctgcagaacgacatggcgccaccggaaccgcagcgcgcttcctcgtgccgaattcgccacccaggcctc

SEQ ID NO: 128028 - DNA, 1036 bp, Homo Sapiens
aaggtagcgaggcctgggtggcgaattcggcacgaggaagcgcgctgcggttccggtggcgccatgtcgttctgcagcttcttcgggggcgaggttttccagaatcactttgaacctggcgtttacgtgtgtgccaagtgtggctatgagctgttctccagccgctcgaagtatgcacactcgtctccatggccggcgttcaccgagaccattcacgccgacagcgtggccaagcgtccggagcacaatagatctgaagccttgaaggtgtcctgtggcaagtgtggcaatgggttgggccacgagttcctgaacgacggccccaagccggggcagtcccgattctgaatattcagcagctcgctgaagtttgtccctaaaggcaaagaaacttctgcctcccagggtcactaggcgggcagcccacacccaccccagacggccaccacactgaggccacacgttggccattccaccttggagttggaaccctgggcgtcgagacaggaaggcagggcgcagtggttgaaacatcaggacactcccaaggccccggctctgaacaagaccttttcgtttcttggaaaagagactcatttgctgatggttcatgccttctgctgggacaggcctgggctgtgcagccacactgtcggctgacttagccccctgctcactctaggtgcctccaggaggtgagccctgggtgcagctggtctctgaatgacgttacaccctcaccttcttttcctggcccctgtctctggactctcccctgtgagggccaattccaagacagactctcgtcctcaccgaagcttaggcccacatctcccaggctgtttaggagacagaatgggaaacgggaggggcgccccctggccagccgcccctggcccctggtcaactgcatggatcccgctctgggtcaaaaccccttcccaggcccaacccaaaagtggggggaatggctctggtggaccctggcctggggaaaaggcaggggctttatgggggggcacaacccctttgtggc

SEQ ID NO: 128029 - DNA, 512 bp, Homo Sapiens
ttttttttaaagatgacttcaacttttattgaatgaggtctttattttttaacattacaaactaacactccctttctgaaaaggcagatcttacactcaaagacaatcttcaagcatttttttgttgttgtttaagaaattgagaggggaaatccacagtttattaacaagaagattcaaaacttcattttacagtaataatgggacaacacctaatacatttcacaatcaaaagtggttcaagctaagaatatctagaacagattttaaaatctgggaaagatgacataaactggacaattatcagtattgctcatcacaattttggctctaacagtacaggacaaatgcttgttttgcactgtgcctaagacggccccttcattaaggttcaccaggacacaggcagcatccccgcctcccagtcatttgtacaaatcattaaggcaaatctacaaaggaccagtaaggcactggggcacagcagctgactgcaggaagtctatgtaact

SEQ ID NO: 128030 - DNA, 721 bp, Homo Sapiens
ggaaagaacattttaagcaatgtcatttctagatgggtttctaattctgcagagacacccgtttcagccacatctaaaagagcacagtttatgtggtgcggaattaaacttccccatcctgcagattatgtggaaatacccaaagataatagtgcatagctcctttcagcctctagccttcactcctgggctccaaaagctatcccagttgcctgtttttcaaatgaggttcaaggtgctgctttgcatgcctgccaacccatggaagttgtttcttacttcttttctctcttatttattaaccatggtctgagagttgtttttgttctatgtaacagtattgccacaaaactataggcaaatcgtgtttgcagggagatttctgatgcctctgtgggtgtgtgtaagttaaagtggccacatttaagaaggccaagctttgtagtggttgcacagtcacactgatatgctgatttgctctttctcattgtatgtctatgctttgtcatcagtgctatagtaaattacaaagaaataggtagattgtatgaacatacccacaaatgcctatgatttaggttaccaatgtattctttctcatttggggttttgcttctgtctgtctgtttattggaaacttgtacttcaagtagggggaatcctaattctaatacctccttagctaagttttattattcaggcaataaacatgttttcatgt

SEQ ID NO: 128031 - DNA, 1311 bp, Homo Sapiens
  misc_feature (817)..(845): n is a, c, g, or t
gcgcctcgcccacgctcgccccagctctccctcaccggcgtccttggcttgctgctccttcctcctctccgccgacgccgggtttcgcttttcctcccgcgctctcgtgctagcgggtgcggcgtgttcggtctggccctctgcctccttgcgtctgtgcgtacgctgttctgccgcttcccccgtgcgctttcccgagctccgcccgtcgacggcccatggcgcttgttgagcgctcgtccgctactctctcctcctcgcctcccgtctcctgctgctcccttagtcgggcgctgacccggtcggcagctctcacccttgcccggtgttagtgtgtggcgatctctgggaaaaagtggtcgcggggagttattgtcggctccgggtgtcgtgaactgtgctgcgagagcaggctacgcgtattatttgcgcagttatggtgttgagcgagagtgttgtacacgcgtggggaaagtggtggtagaagttgtaccccgtttggaggctccgttggattcgttccgtgtaggtatatgtgtcccccaattatggggctaccccccccgcggagttgaagaggttccccttgtgaccaaggattccccacagttagaccgctgtttgcccccgcttcccgcagcgcttgttgtgaaaacgtgtcgcggcccattcctctagagctttatataatatacggagctctcccttattatggggagcccccttgtggacacaaataaaacttggttaagcgcgctgtaaaacttggggcccctctcggagagggataaattcttagagaggcgcgtcccccccnnnnnnnnnnnnnnnnnnnnnnnnnnnnngcagtttaaaatgatttaattgacaaattcttgtgatttacatttcagtaatcaactgcaaaagtgaggaagtaattcatgggcctgtagtgcttttgaaaataatatttatgactcataaaaatgtacattcataatagtatgacatggacatattttaagaaagttcaagcatatacaagcattgtttaatctcacaaaatatattaattttgttgggaatatgtgcattataaaagggtctttagtttaccaaagggttcaacactaagctatttttaaagttgtaattattttttccaatctaaagaggggttaaggccaggtgcagtggctcatgcctgtaatccggacgcgtgggtcgacgatatcccgggaaatccggaccggtaccagcctgctttttttaaaagctgtctatagtgtcactatagcttgcggggggtgcgtggtgtgggtgtggtgg

SEQ ID NO: 128032 - DNA, 1245 bp, Homo Sapiens
  misc_feature (62)..(81): n is a, c, g, or t
aacccctccacttcttctaaaagaacaatcaataaataaaaaaagtggcggccgcgacagcnnnnnnnnnnnnnnnnnnnngccagaaaaagttattttaattttctattaaacattcttctcaaagcattattttatcctatatctcactgaattttaagaaataacattagtattagaaaaactaggaaaaaagataaatgcagataattaaacttacatgaaaaaggaaaattataacaaaggactgagaacgttataaattgaaatgagattataatttgaaaactgcatctgaaagcaaactttattgttcaattattcttaatgatggtgttttatgactaatacactgatttttcaataaggaaacccatgttaaaaatatttttattttaaaaataagcctgtgttcaagctctgatcatatttcttttattttgatttgggaagaaaatactgtttctgatagcatgaaatgcaaaatttttagatttttaatctcactaattttaagaactattgagaaattgattaatgacatgaagtgcacaacactaattactggccagctgttggcattgtgtttcttacttagttctcccaaggaaaactcttaaactgaatcttcagcagaataatccttaaatatactttgtaagcaaaacaaaagcttttttgtttacatagttctttggattttactgttcctaattttattctgaaactcaattttaccccagaccataattaccatattaactttgtaatgcacagttgtatgcaattccgcaaagcagtagtataccatcaggctctattcacccagagcataggaaaaacaggattggtcacacccattaagaaacaaatctatcccacgctatttgccaatgtgtagtttcagtctaaattctgacaataaaatgtatggatatatatctatatatctcatcttgattttcaaaagtagccaaagggagttcttcagagcttagcgttgcctggctgaagctgaagattttgtaacttcatagcgagacccatgttgccagtgattttcgatttgccttgaaagaaggccgactgaggattcattttaccagtcattaaagccaggaagtctgagtcagccattgtgattgtgcagtcagccttcttatctgagttaggaagcactgatcctttgccattccccggccgtaatggccgaattcccgggcatatgtccggtaccgtcgactg

SEQ ID NO: 128033 - DNA, 1154 bp, Homo Sapiens
  misc_feature (1042)..(1076): n is a, c, g, or t
aggagaactgattaaggaccagcaggtgcacaaccactaagtactggccagctgttggccattgggtttccttactttagttctccccaaggaaacttcttaaactgaattcttcaggcagaataattctttaaatatactttgtaagccaaaccaaaaagcttttttttttacatagttcttttgattttaactgttcctaattttattctgaaactcaattttacccccagacccataattacccatattaactttgtaatgcacagttgtatgcaattccgcaaagcagtagtataccatcaggctctattcacccagagcataggaaaaacaggattggtcacacccattaagaaacaaatctatcccacgctatttgccaatgtgtagtttcagtctaaattctgacaataaaatgtatggatatatatctatatatctcatcttgattttcaaaagtagccaaagggagttcttcagagcttagcgttgcctggctgaagctgaagattttgtaacttcatagcgagacccatgttgccagtgattttcaatttgccttgaaagaaggccgactgaggattcattttaccagtcattaaagccaggaagtctgagtcagccattgtgattgtgcagtcagccttcttatctgagttaggaagcactgatcctttgccattcttcacatccaccacccaggtggcctctttacccccagggccatctttcaccttgaaggcaaaaataccaccgattttcttcacaaactgttccccttcctcttcaagtttcttctcaatctccttaaaaacaagatttgccttaaatccatcacttgcagagctggttggaacagcttcaatttgatgagttctaaaagaactggcggcttccggaaaacccatcttgtagagtgttacaaccacagctcctccaatgcctaaattatgctgcagagccacctttgcaccaggaacttgcctcccccggccgtaatggccgaattcccgggcatatgtccggtaccgtcgactgnnnnnnnnnnnnnnnnnnnnnnnnnnnnnnnnnnncgccgcttcctcgctcactacttcgctgcgctcgtcgttcgttgagacgagtagcgcctataagtgatcttaatcttt

SEQ ID NO: 128034 - DNA, 1501 bp, Homo Sapiens
  misc_feature (781)..(804): n is a, c, g, or t
  misc_feature (1330)..(1330): n is a, c, g, or t
  misc_feature (1385)..(1385): n is a, c, g, or t
agggtatacttcaaacacaatttatttttaatttatcaaacaaaaatcaacaatttaagtcactgattggcaagctacagcctgcaggccaaacccagccctccacctgcttttgtaaataaagttttcttggattacagccacactcatttacacgcatattgtctattgctgcttttgcatgtcaacagcagagttgagtagatgtgacagaggccgcatggcctgcaaagcccaaaatatttcccgtctggccctttacagaaaaagtttgctgacccctgatttaagtgatcatgatttaaggacagggtgatatctgacaaaagtatcagtaagaatggggacagtgacccatcaaatagtaagatccccgcaaacagaagggagatcaagaagtgtatatttgacatcgtttctttgacaaacgttttgatataaattataattacttcaactacacaatcaaataatttaacaagaaccttttcctccctgattcagtcactttattatttgagcaagagaacagattgctgcttagtccaaaagaggtcacatctgaaagggtgaagaacagcttaaccatctcttatctgctggttcttgaagcaagctgagagttgctgtttgtcttccagatgcccatttcctcattgcagcagctgaagacttgctgtagccatataacacaagctgggaagcaatgaactcctcctcatctctctgctcctaggctccatgattgttctatttctttccggggaagggttactgtcannnnnnnnnnnnnnnnnnnnnnnnctgagaaacagtgattggctcagtcatgattgctattgagtttgtatgctattggcatatcaggcacttgctgactagaaaagttttatgcaataagttcatgtttttatggtgccagatggaagacagaccttcaagttgagttcccaggattctacacactcagaatctcaaaatcttcctccagatcaaactcctccagttgctcagtagagtcaatgaattctgccccagtggttgtcacttctggcttggctggaggtacaaagggaggccagtgtgatggatgtttctgaactaattcaaacatccttaaattctcctttagaatttccttctgaacaaggctacaccagttatcaaagtctttttcttctttgcagaaaaatcccaatgcaactgaaggatccaggtttaggatgttcattcgctgtggggactgcaggcaatggaaagtctggtcattaaccgttccattctcttcagtgtcaacaaaggtctgggttgtatgagggtccaagaaatnactcgtcacctagaatctatgaatatacgcgtatttggtttcctcctatgccctnagacgtggatcttaaactcttgatgcacacataacggatgatttggtatgccagcgagggacatacacagggttcagtgacatagacaggtgctatctggtgagcataagacggag

SEQ ID NO: 128035 - DNA, 716 bp, Homo Sapiens
gcacgagggggaaaggcttttgagacaaaactgtgctgatcagatagaagttgtttttagagctaatgctattgcaagcctttttgcttggactggagcacaagctatgtatcaaggattctggagtgaagcagatgttactcgaccttttgtctcccaggctgtgatcacagatggaaaatacttttcctttttctgctaccagctaaatactttggcactgactacacaagctgatcaaaataaccctcgtaaaaatatatgttggggtacacaaagtaagcctctttatgaaacaattgaggataatgatgtgaaaggttttaatgatgatgttctacttcagatagttcactttctactgaatagaccaaaagaagaaaaatcacagctgttggaaaactgaaaaagcatatttgattgagaactgtgggaatatttaaattttactgaaggaacaataatgatgagatttgtaactgtcaactattaaatacattgatttttgagacaaatatttcttatgtcaacctgttattagatctcttactctgctcaaattcatcactgaaagatttaattttagttaccttttgttgatttaaaaataattgcatttgtatattgctaactgataagacaaattgagttattgagctattaaatgcacattttaatataaatgcagaaatcccaaataaaatgctaacatactg

SEQ ID NO: 128036 - DNA, 768 bp, Homo Sapiens
  misc_feature (721)..(721): n is a, c, g, or t
actcggagaagtgccaagtttattagagtgagagagtatcaccctcacattgccaccaacagacatagatctcagagacacactgaccttgcaccataattatggtgagtttctaggttagaagataccttagaggtcaccgggctgaccctcccatctgatgtgttaacccctcttaaacatctccctccaggagactgaggtgagattctgtttaacatacggctatcactgaaactctggccagctctgaatctgcaccctggaggcggagaatgtttaagcactataaggcagtagaaggaaagttccttggctcaggccccaatggtccccctttttttaatgatgaaaggttcccagagtccagtgcaaagtccctcgaaatcccccccaccaagcacaaagcacgaaaggaggcctgggccgagggactgggttagctggattttgtccttgagctttgagaaggcctagttctccatccacagaaggcctctcttgcagggttctggggccagcccttgccatgagcagcttgttcttcagctcacgaaactcctctcagagaagacttaggcttgctgttccaccagctgtagtttggcagtcttgactcgatgagcttccttcaggttctgtgcacggacctctgggttggaaatgaactccacctgctgcacaggaaaccagcctcgctccccgtctgagagcctcacgncctcccagccagccgtcactgctctgctgagtcacatcacacgtcgg

SEQ ID NO: 128037 - DNA, 1134 bp, Homo Sapiens
  misc_feature (1031)..(1066): n is a, c, g, or t
ttttttttcttcattaaagaatttaatagggagttgattatgttgtagaatcatatcgtcctattctgtgacacattagaaacataaactttagggctttttcatctccacagcatagaggtctgatcgcttctgtctaaaaacggggatttgctggcgtatttcagccagcttcttcaggtctatgtctgaatacacgattgcttcttctgtgccagctttggctagaacctccccccaagggttcaccacggtgctgtgtccccaggcaacataggaggctttgtcatcccgggcaggagaggctgtggccacatacacctgattatcaacagcccggcttcgctgaagtaactcccaatgggctggtccagtggtcagattaaaagctcctggatataccaacagctggcagcctctctgtgcgtagatttgtgcaagctctgcaaaccgcatgtcgtagcagatgcccagacccactctgcagtaaggagtatcaaatgtggagaaactatcacccggactcaatgttttagattcttgaaatgtaatttttccaggaacatcaatgtcaaacagatggatctttctatactttgctagtaaagttccatcaggcccaaacacagcacaggtgttatataatttcccagcatcctcttcagggatagagcctccaatgagatatatgctgcattcctttgctacttcagaaagcttctgtgtggattcaccaggaattttctctgcatattcaggaaaatatttcgctccatatggagaattaaagcattccggcaaagaaactattttggctccttgcgttgctgcctcccggatgaagctacaagcgcgagtgacgttatctgatttgatggaagaaatctgaagctggatgagggccaagcggaaagaggtcatgactctgcagacaagcaccacctgcggcgcggactgagcgctggagatccggcggaccccccggccgtaatggccgaattcccgggcatatgtccggtaccgtcgactgnnnnnnnnnnnnnnnnnnnnnnnnnnnnnnnnnnnngccgcttcctcgctcactacttcgctgcgctcgtcgttcgctacagacgagctacccctatagtgact

SEQ ID NO: 128038 - DNA, 721 bp, Homo Sapiens
tttttgctatgccttcttgatttattttttgttgttgttgttcacagcattttgttgatgggatttggaacactgtcgtatttcaaagctacaaagcaatattcatcaaataaagccaataatcagctataccaaattaaatgtcccaaaactataactttttctttttaggaaagctgccgttatcagaatgcatggagtgcaaggcacaaaagccttgctgtgattcgttgaaacttcctatagaaaacccaccaatttcttcacctcctggcacacagtgtatgctaattctttggcttttgctgatccaatttgtaaaaccttctctaaatggtccttgtccagcttcagtttttcaatttcacgcttaattggggcaaacttctcaatcacagcatctgccacggccagcttgtagcgagcagtgttcatgcccgcgctgcggcgcaccacttcctccacggagagccccgtcaccgcggcatgcaccgccactatgttggacacgccagcgcggccagccgggtcataggtgacctccgaggtgaagtctgtcacagccttgcgggaatttctgcactatctcctctgggctgtctgttattcggacggtggccagtttgtcagggtctgatttcgacattttggcagaaggatcacgtagggattttaccttcttcatggatgctagggttaaaacaccaacacacacataccc

SEQ ID NO: 128039 - DNA, 1810 bp, Homo Sapiens
  misc_feature (190)..(209): n is a, c, g, or t
tttaaggttttatctttattttataaaaactgctacacacacacatacactctctctctcccctcttgctttcctcatttgacctagagaagtttggagtttgttcccacacattcttttcaaggaaataccattcagccatggtatgtttttaccacaatttattcatccattcccttactgatggtcnnnnnnnnnnnnnnnnnnnnggtccttaccaaaaaatacaatatacattagtaaacatataatcttaagtgctggcgctttttattccttagggatagattcccaggagattcctaggttgtaagagtatattaatgttaaaacagactcacaatgttgtccaaggaggctgttacaatctacatttctaaaagcagctatgaaaataacgttttcccctcctttgtgagtaagtaagatgacaacttagacaaaagcttattgggctatggatgttctggataaatttgttcagaaagtcactcaatatatagtgtgacagcacatcaatgatatccaaaaatattttttaaaagccagtttttggttgccatttataatttccaatacatgatttgtgattgatagggaaaggctgaacttaagaatttgaaatcaagtctataaaagcaaatctttgagttacacaacaattcttgttaatatctggagagaccactgaaaaatctgatttttataaaagtgtaaacatgtaaaggaaaagtaataacttataactcatgttccaaagggaaatgttttaggttggcaacagcaaaactcaaggaagtagaaatgcctcctttaaacaacaaaatagtgtaaaaatttacttctaaagggggttatgcacgtgaaaaatttaaaaagcaatgaaacagttgacagttatttaaaataatttttcctctaaagtctctgaaatgtaacatttgtgaactacagaagcatcctaccatttttgctagacaattcatgaaatattaagggaaacaaggaaagacaaaaacaggtggtttctgtctgtgttacacaatattttggtaacagacatgcatttgtatgcaaatatcccacgggaaaataagagcatgacgaatggggatattgtctttacacggcaaactcttattctgtggtgcatactgagtagtacagctcatgtctgcctccttcacgttatagatcggttatttcacatttgcatatttgtgtaaatagtgcttctagaaaatcttcagcaaaccagaagcagtctagaaaatcttcagcaaaccagaagcagggaaaacttcaaacactgtcttctgtttcctaagaggcagctcaagaacaatgttcataccaactgatatatgccagcaagcagtagggaaagacgtaggttccatgctactttaaatgttacacatttcatttggaatgcatactggattgcagagatactgaaaaacacatgtgatgtttagtatggaaaatcttgttatgtcctaattatcacagaggacaagaatttcaaattcccagtgattatgctaaattcacatgtgcagatctaaagcataccacttgtgttttgtggcatatccacataaaaccactaaattcataggatactgtttgtatatttcttatgctgctgtctagaatactcaattcattcaagattttaaaaagctcattgtagtacaactgggtatggctatttacaactggatatattctgatatgtattctttagctgggtatcacatgtaacttccagtataatgttctcatgggatcctatttttaatacatt

SEQ ID NO: 128040 - DNA, 600 bp, Homo Sapiens
  misc_feature (90)..(140): n is a, c, g, or t
aacattttattagtattttatttgtatttttggagaagatatagagtttcatgagaaacactgatttttctcaaacaatagaaaaagtgnnnnnnnnnnnnnnnnnnnnnnnnnnnnnnnnnnnnnnnnnnnnnnnnnnnccactgtcttagaagaagaaaacaagtctcttcagcaagcatgtggccaattcagatgggaggaaccagtgaagttagaagttacacacaggaagtgagttcagatttatccacaaatgtcttctggtctagttctgtaaggctccaaatgggccatctcagcttaaaactggcaacaccctctcaaagctctcaggatcccatctggtttgaacctggggcctcattctccaggaggctgcatctgtttacagaactcatcaaactgctgctgctccagttctgtcatgactctgttgagggcatagatctctgctctttgtctctgcttcagctcctgctgggctgatttctgtttggccttctcaactctgctgacagattctttaactttggttttttctttacgtgcaggtggatccatggcttgacttctggatatttcttaggaggctctgat

SEQ ID NO: 128041 - DNA, 317 bp, Homo Sapiens
  misc_feature (176)..(213): n is a, c, g, or t
tgccagttttaagctgagatggcccatttggagccttacagaactagaccagaagacatttgtggataaatctgaactcacttcctgtgtgtaacttctaacttcactggttcctcccatctgaattggccacatgcttgctgaagagacttgttttcttcttctaagacagtggnnnnnnnnnnnnnnnnnnnnnnnnnnnnnnnnnnnnnncacacacaaaaaacactttttctattgtttgagaaaaatcagtgtttctcatgaaactctatatcttctccaaaaatacaaataaaatactaataaaatgttaa

SEQ ID NO: 128042 - DNA, 975 bp, Homo Sapiens
  misc_feature (604)..(604): n is a, c, g, or t
tggttccaaaatttcctttattatgaaaaagtaagtataatgtttagacattaatgtacagaaaataattgtcatatatattcctttataattttcacacctgtttattttaaagtgttaattctacacattaaaaaacatactaatgagatcctgtttgaataggaaattgctaaattttacttgcaactttttgtagctataattctaatacacattgggatctaaaactattagtaaacagcaacaatagagactacgtattttttaaattgggcaaatgaaagaagaatatattgagatgtaaatcaggaagtagttatttgcgttacaaatatgcagattaattaataacatacaccttttaaatactaaagcatttaaaataagtttaacaaaaaaggcaatttacactttttaaaaccccatcagttgtataaagagaggcactacttttatccacgaaaagcatcaaaattttttaacagttcacaaataggggcccaaaacaactgatttatcagaaacaaaacaatacaatggctattcacagtgtaagaaattaaatctattttttaaagcatgtttttcagtctcaaattantaacacactttgacttccatttctgcttttccttaaatcactctggactgtgtggaagaatgccgtaacatgaagctattagcaatctgggttaatgttctacacaaaaaatatgctgcctatatacacagaaagtaaatgaaggaaaaagttagcactgaagtacaatgcatactccttaggttcttagaactctaccagtctaacagaaagcaccaagatacagatgccaaagtcagaaaaaataccaagcagctcagaatcaatatcatatatcttattcaaggtaaattttatgttagattctttgtctggcatttgggaggctaaattaacttaggaggctagagatcccatctctactttttttg

SEQ ID NO: 128043 - DNA, 813 bp, Homo Sapiens
  misc_feature (15)..(28): n is a, c, g, or t
  misc_feature (53)..(72): n is a, c, g, or t
aaaactaagtcagannnnnnnnnnnnnnccatagaccacatcatttaataatnnnnnnnnnnnnnnnnnnnnttgaacaaaaggaaaaggtggatataaagtggaacctgtgggaaagaggcaagggctgcaggacagaagagactgggaactgcaggggccctgggactcaggaggagatgctgattcagctcataggtgacccagtcctggccccggctgttcccaagagaaggctgtaagtacccagggaggtggtaagcaggatggaggaaaaatcagaggactggggcacctggctgttccccatctctggccaaccacctccttgcctaacctagctcttgcctctcagacttaatgggaaatgagagggagggtcgggctaagtcccaagagataggttaagggggtgtgtttggggggaaaaggatggccacttttccatttggtatgtatgtagggataggtgatgtgaaagacccttggctccagggtggtggagactgtgcctatccctctgtggccataaccccctggggccgagtggctggtacctgcagctctagtgttttcccagctagcggcgcccaccccggtcccgcacaggtgtgctccgactccggcttctgctgtggcgcttggtgtccctgcgatccctttccctgcctcgttctcggtcctttccctatcccgatctcggtccccctgtcccgctccctttctctctctctctacctgtccctctcccgactgtgctcccgaccctcgtgccgaattcacaacccatgcctcgtacactaagccgatagt

SEQ ID NO: 128044 - DNA, 886 bp, Homo Sapiens
tttgctatgaattttaaattttttatttttgttctggaaattttatgtttacttaaaaccttgtatataatagaaacataatccattgagcctttggataaacaaaattttcggagtttactcataatatattcttcaaattatcccacacaaaactgcttagaaagaatgtgttaaactatactgatgatttaaaaacaagcacaacaacgtaaagaatcttcctctatttcaggagaaatgatttactgtgaagttatccttttaacatctttggtgtcaattctgggtgaaccaggatggtcgctttctgtctcgttcaatgatcctcttgccctgatcttgttcagacggtgtctctcctgtgtacagcaccacagtctctatggtgggagccttaaaagggcccccttcttgcttccctatctgtcgtctgatttctgcagtctccttgcacaccttttcatagcagtaggcacaaaggacatgtttctgtttcaggtgaccacattcaggacaaacgtctatgttgttcttaactttaataagcttctgcggatttcttctcctacaccggttaacttcaatggtgcgtctatttttgggagctgccatccaaaagatactgtccaaaaggctggaattctctttacttccactggtatcatttgctggctctgtaaacatggctgggccctgtactgctaatgctggtccccacggaggactgggaaagcccggccggctctgcggaagcttccgtagcagtcgctcccagtagtttcgaagcactccccgggccgcagaccacggcgaaaccaccaagaccagcatggccctcgtgccggtttcgccacccaggcctcgctacttaggaccgatgggg

SEQ ID NO: 128045 - DNA, 819 bp, Homo Sapiens
ataattccaatggaaccttgtgggataaaaccaaaatttctcgggagtttaactcaataatataattttttcaaaattatccccacaccaaaactggctaggaaagaaaggggttaaccttatgggtgatgatttaaaaaccaagccgcaggcaccgtaaaggaatttttcctctatttccaggagaaaatgaatttactgtgaagttatcctttttaacatctttggtgtcaattctggggtgacccaggatggtcgctttctgtctcgttcaaatgatcctcttgccctgatcttgttcagacgggtgtctctccctgtgtacagcaccacagtctctatggtgggagcgttaaaagggcccccttcttgcttccctatctgtcgtctgatttctgcagtctccttgcacaccttttcatagcagtaggcacaaaggacatgtttctgtttcaggtgaccacattcaggacaaacgtctatgttgttcttaactttaataagcttctgcggatttcttctcctacaccggttaacttcaatggtgcgtctatttttgggagctgccatccaaaagatactgtccaaaaggctggaattctctttacttccactggtatcatttgctggctctgtaaacatggctgggccctgtactgctaatgctggtccccacggaggactgggaaagcccggccggctctgcggaagcttccgtagcagtcgctcccagtagtttcgaagcactccccgggccgcagaccacggcgaaaccaccaagaccagcatggccagcgccattttccctgctggaaaccc

SEQ ID NO: 128046 - DNA, 730 bp, Homo Sapiens
atgcttgtattccttcaagttgaaggaaataaatatatacttaatagatttcagtatctcttagacatctcttgttaggctttactaaccattcattcagggtatgactgttgggtgaacttctttgccctattcccagctgtgagaggcaattctccaggtttctaagctttagacctacgcccttctctgatgaggttaattagggtttgggctgaaacccagattcctatatatgtggatagagtgatgtagaagtactttatgataataaatataaatgaaatttagattttaatttagaaatagaaaacatttaggcaactcactgaatcaaaaataaatatagacaaatttaattaatatatttatttattatattttcctgggttgggctttggcctctatttcatatattttgtttatttttcaggatgttctgggataatgtagtccaggttctagttctgcctttgtcacttactagccatctagtcatataatgctgaaaaatatattatgtagctctaagataaattcaacgtacctgcatagcactattcaacatacttgcacagtattattgtcaatatgtagtctaacagataagaaaccactgtgaaaatagtaaaccattataaaaaatgatgttttataatgatacatctttgcacttctaatattattgctttaaataaatgtggtatatattcagcatacagccaaattt

SEQ ID NO: 128047 - DNA, 700 bp, Homo Sapiens
tttttatagcctggactattttagagtttatgacactcagctgtccagttacacggtctgtattccacagggatatggacaacatgccctcacatacacacacgcgcacccactcccaccctctggcacccatcctcccctgcgctgtgcacgagggagcagcccaagaggcgctgtcctctccgtggtgctgtggacggagctgcggctctctcccggctctctccaatgctgggttccattccagctgcactcccagagctgggtcctggtgagcagcagaattcttcgggctccttaggcagcttcctcatggccggatggtccagtactgcttcccagctggctctcctgggaagttcctggacccaggctggaatctttgcagtggcctcaaaagtcccatgagtccagccaccttagtcctgccattggactttgggggtcctgggccaggggaccaaccatcccgtaagccagagggtggaagaggtagaagctgtaggcagttcccaggagcaggctcaggattcccgccacatgtatgcccctcgccaggggccatgaggccaagccccaggcacagagccgcaggagggtgtccacagaatgcctgcaacctccgctggcagccgtgcccctctctgcatggctacagcaatgatgctccctgagaggaggtatagggcgatgctcaaca

SEQ ID NO: 128048 - DNA, 1305 bp, Homo Sapiens
attagccagtactattttagagtttatgacactcaggtgtccatttacacggtctgtattccacagggatatggacaacatgccctcacatacacacacgcgcacccactcccaccctctggcacccatcctcccctgcgctgtgcacgagggagcagcccaagaggcgctgtcctctccgtggtgctgtggacggagctgcggctctctaccggctctctccaatgctgggttccattccagctgcactcccagagctgggtcctggtgagcagcagaattcttcgggctccttaggcagcttcctcatggccggatggtccagtactgcttcccagctggctctcctgggaagttcctggacccacgctggaatctttgcagtggcctcaaaagtcccatgagtacagccaccttagtcctgccattggactttgggggtcctgggccaggggaccaaccatcccgtaatccagatggtggaagaggtagaagctgtatgcagttcccaggagcaggctcaggatttccgacacatgtatgcccctcgcctatggccatgaggccaagcaccaggcacagagcctgaagagggtgtccgacatgatgcctgtcaacatgcttgagaagagcatggcttggaagtagtggtgggagtagaggacccggcccatcaggaaaaacgggaagtaatggagtgtccagccgagcaggacctggccgcctcctcgaagcaggacctgggacaaccctgcaacctccgctggcagccgtgcccctctctgcatggctacagcaatgatgctccctgagaggaggtagagggcgatgctcaacagattcagccaccaaaccaccgggttgccaagcagatagactcggaaatctgtgtcattgacccctgagaagcgtaggaccctgatagttgataggccagtgccagggtttggacgtgaactcaattgtccttgggtttgaggccagctgttgcccccggatcatgaccatgtgggattccagcaagatctcaggcaaactgggctgtagcacataccaggctgatgtttggcagcttgggattgatatggtcctccacattccagatggagttgagggtttctttcaggtatggggtgcaagtaacttccaactgctcccagccccacttgggcagaacctttcccgaggagcccaggacacaacctgtgaccaaatggatgaagcgaattcgacttctcagcactttgatccggtttcctaatttccggttacgcctcgtgccgatataatccccgtccttctagc

SEQ ID NO: 128049 - DNA, 384 bp, Homo Sapiens
  misc_feature (314)..(314): n is a, c, g, or t
  misc_feature (344)..(344): n is a, c, g, or t
ctggggaagaaaactgcagcagggccacgcaggctgggggccgtgtcaggggtccaagaccagctgggaggcagacggggagacagtgtgtagggctgggaggctggacaggcggcggattctcgctcccgtcaagccaggacaccttcacagggttctgagcacggcgccgggatctcgcctccacattccagatggagttgagggtttctttcaggtatggggtgcaagtaacttccaactgctcccagccccacttgggcagaacctttcccgaggagcccaggacacaacctgtgaccaaatggatgaangcgaatcgacttctcagcactttgatcggnttccaaattttctgtttacgacctcaatccgcagggttaa

SEQ ID NO: 128050 - DNA, 976 bp, Homo Sapiens
  misc_feature (313)..(322): n is a, c, g, or t
  misc_feature (850)..(850): n is a, c, g, or t
ccgagcaggaatatccactttatttggactccatgacaccgttcctatgcccttgactagatgtgaatgtattatacattgttctagatttgggggaaaaaaatctcttatgacataaaattggtagggaatgggtttatcagaaaggggatacaaaacataccctaagctccaaatcattcacttcttcttgggtaaagagctaactgaatgaaagaaattgatttaacacttaaattagacaccaaccacctttattggctgccaccctaaattagttttccttaaaacagtaatatttcacttttactgnnnnnnnnnnccattaaagcaacaccattgtgctgcaaaactaactctatgcaattaagtacctgatacatgttttctgcttttaacaagtgatagaaaaggttacatcatctcattaagaaaacattttccttagacatttcgtttggttttggttttctgttgaaagagttatagcagatggctatttcaaagattggttctttctcctttcacaagtcgagctcgaaacatccaaatatccttcaagttcacgctattttcagctccaaagaatttatgtgctattcctacaacttccttctcgatgttttcttgactggtgcccttcacgtcaatgtagtggcaatcggcactggcgaaatggcaggaaattgccttccggaatccctgggttttattctgaccagatccgtggatgagcaaaggatggaagaaaacagtgtcgcccttctccatcaccaggtgcacccgggccttgttttcctcgtagtcctggatcccgtggaacattttgttaactcccccctcccacttnggggtaatcgtggggcttcagggagcccttgtgtgtgcctgggagcacaaccagacagccgttgttccggctgatgtgctcatcgccgtccaggcgcaacgatgagatcgctgggcctgaagggga

SEQ ID NO: 128051 - DNA, 1012 bp, Homo Sapiens
ttttaattgataaaaattcattttttatttgaaaagtgtgcagaaacaatcactgaatacaattctcaaccatagtattcatagccagacaccaaaaaatcattggatgctatgatttctgaagccactagaactttggtacaacaaaataatgacctaacagtgtgcgtcaggaaccacagtctattaaggggcatatagaataaaaacttcaagtttatagttttaagttacattcatagcactagacaaaacagatctatataggagacagacaaaataatcaaacgtgcttagcctaaaaataaagataatattacttgaaggtaaactgttgggatacaatgaagcacttcagtgttatattagaacatcgtctacttttaacacactaaagcaggataatttatttttttaaaaaataatttcagatacaatcagtatctcttacaaggctatggacacagaagccctatttgtacatggaatattttgaccaacttgtaatatactacctagaattcattggtttccttgaaataaatacaagatgacatattttgtcaataatgagatgtattaaacattttcaatcaaatacaatgacttcaagttgccttcccattttcagttttcaatacctctactgtatgaaaattagtgtgttttccctgctatgatacctctttttatatcaagcagtttaaattacaactgtggttttttattagattttagtttgtgaatagtgtctatttatgaaatggaacataatttacaaaccactttcttatacatatctcctttgagcctgacacgaactctgtgaagcacatataaacacatacagggtttataagccctatatgaggataaatcactaagctatttaatgacctactcatggtcccaagttgttctttctggccactttcctttctacaacactaggtgttttcacaaggagcatttgaaaacaaaatcaccactgcaccagttgcacaatattgct

SEQ ID NO: 128052 - DNA, 873 bp, Homo Sapiens
ttttaacttagaatctaatctttattaacctgggatatcacagaaaatacttgggcctgccacttgtatttctttgtcctcaatactgaacactagacacatttgaaaccttcctcagaaggaaacaaaccaactggttatgcctgggtggtggcatggaagatgcccattgttgcccaatttgctaataagtattttgaaattagaaatgaaacatgaggtccaagcctgtccagttccctacccaacccattcctcctccctggaaaaaagaaacccgtatcatcttccaaatttctgattcatcactgccacttaaaaatgaaccgttttgaattttaaaatgtgaataactcaagtatcttttcttttgagatgcccggcctgagcactaacttcaggcattgctgaatgcagtgaagaaaccagagtggtgtctgctgcctcctgatcttttacagctgacagcacagcctatttctaaatactactagtttgtgaggcagagacaccctctgaaggaaccagacagactatggaggggtacagtgtgaagtcactggaaaacttcctcaccctatttctttggatgactgtcctgagttaaggaaggggcccaactgttggcagcctcacagcttgggctgggggcctttgagttgggtccctggagaaggcactgtaagccctgaccaggagcgacagggcccccagtgagatggtggaagggcaaaagtagagacctgcgatggtgggatggggaggcctcggacttgggtgggctcctttctcttaagcgagggcccaccttggtgctgaggggactagctgagctccattgagtctgtgctgggggctgaagtggaatccttc

SEQ ID NO: 128053 - DNA, 1351 bp, Homo Sapiens
  misc_feature (1258)..(1258): n is a, c, g, or t
  misc_feature (1267)..(1267): n is a, c, g, or t
tttttggcagtacatgaatgttttattcttcataaagtgcttaaaacatgaagaacaagctctttataaagagccttaactaggaagacaaacagcaaagcagaaccatgcctgctccctgcccaacccacctgcaactttcctccaagtgtggctaggagaagaaacatcaacaaggaccctgggcttcgattcaaaaactcctctgaagccatccatgccctgggcattagggaggcccacaaaggtcagggccagggctgggagtgaataaagcccagaggaatccccagtagggggggtgactccccctctctcagaaaagatacttacttctctaatacccaatgacccccaaaagcatgactgaaaccctggggaccagtggatacttttctcagatttgatgagtggagtttaaggtaggtaacgttacaggggctttcctccatgtgtggcgctcctctgctccatcctggcagcagacagacatcacccagagggcacgtgtctgcctgaggccttccaaaagcaagcccacaggccctctcctgaagaagtggtggtcccagaggagctcttgcctcctcactaagctgttaagtatccttcttcagcacctcatcaccccccatttttgctaattcagggtgccccaagctgccaaagttccctgcagatgccttggggaagcctaccatgttttctacaagcaaaccaggggctgggccaaaggacagatacttcatttcaaagtgcactgcagccaagccaggcaagcccctggggcagaagggacaggctgagatagcagcttaatggatggatgggaggacaacaaaggctttttcctaagtataggtgtctcccaaaggcatagtgggacctccctcttccaggcaagctgactggtctagtatggctaagtcctgaggccagacaatgagagtgagcagggcagccccaggcctgcctgcccgcctgcccagcagtgtttatcctgggatcctcctattggggttgagggaggggaagacagcaggaaggttgagggagcagcaacttggccagaccaagagattaactttaggggaggggaacagcccacagcagtgctgtccattcccattcccagggccctgagagagccatccctatgtattcaacaggtgggagggggacgccacacagcgggagaggtcgacatccaggggctcttgaccccgcccaccaaaggcacattttaattggtttccanaaagttcanaaccctgcagcaacacagagtttggcatctgacaggcaacaagaatagcctcgtgccgaattcgccacccaggcctcgctcctt

SEQ ID NO: 128054 - DNA, 1174 bp, Homo Sapiens
gccccttggggccaacgccacctgtgtgggcttccccggggctggccccatgggaaaaacttgggggccggccacccttctccccggagggcccggggggcgccttaatgttcccccccaaaggctaggtttcctggttaatttggtttaggatccaagacctgggaagggagaaccaaggggggcccctttccccttccccccaagccccagcacaggccccgatggggaggggtagggtagagagatgagggtgggaggcagggaggcaggagggcctactgggtcttcttatcttccggtgggtagtagggaggtggcggcggctggctcgtgggcatgtagacgttgtgaggattgcctgggttgtaataggcgctggcggctgcttctgcggccttggcttcggctgcaggagtggaggggacatcggggccgctgaccggaggttccatgggcccagggtagggcggtggtgggggctgcacgtatcccatggccccgtccatcatggggggtcctggatagaactcaggtgggggcggtggataggggtagccaggagggcaggggtacattccattggcgactggcgggggatagacataggccccgctgggcatgtaagagtagccataggctccactggggacttcacctctggaggcttgagatgccacctggagcatccgctgtccgaactcaatggcgccccctgccgtgaaagtcaacttgtaggaagcagagccttcccagccacctcccgcttccgccttcactgttcccttgatgtagtttgcaccaaatacgggctgcttgatctcacagtctttcatgagataaaatggcatcatgaaggactgcatggcatccttgcccttggacagaaagatgacccggtaaggggtaaggtagacagtgcctttcttggtccctttgaaggcttctggcacgttcttcatgtcattgaatgtgagttccacgtgatcataggacattaggatgctctcggtgttattgacgatcactccgccgccctccgagtgattcttgttgagcgccatagtctctccaacaggggtcccgagactcaaaacgcaatgagcttgcgcccctcttcgcccggacgcggggtcgacgatatcccgggaattccggaccggtaccagcctgg

SEQ ID NO: 128055 - DNA, 2117 bp, Homo Sapiens
  misc_feature (133)..(227): n is a, c, g, or t
  misc_feature (1282)..(1282): n is a, c, g, or t
ggggggaattccagccctttttctggcccgggttttcttgggaacaagtttggccctgttccctttccttttgggccccggggccaaaagaatggtttagaaaattttttgggggccgggggggcccccaaannnnnnnnnnnnnnnnnnnnnnnnnnnnnnnnnnnnnnnnnnnnnnnnnnnnnnnnnnnnnnnnnnnnnnnnnnnnnnnnnnnnnnnnnnnnnnnaagggtccagttatttcatttttactatttcacattttcagcaaacaaatcgaggtgcaaacagggtttatttcacattaatatattaactggattttttgtcaaataaatagggaattctctttaaataaccatctcctcacttcatggccagtccagggacaaacaagagtgaatgttagcgcatccaggggcacaaagcttaaggggaagaagcaggctggggggctggtggcaggtcccggccagcacacagggtcaggggcccttgttcccggccccacccagcagccaccaagtggacagacatgcattctctggttccagtcaggaagctccttctagaaggaagtgagaggtgagggaaagcaaattccagaaacaccagcaaaaggcagaagggcttcctcccagcctcggcggccctgccccgacgccacccaagccctggaagctcattttacagcttcaaaagtcacacagggtggcaacaacatgacccaggacagggaagggaaggaagggtggcgggggctgcagctggaccctggctgagtggaatgcgggcgcggtggccttctgagaccagcacagaccagcagagggaatgtgagcagggtctggcagggcccgggaagacacctggctggtctgaagtggctcatgaggctgagtgtagcagtgggtgccagactgagggagctggactgcggtggaggaggtggccagagagtcccttcgaggggagaagctgagagtgaaacaggaacaggggatgctccgtgctcccagaagagccccagacggtgagggaggtacgctgggcagcactgtgggctccgggctggcatgggaagctgggcggcacctctcccgaggccgggggccctaatgtcccacaatgctagttcctggtaattgtttatgatcagacctggagggagaacaaggcgccccctcccctccccaagccccagcacagccccgatgggaggggtagggtagagagatgagggtgggaggcagggaggcaggagggccttactgggtcttcnttatcttcccggtggttagtagggaggtggcggcggctggctcgtgggcatgtagacgttgtgaggattgcactgggttgtaataggcgctggcggctgcttctgctgccttggcttcggctgcaggagtggaggggacatcgggggcccgctgcccggaggttccatgggcccagggtagggcggtggtgggggctgcacgtatcccatggccccgtccatcatggggggtcctggatagaactcaggtgggggcggtggataggggtagccaggagggcaggggtacattccattggcgactggcgggggatagacataggccccgctgggcatgtaagagtagccataggctccactggggacttcacctctggaggcttgagatgccacctggagcatccgctgtccgaactcaatggcgccccctgccgtgaaagtcaacttgtaggaagcagagccttcccagccacctcccgcttccgccttcactgttcccttgatgtagtttgcaccaaatacgggctgcttgatctcacagtctttcatgagataaaatggcatcatgaaggactgcatggcatccttgcccttggacagaaagatgacccggtaaggggtaaggtagacagtgcctttcttggtccctttgaaggcttctggcacgttcttcatgtcattgaatgtgagttccacgtgatcataggacattaggatgctctcggtgttattgacgatcactccgccgccctccgagtattcctcgtgccgaattcgccacccaggcctcgctacttaggacctgtgcggcccttaaagggccggcgtattagta

SEQ ID NO: 128056 - DNA, 800 bp, Homo Sapiens
ttttttttaaaataacttcattccattttaatagccaaataatccaccatatgaatatattgcccttattaatagataccaacaattattaaacatattgacaacccactgtatgaaaacaacttatccattaccatgagcagttctgctgcgaacaccaggacaccatttgcatgctgctgcatggttttattcctcatgggtagatgaacacacactggtatatggggaaatcctcacccgccctccgctgctcttctggaggtctgtcctcttgctttcctcctctgccccagcctggtgctgccccaagccctgccctggcaaagagagaactgtgcacagcggggaggctctccaagccagaggcctcgcacgcagctgaggaatgacgcaggggcctgcaggcagctcacgcggagacaggtctgtggggccccgcgtcagaacccacttcacatcccaaagccccacctgctttgatcttcaatgctgggctcaatgtcagatctggctgaccagaggggctcaatgaggctcactggctcttcatgcaccctgctgtggcctgagcacgtccccccaaaacccacctgcttaagtcctcacctgcaaggggatggtattaggtggggcatttgggaggtcatccggtcacagggcaggggcacagcctcatcatgggaccatcacccttacaaaagaggttgcatctactggtgctttcatcttgggcttccagcctccaaaactgaaactgatttctgttgtttataagccactaggtttacaatattttc

SEQ ID NO: 128057 - DNA, 455 bp, Homo Sapiens
gctgctgcatggttttattcctcatgggtagatgaacacacactggtatatggggaaatcctcacccgccctgcgctgctcttctggaggtctgtcctcttgctttcctcctctgccccagcctggtgctgccccaagcccactgaagcaggcgcccgaatccttcacgaagtcctccaccacgagcggcaggcgggcgaagccgggggccctgacgagctcacacacagagggccctgtcaggctgtagctgtcgaacacccaggatctgtcctcgttggtggcacagcacagggcagcgacaccgtggccgacggcgcagatgggtttgctcttcagagtgaagtgctgcaggatacgggccagggagccactgctggccaggtcggtcagggccccaggacagcttgggatcaggagggcatggaccgggcaccatcgatggactcgagctt

SEQ ID NO: 128058 - DNA, 1207 bp, Homo Sapiens
  misc_feature (49)..(49): n is a, c, g, or t
  misc_feature (52)..(52): n is a, c, g, or t
  misc_feature (57)..(459): n is a, c, g, or t
  misc_feature (477)..(494): n is a, c, g, or t
caggggcgagcttatgaaaacccagcacgggcctttacgtctgcccctntgntgccnnnnnnnnnnnnnnnnnnnnnnnnnnnnnnnnnnnnnnnnnnnnnnnnnnnnnnnnnnnnnnnnnnnnnnnnnnnnnnnnnnnnnnnnnnnnnnnnnnnnnnnnnnnnnnnnnnnnnnnnnnnnnnnnnnnnnnnnnnnnnnnnnnnnnnnnnnnnnnnnnnnnnnnnnnnnnnnnnnnnnnnnnnnnnnnnnnnnnnnnnnnnnnnnnnnnnnnnnnnnnnnnnnnnnnnnnnnnnnnnnnnnnnnnnnnnnnnnnnnnnnnnnnnnnnnnnnnnnnnnnnnnnnnnnnnnnnnnnnnnnnnnnnnnnnnnnnnnnnnnnnnnnnnnnnnnnnnnnnnnnnnnnnnnnnnnnnnnnnnnnnnnnnnnnnnnnnnnnnnnnnnnnnnnnnnnnnnnnnnnnnnaagaattcggcacgaggnnnnnnnnnnnnnnnnnncaaaatgtggatattgtttacttgaagcaacagtccaggattgtgaagtacaacacattttaaggatgagactttcctttcatggtcaagcaccagcatcatgcacacagcatcaggttatttaaaacaacacgcctgtgggaccccgttcctggaggaagacccgcttcagtgtgattgcctcccttgcttcactgcttttagttccaggcagtttcattgtacatccaagccttcctctgcgtgagagcaaaggctttgctcatcagccagccagtcttgttactatctggctactttttaaggttaaaaaataaaaggcagtttctttgctttgcaggcggcaaggcaggaggcgcaggcctcttcattgttcacatgtcacaggaggaggctctgagcaaaggccactggcaagttagggcaacaccaagaaggctctgcggagagactccctgtgggttggggcctggcaggaacggtgcctgtggactgtttatggtctgtccagttgaggcttggtaaacccaagtaaagtgttaaaaacctcagtacaaaagatcctctaacacatctggaaccaaattatttcttcttaaaaacacagtactaagtgtcacaaagctttccctccaatctactactagaaaacactcatgccatggcccacagacccaagagtcaaggacagagagaaacctgttcttcaaaag

SEQ ID NO: 128059 - DNA, 610 bp, Homo Sapiens
agtaaattacagtttatttcatttacagagaccttgaggcaaaaaggtggtgtttggaaaacagcacacgggtgaggagcaccgagaagcctgttacaaatacgccagtgcacgctgccagtgcagtgagtgtggggtcctgcaggtggccgtctaggaagggcaggcttgagacgcgcgtctctgcttccctctgacttgagaccatctcccttgcaccaacagcagcttctccaagctaggctgccacagccaagcacacactctgcaaacctatcactgcgagtagtacagttccctttaaaatcgcagcagcaggtgctcagggaggagagggagccagggtggctctggtggcgtgactgccagtggaggcgacacaggtggcagaaggctgccctccctctcattctatatgctggataattaaaaatcacaagtcccaatacttgacaaatgaaaagtccatttttgcgaatcctgacattcccctcctgatccacaatcacagttctgtgtggttgcgtcccatccctgcccaccaccccccacccccagggctgactgtgatgatggtactcccaagtgtggaggtcctgtgggtgcaccc

SEQ ID NO: 128060 - DNA, 653 bp, Homo Sapiens
ttcatggtttgaggattcatattgtcattttacttatttacagaatcaataaaccaacacatacacactattcagagaggtgggaagtgctctgcaaccttctccctcaaacctgggcccagaccccagtcctggaccactgcatccacccagcaggaaaggggtccagccaagacttttcctgactttgtaacttacagacacaagagaatagagggtagaagggaaattcttggcacctggactagagtgagataaaaggagagtaggaaagcagtgataggagagaagtgagggaggtacatacagttttataaataactagacaaggtctgagcactttgggtggggatggagtgagaaaggctacaggcatgtaggggcctaagtggaaaaggaagaaatagtgcttggggccagagcggatgagagatcagctctgggcctccttttgccccatctgtaaaacaagtaggttgccctaggtggtgtcagagcagccacgtcctcggtgatgctaggactctatggggttctaagccagcctgggggctttggaagaacagctctggggattggcaaggactggtggtcaccgccagagagggttgatgcccggacaggctatgtctgatccccgggctggtactgtg

SEQ ID NO: 128061 - DNA, 1051 bp, Homo Sapiens
  misc_feature (778)..(778): n is a, c, g, or t
  misc_feature (873)..(873): n is a, c, g, or t
  misc_feature (878)..(878): n is a, c, g, or t
  misc_feature (903)..(903): n is a, c, g, or t
  misc_feature (909)..(909): n is a, c, g, or t
  misc_feature (926)..(927): n is a, c, g, or t
  misc_feature (1014)..(1014): n is a, c, g, or t
gggctggggccacgggacatttatttgtagccatcaagtgcctgcccaccttgggggagggttgagactggcctgcaggtggccaacagatggggcagtggaagatactggctaccagccctctgcccatggccctttcctagttgggctgggggctgtcctgggtgggagtgtgcaggggctggaggagagaccctcctggccccagcaacccatccccctcagctcctcaccagggctcagcaccaagcttgggggtgggggctgctgctgcaggactgcagggagagactgggagaggctgaggcgtggctggttgggatttggcacagcagcctggactgggctgggcaaggaggccctgggggaggtcaccggacactcagggagactgaaccatgcgcttgtgggtgtcgaagacataacgcttgaaagtcaggctgagcaccacatgctgtgagggctcgctccgctcggcgctctcctcctgcctggtggcctccccacggccagcccgggcccgcttcttgagggcgggtgtcaggatcttcttggactcggggctgaggcacctgggatgtggatcttgaacttgccgctctggccgaaggactgtcgatgatgcccagttccccagtggacaagtgcaccttgagccccacgaagagctggatgttggtttcctttttgaacagggagcggccgatcacactgtagtcatccatcgcccgctccacaaggccatgcttgtgcttcagcttgtacaccttcagcctgngcaggaagctgtcggcgtagttcctgtcctctagcccgtggagcaagatgcatgggaggctaccggcacgtgttggtgtgaatgtccgcatctancctgnagccatcacaggcacagcgaggcangtgacnggctctcaactccacanngccactgctgcggagacatgcctctgtggctgccccgctctgtcgctcacatgtctgtctgctgtgtcatcctgggcagacgcctgnaaagatcttgaaaattgagatcctctgcgatcttgcc

SEQ ID NO: 128062 - DNA, 1086 bp, Homo Sapiens
  misc_feature (197)..(197): n is a, c, g, or t
cagcgttctcttagaacccctttgttgtttaaagtataggtgttcactgacgtttatagagccaccagtctgtaagaccaatgaggacttaatctacaggatacctggaatttaaacgccaattgcaattcagggatatacggacattcttgacaaaacctggaaaaggaaaaaactattcccaaagaaggttcctngatacttaaggacagcttgctgggttttgatcaaagcagaaagcatatactttcaagtgagaaaacagcagtggcaggcttgagtcttcccaagcaatcaaatctgtaaagcagatggttactagtaagtctagttatgggagtctgagttctaactcatgctgtgcttgctggatttgctggctcttttccgctctctgtgatgctggactggcttggcaggtgacatgctctcaaagttgtgactggactcgttgtgctgccgggtgtacctcttgcacttgcaggcagtgactactgtgattttgtaggtgcgtgtgctgccatcttggcactgcagctggattctctgggtacgggttttgtcattgacacaccgccactcctgggagctcctcctgctccagtactttgttccatagcctcctccaatccagttagggagcactggcaggggcaagcactcgccagcacacaccagctccttcagagggctgatgctggtgcactggccatcagagatgtatttggtggaacgcagttcccggcaacccacttgaacccgagtgttccgatccagtccagtgttactgaaatgcctgcctccatttctggcttgattcaacgtgctgttgctgctggggtgtgctggaacaggtttaaccacatgtgaataaaggatttctgtggcatcatttttaaaagccaaacagcttttcattaggatgcatgcaaggggaaggagatagaaatgaatggcaggaggaagcatggtgagtagaggatttgcttgactgaagagctggttaattcttttgcctctgcttctgcactgtaactgtgaaattcctcctcaagcttccctttatatatccatagaggtttggcg

SEQ ID NO: 128063 - DNA, 514 bp, Homo Sapiens
ttgttatttttattttacttttagtactcaggaaccttagcttctcagagccatagggtgagtagcatcacagtgatgaagctgcgattcagaccagagcctaacactgagctaagatgaaactcacccttggctcccataccctctccttaccatgagctatagactcgaaaggagaaggaatgtttttcagttgcaggcatatctcactttatcatgcttcgctttattacgcttcacgaatattgcctttgtacaaatggaaggtttgtggcaaccctgtcaagtctatcaatgccatttttccaacagcatgtgctcactttatgtctctgtgtcacattttggtaattctcacaatgtttcaaacattttcattatcatatctgttatggtgatttgtgatcagtgatcttggatgttactattgtcattgttttgggacaccatgaactgcacccatgtaagaggtaaacttagtcaataaacgttgggttgttctgactgctccccc

SEQ ID NO: 128064 - DNA, 1556 bp, Homo Sapiens
tttctttgtcctccacggtttactttgctccttttgagacctttagaatttgcctaattatttccaaggactggagccgcggtgccgcaccctgggacgccctgccgccacccgcgtctcgccgtgcggggtcacttgaggatgtgtgcagagagggccgcggaaggtcccagagggttctcgcgggtgccccgccctggtgatttcatctgccgtcagctctctccagaggctgcgggatctgggagcaccgatcgctttggctttctgtgtgtgcagggcgtctcactgaatgccaaagccagggagtcggagtccagggatcggggaagaggcggtggggtcagcacagcgcaggggtggaaggtggcgagaggaaaggaggtggccggccagctagggctcggtggcgtgcttgaccaggtagccactgaaggtgatgtaggtgtccagctcctcgctgaagatggcgttctcacgttcgcccttgtagaggcgtacccacacctggtcctgctctcgcagctccagcatcaggctctggctttgcatgatgctgcggtcgcccacctgcgcgaacaagatcaccacctcctcctcgttcttcatgatgtgcaggtaggtctccttctggttccaggtgtgcacgttgaggctgaagaagtagaggccgggcacgtagcagtagaacttgccggtgaacatgttgaagtggtcgtagaggttcacgaactccgtgtcgaagatcaccgtctggtagtagtggttgctgtgcatgggcttcttccggcccaccgaaaaggcggcgtagtggctcttgcaccgctccccaggggcccccatggagcccttctgccctttgggtccagtgtggcccctggcccctgctgagcctgttttgccatatttcccttggaggcctcgatctccgcggtcacccttctcccctttcaagatagtgatgttgatctggggcacggcggtcgccgggtacatggaggtaccggggtcacagcagcgcaagcaccgggaagcagggagcccctggtcctgactgggcctgtatttttcatgttgttcttcagccctctcggcatggtccggaggggacggcagctcctcagtcccctcccactcctgctgttccccctggacatggggcacgcgactcaggaccaggccagaggcaaaggcaaggagcaggcagtacgccagcaagagtccctgtccacgggagcccatcttcctgccgggccctccgtcccgccggccgctcctcccgcgccgcccctagagcatctcccgccggccaagcctcctcccggccaggtccggggcgatgcacagactcggtgaaggaaacagagcaggggaaaaggtcttccggaggacggcagtgcagaagaggagggtggggggcggtacgagcagccacaggtcccccccacccacagcacctccgtctccccggcgcggtctccgaggtctctgcgaccagaagcggaagcgcggttctcgcctcgtgccgaatcggcgcgcccgtcgacttcatactc

SEQ ID NO: 128065 - DNA, 901 bp, Homo Sapiens
  misc_feature (636)..(681): n is a, c, g, or t
ggaaaagaaaaagtaactcaagtttactaatactgaaactttcaacagccaaagtttcacctttttagaatctagagcaactcatttggaattttaaataaataagcttaagtttattcacatcttctggtccaagcagagttctaggaccatgactctgcttgctgttggtcaaattcacctattagccttttgatgtgagccagcttgttatgaagatattcacatctgtatttttcttcatggtaattgggactagactgctttatcttctgatattcttgtaagacttcttcatgaacattctgatactcttttgagcctggagaaaggcgctttctttgtgcatctagtttgataaatcttctagctacagtctccatcctggcatgcaaagctctgtactcatcatactctgcattgaagtcatccttataattctggcgttgctcataggagacgatagcgatatattttatcaaataatctgggagttcaattgctgaaggttccatggaggcagtgcaatcctctttaactcctccactggaatttggactggagttatttagcttggcaatttcctcttctctcttaagatcttcctccttttcctcaatagtctcaatgtcgtgnnnnnnnnnnnnnnnnnnnnnnnnnnnnnnnnnnnnnnnnnnnnnngactttttgtgagacattgaatggttttcttccataggctttggacactttagtagaacggaaccagggggtaaggtttccagagaagtcctagaggtatatttgtcttgctggtcctcatagatactatcgttttgactaaaactgtcaacaggtaggtcttgagtcccccggccgtaatggccgaattcccgggcatatgtgccggtaccgtcgactg

SEQ ID NO: 128066 - DNA, 1165 bp, Homo Sapiens
tttattcttacatttcttaatttatttttaataagtaaaaaatactcattgaaactgtacaaaaatcaaatcattaatttttgcacctggtatttcagtcatcaacagcaatctcatggtacagaaataaaataatgggaattatcattaacttcaccctggctttctagcttagtagaaccaaacagaagaaatcatggcaataaccattaactatagaaaaaaagtaatggaaaaatggttgcaggtttaatcacaaaatgaacttaatttttgttgattttgttttatctgctaaaacactaatatctataaatatgaactgacagcatcgttctaaatttacttctgaagagctgtcgagacttcaataaaatataagcaagttactggatcatatttatggactgctgaattaactacccgaaaagtatcagttactttcaaagaacacaaaacaaagtgaacgtggaaaaaagccttctttgcaaaagtccttttattagtcctatcctctaaaattccaagccacagagccttgatattcctggattctgttttaagtaaccttagttttaaatatgacacttgggatatgcacaatgggaaagggtaggatatgtgaacaaaatttaatttcttttttccaaaggtagtcattttctttaaattcatcctatccacttttgcccacttccccatgtacagattatcctttagtcatacaaattcactctccacttccacatacattttccccacttgatggtacttttacaagagggaaacaatacagctggttgataaagtaatttaaactatttgtaaatgaaataaaaagaaagtaggtataatacatagtgtaaaagataccaaattggagtaatattgatgttaatctagttttttatttaacaaagtacctactaatggtctgagcaggagagtagaaggaaaggagctagagggaaattacttcctatggttaaaaaaaagccaactgcttcagaatgcatgacagtcttagtaataaaagaatcatttactattttcactgagtttacagtgttgggtactactgtttacatcattttaatgaaagtatttataaaaacatctgcaatagttcatatcagaaaacaaagtttctctcaataaagacctt

SEQ ID NO: 128067 - DNA, 669 bp, Homo Sapiens
  misc_feature (147)..(237): n is a, c, g, or t
  misc_feature (249)..(262): n is a, c, g, or t
aaccatggaaaaacatctggatttcatttggtagtttaaaggtttttgaaaatgttgatatacacaagctgtacttggagctggataacagacataggagctggatgacagacatacttttattcttttatttttgagatggagttnnnnnnnnnnnnnnnnnnnnnnnnnnnnnnnnnnnnnnnnnnnnnnnnnnnnnnnnnnnnnnnnnnnnnnnnnnnnnnnnnnnnnnnnnnnttcttttaattnnnnnnnnnnnnnngctttactacttcctgtggagttcataaaaagttcttccctttgttttagtcatccagagtaaagtcatagggctcaaagtctttccggaagcggcgagccagggtctcctcgtcttccttgctgatctgacactgcctccagtcagacttatcaggaacattaaggatggcttcactggccaggacctcccttccaaactgcaaaggaaaattctttttaattctgtggaaaagttttctcctgtgtcaagttcaacataaaaatatgctgctcctggctgtgcaatctgcttgatgtcagagtgctctgggatttccaacagctctatctgctgctcctgtgcctgggtaatgaaggatctttaatgtcatcagtagtagagcagctgattgggacaggaatgac

SEQ ID NO: 128068 - DNA, 649 bp, Homo Sapiens
  misc_feature (64)..(104): n is a, c, g, or t
ggaagagctcattgagtttatttaaggaatacaaaggggactggaagtgtcactggcatgtatnnnnnnnnnnnnnnnnnnnnnnnnnnnnnnnnnnnnnnnnntcctaagccacatttctccataggttggcatcatctgctcgaggtcttcagatttccgagtcaggtgtgaatcttggggacttgaggagatccctgctggccccctgaggatcacctggtgctcccggtgcccattcggccccctcctccccaggcttggtctggcccatcgtgattatccctgttctcataagagtctgcatcttcctcatgattgggtccaggctggccccgaatggagcggagctggggggctgcatacaggattcctctcatatcctcataggactgggaccccagggaggttgcttcccggctggggtcccaggctgacccatgagggctcaggaagtccattgtcctggcgaccggctgggtcagctcttcatcctcgttctcataagactcagcgttggagaaggatcttcatcctcaggacccaggggctcatcctcagggttctcgtagccgctgccatcctgggagagctggtcctgcccaaggttggagtcgttctcatagaactcggagtcctcctcactgtc

SEQ ID NO: 128069 - DNA, 1194 bp, Homo Sapiens
atgaacatggagttagcttttattaaacacaaatgtaccagacactgtgccaggcacttcacatacagtatttcatttagtgcaacaatcctgcagtactggtcttaacctaatgttgcaaatggggaatctgagattcaacaaggttaattagcttgcccgtaatcataagcacataaatgtgattctcaaggattccaaggcccttgctcagtttactggccatgctgttttcttgcattttatgtaggaagaacaggacccaggcatctccctccaccattgacctccagagaagagatgacacagttggaagggctgtctaagacagacaggaaatggagttgggggccaaatctaagttaggggatctgagttaggggagcacttctcaggagtgaaaatgcacaggaaagtggtggctggagttggaagtgttagaggcctgagatctacggtcttgcgcctgctacagcacctgcaaggttctactgagcagacaggtatttcattcagctattaggccttaggcttctgggggggaaatgaaagggtgggtggtggagcctcaggggttaatgtccaagattgtgtctgtgggtgagcagtcagtattcaaacgtggtttctgtggctgagagagtggtatccaaggttatgcccgtacctgagggagtggtattcctacgtgatggggtagtgtctatagtccggggacgacggtgcatccagttgtgggaaatatttctgggatagccgtttctctactcgaagctgctggttgaggcgccggtagactttgcccttgaagaagtagactcggccatcttgccaactcatagcagccgagggctggtttggcactcccggtaaacgaacccttgattggtttggggtagctgctgaagtcagttcgggctagcttgtcccactgccagtacccggagcccttaaagaggaacaccttttggttgagaggccaatagagagctgcatccaggttaggttctaccctattcagcttcttggggaagccaggagacatcttgaaattaatgtagcgccacaccttgtctcccttaaagaatgtgaatccagttgtgttcgaggcgagtagacagcgacagcatccagtattcccggggataacacgtccgaggtgatacctctagatctgctatcacaaattcagtg

SEQ ID NO: 128070 - DNA, 659 bp, Homo Sapiens
  misc_feature (428)..(478): n is a, c, g, or t
cttcaagggcatgagggtaagagcctcccagcaagtgtagccctgagaccggtgcacacgggggaaacatatctgcacagatcaggagacaccacggaagaaacttcccctttgagtttgacaccacagtcaggtgtgccaagtgcaagaccgtcttccaccagagcttccaggctgtggtgaagaagggctgcccccgctgtgctcgctgacgcaagtaccagcaacagaacgttttggcctgatgcccctctgctgatcgcactttgaaggccgggggtgagtgtggctcagccatcccagctgggtttcctatcagacccaggatactcaccgtgtcaacagctgtgtccccttgtcaggaagacctcagatgtgaccagagcactggcctcgtacagaaagcccaaggaagtcgccatgatgtnnnnnnnnnnnnnnnnnnnnnnnnnnnnnnnnnnnnnnnnnnnnnnnnnnnatgctccctgtttggggcaggcagggccgtttactcaccaggccctggctcaccagcgtcccggcgcctccgttagggctggccaaacactgtggaaaggggacttggggaacattttcaattccacattcctgattaaaaggtctggttttttaaggtgggtttttcccattcatatttc

SEQ ID NO: 128071 - DNA, 1168 bp, Homo Sapiens
  misc_feature (55)..(55): n is a, c, g, or t
  misc_feature (142)..(142): n is a, c, g, or t
  misc_feature (368)..(368): n is a, c, g, or t
gggggaattcgggggggttggggcaaagaacggggcgaacccttcccattaaaanccccagggagggcttcaaaagtgcctgaccagtggctggttttccaggtcatttctcccttctcctaaatgggggccaaggccccanggctagagaagagctaggggctctgacgctgagaaagcggtgggctcagcaggcgagacgcactggggtggggagtaaagaggacacagaggaaccgggtcgccaggactggccctgccctgctgaggggcggtttggcactggcagtgagggccaaggaaaggcactgggtgggcccatagaccctgtcccagcagtggcctgcccaccagccacccgctacctntaagccaggcctgagtggctcctgtgcatccgctgggggtgagaatgtctggatttcatgggtgactcacgtagggtcaagaataaaaaaatactttctgttgaaatatgaatgggaaaaacccaccttaaaaaactagaccttttaatcaggaatgtggaattgaaaatgttccccaagtcccctttccacagtgtttgggcagccctaacggaggcgccgggacgctggtgagccagggcctggtgagtaaacggccctgcctgccccagacagggagcatctggtggtggccacgcctcctgcagcagaggggtggggggagggccaggggacatcatggggacttcctgggctttctctgggaggccggtgctctggtcacatctgagggtcttcctgacaaggggacacagctgtgacacggtgagtatcctgggctgataggaaacccagctgggatggctgagccacactcacccccggccttcagagtgggatcagcagaggggcatcaggcgaaaacgttctgttgctggtacttgcgtcggcgggcacagcgggggcagcccttcttcaccacagcctggcagctctggtggaagacggtcttgcactcggcacacctgactgtggtgtcaaactcaaaggggaagatgatgtcgtggtgctggcagatctggcagatgaagccgcgctgggtgcacaggtcgcagtggtagacatgctgggaggcaattcaatcagggccttgaggaatccttcatacaccccgtctgcgatctgttggaggtcagcaa

SEQ ID NO: 128072 - DNA, 535 bp, Homo Sapiens
tacaggtaagaaatctttaatgaatctcaagcagcatttataaaaaatgcagtaggacagagaatatcagtgtgcattgtgtgacgtatgggtaagcactgtttcgagaatctcctgttccgggatggaaaggcacagcgtgcgtgcatgggttacacagtatgtcacagccatatcgtgggttctggtcaaaagtgctggccagcgtggccacaggtcaacctccagcccagccggcaccagcaggtgtgctgctctctccccaggtgtgccaagtgcaagaccgtcttccaccagagctgccaggctgtggtgaagaagggctgcccccgctgtgctcgctgacgcaagtaccagcaacagaacgttttcgcctgatgcccctctgctgatcccactctgaaggccgggggtgagtgtggctcagccatcccagctgggtttcctatcagcccaggatactcaccgtgtcacagctgtgtccccttgtcaggaagacctcagatgtgaccagagcactggcctcctacagaaa

SEQ ID NO: 128073 - DNA, 1636 bp, Homo Sapiens
  misc_feature (20)..(20): n is a, c, g, or t
  misc_feature (766)..(775): n is a, c, g, or t
  misc_feature (1335)..(1343): n is a, c, g, or t
  misc_feature (1355)..(1404): n is a, c, g, or t
gcttcatgcccaagatgacntgcgaggcaatctcaggagctgtggacttaaccattgcaaagcacactgtctttctcagcgttctctgcaagtcagtaggtgttagtatggttgcaaagttcactgtctcagcaaagttgaactgggctacctctctacagctgtttcctcagagggaaaaatcttgagaccagatggtggagctctggagtcagaggaaatgggtgtcttcagcacaaagctgctgcttttacttcagccacttctgacatttttacataccgagcctgagattgtgtgattatctcaaatcaaatcactttgatggagataaataatcaaaactgttttatagtcattgatttggtgagaacagtaatggaaaatggtgttgaaggacttctcatttttggagctttccttccagagtcctggctgattggtgttcgctgttcatctgagcccccaaaagcattattactgatacttgcacacagtcaaaagcgcagactggatggatggtcttttataaggcatttaagggtacactactgtgtttcactgaccatacatttttcttagcccctcaagtaatatagcacagagttatgaatgacaattcccctaaccattcctcttcatatctgcctcttccccttaccatcgtaattctccaaactggtcataaaggcactctgtgaagatattggggactgacatcttaagctctcacctggctgcagtaggaaaggccaaactgacgacnnnnnnnnnnttctttataaagatgatatggtaacatgtatctttgccctgggtctgggtgggtccagtcagtctcagatttacaagcatttaggagcctaggtaaaagctgctagtattcttttaaaagttacatttatgacttgcaatgatagaaaactccttccaattaaatggcattttataatattatgtgtgtacttcacagtgttaaaaataccctcatacgttattgcatttgatcttcacagaaagtgcattttaaccagtactctgggtgcaataaataatatgtagaaatttaagtcctccaattccagcatatccagtgagttttgacagtgtgtttatgtggaatgtttaaggatatacaattgtactttatataaattggttcttgttcttcttaaatgtgacatgaaataattgtgctgctacattatactggaaattaacaggggaaaagggaagagctcttggctcccttgaggttctgctagtggtgttaggagtggttacaactgagcttttagtaaccatttaaccgtatgtaaacttggtttctaattnnnnnnnnntttctttttccnnnnnnnnnnnnnnnnnnnnnnnnnnnnnnnnnnnnnnnnnnnnnnnnnngttacaacaactttgatacaaaaatactgaaacagcaactaccacctggaatggcacactaagtccacactgttaggattttctccttagaaaggatagagaaataaatggatttagtcctcagaaagcttggattaattgcagataccaggatattaatttccatttacccacttagtcaaatagttttaccatagctaaaggtcacatcattaccatgttgaaacttggg

SEQ ID NO: 128074 - DNA, 955 bp, Homo Sapiens
gtctaggtagcgaggcctgggtggcgatttcggcacgagggttcgccatgcgtcccggggcgccagggccactctggcctctgccctggggggccctggcttgggccgtgggcttcgtgagctccatgggctcggggaaccccgcgcccggtggtgtttgctggctccagcagggccaggaggccacctgcagcctggtgctccagactgatgtcacccgggccgagtgctgtgcctccggcaacattgacaccgcctggtccaacctcacccacccggggaacaagatcaacctcctcggcttcttgggccttgtccactgccttccctgcaaagattcgtgcgacggcgtggagtgcggcccgggcaaggcgtgccgcatgctggggggccgcccgcgctgcgagtgcgcgcccgactgctcggggctcccggcgcggttgcaggtctgcggctcagacggcgccacctaccgcgacgagtgcgagctgcgcgccgcgcgctgccgcggccacccggacctgagcgtcatgtaccggggccgctgccgcaagtcctgtgagcacgtggtgtgcccgcggccacagtcgtgcgtcgtggaccagacgggcagcgcccactgcgtggtgtgtcgagcggcgccctgccctgtgccctccagccccgagccaggagctttgcggccacaacaacgtcacctacatctcctcgtggcacatgcgccagggcacctggtttcctgggccgctccatccggcgtgcgccacgcgggcagctgcgcaggcaccccctgaggacccccaggggggtgatctgccaaagaggaagagaaccttcgggggacccctgcaggaaaggccctgggcctcggtggcccgaggcccccccataatctccctggtgatttaatgggccccacgcagaagatcttatctttatattgcgccccgggcgc

SEQ ID NO: 128075 - DNA, 868 bp, Homo Sapiens
cccccaccttccaacctcccccccttctctttattcctaaacaacaggctggtaccggtccgggattcccgggatcgctgccgtctctgcgttcgccatgcgtcccggggcgccagggccactctggcctctgccctggggggccctggcttgggccgtgggcttcgtgagctccatgggctcggggaaccccgcgcccggtggtgtttgctggctccagcagggccaggaggccacctgcagcctggtgctccagactgatgtcacccgggccgagtgctgtgcctccggcaacattgacaccgcctggtccaacctcacccacccggggaacaagatcaacctcctcggcttcttgggccttgtccactgccttccctgcaaagattcgtgcgacggcgtggagtgcggtccgggcaaggcgtgccgcatgctggggggccgcccgcgctgcgagtgcgcgcccgactgctcggggctcccggcgcggctgcaggtctgcggctcagacggcgccacctaccgcgacgagtgcgagctgcgcgcctctgcgctgccgctggcacccggacctgagcgtcatgtacctggggccgcttgccgcaagtcctgtgagcacgttggtgtgcccgcgggcaccagtcgtgcgtcgtggaccagacgggcaagcgcccactgcgtggtgtgtcgagcggggccctgccctgtggcctccaggcccggccagggagctttgcggcaacgacaatcgtcaccttacattctcctcgtgccacatgctgcccaggccacactgcttcctgggccgctccatcggcgtgcgccacgcggggacagcatgcgcagggcacccctgaggagccgccag

SEQ ID NO: 128076 - DNA, 722 bp, Homo Sapiens
gagggagtatcacggggtagggtcttttgtagggttgggatttggaaaatagtgggcctctgggggctcacactgggtaagagagtcctgtgagctacgtggtgtgcccgtcgtgccacagtctggtgcgtcgtggaccagacgggcagcgcccactgcgtggtgtgtcgagcggcgccctgccctgtgccctccagccccggccaggagctttgcggcaacaacaacgtcacctacatctcctcgtgccacatgcgccaggccacctgcttcctgggccgctccatcggcgtgcgccacgcgggcagctgcgcaggcacccctgaggagccgccaggtggtgagtctgcagaagaggaagagaacttcgtgtgagcctgcaggacaggcctgggcctggtgcccgaggccccccatcatcccctgttatttattgccacagcagagtctaatttatatgccacggacactccttagagcccggattcggaccacttggggatcccagaacctccctgacgatatcctggaaggactgaggaagggaggcctgggggccggctggtgggtgggatagacctgcgttccggacactgagcgcctgatttagggcccttctctaggatgccccagcccctaccctaagacctattgccggggaggattccacacttccgctcctttggggataaacctattaattattgctactatcaagaggg

SEQ ID NO: 128077 - DNA, 676 bp, Homo Sapiens
ttttttgacgccagcgggtaaaagcagggccccagaggcatttattgaaaacacagcatccaaaacacgacatctaggccaggcgcgatggttacagtgatgagagggtcactagacaattatccacaattctacgacatgagacagagactcagcaacagtcacagacagaagggtcatgtgttccttcctgggcagggctgaatgtggcaggtgcggcgtggaggctgcgtcctggcggtttgctcccaggcaaggggtacggggggccggcttggcctgggtggggacctcaagtctgagggtgaggatggctgaatctacctcgcttatgtctcagggacggtcacccatacctaggatgaccccagccagaccctagaaggtctgatggccatcccaagtcccccgcgaggagaagagttccctggcaggggtgacacattcccggtcaacaagccacaacacagtggtgcctgcactctctcagctgttgccacaacacttggtgctggaatttctccacgtagtgaacttttaagggaacatgaataattaaaaatcacacaaactctacgaaaggcaggatcctcactctgctgagagctactcctgagatgtcgcttccggaccccggcagagggcaggagcgacatcagctcggcaggaggatccc

SEQ ID NO: 128078 - DNA, 816 bp, Homo Sapiens
  misc_feature (73)..(91): n is a, c, g, or t
gtgagaaacagaagctgaatatcctgatttgatttgccacacaggcgttcaatggcttagcagtgctaaagannnnnnnnnnnnnnnnnnngggctctgggctgacattgaaatttttctgaatgagaaaaaccatcctcaaccactgttttttaacactgagtaactttggaaattaacttttgccacagacttgaaaatgtttcttaatgaatttgacctgaaattacaaggtacaacaacataatatggtaaattcatttcaataaaaactaaaacttaagattgtcaagctgctttatatactttctgtgctatgagaagtcaaaacagcgctgtattgccaaatccatttttagtggatatattttcctgtagcagttttttggaccttgatgcagtgcaaagaaaatttttaaattttaaaagcatttaactgcaattaaatgcttttaaagtttcctcttaatcttctgttggaaatgaatcatcttgaatgaatgacatgctaaagggcaaataccaaaaagatgaatcctacaaatgccttacaagtgatgaatatgcttaactaaaatcacatgctcatgggtggatgtgtcagtatttagcagtaccttgacctgtttgtttgtgtgaaaagacattttcaaagatgaaatacgtgaaatcccattacacatcagcattagcagattaacattttctatttattccaatgaggggataccaactttcagcccaaattgagcaaaatgttacctcccgtcccctgccaaaaaatcccattattcccattagtagaactctattact

SEQ ID NO: 128079 - DNA, 1123 bp, Homo Sapiens
  misc_feature (122)..(170): n is a, c, g, or t
  misc_feature (288)..(346): n is a, c, g, or t
tgccgttttaacaccaaaaccctttggaggggcccggtttggggccccccaccattggggggggttgcgcggcttcaggagaaaggagggggtttggaaaaagaactttcagggagagaaannnnnnnnnnnnnnnnnnnnnnnnnnnnnnnnnnnnnnnnnnnnnnnnnttccaagcccccgtaggcgagggcccgggattacccgggggtaggctggttagggcccttttgcgctttaccgttcgggggcggggggccaaaataaggtggtttgggataggtgttnnnnnnnnnnnnnnnnnnnnnnnnnnnnnnnnnnnnnnnnnnnnnnnnnnnnnnnnnnnaaagtaaatgctttaatgaaagttatgaatgggatttaacatgggaactatgcatatgcaatatcatatttttcatatcaatgaaaaattccataaaaatagctatattaaatttcatatgtaaatatttaacaaatatgtttgtattcttctatttttatacaatgaatattaatacatattgcatttatttattttaatgacatttatttaagttcaattgtacaaaacctaatttgttgtcaaaagtatcaagcaataaattttaaatattgtacagggaataatcgagcatgcaaaattgaaaaccccatgtaaagacagcatgataagctcactggaaattttttaattaaataagcttaaaaagacattggactaaatgctaatatatggaatataagatttcccaatgttaatttagttaacaacttttttgtagtagcatacacacacataccacctttatgtactatctctagaagtaaaatagtaaactatataagatagatatatatgagtagaacaaggaggacatcttgaggtcatttcagaaatgtacatgattttattgagtctgcacacagtttatgatttttaaaaacagatccttcaagctaagttaacacttctaatataaaatgtattttttcttcataaaaacaaaggaaaagcaaaagcttttagattcacttgaaagaattctctctctttctctgtctctcaccccggccgtaatggccgaattcccgggcatatgtccggtaccgtcgactg

SEQ ID NO: 128080 - DNA, 1717 bp, Homo Sapiens
ttttgaacttatttttattttattttagaacttaaaaataaatttttaagaactaaaaaagtgaaagagcccagtggctgagcagaaaacagcttactacaaggagtaccagatcagggcagagacttcccagctgggtaaggcatgctttgagggaagactccaccagccctgccaggaaagggcagcaggcgcagtgcccctatggggcccacatggctggtaacagcagcaggacacctcttccaaagctgtccaccagccccactaggggctcctactcatggcaaaaaagactacatgagcccacaactgtcaactaacacagtgccacctcctcccaaagcaaacacatatacatacaatgttaagaacctattatcagaacagcagtgcagcagaccctggccttggtctctgaaagtcctgtgtcactggctgtaaggacgcttggccacaggttcctcctccttctcccgcttcagccattgctctaggagtcctgcagtgcctctcttggtggggagtggactcttctgcaggaactgactggaccactggggaacatctgactcttccttttgaggtgtttttgagtcttcctttttgggtgactttgtggccaaccactgcaacatcctctggctactgccacttgccctgagctcctttttgacccccaagtcgacaggagccagacactcaggagtgttgtttcgcgagttgttcaccacagaagagactgcatggaaggtgatgttctctgttgggtggattaatttcagagcttcctgagttgagacttcaccaaagtcaagccatttagaaactgcctcctctccatctaatatggcaggcatcctgtggtggatgtcactcaagcctttgcaggaatccactgtgatgatggtataggaatacaggacatctcctccctctgggggctcccagcagtcaaagatcccggccattgtcagcagcctccagttgtcccagactttctcccagttctcaggactatctgcagcaccaatgctacctgacttctctgtcttgatttgaggaaaatagatgaagtatggctgcctctggtttgttccctgacatcgctgccactcatagaatccatctgctaaaacgacacagcgtcttccctttcccagaggcaccttaaatgaccgtttctccattacggtatcactacgacagttggtagtattgaactgcagcttggaaggatcactttctttgaaccaagaagggaccaagccccagcgcatgggagcaatgatacgctcagatgagtctgcatccttctcaaagtgcagtcgagacagaagcactgggctgttggattgaggactcttgttgtaagaggggcagtacttatcagggtccctccactccgggagccgctgctggccccgccgatcctggtaggcgcaagctctcgtgagaacatctctaggtaagtgacaggatgttcgcccacacattcttcaacaccgcccctcgcaacctcgccccggcagcgcgcgtcacctccctcgggcctcgtgccgaattcccggagcgggggctcgttgctcgggttgcaggtggcccccagccaccggccgcgatccctcgcccctccccgcgtcgcctccgctccgctccggccctcagactccgccgccccgcgtcgcctcacttcggcccaggccgccctctccgc

SEQ ID NO: 128081 - DNA, 708 bp, Homo Sapiens
ttttcaacttttttgaaaatttatttcacatttattactagtcacataatcctcaaaaatctaagttcacaaatgatcatcacatgagccctcttctccatatacacatttgttagtgtgaaaaaacaattttgtacagtattttagtagttacatgattagcaagcaacagagaagtagtgaaagctgaagaactccaaatgcattgctcataggacaaccactcaaacacaagcagctaggcaataaaggaaaatttcccatccagtcattgagaaatgctaaaggcattttatggtgacatgaatgcttaagttagtatgcaacctatagggcaaataaaactgctatataggttggtaattttgcatttaaatatttgtagtatggtactacccatttatctaacatttaataatacataaaattttaagtctgggttctcaaaacagttgcttggtattttggtatagtgtctgttatactcaaatgcttcattcagttatcttttcttctttcacaaggtttagtgggactgtgcaatgctggaacaataatccagaatgtcctgaatagtgaattccattgtaacaccagatccaggataacagcgagctatcaaaccttcaaagtgcttatactggcgtataaattcatcttgcatggagtgcccaccaactgaagtacgtctcttcttcacataaatgt

SEQ ID NO: 128082 - DNA, 649 bp, Homo Sapiens
ctcataaatcttttaataacagtaaatgaagaaacattataacagtaagccccatggtgagggttccttttcattcaaggatcttcaacaacagaaacacctgagactaaaattcagaatgctaagtacacaaattaatgaccatttatttccaaaggcgactgcagataccatttcggtacaatcaaaaggttttacaagacagagaaaacacattacaaaatgccccaagaggtgagcaaactggtgggggcacagagcacgcaagaaccagcctgacaaaaatcctaagcctgctgctgtttagggagagtacaaagactggttctaagggaagccactgtgtgggggttcaggggagacagtgacgggtctgcccagtgcatagcaatcccagctgggaactgaggaaggacaggggtaggggaagaggggcagaggcatttgctaagctcctgacagaaaccattacagatcagcctatcacattctcttcactacaataacaccaatataaatgaaagattctttaaaatagaacacaaaatggacaccaaaagaaagcaagagttttcaaaacaacagctttgtttgaaatgacttttgttttgttttatttttcatggggctttgtctgtttcttgccatg

SEQ ID NO: 128083 - DNA, 1649 bp, Homo Sapiens
gaaagtcacaaaaatatattaaaacagcagctgtcttcactctaggcactggcctcccttcccagtgccccttgcccaccacccgccatacactttcagagacagatgcccagggcaggaaaacggatgcgcctcagccgcagcccagggtctggagaggtccctccagcctgggagtagagggcggctaacagtctcaacaggctcgacgccaccgccgacgagggggccgctgggaggccggaggtacaggagggtcgggcaggacgcagcggacagtcgggctcttggtgctggtgacctggctgtcctgggcctcgggcacaagggcagctgcgcccagtctcttgatgatgctgactttagacaaggactccggcttcctctcaagcccagaccgtgaggaaagcgccaggcgccgcagtgtcggggcagcagccgttgtcgctgagcttgtggccttggctttgacagtcagtgctggctggggactggccttggctgggccccgtcctagcttcttcaggaccccggcatactgcaagacagagctgctgctgtcattgtcgctgtcccaagccagatcctcgtccgtttctggggtggcccccaggcggctgaagactcctgtgggtttactccctgtcgtggtgtctgccttggtctcggcgccgaggcggtcaaacacagacgtcctatggagaccttttgcagcctgctgctgctccaggatcttgcgggtgcggggtgtggtgcctttgggcatgttgatgacgtacttcccctgccatctcagcagtgacccggcgccgcttggcaggaacagccaggctctcctcctcccggcgggccagtgcagtggccttggcactctttgctgccatcttgttggacacagtgaccgagatcttggaggtgctggtgtccgggcgcctggggggtgtgctgggtggagagtcatggttcaggctgttggtgatcattcgggaggcagcactggtgccacggcgaatttcgcctgcaagggggctagggctgcagggtactgactcagtggcagctttgcacatgtcctgacggtgcaccactttggcatgcttgagaatggcgatgatgtcacccaccacggtcacgcccagctcattcattatctccttattgagatccagcagcatgctcttctgaatcctattatccacaaacatcacggcataattgacggcaggtcctggaggaatgccggcttccttaaagaactggatccactcggaagtggccatagtcacggagaccatcgtctccctggccctgacactgctccctggagccttagaggactgctataagggctggatgagtttctatgaataaaagcacttgagacagtgcttggtgcctactaagcacactggaggtgttgtgcctggtctcatcctccaggcctccttccccacacaggtgctttgccggcctcccagtttttagaggatgtcacctgtgcctggaatgcctgtctcctcctggcaacctatccttccttctgctccactgccatctactttgtgacactttccctaagtccccacatatgagactctcttctctatcctcactagggttaatcttgcccttctctggcttctgctcaa

SEQ ID NO: 128084 - DNA, 859 bp, Homo Sapiens
cactgtttattaaaccagatttattctccacaagctgaagatacctgaggttacatgaggactggcattaaataatttataaatgtatttttgactgacagacttttatcataaggattcatgtgtttacaaaagcaaaatccaacctctccagagctagaaagtgggaaggtgcccgggctgcaagcacagccttgggggaggatgaggccacataattctctctgcccacactctcagaatgccccaagaagttagtagctacacaaagccaagccttgggggaaaacctggtccgtggtgtggactctccaaaatgcagacccaaccggaggccgggcccgcctttccatctggaggcactgcagggcttctgaaagcggcccatcccaggagcctggcaaacacccccagagaccctcaggatgcgccagccccggggctttgtcctgagaagctggagctccgtggcccagcttgtggatgggtgcccagggggcaggccccatgccctcagcacgtgctgacacgctccctccggctccaacaaccacaccagaaccttccgtagaacatttaagtaatgaagtctcaacattacagtaaaaaggtgcaaagggtctcttttacaaatatttatgtacagccaagatcttgttgagttcagtatagcatgctgcgcgtacacatacgcagtgtgcacacggattcagggaactgagcggcacactgaagacgagatcacacgtgtgcacacggattccgggaactgagcggcacgctggagacgagatcacacatgatgctattttacttttgatcccatgtgctttcctgggcatgatattttagatggaac

SEQ ID NO: 128085 - DNA, 1051 bp, Homo Sapiens
ttaaactaaaaaaaagaagagattgttttattgtgacatttatgacattgaccccttgttgacaggaatgaccgagggtaatcttggcatattgcacatgctgtgatgaaggatgcactggtgatcctctggccactgaggctgtttcctggtcctcccagacctctatgcacgtgtgggccagtcacagaaatttcattaccacttggtgtatacatttaacaagtctttggtcttaataagcaccattacaaaccctcacattaagggcattattattctagtttataaatgtttcaatgataaaaaatagcacgattacagtatacacacacttaatttacatgtaatgtattatactcataactgagataagctactgaactaactttggttgattgaaattaatgaagtattggaactgaatacttgtaatttggtttctaagttgtgtacatattacagtgcatttataaatctagtttgaaatttactagcaccaaataggtaccataaatggacaacctagtacttgtatttggagaagcaaagtttacaaatttgcaaaaaatagagtagtccatcaattgaaagcacattcccgtacgtttgctggaaggatggcatgtcagcataaatggccaacccccaatggaaatacacgtcccagttttcaagaatcaacacatatgacaaggtagcttagctacacacatgagaagcctgagaaagtggttgttttgaactagggtagtcacctgtaccttgctttggtaatacaaagaatagtgcttatttatacaaatttacttggtgaaagattgtacctatgatatgatgattctgattgggggaaaatatagttctacctatctatatttgtttttcttttaattatttggtctctggatggtgaattaatgaagcaaaacctggattttcatcttcagattatcacccagttcaccactgaggtagtctttgtcatatttgtcttctagttggttaagttctttctttttataaagtggaatactactgatttgtaatg

SEQ ID NO: 128086 - DNA, 649 bp, Homo Sapiens
  misc_feature (86)..(86): n is a, c, g, or t
  misc_feature (320)..(320): n is a, c, g, or t
  misc_feature (327)..(347): n is a, c, g, or t
acatgagtgagggctctggcttactgggaaacagcgattgacctgtgcttctgacagcccccgagacaccttgaggaggccgctcnttcccagacacacccccacgcccccattggacggcattggaggaagggacagctgcttgggttctaatgctcctgctctcttttctttcccctccaaccagttcaatctcatccctcccagcagctccccttccaccccccggggaactgaagattgtcctggccgcgacctgagacctccatgagtggagggaagagtgatctatgtctcttcccccagcagctcggaccaanttccagnnnnnnnnnnnnnnnnnnnnnaggggagctggggaattcctgccaagcaccttgaatgggaggggcctcacagagggcagggccagggtccagcaggggtggggggttcctgctctgcccctgcccgtccccacccagtcttgccctcccatcctctcatctattcccccgctggagacggaagatcttttattttctattatttataacttcagacttgggccccctgttctttctttcccattaacttgagtgacctgtgtgagagacagacagatgccccacgaggatggctggacaaggacttttactttttattacat

SEQ ID NO: 128087 - DNA, 632 bp, Homo Sapiens
  misc_feature (302)..(349): n is a, c, g, or t
atgtaataaaaagtaaaagtccttgtccagccatcctcgtggggcatctgtctgtctctcacacaggtcactcaagttaatgggaaagaaagaacagggggcccaagtctgaagttataaataatagaaaataaaagatcttccgtctccagcgggggaatagatgagaggatgggagggcaagactgggtggggacgggcaggggcagagcaggaaccccccacccctgctggaccctggccctgccctctgtgaggcccctcccattcaaggtgcttggcaggaattccccagctccccnnnnnnnnnnnnnnnnnnnnnnnnnnnnnnnnnnnnnnnnnnnnnnnnaagagacatagatcactcttccctccactcatggaggtctcaggtcgcggccaggacaatcttcagttccccggggggtggaaggggagctgctgggagggatgagattgaacttgggggtgtccgatgtaggggtagggtgagggtgtggaagctgagagtgcaggcaccccactctggggcaccgcgccttgggggggccccccatgactctggggtgggtgcagcagcatcacctggggcgggtggggagcccagggtgagggggcggggctgctgtgat

SEQ ID NO: 128088 - DNA, 340 bp, Homo Sapiens
tgcagagcagcataccccccaagccctttatgccactgttcaccagtcctacccacaccatgccacacagctccatgcccaccagccgcagccggctaccacgcctactggaagccagccgcagtcccagcatgcggcccccagtcctgtccagcatcaggcggggcaggccccacacttgggcagtggacagccacagcagaatctgtaccagccccggccccctctctccctcccttctctctaattccccttccggacgctgccatcatgttgaagcctcagccgctacaacagccctcccagccccagcagccgccccccacgcaacaggccgtgg

SEQ ID NO: 128089 - DNA, 1819 bp, Homo Sapiens
  misc_feature (309)..(358): n is a, c, g, or t
  misc_feature (470)..(470): n is a, c, g, or t
aatatttttacgtaataaaaagtaaaagtccttgtccagccatcctcgtggggcatctgtctgtctctcacacaggtcactcaagttaatgggaaagaaagaacagggggcccaagtctgaagttataaataatagaaaataaaagatcttccgtctccagcgggggaatagatgagaggatgggagggcaagactgggtggggacgggcaggggcagagcaggaaccccccacccctgctggaccctggccctgccctctgtgaggcccctcccattcaaggtgcttggcaggaattccccagctccnnnnnnnnnnnnnnnnnnnnnnnnnnnnnnnnnnnnnnnnnnnnnnnnnnaagagacatagatcactcttccctccactcatggaggtctcaggtcgcggccaggacaatcttcagttccccggggggtggaaggggagctgcttgggggtgtccgatgtangggtagggtgagggtgtggaagctgagagtgcaggcaccccactttggggcaccgcgccttgggggggccccccatgactctggggtgggtgcagcagcatcacctggggcgggtggggagccccagggtgagggggcggggctgctgtgattccagtttggacatgggcctgggtaacatgggccatgttggtgaagccgtggggcagctgctggtggtggatggcatacacagcggctggctgggggaagctgctctgaggggactgggcagaaggtcccggtggcagagagggcggcgtgcctgtcagggcccctgggtggtacagattctgctgtggctgtccactgcccaagtgtggggcctgccccgcctgatgctggacaggactgggggccgcatgctgggactgcggctggcttccagtaggcgtggtagccggctgcggctggtgggcatggagctgtgtggcatggtgtgggtaggactggtgaacagtggcataaagggcttggggggtaggctgctctgcagaagggtactgaggggtagaggatgacacgatggcctggggatggctgcccgacgtcagcatgcgtgggttgctctgaagcatgggggcaaacaccggctgtgaggggtagtgggccatgggctgcatcatggctggctggcctgggaactgctgagggttgtaggggatgtaggaagaatagggcgtggcagccaccagaggcgggccagcagccgcggcggcctgcatcatcggcggggctgaggctggctggtgttggtccgagcgctgcggaggaagggagccttttgctccccggtacttgccctgctgcccaggcactgaattggatacaggatatggatacatctgaggtgcctgcacagctggtcccatgtggatctgaggtatgtaggagatgtactgggggctgtatagcccactctggcctgctgtcagcaccgggatggagggagttgaatgagtccggggccccggagaagttggggtactggtggatttattcacagacagcagaggctttgtaggattgaactccttagcattagggttcaacgttgatttctttacttgttcagcaacagggccctcatctttgtcttctcccttgatgaggcccaccggggggctgccagtttggcttggacaaggtggtgggggctgctctggcccctcagtgcctcctgatggtgccaggggtggtttgtcctccttatccgatacggactctgtcttggaggagacgggagaccccatgggctctgaagtcaacagaccatcaacctctttctcctttcctttgggctcctcatt

SEQ ID NO: 128090 - DNA, 791 bp, Homo Sapiens
tttttccaattttgcctaggttggcctcgaacgcatagcctcgcctccttgtgtgccaggacaaccggccggagccaccgcagctcccgataccgatgtttttaaaaatatgttttaaagtaattgcttaccacttagggaaaaaattgttgaagtataaaacagccagaacacattgctctttattttggtagcttatgtttggctgacttgcatatgttaaaaaattctcagattttagtctatggattttaatactatatgaaaattcttttatagtttctgaagacctatgttatacgctttctatgagaacttctaaattatcgttcaaaaacaaacactacccttacgatatacctttagcattaaacatttagatcatgtacccaaccattctatttttctaaacttctaacctgaagctttggttatgagggaaaacaaagtttgtaagggttcagttctctgagatttttcagaatgtttccaacgaaatacattcctatgttaaaaggccagcgtcagccaagcttccttctggacaaataatgaattggttttatttgaagttttattctgtaaacaaaaagctttggaaactttgggatttcctgatgaaaagctaggagaaatgcacacctagtcctcagccaacgaggcactaaccagcgagaccagatgttctaaccagtcttctctaatgctgtcaatctaagaccacaaccacatctatacttcacaagcatctcagaagtcctaaatccagtaagatgcagtacagttggtgc

SEQ ID NO: 128091 - DNA, 1018 bp, Homo Sapiens
atgcggactgttgtgtgcccgggggggatataaattttattttaagtttatatttcctgcaggatagcaacatacatcttttcctacccagaggcaaaatacattttccaaaaacgtggacactgcccactgcattaagtttaaagtgctccctatatatatagacagtaaaagtaagcaaagaaacttacaacacattccaatctttaatatctcaaaaatgtttccaaggcaacattattaaaataattataccacagtccctaatataacatcaagctccagtaggaaggtacagagagggcaggaagtttccatccagtctggtttaggtgctcttcttttcttcacccagtaaattcacggtagctttcttcgcttctttagtgatggcatctgcagtctctttggccttgtctttaaggtccttgaccacactgtccatctgggactcgtgcttcaggaagaaaggacggatgatgcgcttgtagagcagttcagccccattagaagggctcggggccatgcaccacaacaggaagccacacttcagcatgtagtagaaggggaaccatgacaggaagatatcagagaagaattcagcaatgctgaacacaccatacactacccagtaggtcagccactgggtatcatcttctttgttgggactctctatagctttaattgagatgtaggctgggtagccaaatcctatcaggttgcagaggagagaggctccataaccgaacaccaggtacaaggccaccagtccgatgacaccaagagcgatgaagctcctgttcacgccggttttggcctcgagcttggccagaaggtcagtcatgcagttcttctcgtgcaggaaccggtcgaacctctccctcatggccgcagacatggcggggaccgtctcgccgctcggggctgttcctagtgccggatagactggagcggcgactgcggcggagcagcggcaggcggggaccgcggcgcgtctacgcgtcctccactcgcctcc

SEQ ID NO: 128092 - DNA, 630 bp, Homo Sapiens
tttgcctgtagtttaacacaactatgcattattttattgatggcaagacaatcacaagttatttgacaatattaagtatttcttatttcaacacgttgcagtacttttgaatttccaaaacttatcacaatgcaagttccaacttgagagcaggagaaacaagaatatacattgagcacatgtatctccgtgaggatgtgtttgtggaaggtgtatacacaagtctatctctatatataattatgtacacacatataaaaactaaacacatgacatctgaaacacgttcaaacattggtccttgccttctgcaagaggtgctcagtgggatcctgcttcctctcttcttcacctgaagataaattccttgctagagatgagctctggcatacagcctcctaggcagagggtgtgtggcaggcccactgcacaaatatcagtcctgccagattctgctgcacttactgcctgccatttcagattaatttctgagaagtttcaaaattcattccaacgaccttgtggagttcagcccaccataccccagatggtcattcatcccatctatgacatgcccagcagcagcctggagggagagccactgacagcagggagggtggggtttacatt

SEQ ID NO: 128093 - DNA, 1413 bp, Homo Sapiens
aacagtaataatttattggcaacttgacctcttattgtatacatacagcatgatttattttcctattcacctagtactagccaaatgtgtatgtatattgctattataaacaaccctgtgattaacatctttctatcaagatctgcctctactttgaacagtttccttattgccaatagttattttaaaataaatagttattttaaagggaaattgacacatacatataacacactcacgcaaaactggcaagtagcagataagtgctcttctaatttcagtttcctagctttcatgtagaatgaacaattatagtaataaaggctgaaggaaaacaaagatattattgagatacaacagggacagtctaaaacagcatcagaaagcaagttcatgctgttcaacattagcaggcaagggaaatagggaaagaaatacgcaaacgtggctatcacagaaaagccagcttattactttaggttctgtgggagactacaggtcacataaaagcagtctcaacaataatgtgaccacatgtgcaatcaacatttacaaaatgaaattatatatcatgtataacacaaatgttttgcctatactttaatttacaaagccacataccgaatgactgaaatgtacataaacattcttttatgatagaccagaacatctatattatcatgacttagaaaaagaaaacagatgcaaaatagtgttgagaatttctggcctgaaattacaagactaagtgtgtgtgtgcatgcgtgtgtacatatatttaaatcgttttattctcatttgatccttttggctgaactttattcatatattatctgcccttcttcttataatctctctcatgaaagatatcattatccagtcattgaagccaaacccccttcaccagcccccaatctctagacatcaagggttaacaagacatcttcctaaatttctccggaattaagctcttctctgttagaatttcctttccaagtccatttcttcataaatctggcatgtgaaatttgaattgctctgccgcagttttctcttctttagtcagtggtgacagctccaggtctgtttgcttctgtagtttttgtatcatattcatagtctttttcacagtagcacaaatgcggctcttactctctttctgctcaacagcaactggtttaaagcgggcatacaaagtttgatatcgagactttatcactgacaattcctttaagagtgtaactggatttttctcacttgctgaatcaggatgattagtcttgatttcatattccagcctgtattgaatgtaatccagatcagactcagctttctggaacatcagttccagcttatcgacctccgcctccatgttgaatagttgacattccgcagaccgcggcggcgcttccc

SEQ ID NO: 128094 - DNA, 372 bp, Homo Sapiens
ttttttgtgggttacaggttatatttattattttctatagtatctaaaaagtaacatatattgttaagactttgttaaaaataactctttacacagctttcggaaggtaactggcaaacaaggtttacaagtaaaagataaacttttcaaactaaaatcagtttgttgtctttacgcaatttacagaagcaagttatgattcaatttaagtatctgaagcagtttccacaataaagcattcccaagaaatagaaaacggagcttagataaagcaccagctgtcacattgtcaccaagttaacactggttcctcactggtctccataacatgatggagagcaggagaagaaagggaaggaacacttagagagg

SEQ ID NO: 128095 - DNA, 478 bp, Homo Sapiens
  misc_feature (51)..(59): n is a, c, g, or t
tttagaaatacttattgtatatttgttttaatatcaaggtacaatgattgnnnnnnnnncttttccatattttttaggaattattaggatctggaaataaaactgccctaatcaaggtaatcaataacattctacctttttaagttttaaaaaagaagtttcatatccacatgagatgatttatattatgcatatacaaaagtattttgtatgtgagcttgctacaccaagaggctacagtgacatgtgtgacaatcatttccttgaaactctgctaaaatatgcatttgaccaaacaaaaggccttctgcagctaggacaagcaatcacatattatacagaatgcttagaaccaagattcagatcttaatgagacttattgaaaagttctctgccccataatgaggcacccctttaaaaatatggtctgagtagagacataaaagatatacatttaaactgtgatggtaaaataacc

SEQ ID NO: 128096 - DNA, 553 bp, Homo Sapiens
  misc_feature (481)..(481): n is a, c, g, or t
tttgattagaaatacttaaaggatatttgttttaatatcaaggtacaatgattgaaaaaaaacttttccatattttttaggaattattaggatctggaaataaaactgccctaatcaaggtaatcaataacattctacctttttaagttttaaaaaagaagtttcatatccacatgagatgatttatattatgcatatacaaaagtattttgtatgtgagcttgctacaccaagaggctacagtgacatgtgtgacaatcatttccttgaaactctgctaaaatatgcatttgaccaaacaaaaggccttctgcagctaggacaagcaatcacatattatacagaatgcttagaaccaagattcagatcttaatgagacttattgaaaagttctctgccccataatgaggcacccctttaaaaatatggtctgagtagagacataaaagatatacatttaaactgtgatggtaaaataccnaaaaaagagaattatagttcaaaaaaggacaatctttgaaaaacatcatagaacagtcaactatgacacgtt

SEQ ID NO: 128097 - DNA, 781 bp, Homo Sapiens
  misc_feature (58)..(58): n is a, c, g, or t
caaggacctgtagtaattggtgcacaattttttattttattaagtttaaacacttttncttattcaatagatgaaaagtgagttatccagacacagatgaataaggctgtaaggtgtatcagtttgttttatttgaattagaggctcaaggaaaacaccagtgttacggagagcaaaatccaggcttctgtgtcagatgattttctttacaatcgggcaacaggaacttaaaaatcagtgttttcaagcagaataccttgttcttgcacaagtgttgctagttaataaatgaatataagcgaacattatatagaattatgtctaaactcatcaggtaaactaagtatatgtttattattggtgtatttaataagaaatactagaaaattctgtgtgcttcaaagcctgccaaggatgtttggggttttaattcttgtttaaaataactgaattaaagagtcttgcttcatgactttaaattcaactacctttcctttagtgattattctataacatacagaaaaagccattctgaaaacatacacaagattttagcaccaaaggatgttgacccttctgaacgatttgcattgtgtttttctcaagcaacttaaaggtcaattttgtgtagtcaaggctgactagtttataatgatacatttggggatgttttccattctaaatgaaagaaaaatttcaccttcactataaacataactgcctccttctacccgcattggcctctccaccctctggcccagtgttgataactttgcaacct

SEQ ID NO: 128098 - DNA, 1700 bp, Homo Sapiens
cagtaactataacggttattaaggtagcgaggcctgggtggcgaattcggcacgagggtgttcacggtgagaccaaaagtcaggcccgcagccgtgccgggtgctcttcagcatgtccttcatcccggtggccgaggattccgacttccccatccacaacctgccctacggcgtcttctcgaccagaggcgacccaagaccgaggataggtgtggccattggcgaccagatcctggacctcagcatcatcaagcacctctttactggtcctgtcctctccaaacaccaggatgtcttcaatcagcctacactcaacagcttcatgggcctgggtcaggctgcctggaaggaggcgagagtgttcttgcagaacttgctgtctgtgagccaagccaggctcagagatgacaccgaacttcggaagtgtgcattcatctcccaggcttctgccacgatgcaccttccagccaccataggagactacacagacttctattcctctcggcagcatgctaccaacgtcggaatcatgttcagggacaaggagaatgcgttgatgccaaattggctgcacttaccagtgggctaccatggccgtgcctcctctgtcgtggtgtctggcaccccaatccgaaggcccatgggacagatgaaacctgatgactctaagcctcccgtatatggtgcctgcaagctcttggacatggagctggaaatggctttttttgtaggccctggaaacagattgggagagccgatccccatttccaaggcccatgagcacatttttggaatggtccttatgaacgactggagtgcacgagacattcagaagtgggagtatgtccctctcgggccattccttgggaagagttttgggaccactgtctctccgtgggtggtgcccatggatgctctcatgccctttgctgtgcccaacccgaagcaggaccccaggcccctgccgtatctgtgccatgacgagccctacacatttgacatcaacctctctgttaacctgaaaggagaaggaatgagccaggcggctaccatatgcaagtccaattttaagtacatgtactggacgatgctgcagcagctcactcaccactctgtcaacggctgcaacctgcggccgggggacctcctggcttctgggaccatcagcgggccggagccagaaaacttcggctccatgttggaactgtcgtggaagggaacgaagcccatagacctggggaatggtcagaccaggaagtttctgctggacggggatgaagtcatcataacagggtactgccagggggatggttaccgcatcggctttggccagtgtgctggaaaagtgctgcctgctctcctgccatcatgagattttctctgctcttctggaaacaaagggctcaagcacccctttcaaccctgtgactggggtcctccctcgggctgtaggcctggtccgccattcagtgacaaataaagccattgtgctctgaggcctgcactgccgcagatgcagctgtgtccacttatgatcgtgatttgatccagtgggtcaaggtgtgtaaagcctccctgccagatattcattaatatgttttctcactcttattagtgaggtcaggggtctttgtgggattttcttattagacatcccaggcctcctggtattccatggaatttgaaaagagactggcacc

SEQ ID NO: 128099 - DNA, 415 bp, Homo Sapiens
gtgcacgagacattcagaagtgggagtatgtccctctcgggccattccttgggaagagttttgggaccactgtctctccgtgggtggtgcccatgtatgctctcatgccctttgctgtgcccaacccgaagcaggaccccaggcccctgcccgtatctgtgccatgacgagccctacacatttgacatcaacctctctgttaacctgaaaggagaaggaatgagccaggcggctaccatatgcaagtccaaattttaagtacaatgtactggacgatgctgcagcagcttcactcaccactctgtcaacggctgcaacctgcgcccgggggacctcctggcttctgggaccatcagcggccggagccagaaacttcgtctccactgttgaactgtcgtgtttgggacatacagcg

SEQ ID NO: 128100 - DNA, 700 bp, Homo Sapiens
  misc_feature (122)..(134): n is a, c, g, or t
  misc_feature (657)..(657): n is a, c, g, or t
  misc_feature (662)..(662): n is a, c, g, or t
ctaattcattgaatttttatttttccctacattctggagaactaggcaaatacaagcagagagcggttgtaattttgtgcaacagacactgaccggctttttattttatctttttatatttnnnnnnnnnnnnnaatgattgtactggtaaagtctctcaaacctccaaagaacagcttattccaatgctataataagttacaggcataaaatgatatactctcccaatttcttttatgaaacagcaaatctctcctgctaaaaccgaaacagagaacaataaaacatttgaccaacgtcattcatagacctagatgttcaacttaagtactcaatcaagtgtctatggaacaaaggattttgaaaaaaatgcttaggtatggcgtttgtttcaactctgatataattctgtcatcatgtagttttaaccagtttatttcctgtaaaatgatcatcattataaaagaaagttaattaaggcaaacaaaactttgcagtatgcaaattgaaagctaaatcactgagaaagacaaatagaactggaacacagataccatgggcggcaggttctccctaaccccactctacccctcgactcttgaaaagtcaggaccccagcacccactgctgtggggcccttttgactacccacagcanaacanagtgaagactcagccccagccttcactgctggcaggag

SEQ ID NO: 128101 - DNA, 740 bp, Homo Sapiens
ttgaacaatgttgaaattttatttctgaaatgtttcttttaatcaatacatattaagtatataatttccttaaaaattaacaaataactctgattttcactgttaggacactgttacagagaaggaaacatattgctcttctaacttttcttctttttacatttatccacattccaagtagattatcatagtaaggttcttctgtgttacttttgtccaagttgtgacaactgttttatgaactgtgtagcattaaaaagctcactgcagccatataaaatgtgtttgccttgtttcccctttatgtagtcaacaagattctgatattcaatgtagttgcctcctcccaccacaaaaacaatggcctcttggaatggatttttatttctgggaactgagctgtcattgccccgcagcattttgggatcaaaatatctatagtcatcagtttcggggtttgacttcatctccataagattgtccaaaatacgagtaacaggtagattttgctgtttcaaaaccaggttcttcactccttccatcacaaactgtgatcctgtattcatgactcgtgataaaagacccattggtttagtggtagtgctgccatagctggccggagctgaggccatcttggtaaaagccttccactgtttgatatattgtaaaggattaaggttgcatcctgcatcagttaaagcttttttaaatggccgcaaatcaagccccaaaggtggctg

SEQ ID NO: 128102 - DNA, 1722 bp, Homo Sapiens
  misc_feature (229)..(237): n is a, c, g, or t
  misc_feature (985)..(1032): n is a, c, g, or t
  misc_feature (1338)..(1338): n is a, c, g, or t
ggggggcgctgaaacacgtcgtcgcgcaatatttatcgagaggacgcgcgctctccttaggggagcctccgcccacgtggttggggatagagaacgcccccgggtcaaataagggccctcccgagagagaaaacttcccacgttttggggggagttttgttttactgagaaaaagccgcccttgggcgttttcgccccccgcgggggggcgtgttctttttttatgttnnnnnnnnnaaaatctcccgaagccccctctatttcattggtgcccacaagggtttttccctttggggaaaaacaaatttataggtgcccccttttgtcccactcttcccccctccgggggggcccgcgggcgccccaaaagggaaatggggtttagaaaaaattttttcgagggggccgagggccggccccaccaaaaatctgtctcaccgcggtgcacagtcagttctgcgggggctacgccttgtctttttcgtggacacttgacgccgcggttttcgcgggggggtaataatattcaggtttattctcccttttgcatctgtgggatacccagagttagagagaggggaaacgtctgctattttcttcagcagttgtgttttatgggaagggcttggtgtaaataaatgcgttgccgattttgagcacagcttgagtgcagttacttcgagtgaatgaaaactggaaagggctggactcaaaggttagaaggaaaaggcgccaaaggctgtccttttgaaaccctctaagaaatggctgtggctcctgaggatgagggtggggtggaccagggaggactagtgactgggatacaggagaccaaggggacagctgtgctgatcggtggttacccagccatggtggttgcaaatacctcagggaaactaacagcaaccagaactggaacaggggagctggtgggaaagagtagcagatgggccccctgaccatgtcacacctctggcaaagatgnnnnnnnnnnnnnnnnnnnnnnnnnnnnnnnnnnnnnnnnnnnnnnnnatgcaggatgcatctgcgagccacatgactgttggcttcttgaccagcggccagacatcaccctcagattctcaggtttctataaaccttggcaggaagagaggagagggcgcgggttggattgtatgccccccaggcatgttaagggggaaattagagaaagggaggcccagctctgttgcgcaggaaaagggtgtctacaggaagcccaaacaggaccctgtgtctcatgcagcatgcagcaaacagcagagttaatttttcttctctttgtctctcttcagagtctgtgagcctccagcctgntgagccctgggactggagcagctcagccgccgtctttctttgcttgaaagcattcacttcatcatccagggatttcttcttatcctccagtttcttcttctcgtcctggtgcagtttcttcagacggtcaaacttctcgtgcagctctttctctgcctctttgagctccgcttctttctctttgactcgctggacgaacatctgtctcatctcctcttcttttttctggagttcccctaggaactcgttccttttggcctcatatgtctcctgtaaactgaagggtttgctgtcagggtcggtgtccttgaagcccatctcctccagcttacagcggcgatacagctcatagtgccgggtgtgggtctgctcccgcagatcccc

SEQ ID NO: 128103 - DNA, 636 bp, Homo Sapiens
  misc_feature (232)..(270): n is a, c, g, or t
gcatatgtacaggcaaatatgtttaattttttaaaataactgatggcaaaataaaatatttacatcacatcatactgtgtaaacatgtaaggtctctgtacaaagaaatatacatgcaaaataatgtaaaaatttaactgaaataataaaagaaacaatacacaaataaaaattatgaggttacgaatacacatccagtttcgaatccaatttcttttaaaaagtttctgtnnnnnnnnnnnnnnnnnnnnnnnnnnnnnnnnnnnnnnngaataaataaaatacactggaagctgcaaagcttaactacgccagtttatggctcaagacccaggtgtctggctggcttgggaagtgggctggtctcttttgtagtgcagttcacacgagaaagataaaaagacatccagaaaacttcaagggtgcccagaaacccagcctccttgagttgaaaggactccccacaccagtgcgaatgctgccacagtgactcgggcattgggtaccagccgcggggcggccagtgcttaatcggcttttatttcttaccaaaagctcaaaacccagccaatttttatacagaaagttcaccgtcaaaaagtctaaaaagtagtaaatgtccagactgattttggg

SEQ ID NO: 128104 - DNA, 1557 bp, Homo Sapiens
  misc_feature (78)..(93): n is a, c, g, or t
  misc_feature (103)..(252): n is a, c, g, or t
  misc_feature (258)..(259): n is a, c, g, or t
  misc_feature (682)..(682): n is a, c, g, or t
  misc_feature (1411)..(1411): n is a, c, g, or t
gggacacaatttgaccccccttcctctttccacatgggggccgcccccgccccaaaagggttttaggaaaaatttttnnnnnnnnnnnnnnnncgacaaaaannnnnnnnnnnnnnnnnnnnnnnnnnnnnnnnnnnnnnnnnnnnnnnnnnnnnnnnnnnnnnnnnnnnnnnnnnnnnnnnnnnnnnnnnnnnnnnnnnnnnnnnnnnnnnnnnnnnnnnnnnnnnnnnnnnnnnnnnnnnnnnnnnnnnnttttannttttcaggcaaatatgtttaattttttaaaataactgatggcaaaataaaatatttacatcacatcatactgtgtaaacatgtaaggtctctgtacaaagaaatatacatgcaaaataatgtaaaaatttaactgaaataataaaagaaacaatacacaaataaaaattatgaggttacgaatacacatccagtttcgaatccaatttcttttaaaaagtttctgtacaattttacaagaagaaacaaacaaaaacccaacaaaagaataaataaaatacactggaagctgcaaagcttaactacgccagtttatggctcaagacccaggtgtctggctggcttgggaagtgggctggtctcttttgtagtgcagttcacacgagaaaggtaaaaagacatccagaaacttcaaggtgcccanaacccagcctccttgagttgaaaggactccccacaccagtgcgaatgctgccacagtgactcgggcattgggtaccagccgcggggcggccagtgcttaatcggcttttatttcttaccaaaagctcaaaacccagccaatttttatacagaaagttcaacgtcaaaaagtctaaaaagtagtaaatgtccagactgattttgggaaaaaaaataatactttggcattctgaataatagcataataaattttaaaacattaccctattatccagttttatattcagagtatgaaatcacttttacagtcctcaaaaccaacaaatttcacgaaaagtctctttgaaccgatggcacagggctacgaccctacccacccacccgccaaccccaacacacacacaaaaccataaagctcaccatacgaagtatgtgctttttctatatatttattacaggtacaacagaggtcttcataaatagttgcataaaatgttaaagccacaacattgcacatgatatgaagtaaaaccaaaaaacccccaatgagtgcatttacagtattttcatctgactgtgtactgctccacaatctgattgacggcttggggcaggaacagggggaggggcagtggggcaggacccaacctgatgtcttcatgtgatgggaagaccctcggacccccagaggaagccccaggtggtgggtgggggggtggaggggaggcangtgggaaaatgacagaccgaaggcaggaacagtcttatatacaagtaaggcctacatttcatcagagcaaaacgattcattctattttatgcaaaagtttgaggttgaatgcacgtttcagaagccacgtcgggcgtgagatgcac

SEQ ID NO: 128105 - DNA, 1265 bp, Homo Sapiens
tttggcaaaaagaaacatttaataatgagggggaaagggcagaaaggtgcaatccaggcaggcaggttgagggcaggacatgccgccttctagggtctccagagaagctgtgtcaacggaggacgtgggccggggagggcccaaggctgcagcacatctacacgaggggtcagcagaacttccagcggtttccacactcgttgcagacaacaaaggtggtcatgggctcatcagagctgcgggtctgcacctgtgtgtaggtgcagttctttttcctgcacttgccgcaggtgaacaggtctgtctgcgtgccgccagtgcgggccatctggtgctctcggatggcctccttggtcatggccttacggatctccttcagctcatcactggccatctcctctgaggtcatcacagcgatctgctggggtgttatggccccacacagcacattccgccgcaggtcagggttcttggcatccttcaggttggagatacgactccgtacacggttcttatacttcatgtctgtgtttccaacgtcccggaagatgcattcctcgatctgagccgacaggcgctcgcagtccgcaccgatggccacgtggtcatggtccgtctgcagggcagcggtcagcatctcgcggcacttgttgcgcacggcatcacaggtgacaggcaccggaggaaatgtggtgatcctcggagtcgacggtgccctgggcagctccggcctcttgcggctgggatccggggcctctgaggcatccctcgaggacgtgggcagaggcatgcccctcccccgctccctggctttggcatcggaagcatccaggagcttcttccaggacttgatgagagacttggccagtgcaatgacctcctcatccgagctctgcttccgaagggcgttgacagacatcccgactcgggtggactggagcaggtgcagcgtgataggcatggccttcagctcccgcagcaaatccatggctccctcctcagactccaaactgttgccggcgacaaatgctatgggagacggagggtgacaaacgcgcgctcttcttggtcaccatcttgtccagcctccgggcgatccgcgcaatctcctcttccttgcccatcatcgcctcaggagcagcgacccccgcgcccgtcgcgcccgcctccgcagccgggcaggaccccggccccggccgtcgccacctcccacacccgccgccctcgtgccgaattcaacacccaggcctcgtacctagccgtaa

SEQ ID NO: 128106 - DNA, 319 bp, Homo Sapiens
ctggggatggccctgcccaaccagcctcctgggagtcttgggcatggtgggtggagagcccagccttgggtgagcctgtgcggccttccactctgggggatctcatgtggccacaaggctggaggcctcaccccctttctcgcagttctgctgacccctcgtgtagatgtgctgcagccttgggccctccccggcccacgtcctccgttgacacagcttctctggagaccctagaaggcggcatgtcctgccctcaacctgcctgcctggattgcacctttctgccctttccccctcattattaaatgtttctttttgc

SEQ ID NO: 128107 - DNA, 539 bp, Homo Sapiens
  misc_feature (440)..(440): n is a, c, g, or t
tcaaattaatgtccatccaaatgaatattttactataaaataaaagaagtaaataatacagagtaattatttattacttattcatttctaggcaggatgagggtctgagagtataatacagttcaaataaagaagttacctggcttaaaaatagctacttgctaaagatagaaaattattataaatcttaaaaacaaacaggcaaaacatcttgaaagttttataggctttgcattttaaaattatagatgattagaaactatacttttcttctatactgatactaaaatagtttcattttcagcttaaattacaacagttaataatttatctgactgtatataaacataatattctttctacattttagtttaaaatagtacaatattaaaaagcttataaattggccaataaacatgggaactcacacatacatttcntgacattgggggggattattataattattatgttatggaatgccaaacataggcaatgtatgtaagttttaggatagttataatgaaataataaaaggg

SEQ ID NO: 128108 - DNA, 735 bp, Homo Sapiens
ttttttttagaataggaatctgaattttattaaaaacaaaaataaatctaaaaagcttccttcagttacaaatatgcacaagaatttctgcattacatcatttgacataaaatgttctgaatgacagaagtagaagtagaacttactaccatttgaagacaggagttgagcgctgaaaaccacacacatttatagaaagaaaccaaagtttcacagggaagacctgtgatctctggctacaggagctgaaattaggaacatgaaagaaacttgaagagagaagacattcaatactctaaaatacttcagcaaaaatagtcaaacatctgtaaacaacttgtaacaaatctttatatgttgtgttgctatgcggtaaatattcttaactgattattattcaactcaaaaaagtgatttttattgctcacgaatacttccctctagattagataaaagcttgctttcttttcctggagtcaagagtaaaatgtaattagggcttactcagtgattgtttttgaatttcttagactggggcattccagccacttgcttggctgtttgcaattttcacccaaaaaacggtcaaaataaattgtaaaaccagaacgaataagtttggctccttgttaacatttttatttgcaggatggatgaggaaactgatgaaactggctgtggattttaattatccctggtatctttttctcccatctccaaggatcatcaggactt

SEQ ID NO: 128109 - DNA, 1568 bp, Homo Sapiens
tttgccgcatgagattattttattaaaaaactcaaaggaagcagagtgtggagcggtatctgtcctgcgtgacgtctcacatcggagttggctcagaccctggctgtgcatccatcagaaagtgcaaggcccaggccatgagctggggaggaagcctgacagcttggacccgagcacagagggacgtgcagggtggctcatactcatactggaaggcagaaccatcacgatgcctctttgggggttcccagacagagcagggctcctgggctcccctggtagctccggtcctgggaaaaggcggccgattcttgcagggcaaccctacaaactccttgaactccaggctaggtttctggggcctggtcacaagagcctggtgtggactggggacatggctacggggtgagagactgggagtgcagctctggagtggggagctgggggtacggctggcgtgtggggacctgggggtcagggtggcaggggctgagcagatggctggtgagggctgggagctgcttctctgccctgggtctggagcagccaaggacagggcaggcagaaggctgatgctggtaccactttcctcggatgacatgtggccgggtaaggccggggttcctgaggaactgggtgaggaaggaggagaggctatgagggtcagagataggtcctgcagagccgggtctggtgggggcagctcagggccctgtgtcctctgacaggggcctagagagctcagaattagctggtcattctcagagatgcacagcattgagctggggacagtgtacacagcttctcccgtggccttgcatcgtgaggcagcccagtgggtgacagggggtgctgtgcaagggccctccaagtgtcaggcagctttcagccaggcacacgagtgccccctgatgctcctggtcctcccgcatttcatccagaagctgggacagtgataggcctgcattggacgaggtggactctgaaaggtgctcctcaaggcagtcatagagctttttctgaacatctaagtctttggttgcaaccaggcacccgtagccggggctgctccgtgggcagcagggctgaagcggtccacctggagatagaactctgcgggcgcgccgccctcagcgacctggacatgaaccccgcagtcctgcagcagcagcagccggccctctgtcccgcggaagccgaactccttctcctcccagtccgaggtgtccagggcctcccgcgtcaccaggcatcggacactgtgggtcccgtcagacacaagcagcgtggccccgacgtcggacgtatcaggggcgtgggatgggcccgcgaccgcggcctcggcgtcctgtagtacctcaagcagctgcccggctcgtggactggagggtgtctctgaccccagaatcagctcccgaatccagggccgtaggaccagcctccccgaacctgccatccccacggctacacccagcggatgcaacgggcccgggtttcccgcgggcgcgccacccagcctcgctaccttaggaccgtatagtactgcctcgaaaaaccgctttgcatgg

SEQ ID NO: 128110 - DNA, 983 bp, Homo Sapiens
gctgtacggccggaatttttgggatggctgggcgccgcgggaaacccgggcccgttgcatccgctgggtgtagccgtggggatggcaggttcggggaggctggtcctacggccctggattcgtggagctgattctggggtcagagacaccctccagtccacgagccgggcagctgcttgagtgtgagcccccattcagggcccggagaccgaggcggaggcccggggtggtgggattgacgcctgctcgccgccgtcaggtactacagtgacgccgaggcctgcggtctgcgggcccatcccacgcccctgatacgtcctgacgtcggggccacgctgcttgtgtctgacgggacccacagtgtccgatgcctggtgacgcgggaggccctggacacctcggactgggaggagaaggagttcggcttccgcgggacagagggccggctgctgctgctgcaggactgcggggttcatgtccaggtcagctgatgggcggcgcgccctgcagagttctatctccaggtggacctgcttcaagcctgctgcccacggagcagcccctggctacgggtgcctggttgcaaccaagacttagatgttcagaaaaagctctatgactgccttgaggagcacctttcagagtccacctcgtccaatgcaggcctatcactgtcccagcttctggatgaaatgcgggaggaccaggagcatcagggggcactcgtgtgcctggctgaaagctgcctgaacactggagggcccttgcacagcacccccttgtcacccactgggctgctcacgatgcaaggccacgggagaagctgtgtacaactgtccccagctcaatgctgtgcatctctgagaatgaccagctaattctgagcctctctaggccctgtcagaggacacagggcctgaagtgcccaacaagaccggtttgcggacctatttgaccttaatactttctcctgctaccagtcg

SEQ ID NO: 128111 - DNA, 718 bp, Homo Sapiens
ttcgtagcaccggtcagtcttctgcctgccctgtccttggctgctccagacccagggcagagaagcagctcccagccctcatcagccatctgctcagcccctgccaccctgacccccaggtccccacactgccagccgtaccgcccagctccccactccagagctgcactcctcagtctctcaccccgtagcacatgtccccagtactcacaccaggctcttgtgatcaggccccagaaacctagcctgtagttcaaggagtttgtagtggtttgccctgcatgaatctgtcgccttttcccagtgaccggagctaccaggggatcccattgagccctgctctgtctgggtgagcatagtccccttctgcaggctggacgggtacgaacaagtgaaggccatgaggtacgagctggcgagtggatgcgactggtgtagcctttggagtggggtctggggtccgttgttagcctcttccccagacaccaatacccctttcaggaacacccctaaatgaggcatcgtgatggttctgccttccatgtatgagtatgagccaccctgcacgtccctctgtgctcgggtccaagctgtcaggcattcctccccagactcatggcctgggccttgcactttctgatggattgcacagccagggtctgagccaactccgatgtgagacgtcacgcaggacagataccgtccacactctgcttcc

SEQ ID NO: 128112 - DNA, 1280 bp, Homo Sapiens
  misc_feature (25)..(25): n is a, c, g, or t
  misc_feature (46)..(46): n is a, c, g, or t
  misc_feature (58)..(58): n is a, c, g, or t
  misc_feature (104)..(104): n is a, c, g, or t
  misc_feature (121)..(121): n is a, c, g, or t
  misc_feature (169)..(169): n is a, c, g, or t
  misc_feature (891)..(891): n is a, c, g, or t
  misc_feature (1040)..(1040): n is a, c, g, or t
  misc_feature (1056)..(1056): n is a, c, g, or t
  misc_feature (1068)..(1068): n is a, c, g, or t
  misc_feature (1076)..(1076): n is a, c, g, or t
  misc_feature (1100)..(1100): n is a, c, g, or t
  misc_feature (1110)..(1111): n is a, c, g, or t
  misc_feature (1136)..(1136): n is a, c, g, or t
  misc_feature (1157)..(1158): n is a, c, g, or t
  misc_feature (1205)..(1205): n is a, c, g, or t
  misc_feature (1216)..(1216): n is a, c, g, or t
ggggaaggcttccatttagtgaaanttggaggagaaaggaccctgnaaaaagccaggncacttgtcagtccagaaaaggaggttagaaccgggaaccaactgtncccattccccttacccntgacttagaaaggttcctcttcctccagtgaggaccccttccttcctnttttcccagaccaagctctcaggggacaactcagaagcacaaaagtcaccactgggagcaaaggggaccaaagagccataaacagacatgtttgggatttcaaaagtttatctcaatctcctcattcccagacttccaggtgggaggcaggccgggcagtaatgtgagcatctcaaggacaccacagtcactgcgaccaagccagtctgtgtcctcatttacacaatgaaggcgatggaccacatagtctctgacgtcccactgcaccctgacagctgacaaatctgtttgtcctcaaagacaggtctgagagggaggaaaactgatggggatgatgagttagagctccgggctccctggggctggaggctcatccatcagctgccggaggtgagaggctgccttgtccagttttgacaattccagctggagggaagaaagcttttgttgcctctgagtccctgcctccccttctgatggggtcctggctgtgaggctatcaagctgcttctgcaacttgtaccttcgggcggctaacagaggtagctggatctgcgggtccaccaggccctgcagctccatgtagacttgagccgtgtcactgagtggagcctgggcccagccggagggagctgctgcgcctgggggtaacaggcccacagccccacagtagcccagggtgcccaggggctccaagaaggcctcgaagaggccctgggtcnccaggctctgagctctgcagcagcactcggggccgggctttggtgagctggtacgtggctcggagagccttagcactgcacgacctcttggaccgggagaagcgcgctcagctctggctgggcagtgctccagctgcagcgctggggtnggggcacccgaatctngggcaggggcancaggctgngggcacctctgcaagtctcagcangaggcatcanntgggcagaggcgagcgagtcacgangaaacagactgaggggcccanngggcggcgatgcaagacggctcaagctcagtaactccaaagtggganccaaatgtganggcatatgacacgaatcccggtaagagccctaatcctgggacaggagggtcagtcagacacggg

SEQ ID NO: 128113 - DNA, 687 bp, Homo Sapiens
  misc_feature (342)..(408): n is a, c, g, or t
  misc_feature (644)..(644): n is a, c, g, or t
ttttaaaacccacaaaagtttatttgagaacaagagtgaaagcttttgcacatctgacaaggtagacttgttttacagtagatgccatccatattcagccctaccaatactatcacaaatgaaacatactatttcttacaaagatataggcataagtcaaggactatgactaactagagtgaaaggaaaggttagaccccaaatcttatcccttagaccaatcataacataggatgtaaattaaaccattcagtcttctaatgtagtggttctcaacctggcttcttatcagaatcccaggaactcttttaaagaaattcccaataactaggctgtaccccnnnnnnnnnnnnnnnnnnnnnnnnnnnnnnnnnnnnnnnnnnnnnnnnnnnnnnnnnnnnnnnnnnngaccctgtcgcaagttcaccacagcactagaggcaggtaacgattactagcagattcctcagccccaacaagccctccaagaaagggagacctggtgggcaacactggctctcactgatgctatcctttcactccacttaagaacgacataagttatcacttttggtataattttgagactttccatatgccatggtgatttttagagcactatttaatcaggtgaataccagcanagagagaaatacagaaaaagacattccataaggcatgatatga

SEQ ID NO: 128114 - DNA, 1010 bp, Homo Sapiens
aattaagattgtttgaatattatttcacattcctttttcttttttaaataaacaggtttgctttggaaaggcttaatgatggaatgttagcatcttcactagggtaaagaagaacaaaaagaatgttgctggaacgtaaaatagtatttaaaagttaatgaacacttctctagttttcttagttatggccttaataattagtctcttggcttaaatgtccactggttttactttgacacagttgaacaacactggggttaagtctctggtatttaggctggcaatatatatattaaccatattttaaaagtaccaattttgtttttacagaaaagataaaactcaaaagagaacagtgtattccttctgaggggcttttataaattattaactataatatatgatggattttttcctaattttttatatttccttacaattttggtggccattaatttaactttaggcttttgggcatatgctagtctgagcttccgaaaagatacatatatgtttcccttttcattagctgaatgaggatattttaagaagttgaaagagaatttattttcaagttgtgagtaaatcctcctttgaaattcacctgattattagataacttaaagtttatttttaaaagctgacaactttttatgaatcttcgagttgacagttcctaaaagcgtaactcagatattaatgggctgtgtattaaatggttttattttcagttttgcagcacagaacactgttgaaatatccatatcaacttgatttttttaacctaattcaggtgtcctttgcatctcttaaatgttgggggtgggggtcagagccagttatccggcttctgttttgtcgattgcttagatttgttcctgttgtcaaaactgttacccccaaaattggtgtgacacatgctcatgcataaaatgttaaaatgagtacatccttgtatttgtatttgttttcaacatcgccaaggtgctatgggaaattaacaaaattag

SEQ ID NO: 128115 - DNA, 989 bp, Homo Sapiens
  misc_feature (571)..(779): n is a, c, g, or t
ctaattttgttaatttcccatagcaccttggcgatgttgaaaacaaatacaaatacaaggatgtactcattttaacattttatgcatgagcatgtgtcacaccaattttgggggtaacagttttgacaacaggaacaaatctaagcaatcgacaaaacagaagccggataactggctctgacccccacccccaacatttaagagatgcaaaggacacctgaattaggttaaaaaaatcaagttgatatggatatttcaacagtgttctgtgctgcaaaactgaaaataaaaccatttaatacacagcccattaatatctgagttacgcttttaggaactgtcaactcgaagattcataaaaagttgtcagcttttaaaaataaactttaagttatctaataatcaggtgaatttcaaaggaggatttactcacaacttgaaaataaattctctttcaacttcttaaaatatcctcattcagctaatgaaaagggaaacatatatgtatcttttcggaagctcagactagcatatgcccaaaagcctaaagttacctcttgccgaattcttnnnnnnnnnnnnnnnnnnnnnnnnnnnnnnnnnnnnnnnnnnnnnnnnnnnnnnnnnnnnnnnnnnnnnnnnnnnnnnnnnnnnnnnnnnnnnnnnnnnnnnnnnnnnnnnnnnnnnnnnnnnnnnnnnnnnnnnnnnnnnnnnnnnnnnnnnnnnnnnnnnnnnnnnnnnnnnnnnnnnnnnnnnnnnnnnnnnnnnnnnnnnnnnnnagtgcattatgaatcggcacgcgcgggagagggtttggtattggcgtctccgctcccgccactactcctggccggtcttcgctgcgcgacgggacactcatcaaggggtaacgttacccaaacagggaaccaggaaaaattgacaagccataagcagacttaaagccggtgcgggtttcaaggccgcccgaaatcaaatccttcataagg

SEQ ID NO: 128116 - DNA, 1096 bp, Homo Sapiens
  misc_feature (58)..(76): n is a, c, g, or t
  misc_feature (205)..(232): n is a, c, g, or t
  misc_feature (764)..(772): n is a, c, g, or t
gtgccaagctaaaattaccctcactaaagggaataagcttgcggccgcctgctcaggnnnnnnnnnnnnnnnnnnngccttcataagaacttttttttaattatttagaaatgcagttatatacatagaacaattaaaattaaattaaactttgtacaaatattaaaatactatcttcacacccactgcaatgtacaggataccnnnnnnnnnnnnnnnnnnnnnnnnnnnngcaaacccaaactgattgagtgacatcctgcacagagtcaattatgaatgtgttgttttaaaccattatatgagtaccattctgcaaaggattccatagtggtgcgataacctgaagaagccagggcagggtgtggggactgccacacagcccacgtacatctctcctccttgcttggcaactgagtgctttgcccctgcatccccttctactagctctgctgcttggcagaggggctcaaccttgaggttttcattcacaattctactagggtttcaactggaaattaagagccatttcccagcaaagctgggcctgccaccttttcctctctagggaaccagcaactacaccattcagaccaaacatatgccaagcaaaatattctccaagtctcaccttggggcaccagtaaggactgtccctattccgagagctgacagacccagcaggcccaagagaagctctcagcctcactcgctgtccttggcattaagctgtgaagcctgcatgctgcttccctgctaggccnnnnnnnnnctttgggggtgaggagtaaggatgcacacatgattgcagcatatttcattctctacgcacggatgttcctcggaaatggatgcacattgttatgtgggacacaagtggtctgatggctcatctgggactgggagggaacaggctaatgctatctattcccgtgccacatccatgagtcagaacatataccttgtctgagtgcatctgcttctcactgactttatgcggcggatgaggggaggcatattacctctgcgatcttgctcgaggcaatcctataaggtcttctaattctaccatcaactgttcttttgattgtacgct

SEQ ID NO: 128117 - DNA, 934 bp, Homo Sapiens
  misc_feature (49)..(49): n is a, c, g, or t
  misc_feature (99)..(225): n is a, c, g, or t
gcagtggcaacctcccaggttccagtgatcctcctgcctcagccccctngagtggccgggactacaggtgtgaacactgtgcccagctaatttattaannnnnnnnnnnnnnnnnnnnnnnnnnnnnnnnnnnnnnnnnnnnnnnnnnnnnnnnnnnnnnnnnnnnnnnnnnnnnnnnnnnnnnnnnnnnnnnnnnnnnnnnnnnnnnnnnnnnnnnnnnnnnnntaaatctggctcttcagattccgagagagagggtacaggagcctctctgctcagcctgaagaacacccagaaggagggaacctcaaagagccccgagatggaaggctctcctggcagcgcctcctgcaggggtgcctgtggaacaggctggccccagggctaggagagttcatggcccagtctgcttcactgggctgccacagtgtgaaagctgggcctagacctggctcctgacatcctagtgagggctgggaccttagtggttctgaaagacctttactggatggttccttccagagtggggtatgggatacacacacactgcggccaggcattacgccagctcccggatgcctcagcctcgtgaattcggggcaggacgctcagggcccatggtcagcacagcgggtgggtgggttccagcgtggtcacttctccaggggtgcataattgagcagcttctcgatcaggtccacgtgggccagcagcatccggcggcagcagtagcgcttcaggcccagggcatccagcgcatccccctcggtgtactcggcctgcagcagccccaggtaagcctcccacttgttgaccgacgatcttgccacaagtgaagcagcgtacagggatatcggacgcgtggttcgacgatatcccgggattccgaccgtaccagcctgctttttttaccactgttcatagtgtcccatgg

SEQ ID NO: 128118 - DNA, 727 bp, Homo Sapiens
  misc_feature (159)..(159): n is a, c, g, or t
  misc_feature (188)..(272): n is a, c, g, or t
  misc_feature (274)..(274): n is a, c, g, or t
  misc_feature (279)..(285): n is a, c, g, or t
gggggggaattcccacccccttggtttgggccccggttttccctggagaaccaagttttaccccattttcctttcccctttggggggcccgggggccccacagaaattgtttttgaaaaatttttttgaggggcggagggggcccgccaaagaattttnttattttgtttaggttaggggggaaatgnnnnnnnnnnnnnnnnnnnnnnnnnnnnnnnnnnnnnnnnnnnnnnnnnnnnnnnnnnnnnnnnnnnnnnnnnnnnnnnnnnnnntnttttnnnnnnnttcttttggttctgaaagacctttactggatggttccttccagagtggggtatgggatacacacacactgcggccaggcattacgccagctcccggatgcctcagcctcgtgaattcggggtaggacgctcagggcccatggtcagcacagcgggtgggtgggtttcagcgtggtcacttctccaggggtgcataattgagcagcttctcgatcaggtccacgtgggccagcagcatccggcggcagcagtagcgcttcaggcccagggcatccagcgcgtccccctcggtgtactcggcctgcagcagccccaggtaagcctcccacttgttgccgacgatcttgccacaagtgaagcagcgtacagggatgatcatggcggcggcgcgtcccagactgccccgctcgccgtccttccccctccccgggggagtcccgcgt

SEQ ID NO: 128119 - DNA, 699 bp, Homo Sapiens
ggctgcaaccgtggtttatttcaaatgtgcaaagctaaatatgcaactacaaatctaactcaggaaggcctgccagtggccctgagaggtggccgtgctagggtggtccacagccagttctgattggctaggagacgttcagacccctcagaccaatccatgagtctgaagagactggggctcgggggctcattagagactcttccttatctagaaaccagaatatcttgctaaagaagaaagcagaaatcacatgggtctgggggcagggagggggtaatagaaactgttccgctggctggggctctctctcttggggtgcagtgggggagggggcagactctgtcaagcctcatatactctgcagggtggggctggtggcaaaggcaggctgggggtgctggactcaaagcctgctgtcctggaaggaagcgtcttccacctcttacggggcatggggggatcctaggagagcccaagaggatcgcagtgcagacaggcccaagctggattaaccgcagctggaatcggtggtcacccaattagcctcgcagctgagggacctctgccaccagggctagaggtcaggctgcgggcagagccctaacctgaggtgggggctgagagggtctctgcggcttaccctggccgggcattgggggctcgctctctggacctagcgggcctgatgtgaccgag

SEQ ID NO: 128120 - DNA, 1328 bp, Homo Sapiens
  misc_feature (84)..(132): n is a, c, g, or t
gcttggtctgaacagatttaaggaggttttatcacaaggacctgaaaacttcctaagcatgctttctccttgcacagctgaggnnnnnnnnnnnnnnnnnnnnnnnnnnnnnnnnnnnnnnnnnnnnnnnnntctcaactaagggctctgaatcacagaggggacagatgctgccttagtccttcttgcctcccagggccaggcttcttgtgaggagcttccctgggctggagggggtcagtgtggagactgtgggggattccagcttcactctgtctaagaggtcttcttaagggcagctggggagatcttttcttggtcggccatggactgtagctctcgtgttcggatacaggaggcctcaactgcattgatgagcagagagcggaagcccccactctctagaaagtgcagggcgtggatggtggctcccccaggggagcagacattgtccttaagctggcatggatgctgctccgagtccagcagcatcttggcagctcccagcaaagcctgggccccgagttggattgccaggcgccgtggcaaacccatcttcaccccaccatcagccaatgcgtccagagccatgaatgcataggcaggcccgctgccactgagccccgtgacggcatcgatgaggtcctcttccacctcagtgcagaagcccacgctgctcatgagctgctccaggagctgcccatcctccaccagggcatgggtgcccgtggcgtacactgtagcgccttcctgcactaccacaggtgtgttggtcatgcagcgaatcactttgggggctggctggaatgccatcagcttcttctccacagagctgatggtgacaccagccgcacaggagaccacgatgtgtctggcttgcacgtcggccccaatctcatccaggatgaaggggatgatatgtggcttcacagccagaaacaggacgtcgctgtgcttcaccgtctccttgttgctgcgtgtcaggttcacacccatcttcctgagcgcggacaccgtgggcaggttcatttctggggagctggctattatcttgtgagccgacaggatgcctgcggccgtgaagccccgcgccagagcataggccagctggccggccccgatgaagcccacgctcatggtccgcggttcacgcctcctgggagccgcacgaaccccctcagcgagggaccggaagtaacgctaggggaagggcggacagcgcaggggcgaacgggcggcgtgccgaggaccggcgagctaacagcagcttctgggatggtgcaaccctattctcccccggcggatatctcccgggcggctgatggcgc

SEQ ID NO: 128121 - DNA, 777 bp, Homo Sapiens
  misc_feature (510)..(510): n is a, c, g, or t
ttttgatatttaaaaataaactttattaaagcagttaaacttagcattaaataacactctttaaatggtacacctatgaagcaagagttaaatataaacccagtctaatcctgtacacttgtgattaattgtgacaatcttaagttgctcacttctttcccatttaccaattcagagaaagcccgtttcctgttttctcctcaccactttgccttggcatcacaccaaccctgcctcgggcttcagctgcagatcctccccagcccctcctcccagctgggctgactccagtcccagccccagtctccaccaactgagcagcgtacgcagggttgtgtctggcttccagcatctaccaccccttcagagcaacttccaacatgggacaggagaggaagctcgcattgcttggtctgaacagatttaaggaggttttatcacaaggacctgaaaacttcctaagcatgctttctccttgcacagctgaggaggggcaatggtgggagcggngcaagggggtggcaggggcggcaggggctctcaactaagggctctgaatcacagaggggacagatgctgccttagtccttcttgcctcccagggccaggcttcttgtgaggagcttccctgggctggagggggtcagtgtggagactgtgggggatttcagcttcactctgtctaagagggtcttcttaagggcagctggggagatcttttcttggtcggccatggactgtagctctcgtgttcggatacaggaggcctcaactgca

SEQ ID NO: 128122 - DNA, 1080 bp, Homo Sapiens
taagggacatattgggagaaaatctcttttttgtgggcggggcccatgggaacgagaaggtttttaggtcttcggaatcacagagggccccttccaactgccattggatcgcaccaaaagaaccgggaaagccccccccttttttataagaaaagttccaggcgccttgaaattggttggtctccccccagggggagccaggaccattttcccttaaagggtggcctggatgcttgtttcggaattccaagaagcatcttgggcaggttccccagcaaaagccttgggccccggggttgggtttgccaggtggccgtggcaaacccttttttcaccccaccatcagccaatgggtccagagcccatgaatgcataggcagggcccgctgccattgagccccgtgacgggcatcgatgaggtccttttccacctcagtgcagaagcccccgctgttcatgagttgttccaggagctgcccatcctccaccagggcatgggtgcccgtggcgtacactgtagcgccttcctgcactaccacaggtgtgttggtcatgcagcgaatcactttgggggctggctggaatgccatcagcttcttctccacagagctgatggtgacaccagccgcacaggagaccacgatgtgtctggcttgcacgtcggccccaatctcatccaggatgaaggggatgatatgtggcttcacagccagaaacaggacgtcgctgtgcttcaccgtctccttgttgctgcgtgtcaggttcacacccatcttcctgagcgcggacaccgtgggcaggttcatttctggggagctggctattatcttgtgagccgacaggatgcctgcggccgtgaagccccgcgccagagcataggccagctggccggccccgatgaagcccacgctcatggtccgcggttcacgcctcctgggagccgcacgaaccccctcagcgagggaccggaagtaacgctaggggaagggcggacagcgcaggggcgaacgggcggcgtgccgaggaccggcgagctaacagcagcttccgggatggtgcaaccctattccggacgcgtgg

SEQ ID NO: 128123 - DNA, 1077 bp, Homo Sapiens
ctaaaaggggcaagtctgggggaacatcctttttcgggggtcggggcccaaggaacgggaaagttctgcggtttttcggataacagggaaggccctccaaccggcatggacgagccagagaagcggaaaagccccccacttttctaggaaaagttccaggggcctgggattgttggctccccccagggggagcagaccttggtccctaagttggacagggatgctggttccggagtccagcaagcctttggccagtccccagaaaaagctggggcccccgagttggattgccagggcgccgtggcaaccccatcttcaccccaccatcagccaatgcgttcagagccatgaatgcataggcaggccccgctgcccttgaggcccgtggcggccatcgatgaggtcttcttccacctcaggtgcagaagcccacgctgctcatgagctgctccaggagctgcccatcttccaccagggcatgggtgcccgtggcgtacactgtagcgccttcctgcactaccacaggtgtgttggtcatgcagcgaatcactttgggggctggctggaatgccatcagcttcttctccacagagctgatggtgacaccagccgcacaggagaccacgatgtgtctggcttgcacgtcggccccaatctcatccaggatgaaggggatgatatgtggcttcacagccagaaacaggacgtcgctgtgcttcaccgtctccttgttgctgcgtgtcaggttcacacccatcttcctgagcgcggacaccgtgggcaggttcatttctggggagctggctattatcttgtgagccgacaggatgcctgcggccgtgaagccccgcgccagagcataggccagctggccggccccgatgaagcccacgctcatggtccgcggttcacgcctcctgggagccgcacgaaccccctcagcgagggaccggaagtaacgctaggggaagggcggacagcgcaggggcgaacgggcggcgtgccgaggaccggcgagctaacagcagcttctgggatggtgcaaccctaatcccaggaattccggaccggtccagc

SEQ ID NO: 128124 - DNA, 1471 bp, Homo Sapiens
  misc_feature (129)..(160): n is a, c, g, or t
  misc_feature (199)..(207): n is a, c, g, or t
  misc_feature (541)..(560): n is a, c, g, or t
  misc_feature (575)..(576): n is a, c, g, or t
  misc_feature (578)..(578): n is a, c, g, or t
  misc_feature (725)..(725): n is a, c, g, or t
  misc_feature (727)..(727): n is a, c, g, or t
cacgtgtttctgcccacgcggaggggggtattttttatgggacggcgacccaggggcggggtataccccccggggcgggatagtggtctctcacacaacccccggtttggaggaggggttctcaccgcnnnnnnnnnnnnnnnnnnnnnnnnnnnnnnnncgcaacaccttctttcttcgggaaaaaaagccgcgaccnnnnnnnnnagaatattatatgatataagggcacccccgcttgggggaacccccgcttttgtggggatcccccataaaggggcgcccccaaaaaccccgccccttggggggttttgtttggcggcaccgatcggcgggttttgctcccccgcgggggcgttctttgttttttgtggggggggaggaaccgccgcgaaacgccgtttttgcttacggccggagagtgggttttccttttggggaggacgcctataatcgggcgctgtttttctcttcgttcttttgttgcggggccccgcgccgcccccgcaaaaagaggtggttttgagaaaacttgtttttnnnnnnnnnnnnnnnnnnnncgccaccaaaaaagnncngtatggacgggatttctgtatcaagggggcatcgggcgcgcgatctgttacgcttgtccgtggtgtgtttcgcttttattttggtcgtgcgtgttgcgtatccgctttttctgtcggggctttttgttccgggttgtgttgtttttntnttttgctgggaactgaatataaattaactttattacaaaaagcaaaatgttagtttctcattgtgagtgattcaagaaaacaacggtaacagccctggcaggagctgggaccaggataccagtatgcaggctgaggggtcaaaggccaggctcaggagcgggctgacaggcactgattcacaacctccaagaggtgggtgttctccagggcagctgccacccgctccttatctgcaagttgcttgttcactgcatgctctgaggcatgggtccccggagtaatgtgcacgtccatcttgaaacgctgaggaagggagcgcagaagcttgaccttgatggacagaccaataagggtggccatgctgcagtgcggaatggttggtgtgaaagccacagccactgtactctcggggtcgctaacctgaacccgcacctgctctactacgttcaactcctctagcgtcagtggatgctccgggtcattgatggagcgaatcagatcgaagatctcgcgtgcgtcgatgctgtcgggaacctgctcgtcctcctcgcctgccgtcacaggccgctccccagagcgctggtagatgagggggttggcattctccaggaggccgccgccgaccccgccgccgcctaccatcgcggaaccaccaccgctgatcctagcaggcgtgcgcttccgctccacccgcgccgacgcgtggtcgacgatatcccgggaattatccggaccggtaccag

SEQ ID NO: 128125 - DNA, 482 bp, Homo Sapiens
ttgaaaacacgggtctcagcaccttttattcgtcattattgaacctgttgtgacaggaaatggagccaacatctccaaacagtcttaatgcctttcacaatccaatgggaaagcccaagacgccgcctctagtggggaagccatgagccttccgcctttggatgccacaaatgggaacgatagaggtacaggaggtctgccttccacgccggaccctccagcgcagtcccatgccggacacagcgaggcggcacttggcacagaacgttttcctgtggcctccccgcaagactcacaccagtggatggcactcgagtccacagctgcacggagccacgggtccaaaacgaattctccactgagatgggtccacagagcctggtggccacaatggcttgatctaatgtcttcctttatgaatacatctgtgcacctttggaattgaagtttaaacagaaggaaaatatgacttttcccccgtt

SEQ ID NO: 128126 - DNA, 907 bp, Homo Sapiens
  misc_feature (201)..(209): n is a, c, g, or t
tttatgaaaaagcagatttttttattatgatgtttctccatatttggcattgctgtaaatggctaacatttactgccaattcggtacaaatgtgtggtttggtaataccagaacagcaaatttaaatgaaaaaataaaagttaaacatttccacacaaggttttacagtctgacatttcactgcgtaggtaaaaagacacnnnnnnnnnaactacagattattattcagcatgaataaaaaactacaacttttatttttaaacaggagtcactggttttaatttttacacattttaaaattactgtgataaaaaataatgaaaaagcttcttaataatgccatacacagtataatatagatttgtccccattatatagcatttaatatacaaaatagaatattgacacacttgaatctatatgtagttaagcaagttatttgaggagggtattttcatacagcctttcatcagaaaataaaatcctttcagacattttctagagagaagcaaatcctttcctgaaaacctggtcactaatcctgggtggaccaggttgcttgaaaatagtctgggaaattacgaaactccacccaaagggtttaaagtgtcctccttacacttttatttcccttctgacactaaaaccagacacacacacaaaaaaacacattcacctacagctacagtcagggagtgaccagccaagatggaaatctcactgaaggctaccatggttctggaagtttgacagatcaatgtattgtctaacaatatttttcattccatggtgatgtagttttcagggtttttcaaagggaactaaaattatgagacttaggtgaaactggaatttctccctgcctctgaattctgaagggagcgtggcttaccttcatggcatgccc

SEQ ID NO: 128127 - DNA, 2049 bp, Homo Sapiens
  misc_feature (603)..(614): n is a, c, g, or t
tttcatggtccaagcatgtggtgatttttattaagaataactttggttctaagaattccaccctcaattctttaatactttccgttaaaaacaattatacaagagcaaatacaaaaaatattaaattatgaaaaccaatccattaaggctccctttatatatattatatacactcaaacaagtcaagatttttcagagtagaagaataaagtcgactgttatagcttagaaagcaacactactactatgagactataaaacattaaactattttaagaaaaccacgctgtggaaaaatggagccatttttgtcaaaaagtggctcaaagcacaaaactgctcagatgttcaagagtcctaggagtttgggctgcacagtattaaggggtgagaggagaccgacagcctgtttgaatcaggcttgtgagcccagctcatctgacaacttcaaagagcttctctgcctatacattccaccgtttagcataagacaccactttacgctatttacaagtctccttttggccagattttgtattactaattacaaataattctgcagatttgagtgagattaggaaagaaatgctttcttaagtaacnnnnnnnnnnnncagtgaagaatgaattctagttaagctctaggaacagaaatggtccttctaaaggagcctaccagggcccctgtgaatacgatcaagtggcagaattgcttcgagaatacagatttcaagatctgacatctagttagataaaaagatatgagccagtcccgaatcttcattttacaaacagcatcgctagtccacagacacaaagaaagaattccagtcaacgtgcaatcagaaatgggcttttcaagatcatcagtcatcacacttccttctctcaaaagaacgatgggaaaaaatagttaccattccattcttcgaaaccaaattactatagagcaacaatttttcttaagcatttctcattttattcaaataatacttgctgatgagataaataatccatttcaggtataatcaactaacatgtttctctaactagcagtatattatcattgcatttacttttgttcccattcagattgaatatgggcctaattgtcaactgctaacactaaagcattcccatagaaagctaatttctactgtgctaattaaggattcaaaagctctagatccagctttctatgagtcttcaaagaaagtatgagaagtctctccaatgcagaaatgactggctgaactgtctctacggagcatactaaatcctcaacaattcttcggtatcacccaggcaaaaggtaccgatgcccacactagcagtttaaaactaattttgcatgagaatgcggctgctgtctgtaactcggccccctctctgaggagcgtgctgctagctagaacaagggaactcagcagcccctcccttcccatcagctgttcctgagagatgcaatatagtagtcatcgacatcatccttatcaacagcatcatcactcagacagtggtgaaagtctttcttcacaaggaaaaacaaagataaagaaatacatgagcattaatcagaaattttcaaagcttggattctaatgatatgcattatcattagacattcaaatgctatacatcttctgatgaagcctccttgacagcagtctacacttatttcacattagaatgcctagagaaatcctgactgcccagctggtcatgggaaccttccccactctcctcttggagaaatgaaaagatgtggcggcttctacttttgctactgaagctgggttatatggactagttccactctctaagggactggaaggttattccatctgaaagaactagatcagcaagacatttaaaaacaaaactgaacagaaaccctcctagtaatcaaagcaattaatgaatggacaggatgtaccttcttggaactggaatgtcactatgtagcctgctattattacacagagaaccaaaaggaatgcccggccgtaatggccgaattcccgggcatatgtccggtaccgtcgactg

SEQ ID NO: 128128 - DNA, 481 bp, Homo Sapiens
ttttaagacaagccaaattttctttatttatttcccacctggaaaatccagaatcaaactttatttagatgttaggcttgctctgatacagaccttcaaaaaaacaaatcactggagcttctcatgtcagcagaatctggtttaaagaattccttgaacctatcagcagcaggatgtaaacattcacaagaatgctgtcacttctggctgctgtgggcagacatattctttttcaaagacatagttgaagagctagccttaaaatttgtgagaggttgcaagcctgcaaacaactttttttctagttcttcttggatcttaagaagaattctctcctgttctaaggcttctatatactttgagtagcaccaggttggctgtcggccatatggttggaggcctaggaaggaatcactgagtaaagcagttttgatagcaggcactgaagtatttgcatattgtttgattccatcctttccag

SEQ ID NO: 128129 - DNA, 1119 bp, Homo Sapiens
ccaaggcatttccatatatcttttattcaacccattttcatattgacactccaacattaataaaccatttaaccatcaaacatgattgcaaattaatattcttaattattgcacattggttctgcctatatgcctatatgcaatccacttgtacagtgttagttcagtactagagaagttctgcctatatgcctatatgcaatccacttgtacagtgctagttcagtactagagaaaaaattatcttcatttaggtctctacttaaagtacatctcattaatgggatcttccatgaccattctatcaaacctcagctcctcccaccccttttccctattttttttaccattcatactactatttgaaaagttgtattacatacttattatctgtctcaccatgagagcaggggctttttcctgttatactatcctctagcatctagaacaactcagatgtacctcataagattggctgaataaatcactgaatagttttcaaaaagttaatgtaatcaagtcaaaaataaaaagtgcccagtatgctagaagtggtgaatctttaccatgtcagtcattggatttaggccagttaacaatatactaaagaacaaactaaataacatgcatgtttgactgatctaggaattcatactactctaaaaaacgcagtatcattctaaaaatataactatccagtttgtctgttttaggcatttaggcatagaaggtttaacttttctgcattccagtgcacagtcattaagtgttacagcaggttcctcattccttgaacacaactactgcaacatgttctaacattaatagttccaacagtgaactccctgactgttgcaaaagtgagcagttccctaggtacaccatactgtatgtttggatgggagtaatctctggagacttaagcttgaaaccgctcctccaaccttccatgattttgtaagaaactatgtagtttcaaaactcccatataaatctgcattcctcttcaaatagctagagtggtttgtttcctgaaaatttgcggacgcgtgggtcgacgatatcccgggattccggaccggtaccagcctgctttttgaacaacctgttcatgtgtcc

SEQ ID NO: 128130 - DNA, 1414 bp, Homo Sapiens
  misc_feature (208)..(230): n is a, c, g, or t
  misc_feature (1310)..(1344): n is a, c, g, or t
ttttttcagcttaaaataaatttattgtgcaatacaaaatgtaggcatactggaaaataaaggtacattattaaatatacaaagcaaatgaaagctaaacaacacaaatgttttcatccaaacactaagataaaatgcacaacatttatgctaaaaacaaagtacttcaagaacaatatgcatttcaaatgaaatgttaatgatgccnnnnnnnnnnnnnnnnnnnnnnntcaaatatgctacattgtaaatgcttgaatatcaagaatcaataatggcataaaacaaacccaataatagtgggtactatcaagaactttgtttaaaaaggtgttaagaatactgaaagaatcaaaatatgtccttaaaactggcaaagtttttctgtttttaagtttgagggcctattcgcagtatcttatctcttcttccgtttatacttttctataaaaatttctgctcattcttaacattttctaaacacagtagcttagataacagtacttcatttttaagtatgcatttaaagcattaccaacacaaaaatagtaagtgacacaaattaacaacctaattttgaaatctatacagctatgtatacgatatgaaaactaaatcttcatttaataaagtaaaaccaacttcggaatgaaatggtaaaatgtaacaatttagatcataggggaaaccacaatgccttttttccaattaaggcattcggttgcccaaactacaaatggccctggtgcaactaacataaatatgcaacacaaatatgcagtaaggccttgagaagcatccagttaggatatgcatctgaacattcaaagaacattcaagtaagcataaaatccttgggaaaatcctctacaacttaaaatataattatttaaatatataaatttaatacttaagttagcccaaaaggctttttggccagcacctctagaagggaatttcttttcttaatatcacagttcccaaacttaagacattatgatcaagattttctatctttatttgcactagtatctaaaatactcagtgaaatcttttttgctacactatatttacttttacagactttccattaccacatacatacaccatcatgctaagaaaccaccaagtttttcttctaatcccccactaaaattaacaggtttcaacaaacttgaaattataggggaactatggggaaaaccagagaagtatatggaagaaggaagaagtgtgaataggtcctacagaattttacacccggccgtaatggccgaattcccgggcatatgtccggtaccgtcgactgnnnnnnnnnnnnnnnnnnnnnnnnnnnnnnnnnnncggccgcttcctcgctcactgactcctgcgctcgtcgttcggctcgacgactagcgccctatatgatcta

SEQ ID NO: 128131 - DNA, 700 bp, Homo Sapiens
  misc_feature (598)..(598): n is a, c, g, or t
  misc_feature (612)..(612): n is a, c, g, or t
  misc_feature (618)..(618): n is a, c, g, or t
  misc_feature (689)..(689): n is a, c, g, or t
cccagtcaatatgtaaaatgatagcaatttactataacaaccataaaatcatcaggctactgacagctggagaaattccacatgctaagcaactcaactccaaagaaatattagaggtttgagatgaaaaatacacttgaacctgtaattgaattagacaagcctcactgcacgtagggctacagcggtcaccaggacacaaagcaaatgtcgggttaccagaagtgcagttatcagccacagtgatttattgagtgctttaataatacaagtgtacatcaactgatccacagtcaaaagtggcaggtccctaagaaatttacaagcactttaagtaaatcaaaatacatattattttgttcaatccaacagtcttctgcgggagggacagaaggctagtgataaacagagtctcagtaatgcacagtgattctgattgaagcttttgtacaaaaacttgttcccagtagcatgcacccaccaataaagacttcagtacaaaaaattaaccctaagcactacatttaagtagaaacgagatataattctgaatgtgttttcccaaagatcacataaaagagaaaaaaatccaaaatcnaataaaccaccacnaaaaanaccaaaccccacagtaataccaagccttggtaagaaagctcttactattacagctcccacattggttggcnccggaaaccaa

SEQ ID NO: 128132 - DNA, 713 bp, Homo Sapiens
gagaatcttctctgggctttacttggcttgactcacttaattctggcactgtctatctgaggtaggcacaattatcacccccatttcctagagagaaaaacagaggctcagccaggatgtcattagtctgaggtcgcacctcggggaatggcgatgtctagattcagactgcagtgagatgcagtgcagttcttgctctgccctctccgtcttgccctctgcctggtgctggcacaggcccttccaggtgggaggctgcgtctcaggctggagaaaatgtgaacacgggcgcctgagagaagcctggggatgctgctggccagcggagaggaccttgatgcatttcacagggctctgggcccgtgagcagaacgcgtccaccatgagtgacatcattcagctcagccagggagcttggcatctgggcttggagctcgatgcttcatgagccgctgggaggcttccctgggtgactgaaccagggctcgtggtcccaagtgacgaggatggggcaggacagagaccaagtcccaagccgtgaacagtcccttggaaagacataggtgggaattctagctcagcagcccctctcggtgccagctcacagctgaagggtctgctcctcgctgtcgctgtcactgccttccagctgctccaggatctcgtccaacaccacagaccgctttttcttcgggggctcgtgaaagtgagcg

SEQ ID NO: 128133 - DNA, 996 bp, Homo Sapiens
  misc_feature (411)..(782): n is a, c, g, or t
  misc_feature (806)..(806): n is a, c, g, or t
  misc_feature (829)..(829): n is a, c, g, or t
  misc_feature (854)..(854): n is a, c, g, or t
gctgatgagaatcttctctgggctttacttggcttgactcacttaattctggcactgtctatctgaggtaggcacaattatcacccccatttcctagagagaaaaacagaggctcagccaggatgtcattagtctgaggtcgcacctcggggaatggcgatgtctagattcagactgcagtgagatgcagtgcagttcttgctctgccctctccgtcttgccctctgcctggtgctggcacaggcccttccaggtgggaggctgcgtctcaggctggagaaaatgtgaacacgggcgcctgagagaagcctggggatgctgctggccagcggagaggaccttgatgcatttcacagggctctgggcccgtgagcagaacgcgtccaccatgagcctcgtgccgaattcttnnnnnnnnnnnnnnnnnnnnnnnnnnnnnnnnnnnnnnnnnnnnnnnnnnnnnnnnnnnnnnnnnnnnnnnnnnnnnnnnnnnnnnnnnnnnnnnnnnnnnnnnnnnnnnnnnnnnnnnnnnnnnnnnnnnnnnnnnnnnnnnnnnnnnnnnnnnnnnnnnnnnnnnnnnnnnnnnnnnnnnnnnnnnnnnnnnnnnnnnnnnnnnnnnnnnnnnnnnnnnnnnnnnnnnnnnnnnnnnnnnnnnnnnnnnnnnnnnnnnnnnnnnnnnnnnnnnnnnnnnnnnnnnnnnnnnnnnnnnnnnnnnnnnnnnnnnnnnnnnnnnnnnnnnnnnnnnnnnnnnnnnnnnnnnnnnnnnnnnnnnnnnnnnnnnngatacgcagaagacatgtgagcanaggcagcaaagggcagaacgtanaaggcgccgtgtggcgttttcatangtccgcccccttacagcacacaaatcgagctaatcagaggtgggaaccgacagacataagaacaaggttcccctggagtccctctgggtctctgttcgacctgcgctacggaactttcgctctcctccggaagatgggtttc

SEQ ID NO: 128134 - DNA, 562 bp, Homo Sapiens
  misc_feature (105)..(128): n is a, c, g, or t
tttaaaatggacttgaattttaatttttttaaagattatctatatatatattaataaaaagtgcaaagaatagaccttcatgtttaaattatattctaaataaannnnnnnnnnnnnnnnnnnnnnnnttccattaactgcgggagacaactggcaagtaaagagcctgagagagtccagtccctctccaccactacaatggacatatatttcaaggaagcacctatgaaaaatagtagagtgttcacaacacatctggtaacacagatagcttctgggtgttcttgagagcagtttgtttgcattttcaatatgacatgaaatgaagggaaaaatcaaattcacaaaccgaaatgacattacttagaacaatctagtattctgtattcatgttttacatgccctagagcctagcattttcatgtagcaagctacactcacatgtgcgttaagccgcgtatctcaaatggtgatcagctcttagtgcaagtgctctctgctcctaacactgctggttgagtaacatagctggaacatctggttagaactgaattttcctgtc

SEQ ID NO: 128135 - DNA, 589 bp, Homo Sapiens
gagtgaagagaaattgcgtatgttttatatataaaaatagcaaggatcaagaaagtccaaaaatccaaagttaattctttgcaaaggcgaacaacattcctgcacctctgccgggactgaggaaaaggagagaagcagcaacaagcagggatttcagcaaagggctcctccgtggtctggaaggagccacctggaactgccacagcttcacccttggagagggtggagggaccctcaagtcagggccaagacacagctgcctgcccaccctgggaggaggcagaggagagatgggaagggcaggacgctgggaggaaagaagcgcgttgctcttttctcagcacgtctcccacgtaagccccacaagtggatctgcaggtgaactctcaggatgagtaagtcaatgtaccgaagtcaccagatggaagggcagtctagaaaaaccaccaccgagtccagtgctgggggctgcagagggaacccggcgctgtcagacaccacctcagcgagaccccgcctgtctctctcttgcagggcagtttccgtttgactttcttcagttggaggctctgcatttggtcccaacagg

SEQ ID NO: 128136 - DNA, 653 bp, Homo Sapiens
ttttttaagtgctcaacaaacatttactgcccaaatgaattataaactaggaaacatatttaagatgtgaagtgtcttgtcacttctggagcttatagccaagtagtggatgacaagggttcaggacggtaatgggtatttccccaaggaagatcggatgactgaactgatattgggtcgggccagccgggcaggaggatctgcggtgcaactgcagacagtctcaggccagtgtccaatggcttggtggcactgcccagccggctgcggaggatgaatggcaatagctatgtgcttctgaggcagagcaacaatggagtaccagcagggccctgctccttcgccgaggaactcagccgcatcctgggctggggcaggatcctgaacctctcgggggcgtagcccgcggaacgtggtcggcttgttggtgaaggggtgccactggccctggatgctagggttgtcggtgtggaagggcttgcggatgcggatcacgtccaagcccgactggtcggccagcttctgcaccagcgtcgagatctcctcgaccgacttgcagtggatgctctcctcgcgcacagccccgttaaggtattcggccactactctgggcacgcagcacggacgcgagtttacatatattacgacccctg

SEQ ID NO: 128137 - DNA, 1029 bp, Homo Sapiens
gtttttctgaaatgtgaccttggataagtttattaacctgttttataaatctgtattcacacagatataaagtgcctagcccatcacagcagagctctccgtagctcagtggttgttccaataagacatcagggattcttcagaagccagccttcagacctctcactgtgttttgagatcattattatcaatttggatttaaaaaacaagggccctgtaaaacccttgaagtcttcctcatctcaggttttagggatgccacttgcataaaaatgagtggttcacaaggtcactgcccccagaagcaggcactggaaagaaacaggcagctcttcattatcccaagcagaacctctgtcaacttgcccattgatgggttccatttgcctgggcttggaatcccaaaggggaagaaccacctttaccggagtaacagtccaaagcctggggctgcagttggtggggcaactcttcactgtgcttgcacctgggctggggcaggatcctgaacctctcgggggcgtagcccgcggaacgtggtcggcttgttggtgaaggggtgccactggccctggatgctagggttgtcggtgtggaagggcttgcggatgcggatcacgtccaagcccgactggtcggccagcttctgcaccagcgtcgagatctcctcgaccgacttgcagtggatgctctcctcgcgcacagccccgttaaggtattcggccactactctgggcacgcagcacggacgcgagtttacatatattacgacccctggattccgtcgggcgaagtcgatcacctcccgctccacgaactccctggcgccgcgagacgaggcgccgtcgcggctgacgctgaagctcagacgctgcagctgctgcacatagcgacccagtccgttgtggagaacgctggccaagaagcggctcggagtcccgcgcgccgtcatagctacagcttggaggccgcggagcctaagcagcgaggagaggggggcgggactaaacctcgaggcttccggttccc

SEQ ID NO: 128138 - DNA, 831 bp, Homo Sapiens
ttttttcagctcagagagaagctttattcctcagggccctcctcagggcaggggcagtaggcaggaaggctcagctctcaaactttttcttgcggccctccattccactcagtgcatcgatgttcttgcgccagtctcccacctcccggttttccttctcggtgtcctccttcttcacctgcttgaggtgggcccgcaggtccagggactccttagcccgggcccccagcagcgcctgcatcatggcatctgcagagatcctcactctccgcagggtgggccgcttaaacttgcctcgaaggtcaaagatcttctgagtcagatctgcaatctccgtgatgttcttggtgacttttgcctctatgtcgtatctctcttcatccaccttgtccacacgggcgtggagctgtcggcacaagtcctgcagctccgcgaagcccagcccggccaactccagcggctggcagcgggtgctcagagcgcgccccttctctccgcgccgctcctccgcctctcgctccagcttcttgctttgcaatctgcagcagcagagtcttcagctgcaattttctcgaggcggagatcttagattttttcttggcgtgcggctccgtggcataagcgcggtagttggaggagcggcgtctgattggggctggtgcagggcgaggttccctaggcgcatcgctgctcccatccgccatgctgagactcaggccgggaatggcaggaggcagggcgaggacaggggcgtttggagggtcagtgagggggccgcccgggtgaccttcagggtcccagggaccgtcagtcctctccgggctgcttgac

SEQ ID NO: 128139 - DNA, 623 bp, Homo Sapiens
ttttttattaaaaacaactttaatatgaataaaaagttacaaataagattcttcataaagagcagcaacagccaaagatcatcctcattccctttgtccctgaaaacaggcccttttaccagaccgattttgtctcaccctaacctgaggcagggattcatctttgcagagcaaataagatctgatctcaggggctgggggaggaagagggtgaccttgcagcacggagataactttggccttgaacaacaactgaggctcccaaggaatgccaaaagtagggctgaaaaggggcagattgaaaggactgtcacacagtggagttcccttcctctctactgtaacaatattcctagccccacctaggaagacattggctaaaatgctaaaccctagtatgtcctgcccactttaaactctcacacttccaaggagaagtgtttgtggtccattgcttcagctaaagtgcttcaataatgcatcacagctgtagcaggagggaatccctccccttcttcttgctttccccagaggaaagggaggcggccacgtccttaaagtctcctggctgctgaaagagctcagatggctgggaggggcagcccagataccacatcttgcgc

SEQ ID NO: 128140 - DNA, 1413 bp, Homo Sapiens
tttccaatagtttgactttattaaatcaatagaacgggatctcagtggttaagccgtcttaacagggccaggtctcttgaggtagtttttgggccatcagttaattacatcgactttccaggaaacagactatggagaatgagaggaatcagactgcctgtcacacacctctcatggaaccccctagtgacacctataaggacgttacagatctagttccagactttacagatctagttctattttctcaagttacagatggggaaactgaggccccagcagggggaggggatgtatctaagtcactagtgagttggcggcagtcaggtctcttgattcttttccccatactctcagcccaacttctcagtggagaggggctggcaggcctgctctctggatagaatgtagcaaaaggcccgtggtcaaactgatacggggtggggaaggttggtgggctctcagccatcagccattctcatcttacacgtgaaaaactcagctgagagaagggaagtgacttcccccctcagggtaacacccaggactggagcttggatctcctgcttctcagcctcctagaagcttccacaatggaatacaaaaggaaaggtatatggcggcatggccagtttggagaaagggatcaagttaatgactttaaatacaaataatctgaacaaatgactagataaaaattgatttccctaacatgatctcaccctccatgagctgtgctgtttctggagagagcagtccaggaaaggggtgtaggaaaatgcagtgttagaacgaacaccaaggctgcaaatgggggcaggggtgggctgggggcatttagacagtctgcactggggtcagtaaatccatgactccatctttggtgaggaaggccacctcaccagtgttctgacaccaaacctcaaaatgtgcagggtcctccagggccctcttgccagcgattatcacaaaggggtagccaaacttgttggcatctttcagtctgtttccgatggtcagatgggtcctgtcgtccaggagcacctccccgtgaagctgaggcactgcctctgtgatgtggtcgtacagctgccctatgagctcggaggccgcctgctccttactgcccttcttaggggggatgaggcaggcttggtaaggggccagtaggctgggccagcggacacagtcttctgtagagaggacttcaatggcagcagccaagatccgtgtcacacccaagccatagcaccccatttcagccagggttggtttgccacagacattggtaaactgggcattgaaaatggatgagtacttggtacccaggtaaaatgtgtgccccacctcaatgcctttggttttagtcaatgggcccctcgtgccgaattcgccacccaggcctcgctcgtt

SEQ ID NO: 128141 - DNA, 892 bp, Homo Sapiens
gtctctccagtcattctttattcaggaaaagcacacaatcgtaaacaacggagagtgaagacagtaacaactggtttgatattgaatttttaaaatcttgattcaaatggaattttcataatctaccacttaaaatttatttttaattagaagaaaactatgtaactgtgaagagaagcacatttcagcctctcagtcagccccatcgtgcctctgcttcacatccaggaagaagcgagtcctcggggcagccacgcaaatgcaaggacagagagtccagagaataccacttggcctccaggtgcatgccttccaagtctactctgcagacgcaaatgtcatgtgggtttttgccaaaatctcaatggaaacatttctatttgctttattttatttttaaagtcaaacaccacagttcaggatgtggaagaaatatgaagtcagtggatgaaggtcttgcttctaccagcttatgatcccactggccatccaggaagcacaggacacatatcagcatctgaacagcagggagcattcttcctcctgtgttggcaactcgaagctggaggtgcctttatatgaacatttttcatcatcatctagtccagaaatcgctccttttatagacatacattctgtaaatcttaggtacatatggattgtcttgtttttaaatacaatttctaaagagccctctgtagtaatttcttattttatctatttagagcaggcttcacgtattagtctgcctgggctgccataacaaaataccacagactgggtggtttcaacgacggaaatgtattttcttgcaattctggaggctggaggtccacgatgaaggtgctagccaagtctgttcctgataagggctcttcttggcttgcagacg

SEQ ID NO: 128142 - DNA, 1276 bp, Homo Sapiens
  misc_feature (994)..(1006): n is a, c, g, or t
tttttttctaacaaataacatttatttttcttttacatatatatttcacagcctgaacatcacatcttcagagaaagttacttttatgccattgtatttactatttaccacacaggcattgaacattctcattaacatgataagacaatttgctggtaaacatttaaacacacagacattagtttcagtatctcaacatatttttggtcataaccaaggaaatacatcaaaataatgacaacattggctaatattttacaagcaaatatttaactctgcatagtttatacaataggctgtggcaataaataatgtcaccaatctcatcaactattaactggccacaagaagcctaacattcattttaattatgatatgaaatgctctattggtgtagtttcaacatatccttaaatgtttgggtgtttaaccttgaatacacgaaaagaaaaagtactaaactggactaagaaggtgtgtttggttaactacaaatatgtcatgttcacatagtacattcctaacatgaaggcaaatatttaaatagaaaaactagcagtccaaaaaatgtgaatgtgcaaattgtgagtaaaacattgcatttaaatttgcactcatttgcaagttacagtactagctcagtataaacactaacaggaaaaatattcagcaggaaagaatggaaacggcctctcacagcagagaactggtcactgcgcactgctccacagctaagaaagttttccaggtggtctagcgctcctaacaaacaccttatgattatccttcattcaacagaggaggagactgcaggcatgcttcagtcagtggtaagaacaggaagaaaaacccaaatcagcaacattttcttccttaatttggtataaacgtccttttcattatttcaagttactaatttgctaatctcaaatgttttctgaatcaggtttgctaaatgctgtaaagaatagctatccttcatacaatactaggnnnnnnnnnnnnnagtatgtcagcataataaggtacatgcgcattcattccaccaacctgtttagataatactcagcttgggtcatattcaaattctacacagagattctctgttttcaatacaactgcttagaaagcagaattgcctagtgatgactgtagtgtgccttttaactgaaatgtatataaaaataaaaccccaatctttatagaatgtcagattctgttagggatgttaaaagcattgggcaaacctggttttcagcgtgccatctggactact

SEQ ID NO: 128143 - DNA, 980 bp, Homo Sapiens
  misc_feature (906)..(906): n is a, c, g, or t
  misc_feature (939)..(939): n is a, c, g, or t
tttttttaattttctatagactttattacacattattatgttacgagacaaatgcagataattcttaatttatcaaatttgtgagcttaattaacaaaaatatttgaccctcaccagaaaaacagataactctaaatctactctgaaaatctaatcaattgcgaagtattacctatttggagactatgtattatatcaaagataaagctactattctcacagaacatatggggtcattggcagccaaccaataatgaagtaaatattctaatatttgggaaaatactgagaaaactaataaattgtcctggatattatttattcttgcctttacaaaagacttacacatccaaatgagattagtttagaatagaggtttttagttcagaaaatgttcaaagtccaatacagtcatggctaatcagagactagagaacctttataaaggtaagtaggcttgaaaacccttggaaactgagcagtcttattttgaactagcatgttttaatcaaaggtatggaattaatcaaatatcaattaagaattactggaatgcacactcatgccaaatgacaactaacatgttatttcctactatgatgactctttgatttgagacagatggcataaaaaaatattgctagctatacaataaattttactcttctgcttcgtgctctctaaagaaaaatcttagttttttcacagtaagaagctcattggaatctgaatgtttaattaaagaaaagatagggtaagtacaacttgggggaaagacagtacctctaattacataggaaatccatgaaagaattaatcatcataagagaagaatcattttaccagtagccccactaccatgaatgatatttttcatgagcctcggccaccttctccaatggatantgagaacctatcacaggttcaaccagccaattnccattccagctttgaagggcttgctgcatattgctgaaatt

SEQ ID NO: 128144 - DNA, 642 bp, Homo Sapiens
tcttttcatgctaaatttttatttcaatgttatgcaactgcataagtataaatattttgttcaatatacaacaattatgacgtccataaggaatttcttagagaaaataagactgcaaacactttattgcacagatcctaacaaacttttaagctggtaaatctacagctgggagtactaccaaggagcacatcctacaatcacacagagactgaccaaatagaacacaatgaggagaatttctaccagctgattggagaggtttacaacaacaaacatgtaatacatgaatgcaaccttaagtactctttactcatttataatgaaaaacatatttggcaaaaatgatgatacactatacaaaatatacataaaaatatcatttgtaaacaaatagctagttgtgctttaaaggaaattggacagttaaaaagcaaaggcttgtaaaccatgaactacctccccgacagacttgtcccgatggctgaatgtaggattgggttatgacaactgccaaacacagatatgtattataaacgttgagaccagttttgaaatccattagtaaactcttgtaaagtatatatatatatttttacagcttcacaatatagtgatggggaatggctaaaaccatatggg

SEQ ID NO: 128145 - DNA, 780 bp, Homo Sapiens
gctgtatgtcataaaagtgcactgtgtcctgaagttttcattattttcatttcaaagaaattcactggtatggaacaggtgatgtggcataaggtgagtgcacggtatgttcagatcacagtgccttatgtccgaatacagcaatatgtcaccgccgcagccggggcgcacgcgtgtgaaacaacaccgagcttgaatgtggaagtctttgaaccttttaccaaatcagtttgttttctttagatttgtcaaaaagttgtaatttgaatataaataattactttaaaattttaatgacacttttacacgtaagtgttttgttctgggctaccgtgtcaacgaggctgctttacaacagctttatttatttttactttcatgcaatttttttacacatcttttggtggagtaaacttcaccacatccatgaataaactctcagttattttgaaatggcaaatttctcattatttaagtttggatctggaaaggacatgacttctgaaatagccgctgctgggttttaaaagctgaggtctctcaaagtgtggaggagacgttgccgtcaggcgggagccaagtgccgggaagatgtctattttttttcttgtgtattgaaatgtaaaatcatgatgtttgttatgactgctgatgcgattgtttttgtaaattttattgtggcatatacagtattgtcatacagttgaagagaaacaatgtttcctaatgtaagtgctctgaaaatgttgacactgtatatatatatatgaggatagtttg

SEQ ID NO: 128146 - DNA, 537 bp, Homo Sapiens
caagctgagagtcacagggcatttattgaacacctactatatgccaggcacagcgatcccccagagcaacctgtgaagtgagtgatattggccctgttgtacagatgaggaaactgaggctcagaggacacgtggcttgcctgagggcacacagcagagcccacctgaggatccaaggccagctaagttcttctgactgttgtgggcagttctctcttatggggtccctgccccagtgccctgaggtcctccacgggggcctcctccatggagttgtcctcactctcctccccttcttttcctgggctccatatggtgctctgagcactctaaataataataataataaaacgacagcaacatcagtaatgataatggcagcaacaagtctcaagtgtttgttgcgcaacaggccgggttttctgtgcttcgtatagatctgttcatctgatactcagcacagccctacacggaggttactgttctaagccactctgcaggcgaggactctaaggcacagagaggctaggagacttt

SEQ ID NO: 128147 - DNA, 689 bp, Homo Sapiens
  misc_feature (590)..(590): n is a, c, g, or t
gagagtcacagggcatttattgaacacctactatatgccaggcacagcgatcccccagagcaacctgtgaagtgagtgatattggccctgttgtacagatgaggaaactgaggctcagaggacacgtggcttgcctgagggcacacagcagagcccacctgaggatccaaggccagctaagttcttctgactgttgtgggcagttctctcttatggggtccctgccccagtgccctgaggtcctccacgggggcctcctccatggagttgtcctcactctcctccccttcttttcctgggctccatatggtgctctgagcactctggctggcgagagactgaagaacagatggaggggggctggtgttggcaagcagccgagtgtcataatgcccataaactccttgcatcttggctctaaaatccagtagatccctctccaggtcatacttctccagggtctggaaggcgctagaatacacctccaccgctttggcatggaaaaccatctcaatagttacaaagtcacaaaaaaatttctgcaggtccttgagcttctgcctctggaagccatccacagtctcctccanctggagggtggtgcggctggagtccacagcggccctctgcactctggtctctgcctgggagatcatttgctgatccgagggtgacttctgcctcagttt

SEQ ID NO: 128148 - DNA, 836 bp, Homo Sapiens
  misc_feature (125)..(125): n is a, c, g, or t
  misc_feature (135)..(137): n is a, c, g, or t
  misc_feature (585)..(644): n is a, c, g, or t
cctggatggcagaggggagagggcattctccggccggggaacttccaggggccccatcctgggctgctgctgtggttagtccactgagggccacggtgtggtagccccgggacaggtttccccanccgccccccnnnttgtccccctgagcccagggccaaatggggaggaaagaggattctgagaaagaggcaataagcaggcagtgaggctgacctcagccccgggggcccggccgaggtgaccgggcctgttgcaggcccaggggaagcattactaaaggatctggggctctgcactctggctccatgcacagcgggtgcccagagagtcctctgccctggggtggtgctgccaatctaggttgggggcacagctaggtccagtgactcagctttgatgtccaagacctcgaactcccgcctgcctggcgtggttcttcctggtcacatgaaccagatcgtgttccaagtggaggatgtggctctgcacgcggtcatcaatggggaaggaggtcaggtacctcttgaccatggcaaagtaagccatggcctccccaaagctgggtacaggcacctcatcacnnnnnnnnnnnnnnnnnnnnnnnnnnnnnnnnnnnnnnnnnnnnnnnnnnnnnnnnnnnncctcactgtctgaatcagagtcctccccaccttccaggaaatgcagagtagggcactgggcttcctcctgggcaccataagccccgaagctgccaccggcctccactactccctgggcccagtcctcagcctccaagccctccgaggagctctcctcatcttcctcctcttcttcatcactatcctcgtgcc

SEQ ID NO: 128149 - DNA, 1303 bp, Homo Sapiens
  misc_feature (59)..(77): n is a, c, g, or t
  misc_feature (428)..(445): n is a, c, g, or t
gtgctaagctaaaattaaccctcactacaagggaataagcttgcggccgcatacgcggnnnnnnnnnnnnnnnnnnnggctgttaaaacgttcacccccacaaaaggggagtggacagatttattgaaatcaaactgggaaaggagcagctggacggctggactctgggcccagccccaggcccctctgcccaggatggggccctgccagagagggaggagaggcatggggcctgcagctgcccacaaggaagcgcccttggttacttccacggtggggggcctcttggaaacctccaatctggaaagaaaaccaagggccaaagtcacatggacagggccagagaaagggactggggaggtggaaagcaggcagaagcaggctcaggagcccgcagtgagttaaactgtgcttctcaaggcggcctnnnnnnnnnnnnnnnnnnctgccagccttgcagggggcctaggctggaccttcttctggagcccttcccagaatggctttggggtccccccaccaaagacctgacgtggatggcagaggggagaggcactctccggccgggaacctccagggcccatccctggctgctgctgtggttagtccactgagggcacggtgtggtagcaccggacagctccccacccgccccacctggtcccctgagcccagggccaaatggggaggaaagaggattctgagaaagaggcaataagcaggcagtgaggctgacctcagccccgggcccggccgaggtgaccgggcctgttgcaggaccaggggaagcattactaaaggatctggggctctgcactctggctccatgcacagcgggtgcccagagagtcctctgccctggggtggtgctgccaatctaggttgggggcacagctaggtccagtgactcagctttgatgtccaagacctcgaactcccgcctgcctggcgtggttcttcctggtcacatgaaccagatcgtgttccaagtggaggatgtggctctgcacgcggtcatcaatggggaaggaggtcaggtacctcttgaccatggcaaagtaagccatggcctccccaaagctgggtacaggcacctcatcaccatcctcctcatcatcatcgtcgtcttcatcttcatcatcctcttcctcatcgtcctcttcctcactgtctgaatcagagtcctccccaccttccaggaaatgcagagtagggcactgggcttcctcctgggcaccataagccccgaagcagccaccgcctcccctcggccgattcaaacccagcctcgtacctagccgtt

SEQ ID NO: 128150 - DNA, 880 bp, Homo Sapiens
cagtacacacggcactatacggtctaggtagcgaggcctgggtggtgaattcggcacgagggcaacaggcccggtcacctcggccgggcccggggctgaggtcagcctcactgcctgcttattgcctctttctcagaatcctctttcctccccatttggccctgggctcaggcgaccaggtggggcgggtggggagctgtccggtgctaccacaccgtgccctcagtggactaaccacagcagcagccagggatgggccctggaggttcccggccggagagtgcctctcccctctgccatccacgtcaggtctttggtggggggaccccaaagccattctgggaagggctccagaagaaggtccagcctaggccgcagtgcaaggcttgggcagaccggcgagacggcagcgcccagggggcgcgatgtggagaagaacagtattaacatgcagttggcggggcatccagtgagcactgagtagaatggactagaggattgcggagactccccacaggtgccacgttatcactgggacccctgataccaatgtgaacatttggaggccatatgggataaacagctttatcccaaacaatgggaagggtatgaccaagagaagggcacccaacaaacagaggagaaatgtaagcaaagggggaagaaacgccatatgtagaagcaacgctgcaggccccaaatagcactaatacattcaccaactctggacaaagggaaccacactacatgggagcaaaagagagcctagggggctaggagcaccaagaagacaaagacagtacgacacagctaccatatacaaagatcagattatcacaataaaatcgagtccacaatcacaccttttgtggaggatgaa

SEQ ID NO: 128151 - DNA, 1259 bp, Homo Sapiens
tgacatgctttgaaaaatctttcctcatgtgatactcctccccagtactaagataccaattatagaaaatcaactggttaggattacattttgcatttgataaaataggaattgagatgaagaaaatagttcatacgtctctcctcagtatttccttcaattcttcactcttgtatataaatcaaaattataagtgacataattttagcaaaccaaaataaccagtaaaccaaagaataattttacttaaagtacagacaacctcctaacaaagagttgaccaagttaacacctgaaatttaaaaacctttcatcagactgctttcagcatatttaggatacatacatttcttcttttgaaatctctaccatgagagactaaacacagtacgatacttgcagagatttccattaacaacttcttttcaaatagtgacatttgcaatggaaacagctggtctctattctcatctctaacaacagaggtaggcaggcataaagggtaaagagagttgcctctcagtttgactctctagccagaaccctctgcagagaaggcacttagaagaagcaccccacgtggacatgctggccagagtcctgagtggaaacaagcctgtcagagaactgcaatctatgccagtaagtgaacgagagaagatataaccacacggacaccgtcttacatttattcacacagagggataagaatcagtacaaataataaacagtgctttaaatacaaataaatagctctggtttctaaaggaaacaactctatatataattctaagttttttctaagttcctattaaaaatagaagactattttgcactatgtaagttctagtccaccataatcctttgaagacttacggataaaatggtgaattctatactccaagaagtcaccagaaaaatgggagataatgctcctacctctctgaactatcccccaaataggaggagagttacttgcatcatagacagacacagctaatacatacagaaagtatttgatgtctagagatatttaaaaagattaaccttgggaaaagtaaaaagaatttccttaaaccagttttatgaattctaaaacctccctctactgaagttttgattcaaatgtcttaaattcatttatactcatgggaagatgttaagttcctatattgaaagcttcctcttgctaacaacgatagtgataaacattctgtcatcaccaagaatggcacctggagtaacaaagtgatacatac

SEQ ID NO: 128152 - DNA, 1226 bp, Homo Sapiens
  misc_feature (92)..(185): n is a, c, g, or t
  misc_feature (815)..(815): n is a, c, g, or t
  misc_feature (1017)..(1017): n is a, c, g, or t
  misc_feature (1084)..(1084): n is a, c, g, or t
  misc_feature (1105)..(1105): n is a, c, g, or t
  misc_feature (1151)..(1151): n is a, c, g, or t
  misc_feature (1214)..(1214): n is a, c, g, or t
gtttgaaaaagtatattcaataaattttgtatttaaaacagagctcttgacctataaagtataaaaagtaattacaatgaaatattcttcannnnnnnnnnnnnnnnnnnnnnnnnnnnnnnnnnnnnnnnnnnnnnnnnnnnnnnnnnnnnnnnnnnnnnnnnnnnnnnnnnnnnnnnnnnnnntggatcactgtgtggccgttcagcatcttcctatgctgtgtcaggcaagagaaattctggaaagagagcatctcatgtttattaaggagactgggtgtccttgtagaaagtcctgccatgcacaaccccggtcttaactgatgtgtttcaccatactgaaggcaagttgccatctaacatagtttaaggggagccagttgtggtgatctttgttcctgctgaaagatggaaagaaaatgaggaaatgagctcattttcaaagaaaatgaacattctttcatatgaaagaaataggagcaaagtgacaggagggaaacaaagcttagggttggtgtgagatacacagggtgttagccccacaaacagtgctgctgggccaagttaattccctgtttttccctatatatgtggtgtggaaaagctatttataaaatgtgtttaaatatttaggaccaaataaatcaacattgttgggaaacattgactctgaccagaactcatttccttgccctagtccaatgtgaataacaaaatgaagaatatcaggatgatttgagaccaggaatactacagatgtccaacacttccacctggaatccccaaagaggcccgcttttagcctccacactnggttggtgacctgactctgcagttcactctgctgcttcagatgaaattttcaggtctgtctgccactgtagtgaaggactgctttgggtagtgtctgtggagacactttttaaggacatagtttaatattgtgctacaaccaatccttgacaccatcgtttgtcctactctctgtgacagtgaagatggtgtgctcttgganaggcactctctgtctgatctggattccttttctctctgatatcttcctcagtttcccactgtctcanactttactcactctctttcangaatctctcgcagtcaagttctactcatatctccctctccaaagcngagtgcagtatcatctcacaactctaaagagctactacgtcaccacccctaccatctatcaangggtggtccccg

SEQ ID NO: 128153 - DNA, 547 bp, Homo Sapiens
  misc_feature (15)..(15): n is a, c, g, or t
  misc_feature (319)..(394): n is a, c, g, or t
agagaggtaggacanaatgagtggtgttcaagaattggtttgtagcacaatattttaactatgtcctttaaaaagtttctccacagacactacccaaagcagtgcttcactacagtggcagacagacctgaaaattttcatctgaagcagcagagtgaactgcagaggcaggtcaccaaccagtgtggaggctaaaagcgggcctctttggggattccaggtggaagtgttggacatctgtagtattcctggtctcgaatcatcctgatattcttcattttgttattcacattggactaggagatagatattcttcatnnnnnnnnnnnnnnnnnnnnnnnnnnnnnnnnnnnnnnnnnnnnnnnnnnnnnnnnnnnnnnnnnnnnnnnnnnnntgaagaatatttcattgtaattactttttatactttataggtcaagagctctgttttaaatacaaaatttattgaatatactttttcaaacaaagtttcatgttctaatcattgtctgatttcagcattaaatgaaacccagtaaagaaaaaa

SEQ ID NO: 128154 - DNA, 546 bp, Homo Sapiens
cgtgagcatgaattatttcttgttttattgctttcttgtttctttcttgatgcagagtcaatgtttttgagtaacagtaataagatgcccaaaatccaacagtaaacattcaaatagtaagatctgatgcagaacaaagtcctcaaatgttaactcctataagttacatctagcggaaccacgagggataaaggctgaactcatcatcttggtttatgatggaaaccgctatcctctgacccagggaacaggaggaagtctcgaatgccagccacctgtttaggcactggtggcagcactgtggtctcctcgtgaaatggccggggagactcacagtgagtctaagtatggcaatctctccttttaccccaggattaagagatgcccccgcaactgagagaatcaaaagaaactcctatggaatagaagacgtggttacagtgataaagatcagaaatgattgtgttgtcaaggaagtgacctgtgactgcacagaaccccatctttgtgagaaagcaacccactcttaagtgcacatcagagagg

SEQ ID NO: 128155 - DNA, 1221 bp, Homo Sapiens
  misc_feature (62)..(62): n is a, c, g, or t
  misc_feature (965)..(965): n is a, c, g, or t
  misc_feature (1114)..(1114): n is a, c, g, or t
agcgctttaccatcataagctcccaatgtgtaaacagtaagtctgcccgcactccttccagnggtggaaaaactcagatactgataattctcttgatcacagcccagtttttcccagcggattccccaccatccctcctatccccagacgctggagtctaggtttccagcccagtcaaaatctcaaggactttcttttccctcaaactccaaaagaacagacacgcaataggatttctattcatttttattcattcctccaaagagcaccacaggccaaccacacccttgatgtgtccttcatggttccccactgcagtggacacaaatccctccctcattatccaggcatggatggaactctgctgtggtgaggaggttgtctcgcccactcacccaagttttccatgcctgttctgcttttgatggcaatgccaaaattcatcatacatttccttgaattcctgccttcaagggtcttccagccctgtggtgccatgcagacacacttcagtggcggccagtgatctgtctacaagggagtcttagtcttttctgcttggatgctcccagggacagatgcctgccaacaaccttatgtcttcacaaagactaaaatggaatcccattaaaagttatgatttaaaaggcgaccacccccaaaagaagtcataacactcaagggtgtcaatatatacaactgtgtaaacacaaccaatctacaactatatcaacacaaccagcactcctctatgggcacagacacacacacaaaattgtcttgctttctcagatatgatctctggcatgactcctgctggcatgagggcagaggaaattgagaggagcaaagcatatagcagtgatgtcagacaggaccacatcagagacagggtcaaagtggcagaataatgatgagcacactccgagcacaggcatgggggtgagacaaaggatccagactanagccatcttggtgctgccactggtgggtggcactcatgtttgaactccatgtgtcaggcttttcaggaaatggtgtacaagttatgtgtctgtgtgctattgtgtgctgtatgtcataatatgttcaattctacataacatgtgagtanatgcatttggttttgcttgccaatcagtgatggctaccgccctgagtatacggaaaattctatgtagggattatcttgcctcccggtcattcataccatagcaatgg

SEQ ID NO: 128156 - DNA, 1059 bp, Homo Sapiens
  misc_feature (32)..(32): n is a, c, g, or t
  misc_feature (54)..(54): n is a, c, g, or t
  misc_feature (99)..(99): n is a, c, g, or t
  misc_feature (206)..(206): n is a, c, g, or t
  misc_feature (290)..(292): n is a, c, g, or t
  misc_feature (306)..(306): n is a, c, g, or t
  misc_feature (324)..(324): n is a, c, g, or t
  misc_feature (360)..(360): n is a, c, g, or t
ttcagagtctattgacatgccattgattcacntgacatgttgctgcattcatgntgaatgtcccagaccatgggaccagcagatctgtgatccctcacntgacctctgtacgccgcatgacacagaccccaatatacaacctgcaggcatctcccatcgtcactgtcggaccactgtcagagctgtggagcagaccctgagtgacntgagcagtccagtgcatcagcatcgaggacgagatgacgtgcgcctctgaacctaggcatgatcgccgcctactatacatcaannntcaccaccttgtcntggcgttgaggtgagatntaaaaagtcaccagattagtttcaaatgaacagccntgagaatcttagaatatcttgagggtaagttaacgggtgtcattgtaggaggtgatagagaagtaggccaaacccaccaccatgctctgggcctaatacagtcttttcctattgaaaagtgacggttggggaagaaaaaaaatctcggcctgtttctgttactgtagtagctagcacttatgaattggcaaagtttcagagaccctccctcccctatgtcagatactacaataccatacaggattaaaggtgtaatatgcagatcaagacctagagattaaatacagacttcaggtaggctgctgcttggaatacttattatttttatacttattttttaatatatttccaggaagaggaagatcaaaacgttgtgccagaaactacctctgaaggctacactttccaagttcaggatggggctcctgggacctcttaacttttagatcatgtagctgaggcataaatttgttgtgtactatgtttggtattttgtcttattgtttctctactaagaactctttcttaaatgtggtttgttattgtagcactttttacactgaaactatacttgaacagttccaactgtacatactgtatgaagcttgtcctctgactaggtttttaatttctatgtggaatttcctattttgcagcatcctgtaaataaacattcaagtccacccttttcttgacttc

SEQ ID NO: 128157 - DNA, 3336 bp, Homo Sapiens
gacatagtcttttccaaaaatttcgagttccagtgctcctagcgaaagggccgctgtgtttgtcgcgcgcctgtttttttcttcgcgacgggcgaatgtgaagagcgcggcgcgccccagatggggaaccaagggggcgccccccgcgtgtaactcgttatccttgggcctttagcgtggggggctgggcccaaatgtatagggccgtcctggaggtgggcggccccagcaaaatagtgtgggcgccccacagccgcctgctttgttagggtgattgcgcaccggggtgccccttcttaatgggtttgccccgcactccgtctccaattatagggagatttaggcttttcgggaactgtgtttaatatagtcgttaacgccctcgtgtttcttccaaaatggggggccgaaggtccgtcgtgcatttgtttgcgccgatttcgtgtgcctgggtccaagttcgcagggcggtaatggccacgcggcgttttcccggtttcttgcgatccctgcccatctgcccccggatggtgggagaaacccacttgtcccgcttcccttggtcctgggggcgaggcttttgcatattctcaagaggaaaagtggggggcgagctgctttcaggtatgagtccttggacccgcatggcttgggtgaccatctgggccagttccatagctgccagagcagggctgagccacccattgctggaaaggacatccacgcaggcctggatgagccggattgccttactaaggatttcctccgtatctgactgcaactcagcactcagctgcatgcgagacaagtgagcctgcaggagcaggttggtcttgacgtgcggatcattgaacttagggttattcagcttgtgggggaccttctgagccaactgcctcaggagattgtcttcatggtgccggatgggaatgttctcatactctgctgcattggagatgatctcgataagccctcgcaccttggtcttggcattgagggacatgctgaagagctcaatggtggtgtagttgatgtaatagtaggcggcgatcatgcctaggttcagaggcgccacgtccatctcgtcctcgatgctgatgcacttggactgctccaggtcactcagggtctgctccaccagctctgacaagtggtccgacaagtgacgatgggagatgccctgcaggttgtagtaattggggttctgtgtcatgcggcggtacagaaaggtccaggtgaggtagtccacagcatcctgcttgttctcaatggtcttggtgacgatctcagcattgaagtggtcatgcatacagtggtccaggtgagattctactggcaatggctcatataagaacttcttgaagaaatccttcttggagccctgacacatgatgacacagcgcccctcatcgtcctgcaaagggcggttggcgtggcccaccatctgaagcacgtcatagatggggtaatccacataggcgtggatcttgccattgtagtactgggtatccatgatgattaccaggtgggcagccacgttcatgccccagcagagactccgagaagccaccaccacctggatagcccctgagctgaagagctgctccaccaggcgtcgctccatggggctgagcccctcatgcaggtagcccaccccatttagcagcgtttccttgagcgtgctgtcacttagcttctccaggtacggaatcagatccttctcggtgcagtgcaagaacctctgccgttggatgtctgctgcacaggtggtgaggatgtcaatggcagtgaggcgggtctgcttgcgagacggcacaaagacaatgacaggcttcttgggcgagtgcttggtgatagcatggtacacaggcttggccatggagagcaggcgggtttgtgtatggctgatgttgaagccctggatgtgcagctccaaggggacgggacgcacattgggatggaagttgaaggtggaggtggcactgcagcccagccagtgggccacatccttggcattggagagcgaagagctgagtgccacaatgcgaatgggccgctcaatctgggaggagatgtagcgcattcgggagcagatcacttctaagacaggcccattctcgcccccgataaggtggacctcatccaccacgaagaggttgatgttctgcacgttcttgcgctgcttccatcgccgggaaagttatgtcccctttttcaggggtgctgatgataatgttccctttgcccagcagtttcaggtctgtgctggtctcgcctgtcaggagttccacctttttgttgagcctgtcttggaacttcttgtaccagtccatgtatacctgttctgccagggcctccatgggggtgatgtacacacagcgcccctccgagctttgcagcagcattcgcaggatggcaaactttgcacaaatagtcttcccgctgccccgtgggggcccccacaaacacgttgtcgtcactgttgtatacagtgttaaacacctgggtctggatgggattgaagaaaggaaatttatcttggtaaagactctcaaaggcactgtttctcagagcagacacgggcaagggctgcaggtccaaaagttcggttggaggggggtacttctctggcaagatcaggtgccggaagggtgacaggcagctgggtctcacaagagagccagcggtcagacagcactcggatgaagtactgagggggcagcggttcaaagaccggcacgacgcatgtcctgaggtgctcgtcctgggcgtacttggccttgaggagcaactactcatggtgccgaatcacctcgctgtccacattcttccaccagaatcccaaaagcctcggatgaaccatgcaccttttcatcccactggaagtctggcgtgatggtcagctccaccttcagggtggagcgtgtgataggctgcaggtgcactgacaactccaacttgggaaacagatggacatatttgtggatggtcttccccatctttggcatgcggataagctccccaatctcattatgattcaggtcgtacagacgctcaaaggggaaattcttcttctcaatcttcttcactacttcctcagggagtttccggaactggcgcagaggacacatggactgccacatgcgtttgtcgatcatcttgcagaggttcagggtcttgtctgtaagctgtgcccaacctcggttcaggacaatttcaaatatcgctcgcatcaaccggccagccgactgtgtgacatacaccatgtcagccatcagtgcaaagccctccaatttcagctgtgagatgaaggcttgcagaagaacgttgatctta

SEQ ID NO: 128158 - DNA, 1471 bp, Homo Sapiens
tcacgtttgaaacccaaggggttaacccccaaatttctgggttcccaagctgttttccccacccccctggggtaataggtttgggtccaacgggcccccccacaagcttccctttttggtgtccttaaaaattttggcttttggaggagaaccactgaccaaggaatggggactaatgcatgatttcacaaacttgctgtatctggtcctggcggccgggctgtgatgtttgacattgtccacgtagcttccttctgaatgttagttttggggttggtgagcaggctgggaaagacggcgagtgctcttgcatcaatcacaacctgagtctgttcatctgtaccagtgacaatattccctatggctcttagggcaggagtcacaattggcaattcagaagctcctagaagcttcacaagttggggcacaactcctgttttcaccaccatgccaattcgttcatttggaccatcagtaaggtaggaaatagcccagcaggtatctgctaacacttctggatcatcatgatgcaggagccgaactaaggtaggaagaatctgctcaacagcatctatcgggggtgcaggattcttgttgcggcaaagattagaaagtgttccaggtaagattacgtaagtagccacatgctaaagatgacatatcaggaactgcaaggagagccaacagtgggtcaactgcaccgtacttaataaccaagtctcggaacactgagccatcacctgcaatgtttcctagagcccagacagcttgttcactgatgtgagcatggggagatgccaacagagaaatgaatgctgggatggcacctccatctaccacagccttggtttgttctgatgtcccagaagcaatgttagtgagtgcccaagcagattcaaactgaatgggactacaatcagttctgcccaagaaggacacaaatttcggaatcaaaccagcccggattatgttgtctatggggggctgtttttctctggaaagtagtttcctggcagcttgagtagcttggagctgattttccacattgctgctatttatgcctttgacaatgtcatcaacagaccaatttacagtgccctggttgttgcggttttcctgcagcggagaagtagcatcatcaggaaatgagcttacatttctcctcttcagcatctggtcatccttcttagctttcctcagctccacattgacctctattctgcgacgcctcatttctgtactgtcttttcccttgttcttgaatctgtgaagacgggcagctggtgtattagcattctcgttggtggacatggttatgagacaaagggagaaagctgcgaagcgggcctgggcttccacgggaggcgatgcggggggaatcagcggctgtagggcgactgcgttcaaagggtccacctcgactcagctccctcgtgccgaattcgccacccaggcctcgtacctagccgtt

SEQ ID NO: 128159 - DNA, 2521 bp, Homo Sapiens
  misc_feature (36)..(36): n is a, c, g, or t
  misc_feature (149)..(149): n is a, c, g, or t
  misc_feature (237)..(245): n is a, c, g, or t
  misc_feature (250)..(250): n is a, c, g, or t
  misc_feature (435)..(519): n is a, c, g, or t
  misc_feature (581)..(616): n is a, c, g, or t
  misc_feature (735)..(735): n is a, c, g, or t
  misc_feature (992)..(1015): n is a, c, g, or t
agaaaggcgcactcgtgtgtgcgcacaatatgtggnggaggcgggatcgaaacggtaggggtgtgtatataaataaataacgagagcggggtgggacgagaggcgtgatgaggggcattccaccacggctggggcgggtgtgggcgaangaaagttctgagcggtctcgtagtacacgccgctcggcgcgtggtcgaacggaggagggaggggtctgcagggagggtcgcggcggtnnnnnnnnncaagnaacggagtaggggtgagaagagggtacggagttctaaacctgcgcacgtcttctcggagaggccggggagaggaacaggtgggggtgtgcgatagaacgcggagcgcgccatatttggcgggggtgtaaagggcgcgacgccattatgggcaccagcggccggtaacgtggggagatagctagtnnnnnnnnnnnnnnnnnnnnnnnnnnnnnnnnnnnnnnnnnnnnnnnnnnnnnnnnnnnnnnnnnnnnnnnnnnnnnnnnnnnnngacacaaagaaaggggaggaggttggctgggaaggagggggtattataagccggactaaaannnnnnnnnnnnnnnnnnnnnnnnnnnnnnnnnnnnacgagaaaaaggtgagtcggatgtgtggggggcgcgacgagaggaaaacagaaacatggcgtggaagggtattcgctcgcagccgcgcggagacacgcgtgtgggcgtctaagatgggngagaaccggggggaattatgggaaggcgacaaatggttacagccgtgggtcccgcaggggtgttcgcctcagggaaaacacgacgggtacgacggggcaatagggtcgcggggcggacgcagagggcgcggcgccgccccggaacaggaaggtttgggtgcgaaatttcgtgggggggcacaaaatgggggcaaggcggcgggaaagcccggatgcggagcgcgggcggaagggaaggggaaagaggcgtaacgaannnnnnnnnnnnnnnnnnnnnnnnaataagagggcggaggatgggatagaggggtaaattaatggggtggttttaagggtggacttgaatgtttatttacaggatgctgcaagataggaaattccacatagaaattagaaacctagtcagaggacaagcttcatacagtatgtatgtacagttggaactgttcaagtatagtttcagtgtaaaaagtgctacagtaacaaaccacatttaagaaagagttcttagtagagaaacaataagacaaaataccaaacgtagtacacaacaaatttatgtctcagctacatgatctaaaagttaaaggtcccaggagccccatcctgaacttggaaagtgtagccttcagaggtagtttctggtacaacgttttgatcttcctcttcctctacagagaaatacttctcaattaagcttaacgaagccttatacacagactcattttcatggttttgtagagcttcaattttgtctaagcctccacattcttcaatcattatactaagtttctcagtttcacctagtttctcagcagcctgaaagatatttgaaatggcatccaggataaccagaataatcttggtatcttttgcagttaagaggttcatcaacggttctattatgccacagtgaacaaggtacacaatctgttcaactgttccaccactggtatagttggtcacggcccacacagcttccttttgtgtcttaaaatctgccttagagagaacactgacaaggaatgggactaatccatgattcacaacttgctgtatctggtcctggcggccggctgtgatgtttgacattgtccacgtagcttccttctgaatgttagttttggggttggtgagcaggctgggaaagacggcgagtgctcctgcatcaatcacaacctgagtctgttcatctgtaccagtgacaatattccctatggctcttagggcaggagtcacaattggcaattcagaagctcctagaagcttcacaagttggggcacaactcctgttttcaccaccatgccaattcgttcatttggaccatcagtaaggtaggaaatagcccagcaggtatctgctaacacttctggatcatcatgatgcaggagccgaactaaggtaggaagaatctgctcaacagtgggtcaactgcaccgtacttaataaccaagtctcggaacactgagccatcacctgcaatgtttcctagagcccagacagcttgttcactgatgtgagcatggggagatgccaacagagaaatgaatgctgggatggcacctccatctaccacagccttggtttgttctgatgtcccagaagcaatgttagtgagtgcccaagcagattcaaactgaatgggactacaatcagttctgcccaagaaggacacaaatttcggaatcaaaccagcccggattatgttgtctatggggggctgtttttctctggaaagtagtttcctgcctcgtgccgaaatcgccacccaggcctcgctacctt

SEQ ID NO: 128160 - DNA, 559 bp, Homo Sapiens
aaaataaataaataattggattttattaccatcaagccaaacatcagaggggcaataagtacattacgtcctatgcacactgatattttactatatttaacaaagatatgaggctcatttttaaaagtatgagggaaaaaagggctcatggccttggctttacatttttccaagttgttattaatattaccatccattactcacctctacagagaaatacttctcagttaagcttaatgaagccttatatacagactcattttcatggttttgtagagcttcaattttgtctacgcctccacattcttcaatcattatactaagtttctcagtttcacctagtttctcagcagcctgaaagatatttgaaatggcatccaggataaccagaataatcttggtatcttttgcaggtaagaggttcatcaacggttctattatgccacagtgaacaaggtacacaatctgttcaactgttccacggcccatacagcttccttttgtgtctcaaaatcttagagagatcgctgacaaggaatgggactaatccatgattcac

SEQ ID NO: 128161 - DNA, 687 bp, Homo Sapiens
  misc_feature (617)..(617): n is a, c, g, or t
gttttcaaacatgtaatcttttattcagtacactctcaaaacagcatttctgtatctagttccaagctgggtgatcctgcggccccaaaggtagtgatgactctgctgggaggagacacagacctcccagttcagtggatcccgagtgagtcagaaggtgagactggaagcagcagggtccttgagggaagtaggctctccttgaaggataagcaatggctgcatgaagtagcaggtattgaagctagggctttgaaggatgaataggagcttgccaaacaaagaaggtgggacatgcaaaccaagtggagggactgtggcccaaactcagggatacatggatggagtagcaggagaaaaacagactgggggagcaggaagagtcagtgtgagctttctccagatccaaaatcagcagcctgtcattcaaggccaagacattccacaatagttccccttggccctgtcaagcctatcaggcctggagcttcctcaaagcagctctgacaactccagccactgtcatctcccctctttgtgtcacgaggaccatgcactttggtgcatggtgacattcagtgggggctgctttcctcggtgtggctgtgggaccttangcccatgcctcagtttcccaaccctggaaaatgggctgcacgaagccacttttgcaacttatgtttatct

SEQ ID NO: 128162 - DNA, 1144 bp, Homo Sapiens
cagtgtctgagagcatttttattacgggcagcagaacgggatcgcagcatcttagaaagcctattctctgccgtggtggggagtagggagcagagggaaggacccagcacacttcaagaaaccaggcgggtgtgaattcctgagtgagcttggggcagcagtgggtggctgctccacagctcgcccctcctccagaggacccagctttttggttttggagcagccagggctgttcgccagcttgctcagagcctaccctgaaggcatggctggcaggagcaagccgcccaggcccaaaggagagacacccactggctcgaaagccaagcctctgctgacggggccaaccctggggtgccagtgccagggctgagagtccctgaggggctgccggcacacaggtatcctcccgtgatgagcagagtgcagtgaggggttgacaggcaggcagagctacgttggcagaaatacgaagcaatgggacagtttccaagaatggcaacatttctggatccagagaagcaacaagaacaaatggtggcttgtttggatagctgacagaatttggcattttattacaaactggagtgtgagtgaaataaaatccatcatcacttttctgctaatgaagacagatgtggaaacgccagcccggtgcccttgccatcccgggcacaagggagtctccagaaacctgcccttggcgtacctaggacaaaagaagccgagttcgtgtacacaccgcaggggccatgcgcctgaacaatgttaggctgccgaacctgcccatcactccccacttctgcacagaccagaccaagctgtcttacacgcctgtaggccccggaaagatctcaagttatagaattaaaattaaaacaaaaagcaaagtttaagtcatcttctccacaggatctagtcccccccaagagccaagaagggaagccgccagtggcagaagcggggttggtgacacacggcatttggatcgtcggcttccttggggtgtcagagcgacatggattctctactagtgcggggacaatcccatttgccttgaaaagacattaatattcaaatctttacaagtttatctgacgataaattctaaggtcaatttttatttctacaaaaaaaggcagtc

SEQ ID NO: 128163 - DNA, 614 bp, Homo Sapiens
ggcacatgcaaaattttattgtaaaacggtagccatttgcatttataaagaaagacaccgttctcagcatcctcagaaggggcagctaagctttataggaggtttcggggattctgattgaacgtaacaaataatagtataaatgaggaagatttaatatggcaaaattcacataatttagaatccagcagagagcacgtgtgggctatttggaatggacagtgaagggccaccttttgcaaaacggagtgactggcaagtgacaagttggaaatacttttctttcaaaagactggttctaacaaatgttgacagtgtggccaaaatcactcccacagctcccattgttgctaaggtgaaaacccttggagaggctgtttcaggcttatctgtggtgcctgaaggcgtcctcttacctacttgtccttcacctaaacacttcactgcccctggcagcatccgctgggaccatcctgggacagagctggctcatgctccagccacatccccagggatgccctcctgtggaacaaatgccatgcatgtgtgcttgggctcatttccagtaaagatacatcacagtctatgtaataatgatgagaacttaaaaaatt

SEQ ID NO: 128164 - DNA, 687 bp, Homo Sapiens
  misc_feature (659)..(659): n is a, c, g, or t
tttaattatacagatattttaattgtatatatatcaggtacacggaataaaagtcctactctctagaacatgagaagtcaataaatagaaaagatatacaaagtggaatgaacataaaaatgactaagcatgtgatcttcacattcatacagtttttcaactaatcttttacaattaaaaagtcatttatttgaaactgtagagttgatatatgccatattagtttggaaccttacaaaacaactttagtggtgttatttatgtgtggagagaaaactgtgtatgtaactatcatgtttcaagggacatgacttaacagtgaagttttttatgttatagggaagaaaacaagtattagtatcagttatcttagaaatgctatctaaactagaatgacatttgttcagtatgatatgttctttccctaactccattctaattgcttaaaaactatcaagtgaagttacaaaagttaaaccactaaatgtggcatcttttcttatagaaggtattttgtgttagaaatgcggtatttaattaagtaaaccttcttggtgaccccagttataatcaaaagaggccacgatactacagactactgacgaaaagtgtcagtgcagacactttccatcaatcaacaggcagtccaagggacgcangagaaacaagtctgggtaacatgaattt

SEQ ID NO: 128165 - DNA, 644 bp, Homo Sapiens
ttgcattttcaacaacttgctcaatatttttaatatttcatcacaaaatccagagatgtacatataattctttacacttattttacagaatcaggcatagtttcttacaggcctaaatcctgaaaaggcaaagggaagattcagcataaatacaacaaagggagaataaagactggatttatattgccatttggaccacggaaacatacacaaaggaaaatgtacatttgttttaggttttccagagttcatttggtttggcttgtttccacaatgaggataaagtactgaaatctgctatttgaagaaagtaacctgacccctgtggtaacttctgtgtgcaggaaccatctaccctcgcacaagctgcacctgaagtggttagccccatttagttcctgtcctctcttttaactggaaccaaaccaaaccaaacaaatccagaatggggtcacctacaagcaatatagttagaaatattaaccctgatgaacagaaacaacactgcatctttagaaaatccaaaaccttttgttcatattcagaacgattaaattaaaccacccaagtagaacacataattcacattcttactgagttaaatcaagtttgatttcaggcagcttttacgcctcgtgccgaat

SEQ ID NO: 128166 - DNA, 1309 bp, Homo Sapiens
aaatgagaaaaggtacatttatttttcaagcagtaaatttttacagaaaattttttataaaggtattaaatgaatcataatggaaagtactatattttattagtttttatttaggaaatggaactttcactttatcccaatattttcttcagaggtagactttgtttttatttcaatgagttcttccactcgagctagaacactttcaatcaaatcaaatgtgaaaagagctgaatgcaggaccttaagctgcatttcaggaggcatattagggatctcttctccacttacagttatagaacaaagatctttagatttctgggcctcttggctatttttaatttctgcttcataatgtgcttttgacatattaagtcctatatgaagtggctttaagaaattattctcaatatttccaagttctgtccataatccagtttgattgtcattttcattatctttgataaccaaatacctcaataaatttaatgaagccataatcctatctgagttttgcagtaaatctgtttctgcaccctctgggagaaaaataccaaatcaagaagggaaatcacctgtggtcctgtaaaccatttgttgttacgtgttctctttaatgacatgtcaatttgatttttgatattttgaataataaaggctccacacctgagtgattacttgtattcaataagcacctaaataatgtatatttgccttgtgaatccaacttgttaatatacagctgaagcatagctaaactctttttcctcagtgtctcaatggggcaaagtgtcattactttcactaagccctgaggtacagtaagaaaactcttgatttctaagtactggtaaagtagactattgtcttctattctcaataaactattctccagcagctccaatcctttggagataacagactcttctgttctttgcaaaaagacttcaatgtgccccatattaaactgcaaaaggtacaatgggcttaagaccattggaagctgatcaatatggatgccctgtacaaatactagatatgccagagaagccattgagtctgctaactgtttattttcttcttcttcaaattcaaggtaattccaagttctctttttccttccatgattaaaaatcattttggggaaagggtgtccattgctgataaaaaacctattatttctgatgcaaatacctgaaaggatcatttccaccttcttcagactgttcaaagcgacgcgtggcgacgcgtgggtgacgatatcccgggattccggaccgtaccagcctgctttttgtacaactttcat

SEQ ID NO: 128167 - DNA, 1394 bp, Homo Sapiens
  misc_feature (451)..(467): n is a, c, g, or t
  misc_feature (1277)..(1311): n is a, c, g, or t
  misc_feature (1314)..(1352): n is a, c, g, or t
gttctcttctgttcttcttcgttgtggcgtgtggtgtgatccgactaggcgtcctgggtgaagaagaagcgttgtcacgtggaatggagtacttcatggtgttgccaggacgtgtccagcaggcaaggaataagcacgcgtatgtttgggacaccgtgtattagcactttgagacagttgtcactagtgtagcccgttggaggctttgtgagtcttctggtagggtaggtgctggtcccaaataatggttgcacctcccagcagaagttaggtgtccggtcgcgaagtatctccagctagcagttttccccagtctcgactgtggtgtgaacgacggccagtgcctagcttatgatacggactcactatagggaccactttgtgacaagaaagctggggacgcgtaataggcttgggcccctcgagggatactcctagagcggccgcccgnnnnnnnnnnnnnnnnnggggtcggagtggttttattgggcagcaggggctgcgggccggtggggcgtcaccgatacaagtagtcagcctggatgttggcggcgatctcggcctcccacttgtccccgttgttgagcaacttctccttgttgtacagcagctcctcatgggtctccgtggagaactcaaagttggggccctcgacgatggcatccacgggacaggcctcctggcagaagccgcagtagatgcacttggtcatgtcgatgtcatagcgggtggtccggcggctgccatcagctcttggctcagcctcgatggtgatggcctgggcggggcagatggcctcgcagagcttgcaggcaatgcaacgctcctccccggatgggtaccggcgcagcgcatgctccccacggaagcgagggctcagcgggcccttctcgaacgggtagttgatggtggccggttcccggaacaggtagctcagggtcatgcccaggcctcggaagagctcagtccacagcagggtgcgggctgcccggtcagtcactgacttcatgtccatctcgggatcctgcatgttcacatacttgtaggtggctgccactgcactgctgtggaggctccggccaccaggaggtcctgcacgtgcagcctgggccagggcccgcagcagcataggcgtggtcaggcagcgcatcttgaagcgccgccgctacttgccttgccaagcaggccagtcaatcgggaggcggaggctacactgtaggacgctccccggccgtaatggccgaattcccgggcatatgtccggtaccgtcgactgnnnnnnnnnnnnnnnnnnnnnnnnnnnnnnnnnnncgnnnnnnnnnnnnnnnnnnnnnnnnnnnnnnnnnnnnnnnactagcagcgagtagcgccctatagtgatcgatacaagtttt

SEQ ID NO: 128168 - DNA, 800 bp, Homo Sapiens
ttttggggtcggaagtggtttttattggggcggcagggggctgcgggcccggtgggggcgttcacccgatacaaggtagttcagccttggatgttggggggggatctcgggcctccccacttgtcccccgttgttgagcaacttctccttgttgtacagcagctcctcatgggtctccgtggagaactcaaagttggggccctcgacgatggcatccacgggacaggcctcctggcagaagccgcagtagatgcacttggtcatgtcgatgtcatagcgggtggtccggcggctgccatcagctcttggctcagcctcgatggtgatggcctgggcggggcagatggcctcgcagagcttgcaggcaatgcaacgctcctccccggatgggtaccggcgcagcgcatgctccccacggaagcgagggctcagcgggcccttctcgaacgggtagttgatggtggccggttcccggaacaggtagctcagggtcatgcccaggcctcggaagagctcagtccacagcagggtgcgggctgcccggtcagtcactgacttcatgtccatctcgggatcctgcatgttcacatacttgtaggtggctgccactgcactgctgtggaggctccggccaccaggaggtcctgcacgtgcagcctgggccagggcccgcagcagcataggcgtggtcaggcagcgcatcttgaagcgccgccgctacttgccttgccaagcaggccagtcaatcgggaggccctcgtgccgacttcaaaacccagcctcgtacctagcgtataggc

SEQ ID NO: 128169 - DNA, 819 bp, Homo Sapiens
  misc_feature (241)..(241): n is a, c, g, or t
gggggtcgggagtggttttaatgggccagcagggggctggcaggccgggtgggggcgtcacccgatacaaagtagtcagcctggatgttggccggcgatctcgggcctcccacttgtcccccgttgttgagcaacttctccttgttgtacagcagctcctcatgggtctccgtggagaactcaaagttggggccctgcaggttgaggtgcagggacggtggttaggccctgctgaggagcntcaggccccctcccaacccgggggcctcacgcgcctcgacgatggcatccacgggacaggcctcctggcagaagccgcagtagatgcacttggtcatgtcgatgtcatagcgggtggtccggcggctgccatcagctcttggctcagcctcgatggtgatggcctgggcggggcagatggcctcgcagagcttgcaggcaatgcaacgctcctccccggatgggtaccggcgcagcgcatgctccccacggaagcgagggctcagcgggcccttctcgaacgggtagttgatggtggccggttcccggaacaggtagctcagggtcatgcccaggcctcggaagaagctcagtccacagcagggtgcgggctgcccggtcagtcactgacttcatgtccatctcgggatcctgcatgttcacatacttgtaggtggctgccactgcactgctgtggaggctccggccaccaggaggtcctgcacgtgcagcctgggccagggcccgcagcagcataggcgtggtcaggcagcgcatcttgaagcgccgccgctacttgccttgccaagcaggccagtc

SEQ ID NO: 128170 - DNA, 1070 bp, Homo Sapiens
  misc_feature (68)..(85): n is a, c, g, or t
cggccacgtgccattgctcgaattaaccctcactaaagggaaaaagcttgcggccgcggctgtatgcnnnnnnnnnnnnnnnnnnggggtgcgcggcctggctactctggctgcaggccgagggttgaacgtttattcatcacaattaacagcctatacaagcatctctagaacagaggctgtgggtccaaacgggtccctgcagctccaaccctctggcctctccgggcactgccctcacagccgatggagcatggctgggcaggcagacaggacacaggctcagtcacagggtgtcagggggaagctcttctagctggaatgattggaagttggcccagcggctggggctggtctgtcccttcccctcctgggaagttccacctccactgtagttaaggccaccaggatgaaagcagggttaggtccagggacccagtagagccttgggatgcatgaggtgggggtaaatgggcttggcagagaaatggagattgggaaggggcctgattagaatagaaactgatgatgttggttcagcacctgcaagatgaggaaggtgactgcagcaaccttagagcttcccaaaggaagcaagtgatgcccccatctgccaagagggtacctccttcagcccttggcacaagagccagaccaaggtgtccagggaactccacaggacagaagccctgccgaggttagggggatggtgggtggatagaaagtctttcctggggcctgcagcccagtctcaaacaaggaccaggacgtggctcactggtcctcatttgtgagccactaggcaaggagcgagccctcctctagggtagatcacagccctgggggatttttcctaaggttaggatggctccacggagacccacaggttagggcccaaatcccgggaaagtcaattcagtgccctggggcccctcagggctccccggcagaacctttcttgttgggaaaggcccccccaggttgcaattctgacctttaggaaaagacggaaagaaaccttgggtggatccccggtccccctaacctggaaccagggtgcccccaaacaa

SEQ ID NO: 128171 - DNA, 815 bp, Homo Sapiens
catgacagtttgcagttgatgttacataattttctgctactcaggaactcaagtctttgggaatatgacctagagaaagtccccagattagagcccccagcgtctctccctggggaaggactggtgtgggggccgcctggggagagtggagctccctctgctgtgactgttctctcctcttccctcaggctctccagcaccaagagggccgtgaaggcggccttggcagatgattttgacacacccagggtggttgatgccatcctgggccttgcacaccacgggaatggacagctcagggcgtccctgaaggaacctgaagggccgagaagtcctgctgtgtttggtgccatcatctcttactttgaacagttttttgaaactgttggaatttctctggcaaatcaacagtacgtttcaggagacggcagcgaggctaccttgcatggtgtggtggacgagctggtgcggttccggcagaaggtccggcagtttgcgctggccatgcccgaggccacgggggacgcccggcggcagcagctcctagaaaggcagcccctgctggaagcatgcgacaccctgcgccggggcctgactgcccacggcatcaacatcaaggacagaagcagtacaacatccacgtgggaactgctggatcaaaggacaaaagaccaaaaatcagcgggctgaggatggagcacagccatgaacctgctcacgacaagacgcacccatgcttctcagggtcaaggctttatgttaaagcttcctgtcggggctgctaggtcagcattaaagtaaggcaaccaacagtg

SEQ ID NO: 128172 - DNA, 761 bp, Homo Sapiens
  misc_feature (687)..(687): n is a, c, g, or t
ttttttggttgccttactttaatgctgacctagcagccccgacaggaagctttaacataaagccttgaccctgagaagcatgggtgcgtcttgtcgtgagcaggttcatggctgtgctccatcctcagcccgctgatttttggtcttttgtcctttgatccagcagttcccacgtggatgttgtactgcttctgtccttgatgttgatgccgtgggcagtcaggccccggcgcagggtgtcgcatgcttccagcaggggctgcctttctaggagctgctgccgccgggcgtcccccgtggcctcgggcatggccagcgcaaactgccggaccttctgccggaaccgcaccagctcgtccaccacaccatgcaaggtagcctcgctgccgtctcctgaaacgtatgtgcctgtgacttctgcacattctgagagtctttgaacataaacgtgtgtgcagagctggcgacattctgttgctgagatggactcatctctggttctgcgcacgagagtttgccaactgttgatttgccagagaaattccaacagtttcaaaaaactgttcaaagtaagagatgatggcaccaaacacagcaggacttctcggcccttcaggttccttcagggacgccctgagctgtccattcccgtggtgtgcaaggcccaggatggcatcaaccaccctngggtgtgtcaaaatcatctgccaaggccgccttcacggccctcttggtgctggagagctctccacagcatcgct

SEQ ID NO: 128173 - DNA, 993 bp, Homo Sapiens
  misc_feature (694)..(695): n is a, c, g, or t
  misc_feature (704)..(704): n is a, c, g, or t
  misc_feature (732)..(732): n is a, c, g, or t
  misc_feature (834)..(834): n is a, c, g, or t
  misc_feature (858)..(858): n is a, c, g, or t
  misc_feature (892)..(892): n is a, c, g, or t
  misc_feature (923)..(923): n is a, c, g, or t
  misc_feature (953)..(953): n is a, c, g, or t
tcactgttggttgccttactttaatgctgacctagcagccccgacaggaagctttaacataaagccttgaccctgagaagcatgggtgcgtcttgtcgtgagcaggttcatggctgtgctccatcctcagcccgctgatttttggtcttttgtcctttgatccagcagttcccacgtggatgttgtactgcttctgtccttgatgttgatgccgtgggcagtcaggccccggcgcagggtgtcgcatgcttccagcaggggctgcctttctaggagctgctgccgccgggcgtcccccgtggcctcgggcatggccagcgcaaactgccggaccttctgccggaaccgcaccagctcgtccaccacaccatgcaaggtagcctcgctgccgtctcctgaaacgtactgttgatttgccagagaaattccaacagtttcaaaaaactgttcaaagtaagagatgatgggaccaaacacagcaggacttctcggcccttcaggttcctgtaagagatcatgtcgcagaagctccttaaaagcagtcttgatggcagtgggcaaacggaattcaatgtcaaaagacaaaggcttcagcaggtcacttcagtctggcctttctcctggcttcttcagggacgccctgagctgtccattcccgtggtgtgcaaggcccaggatggcatcaacaacctgnngtgtgtcanaatcatctgccaaggccgccttcacggncctcttggtgctggagagctgagggaagaggagagacagtcacagcagagggagctcactctcccaggcggccccacacagtctttcccagggagaacgctngggctctatctgggacttctctangtcatatcccaagactgagttctgagtagcaganatatgtacatcactgcaacgtcatgtacccnagaaaatccagacactcgtgccgatctggnctcgaggcaatcctatatgagtcgataatcgtacagtcaa

SEQ ID NO: 128174 - DNA, 970 bp, Homo Sapiens
  misc_feature (690)..(690): n is a, c, g, or t
  misc_feature (758)..(758): n is a, c, g, or t
  misc_feature (826)..(826): n is a, c, g, or t
ggttgccttactttaatgctgacctagcagccccgacaggaagctttaacataaagccttgaccctgagaagcatgggtgcgtcttgtcgtgagcaggttcatggctgtgctccatcctcagcccgctgatttttggtcttttgtcctttgatccagcagttcccacgtggatgttgtactgcttctgtccttgatgttgatgccgtgggcagtcaggccccggcgcagggtgtcgcatgcttccagcaggggctgcctttctaggagctgctgccgccgggcgtcccccgtggcctcgggcatggccagcgcaaactgccggaccttctgccggaaccgcaccagctcgtccaccacaccatgcaaggtagcctcgctgccgtctcctgaaacgtactgaagccagcagggcgcggttacgtcccccggagactgtggattgtggatgcccccctccccaccccgtggttgggctctgggccgacacccacccagccctgggcttccctgattccctgcagctgggcctctttctgggtctggcagggatgggtacagcccgcgagcgctgggctctgggcaaggctccactcaactctgagcatctgtcgtccaagcaaggctgagtgatcctcactcgggagttggacaaaaggctggggggctgcatgtcgcccgccctgaaccanacgctcctggcttccagactcacgcattgtggcgaggtacaggagcacctgaggataggctgggggancgacgagcgctgcaacgtgtgttcgggaatggctgagatcaagctcagggctgggacggaatgcgcanaggctcgcctgtctccactgagacaatctgggcgtgtggaggggacttactattgttatcatggtgtaaaagacaaccacattgcttgggtacactaactcacaccctatatgctcataaaaaagtttgtttaaaaatagcaag

SEQ ID NO: 128175 - DNA, 980 bp, Homo Sapiens
  misc_feature (702)..(702): n is a, c, g, or t
  misc_feature (742)..(742): n is a, c, g, or t
  misc_feature (817)..(817): n is a, c, g, or t
  misc_feature (820)..(821): n is a, c, g, or t
  misc_feature (857)..(857): n is a, c, g, or t
  misc_feature (886)..(886): n is a, c, g, or t
  misc_feature (937)..(937): n is a, c, g, or t
ggtgccacaaaaatgattttattttgaaccagaaaggaacagcaatcaagacaatagtcagggccgagggcttggcagtgtgacttaagtaccggggattgaatttgtccaggtgcaaggagtgacataaagagaatcaatttttcatgtccaagccaagctgatacagatgatgatacttatcagtgattcccatttacacaggcttggattgcttttcagatatcagatttttggaactattttataaatatttttaaaggtgatggagccactggagtgtaggtgaattggtgcccctccccttttctttttgggtgtatcaagcatataatcaatgacaggaaaagtgaaaggtttttatgagagttttgcattaaaagaaaaccaacgatcaagtttctacactgcagcactgttgatatttgagcaagacaactcttcgtggtcgggggctgcgcttgcactgtaggatgtttaacggcgtccatgacctctacgcactagatgctggtagcttcccttccccggctgcgacaaccaaaagttgccattgcattgccaaatgtctcctggggggcaaaatcgagcactggttgagaagcgctgttttcaaaaacatcctcctgcccccatcattgtcttggtgtgctttttaccattttattaagatagaccagatggtcaacttcccaacaccanatgcacatgtatgccagcatatatgcgtgtctctttgcangtatctgcatgttcctggagctgagatggaatccacggtcactggaggacgttagttcagttcctcagcaagttnagnngtcatatatcagtacccgtataaaaagctgtctgtnatcaagctgttcttttccctccagcaaancatcgtcatatttgcagtcagtttttgaagtcacttccttttaagctgganagatctcacccactccggtgcgatccttggctccagggcaatc

SEQ ID NO: 128176 - DNA, 1001 bp, Homo Sapiens
  misc_feature (704)..(704): n is a, c, g, or t
cttggggccacaaaaatgattttattttgaaccagaaaggaacagcaatcaagacaatagtcagggccgagggcttggcagtgtgacttaagtaccggggattgaatttgtccaggtgcaaggagtgacataaagagaatcaatttttcatgtccaagccaagctgatacagatgatgatacttatcagtgattcccatttacacaggcttggattgcttttcagatatcagatttttggaactattttataaatatttttaaaggtgatggagccactggagtgtaggtgaattggtgcccctccccttttctttttgggtgtatcaagcatataatcaatgacaggaaaagtgaaaggtttttatgagagttttgcattaaaagaaaaccaacgatcaagtttctacactgcagcactgttgatatttgagcaagacaactcttcgtggtcgggggctgcgcttgcactgtaggatgtttaacggcgtccatgacctctacgcactagatgctggtagcttcccttccccggctgcgacaaccaaaagttgccattgcattgccaaatgtctcctggggggcaaaatcgagcactggttgagaagcgctgttttcaaaaacatcctcctgcccccatcattgtcttggtgtgctttttaccattttattaagatagaccagatggtcaccttccatcactanatgcacatgtatgccagcatacacccgtgtctctttgcaggtacctgcatgttcctggagctgagatggaattcacggtcactggaggacgttagttcagttcctcagcatgtttatggtcactatatcattaccgtaataaaaaagctgtctgtaccctgctgtttcttgtcctcagcagcaacatcgtcattttggcagtcagctcgtgccgattcttggctccagggcacattcctaagaggagtcttataatcgtaccaggtaaggtgttcggggtgaatggtaccctcaaac

SEQ ID NO: 128177 - DNA, 1362 bp, Homo Sapiens
  misc_feature (805)..(1001): n is a, c, g, or t
  misc_feature (1228)..(1228): n is a, c, g, or t
ctgcagtgtaattttgcattctctttaaactgattgaggtcacagtattttattatttggggtcctcaccacaggaaacactgcgatacaggggcaaaagagatggcagtgccaattaaattaatacaacaaaatcaatgcagcaccaaccaagactgccaggtctggtgtcatgggtatgcccagagcccaggagttcagaagggccctaagcctgatttaatgctctgctgttgatgtcttgaaattcttaacaatttttgaacaaggggcctgcgttttcacttcgcactgggccttgcaaattacatagcgagtgctcataaaagaactcagaaacgtggtacctctcttcctggtggatacaaataaagaaatctggatccaaagttgaaagttgctggcgatatcattcaagtaggactctaaatagtggattaagatgagggtgggcctgggtgaagattctttccagctttaaaagaaagtgacttcaaaaactgactgcaaatattgacgatggtttctgctggaggaaaagaaacagcttgaatacagacaggcttttttattacggtactgatatattgaccttaaacttgctgaggaactgaactaacgtcctccagtgaccgtggaattccatctcagctccaggaacatgcagatacctgcaaagagacacgcatatatgctggcatacatgtgcatttggtgttgggaagttgactatctggtctatcttaataaaatggtaaaaagcacaccaagacaatgatgggggcaggaggatgtttttgaaaannnnnnnnnnnnnnnnnnnnnnnnnnnnnnnnnnnnnnnnnnnnnnnnnnnnnnnnnnnnnnnnnnnnnnnnnnnnnnnnnnnnnnnnnnnnnnnnnnnnnnnnnnnnnnnnnnnnnnnnnnnnnnnnnnnnnnnnnnnnnnnnnnnnnnnnnnnnnnnnnnnnnnnnnnnnnnnnnnnnnnnnnnnnnnnnnnnnntgcagtgtagaaacttgatcgttggttttcttttaatgcaaaactctcataaaaacctttcacttttcctgtcattgattatatgcttgatacgcccaaaagaaaaggggaggggcaccaattcacctacactccagtggctccatcacctttaaaatatttataaaatagttccaaaatctgatatctgaaaagaatccaagcctgtgtaaatgggaatcactgantagtatcatcatctgtatcagcttggcttgacatgaaaattgatctcctatgtactcctgcactgacattcatcccgtactagtacctgcagcctcggctgatatgcctgatgtgtcttcgcaaaaactttggc

SEQ ID NO: 128178 - DNA, 923 bp, Homo Sapiens
  misc_feature (436)..(450): n is a, c, g, or t
tttgcagttttaataaaaattttattacacagccataatgtaatcaacacttctccaaatccaaatgatactaaatacagatctacatggtggatcagaatgactccagcgaattatctggattctataattttatgttttttaaaaccagaaatcaagaagaaaagtccaagttcatcatgataggagaggtcccagcagctccaggactctgctgaagtccaggcaatgttaacagtctgtgattccacatttacacaatagtctataaagagtttcggtcaatggactattcaagtatatatgattttaacgagtccatcaccactcctttgcccaagtgaactgtgtcacagctaccacaaagctgtgttacagtcatatttagcaattttacaatcataatactcctttaaaaccatccattgctgctttnnnnnnnnnnnnnnngtaaactaagttaaagcgacactgaggctctactaaacccagaagttaccaagttcatttttatgtttaaatacaacttacaagtccatgatttcccatcgtcccccttccttgtacgaaagcagggtgaggaagtacaaagcagagcttttagattagtctctcgtggagatcggagctctcagctgttcctttagcttagctcttggtatatatagtcagctgtactttgttctgaaagatttgttaaatgccacttttatttacacttggagctttacacctgagagtgattatcaagcagtcagcttatctcttttcaaacatttcataaagacatacacacacctctgctggctcgccctagctgcacaatatatatgctgaccatatatatgtatacacacacacaaaactgcacatgcttgaaacatttgcaacctaaatctttttgaggcggagtctcaagaaaa

SEQ ID NO: 128179 - DNA, 653 bp, Homo Sapiens
ttttttagttttttaaaaaataaatgtttatttcaagtatgaaaagtaatgtttaaacgttgtcccaaaattgtgttcagtttcacaagtataaaataagacttctgaaaaaaagtttacaattagttataaaacacttaagaatatattttgacattcacatcacagtgggcatttttgaaaaataaattttgctaatatagcttagaaaccaaaacatatttacagtcccatttaaataaacaagtccttaactgaggaacggtcctccctcaagatgggtagaatttcaaattgatttgtataagcattccttttaaaataatggtaaatctggttcaataaagtagaaattcaaataccttgtttccccggtgaataccatccatttcttacacatggctacccaaagttctcaagccattttaattaagcactttcaatgaaatacaatgaaagtgggaaccaaactctgagaaatctttatcatggcatttctcattagtttcagcgaaatattttgaacagaaaaggaaagaaatttcccagtggcaattacaaaaccacatcttgtaattattttacaggactgctaccaaggcttctgcttctcttctccaggtacatctgtttgtaggtttgaaacatttctt

SEQ ID NO: 128180 - DNA, 2280 bp, Homo Sapiens
  misc_feature (1230)..(1241): n is a, c, g, or t
  misc_feature (1384)..(1401): n is a, c, g, or t
  misc_feature (1423)..(2087): n is a, c, g, or t
  misc_feature (2098)..(2098): n is a, c, g, or t
  misc_feature (2101)..(2101): n is a, c, g, or t
  misc_feature (2200)..(2200): n is a, c, g, or t
  misc_feature (2202)..(2202): n is a, c, g, or t
  misc_feature (2229)..(2229): n is a, c, g, or t
gcggccgcgtcggccggggccgggacgatgactctggagtccatgatggcgtgttgcctgagcgatgaggtgaaggagtccaagcggatcaacgccgagatcgagaagcagctgcggcgggacaagcgcgacgcccggcgcgagctcaagctgctgctgctcggcacgggcgagagcgggaagagcacgttcatcaagcagatgcgcatcatccacggcgccggctactcggaggaggacaagcgcggcttcaccaagctcgtctaccagaacatcttcaccgccatgcaggccatgatccgggccatggagacgctcaagatcctctacaagtacgagcagaacaaggccaatgcgctcctgatccgggaggtggacgtggagaaggtgaccaccttcgagcatcagtacgtcagtgccatcaagaccctgtgggaggacccgggcatccaggaatgctacgaccgcaggcgcgagtaccagctctccgactctgccaagtactacctgaccgacgttgaccgcatcgccaccttgggctacctgcccacccagcaggacgtgctgcgggtccgcgtgcccaccaccggcatcatcgagtaccctttcgacctggagaacatcatcttccggatggtggatgtggggggccagcggtcggagcggaggaagtggatccactgctttgagaacgtgacatccatcatgtttctcgtcgccctcagcgaatacgaccaagtcctggtggagtcggacaacgagaaccggatggaggagagcaaagccctgttccggaccatcatcacctacccctggttccagaactcctccgtcatcctcttcctcaacaagaaggacctgctggaggacaagatcctgtactcgcacctggtggactacttccccgagttcgatggtccccagcgggacgcccaggcggcgcgggagttcatcctgaagatgttcgtggacctgaaccccgacagcgacaagatcatctactcacacttcacgtgtgccaccgacacggagaacatccgcttcgtgttcgcggccgtgaaggacaccatcctgcagctcaacctcaaggagtacaacctggtctgagcgcccaggcccagggagacgggatggagacacggggcaggaccttccttccacggagcctgcggctgccgggcgggtggcgctgccgagtccgggccggggcctctgcccgcgggaggagannnnnnnnnnnncatatttttaacaaatggtttttatttcacagttatcaggggatgtacatctctccctccgtacacttcgcgcaccttctcaccttttgtcaacggcaaaggcagcctttttctggccttgacttatggctcgcttttttctnnnnnnnnnnnnnnnnnngcctcctcgtgccgaattcttnnnnnnnnnnnnnnnnnnnnnnnnnnnnnnnnnnnnnnnnnnnnnnnnnnnnnnnnnnnnnnnnnnnnnnnnnnnnnnnnnnnnnnnnnnnnnnnnnnnnnnnnnnnnnnnnnnnnnnnnnnnnnnnnnnnnnnnnnnnnnnnnnnnnnnnnnnnnnnnnnnnnnnnnnnnnnnnnnnnnnnnnnnnnnnnnnnnnnnnnnnnnnnnnnnnnnnnnnnnnnnnnnnnnnnnnnnnnnnnnnnnnnnnnnnnnnnnnnnnnnnnnnnnnnnnnnnnnnnnnnnnnnnnnnnnnnnnnnnnnnnnnnnnnnnnnnnnnnnnnnnnnnnnnnnnnnnnnnnnnnnnnnnnnnnnnnnnnnnnnnnnnnnnnnnnnnnnnnnnnnnnnnnnnnnnnnnnnnnnnnnnnnnnnnnnnnnnnnnnnnnnnnnnnnnnnnnnnnnnnnnnnnnnnnnnnnnnnnnnnnnnnnnnnnnnnnnnnnnnnnnnnnnnnnnnnnnnnnnnnnnnnnnnnnnnnnnnnnnnnnnnnnnnnnnnnnnnnnnnnnnnnnnnnnnnnnnnnnnnnnnnnnnnnnnnnnnnnnnnnnnnnnnnnnnnnnnnnnnnnnnnnnnnnnnnnnnnnnnnnnnnnnnnnnnnnnnnnnnnnnnnnnnnnnnnnnnnnnnnnnnnnnctcaatcggtntangtcgtcgctccagctggctgtgtgcagaacccccgttagccgacgctgcgcttatccgtacttcgtctgagtcacccggtagaacactatcgcctgganancactgtacacgttacaaacgagtagtngcgggctcaatctgaatggggctacacggaacaaaaacaaattggactggc

SEQ ID NO: 128181 - DNA, 835 bp, Homo Sapiens
  misc_feature (724)..(724): n is a, c, g, or t
gggatgggaaaactttattaggtttggtttccagcttcggccacgcgggctccgcccgccccgagctcgggtcacggggcgcccccgccgccctcctcgtcgtcctccacgtcgaggcccgggatgccgcggatctggcgttgcagcgcccctcccagcaagggcacggcgccctcctcctcctcctctgggggcggcggcggtggcggcgacacggccccgggggctggctctgggggcacgggaggctgcgccggcacgccctctgcgccctccgagatccctgccgcttcgccctgcgccccctcgtccagggcaccgccctcagcctcctcctgctccttctcctcctcggggctgtcggtgaaagggttctcgcccttcaggtagcgctccagcttcttgctgatgagcttgttgttgagaatactgcgggccaccatgagggaggacttcttggactgctccatcatgagcctgcggttccggttgtgatccatggtcttcagatgcttctggatgatcccaaactgcatgggaatgaagaggtcgcaggctgcacaatgggctgcctccaccttcttcacaaaatgctccatggcaatttcctgggtcagatcctggtctctgtagatttgctggatgaggccatcaaggtcctccacggtttttcggagctcctctgtcttcttggtcttgttagtgacgtactcctgcagaaagntcagccgtctgcttagggagcttggtgcctacgtactttaagtgttccttgtggaacttgctgtcaagatggctggccatctcgtcctcatagaaggtccggtatttgcac

SEQ ID NO: 128182 - DNA, 432 bp, Homo Sapiens
gtggagcttctgtctactggaccttctggcatatctggccttctggcatacctggaccttctggcatacctggaccttctggcatacctggaccttctggcatacctggaccttctggcatacctggaccttctggcatacctggaccttctggcatacctggaccttctggcatacctggaccttctggcatacctggaccttctggcatacctgggtcagatcctggtctctgtagatttgctggatgaggccatcaaggtcctccacggtttttcggagctcctctgtcttcttggtcttgttagtgacgtactcctgcagaaagtcagccgtctgcttagggagcttggtgccacgtacttaaagtgttccttgtggaactgctgtcaagatggctggccatctcgtctcatagaaggtccaggtatg

SEQ ID NO: 128183 - DNA, 362 bp, Homo Sapiens
tacctggaccttctattccatgatctgacctcactgaggttcagttcctgggagatcgactgctcttgtctcattcttcctagtcacgcatgctgtctagcaaccgtctgtcttaacccgcatgaatctttcaggtttcttctgaatactcacgacttccagaaaaccaagcccgaacccttctgtatgtttcctgctccatgccgttggctgcctagcctgttaaactctaaactcggcctacttgttcaccatatctccagtactggcacaaagcaggacacataccgaaggtccaggtatgccagaaggtccaggtatgccagaaggtccaggtatgccagaagtccagtaaaccggtg

SEQ ID NO: 128184 - DNA, 364 bp, Homo Sapiens
catacctggaccttctggcatacctggaccttctggcatacctggaccttctggcatacctggaccttctggcatacctggaccttctcggccccctctggctggccaatgcacagttggagggggccgagaaggacaggaaggccctggagcaggaggtggcccagctcgagaaggataagaagctgctggagaaggaggccaagcggctgtggcagcaggtggagctcaaggatgcagtcttggacgatagcactgccaaactgtccgccgttgagaaggagagccgcgcgctggacaaggagctggcccgctgcagggacgcagccggcaagctgaaggagctggagaaggtccatgtatg

SEQ ID NO: 128185 - DNA, 942 bp, Homo Sapiens
  misc_feature (231)..(250): n is a, c, g, or t
  misc_feature (912)..(912): n is a, c, g, or t
caaaagggaagatgacaacttttattgttattacaaaagcaaatttaatttgtcatttgaataattgcaagagcagactaagggcttaatcctcacacaggcaccaagtcaggcacagtaggtagctacaaatcgtaagaaaaagctttctttcctacctagagcactcttccatgctttggaattaggctaaaaaactcaacaaacctgatcagttccctttaatcctgnnnnnnnnnnnnnnnnnnnnaaatgagatctaggtattaacctgctgtctagcgaaaactagtcactaagtcctggcctgagagatacccacatttcctttagaacaaacagaactaatacctgtgtacatttctgagagcctgatgtgtgagtccttaaaatgtagaccttgcaggaggcttagacctcagtttcacctaatgcatgtggaggaaatggaggtgagaatagtcacctgaagagtgcaagcgctccagctccagcacacacactcttccctgggcagcaggaaaaggaggtaacaaggacttgggctgacatctgaagcactaagctaatgtgcctggtagaggggagcctcaggaagcacaagatgtcattccacctgtgctgtccacaaacctgaggtttccacatcgttttaaagggcacagtggcaaatgtgacaaggcagaaaacaataaccatttcaaggatcacttaaggaatcctggtgttttctgcctaatcagaagtagtaccaacctgcttttcccttatattggagaacataaaggttttaattaatctccactcccacaccttcaggcccttataataatccttagtaaacaactcagctagcattattgtttcaaggaagcataggattagaggtatgtgagaagtgtatttattganagggaagactcagtaagttctaggatatta

SEQ ID NO: 128186 - DNA, 185 bp, Homo Sapiens
ttaccagtcatgttttatttggaggttaattcctattaggatatgaaaggattcagcaacgattgagattgtgttcctcacggaggggctcgggccaaggtcgtggggtgggggggtgcagagtgtgtccccttctgtcgtcttctcgcagccgtatagtagtagtaggcggccgctctagagga

SEQ ID NO: 128187 - DNA, 449 bp, Homo Sapiens
tacacgtaccagtcatgttttatttggaggttaattcctattaggatatgaaaggattcagcaacgattgagattgtgttcctcacggaggggctcgggccaaggtcgtggggtgggggggtgcagagtgtgtcctcttcagtggtatttgcggagccgctcgtgcttgagatgcttgtaggaaaaggagtagctaaagagcacgtagcatgccagcaccatggtaatccccgagatgctccccttcttcacattgatgtacttgttgtagtaccggtagtaacctctttgaaacgctccgaaaatgccactaggactgaagtcccgcatcaagatccagcttggcagctcccccagtttgacctccagaagtttcttgtccttcactggtacaactgacgccattttggagtcctggtgtccgctgtgccggaccgcgcgagggcccc

SEQ ID NO: 128188 - DNA, 462 bp, Homo Sapiens
cacgtaccagtcatgttttatttggaggttaattcctattaggatatgaaaggattcagcaacgattgagattgtgttcctcacggaggggctcgggccaaggtcgtggggtgggggggtgcagagtgtgtcctcttcagtggtatttgcggagccgctcgtgcttgagatgcttgtaggaaaaggagtagctaaagagcacgtagcatgccagcaccatggtaatccccgagatgctccccttcttcacattgatgtacttgttgtagtaccggtagtaacctctttgaaacgctccgaaaatgccactaggactgaagtcccgcatcaagatccagcttggcagctcccccagtttgacctccagaagtttcttgtccttcactggtactggggccggacactcaccaactgacgccattttggagtcctggtgtccgctgtgccggaccgcgcgagccc

SEQ ID NO: 128189 - DNA, 747 bp, Homo Sapiens
  misc_feature (487)..(487): n is a, c, g, or t
  misc_feature (668)..(668): n is a, c, g, or t
accagtcatgttttatttggaggttaattcctattaggatatgaaaggattcagcaacgattgagattgtgttcctcacggaggggctcgggccaaggtcgtggggtgggggggtgcagagtgtgtcctcttcagtggtatttgcggagccgctcgtgctctgaagtcaggaaggcaagatggtaagtatcttaaaaggttacagtgaaggcacagcatggcaggaagcaggctgagatcacacaaagccttcctgagaattcccttcagagatgacccatgacccgcctgccggtgtctctgcagaatcagcagacccggggggcacaaagacacctcaggagccaacctgccacctggccaaccactttctttccagaaggaacagagggaacacacgctcagacaaacagccccagagaacccgtccttcagaggcaggaccgccctggtgccacagaatgggagtgaggtgggggtagggggntgtacactacactgtcagaaacagcctagtcagaggctgccaccgacacctcccgccaatctcccaccagacaagctcctctcaagcctcagagccggaacagccatgcttttctggggtaccagattatcccactcaactcatttctctttctgcattggctactaggaaaatcgagccnattttcacagtgtgctgtattttaaagaatgcttctaagtactctctttaccctggcttcatcttgattttcctgtgtt

SEQ ID NO: 128190 - DNA, 744 bp, Homo Sapiens
ctttcctgtccgccacggttactgcttttttcgagacccttttctggagttactcgcgaggaagctgttactcagacgtcctgttggttaataaagctgtccctgcagcagttctgctattgtatagactcagtcttaaaatagtgggcttgatgtgacatatttcttcataatattgtgtatgtgcagcctctgtgtaattgcattatgcacctttattgcatagttgaagcagtggcaggaaaggatgccatatgtgttactgggagattattcagtgggtattttttctcactcttccgtttcagtaccagtgaaggacaagaaacttctggaggtcaaactgggggagctgccaagctggatcttgatgcgggacttcagtcctagtggcattttcggagcgtttcaaagaggttactaccggtactacaacaagtacatcaatgtgaagaaggggagcatctcggggattaccatggtgctggcatgctacgtgctctttagctactccttttcctacaagcatctcagtgagtgcctctgcggcgtcttgcctttagttcccatgagagggtggtggtgactgatttcattaagatacagcagcccaccttcttctgaggctgagggacctttaggttaaagttccttatgtttccacctaaaagaatcggagggacctatcagagtacagtatgtgggatatcgtccgaaattgagacacatcgtgacacagaggac

SEQ ID NO: 128191 - DNA, 1646 bp, Homo Sapiens
  misc_feature (429)..(478): n is a, c, g, or t
  misc_feature (827)..(827): n is a, c, g, or t
tttggccttagagagggcagttttattgtctcagaggggcagggctgagggagggagctgaggagcaacatccccccaggccccaaggacacacacactctgtccttcccatgggccatggctctgggagcgacccacagaagggagaggaggctcaaactgcccccaggccccagggttctcaggtcagggagttagggaggaacatgaaagtgacatgcttcttagatacatcagcggctgtaaccacagggctgagggggcctccttgctctggagggggtcttcgtccatccttggtgggggggggtgcccagccccttttcaggcctaagaacagtctctaagagggtcaggagaactgggcagccgctaggacagcgtactacaccccggacaggcaggtgagccacaggcttgtcacagacnnnnnnnnnnnnnnnnnnnnnnnnnnnnnnnnnnnnnnnnnnnnnnnnnnaagagtgcaattgagagccttgggccaggacgctagaagatagggatgtagttgtcgattttggcgcggtggcgctgggcgatacattcagcgatccacacgatgttgcgacactcctgctccttgagcttcacgaaggcatagaagacaccaaagtggaactggttcaggaaggccaacttgttcagctttacctcgtgctcaaagaatcggtcctccagcgtcttgtctccagggttgctacctgcaccctcgaagagcagcttgtactccgggtagtatcgggcacgttcttgacctgttcatagtcgtcagccccgagccagctgcgccaggccctcaagggtangagccgcccacagtgtgggaagagcttggcacggtcctctttggacagctctgtgccgaaagaattgatggtgatgatgaaggcgcggcgttctgcttcaacttccaggatggggcaacatggcatcacccgtagtcccgcccagtagggtgcagaacttgtagaaggactccaggtaggccttgtagagggtgttgcggatgatctcgatgttcatctcgtcaaggtcctgctctgaaatgcagtcctggaaaaaagccgcaagaggcgtgtccaccagaatggcattgtagagctcagcaggtgtctgagcaatgttcacggcctccatctgctcgaagctgcctagtgggtggcacttgggcacgagctcagcgatggagcgctggtgcagcgtgcctgtgatgagcaggatcacgttgtcgatcatgtaactgtaagtaatgaagtctaggaagctggcgagtggctcataggcatggttcctcatgtggcggaactccaccaccatcttctccttgagccggtcatcgatgactgacaccgtcagaggtgatgcctcgttggccaggaagttaccataatcagtgctctgcagatgcagtttcaagtcctctagcgtctcgcactgcaccaggttgaggtagtcggcctggctgagcaccccggccttcaggccgcgcaccagtccctccaagtagccattgtccacgttaaagtaaagctccgggaagaacgacatggctgctgcgggagcggcgggaccggagaacccctcgtgccgattcaacacccaggcctcgtacctagccgtaattt

SEQ ID NO: 128192 - DNA, 1163 bp, Homo Sapiens
cctgggggggattccatttccaggggattccccccaggattgttggggaccctccctggttccttgaactttcccggaaggccttagaaagaccacccaaagtggaacctgttttcaggaagggccaacttgtttcagctttaccctcggtgctcaaaggaatctggtcctccagcgtcttgtctccaggggttgctacctgcaccctcgaagagcagcttgtactccgggtagtaatcggccacgttcttgacctgttcatagtcgtcagcccgagccagctgcgccaggccctcagggtagagccgcccacagtgtggaaagagcttggcacggtcctctttggacagctctgtgccgaaagaattgatggtgatgatgaaggcgcggcggtctgcttcaaactccaggatggggcacatggcatcagccgtagtcccgcccagtagggtgcagaacttgtagaaggactccaggtaggccttgtagagggtgttgcggatgatctcgatgttcatctcgtcaaggtcctgctctgaaatgcagtcctggaaaaaagccgcaagaggcgtgtccaccagaatggcattgtagagctcagcaggtgtctgagcaatgttcacggcctccatctgctcgaagctgcctagtgggtggcacttgggcacgagctcagcgatggagcgctggtgcagcgtgcctgtgatgagcaggatcacgttgtcgatcatgtaactgtaagtaatgaagtctaggaagctggcgagtggctcataggcatggttcctcatgtggcggaactccaccaccatcttctccttgagccggtcatcgatgactgacaccgtcagaggtgatgcctcgttggccaggaagttaccataatcagtgctctgcagatgcagtttcaagtcctctagcgtctcgcactgcaccaggttgaggtagtcggcctggctgagcaccccggccttcaggccgcgcaccagtccctccaagtagccattgtccacgttaaagtaaagctccgggaagaacgacatggctgctgcgggagcggcgggaccggagaaccaggaccggccggcacgaatcgcgactccccaggtcagctgaccctcgtgccgaattcaacacccagcctcgctacctagcctaagttg

SEQ ID NO: 128193 - DNA, 910 bp, Homo Sapiens
ggctttgggcttcatttttctgccctgttgggcctggagaagctggttactccaacccccggggggggcagtgctgccccagtttctgacccttcgcccagtgaaagcctttgaagggctcctttgggcttcacaaaagtcctcgtccccgatggtccttccatatccaagtccacctgtccaccgtgagctagcctccgaagctctgctggcacctcccctctgcggatagactccagaaactgggcattggatgggtcttggtagcttctgagttctccattatccaggctgaatccactcttccagagtttcaatactacatgaacatcttggctggaatgctgcctcttttctcctgccacataggcagactcttcctctggtgctgccccaaggcggtagccacctcctgcaaatggtctcggtttactggtctctccagggctcttggtcactcgctccacagctacagctccatgctctttggcacctttaaagagatcatccaccagctcgttgggacttttcttcctgggagggccaacaatctgctgtccacttctctctgagcccccagcataaaacctgctccttaagtcagagccgtgaggttcaaatctctggccttcctcttcctcctcatcttcatcttggtcatgaatgaggtctctgaaggatgtcactctattatcactgggggctgtgcctctggacactgaactgggggttgcctgcgaaatggtcacaatgtcttcatcccctccgtcctcataaaagctcgctagcgcgatctgcaagtcccagccggccgactcgagaaagaagcgggcccggtcctcctcggcgcccgtcaccgccacgaactccctcagcgcctcctgtcgctccgccgccatcttcgccccgt

SEQ ID NO: 128194 - DNA, 2532 bp, Homo Sapiens
  misc_feature (266)..(266): n is a, c, g, or t
  misc_feature (274)..(274): n is a, c, g, or t
  misc_feature (296)..(296): n is a, c, g, or t
  misc_feature (589)..(589): n is a, c, g, or t
  misc_feature (612)..(622): n is a, c, g, or t
  misc_feature (883)..(909): n is a, c, g, or t
  misc_feature (966)..(975): n is a, c, g, or t
  misc_feature (1011)..(1012): n is a, c, g, or t
  misc_feature (1016)..(1016): n is a, c, g, or t
  misc_feature (1018)..(1155): n is a, c, g, or t
ggggggagaaatcctgcaccagtggctccgtctctttatatgtgctggcgccaggggtcttggatggactactcaccagcgcacgggttgtaaattaagagtgtcgcccgctcaccatcaaggcgggcgcgtgtggtgtatcccgcccgtccccccacagatagaagaaatattattacctgtggtaaaaaaacggataaaatatcttttggttgttgcgaagacaaacaagcgaggtgcggcggtctttatacacacctattttnggagtatnccccccctataaagaggaaggncggcggacaaggcaaccgccaactgttatatacaccacaccgccaggtgttggctctctcccgcggaaaaaaatgtggtcggcgagtttgtttatgtgggggcggcgttctctaaaagcggcgcgtcttttttataggcgcgccccaggtggggagaccgctgcttttatagcaaacagttgggttgggtcgtccgtttggtcttttaaagaggttttcgggaaccccctccccggtgggtgagaggcgcctccggggggcgccttaataaaattaaaaaattttgtgggacnccgggtggttttatatgtagggnnnnnnnnnnngttttgggaggacacacaggggcccgtcttgaggaatgaatttttccccgcagtacataatgccccacggtagagagctaagtgtctcggtggggggcggaacaaatttgacccgtgtggtatagtcaccccttatttttctttctaacccctttataaaattttttatcttaaggcggttataaattttttgaaggaagttttttcctcccttagatttctcctccccaaaaaaaagggtgtctcacccaaaagaatttnnnnnnnnnnnnnnnnnnnnnnnnnnnaccattgaaaaaacgggggccggattttatgtccccaagggggccccttaaaagggnnnnnnnnnnaaaaaagaccggcttcgcctaatgtttggccccccnnggcntnnnnnnnnnnnnnnnnnnnnnnnnnnnnnnnnnnnnnnnnnnnnnnnnnnnnnnnnnnnnnnnnnnnnnnnnnnnnnnnnnnnnnnnnnnnnnnnnnnnnnnnnnnnnnnnnnnnnnnnnnnnnnnnnnnnnnnnnnncattaaagtccattgatcatcacaaaaacccaggaaatgcaactaaggagaaaacaaacgtccaaccaagatctaagaacccagagctatggaggagacgttgcactggactgctgggtgtgcacaagggggcaggaggggcgatccccatggggcatggccactggccatgggaaacacaggagggaggccaggcagctggctgggcggttatgttaaccgctgcacgatgacagcattgagcaggttggcttccttcagggtctggctctcatcagccagctctttgttcgggaaagtagtcatgaggataaagctggtggcagccatggctggccgggcatccacgatgaagagtcggatgtcgctgatcctgtggctgtggttaaatttctgcaccagcctcccgccgtctgcaagccgaatttggatgtttgtggtaggctctgattcgttgattaagatggaagagctggctttggcttcattttctgcctgttgggctggagagctggtactcaacacctggggggcagtgctgcccagtttctgaccctcgccagtgaaggctttgaaggctcctttgggcttcacaaagtcctcgtcccgatggtcctccatatccaagttcacctgtccaccgtgagctagcctccgaagctctgctggcacctcccctctgcggatagactccagaaactgggcattggatgggtcttggtagcttctgagttctccattatccaggctgaatccactcttccagagtttcaatactacatgaacatcttggctggaatgctgcctcttttctcctgccacataggcagactcttcctctggtgctgccccaaggcggtagccacctcctgcaaatggtctcggtttactggtctctccagggctcttggtcactcgctccacagctacagctccatgctctttggcacctttaaagagatcatccaccagctcgttgggacttttcttcctgggagggccaacaatctgctgtccacttctctctgagcccccagcataaaacctctggccttcctcttcctcctcatcttcatcttggtcatgaatgaggtctctgaaggatgtcactctattatcactgggggctgtgcctctggacactgaactgggggttgcctgcgaaatggtcacaatgtcttcatcccctccgtcctcataaaagctcgctagcgcgatctgcaagtcccagccggccgactcgagaaagaagcgggcccggtcctcctcggcgcccgtcaccgccacgaactccctcagcgcctcctgtcgctccgccgccatcttcgccccgtgcgcctcgtgccgattccacaccagcctcgtactaccgatggt

SEQ ID NO: 128195 - DNA, 1044 bp, Homo Sapiens
caaacttgtggggcgccagaggagggttccacagaggttcggccacactttggaaaagaaaggacgggcggcccaagagcgcgtccggcgggtaaattgccacactcccctgccacgaattgattttgtagctctatcttataaagaggagaactgcttgtcattttccctgtggcggaggacgtgtaccaacaccttggggcagtgcgccagttttgaccctggccatgaaggcttgaagctccttggcttcacaaagtcctcgtccgcgatggtcctccatatccaagttcacctgtccaccgtgagctagcctccgaagctctgctggcacctcccctctgcggatagactccagaaactgggcattggatgggtcttggtagcttctgagttctccattatccaggctgaatccactcttccagagtttcaatactacatgaacatcttggctggaatgctgcctcttttctcctgccacataggcagactcttcctctggtgctgccccaaggcggtagccacctcctgcaaatggtctcggtttactggtctctccagggctcttggtcactcgctccacagctacagctccatgctctttggcacctttaaagagatcatccaccagctcgttgggacttttcttcctgggagggccaacaatctgctgtccacttctctctgagcccccagcataaaacctctggccttcctcttcctcctcatcttcatcttggtcatgaatgaggtctctgaaggatgtcactctattatcactgggggctgtgcctctggacactgaactgggggttgcctgcgaaatggtcacaatgtcttcatcccctccgtcctcataaaagctcgctagcgcgatctgcaagtcccagccggccgactcgagaaagaagcgggcccggtcctcctcggcgcccgtcaccgccacgaactccctcagcgcctcctgtcgctccgccgccaacttcgccgccgtgcgcctcgtgccgaattaacagccaggcctcgtacctagactatgag

SEQ ID NO: 128196 - DNA, 591 bp, Homo Sapiens
  misc_feature (357)..(426): n is a, c, g, or t
tggtcctatatagcagtacttaacacagtgccttgcacatagtagccattcagtaaatacttacatgcatgaatgaataatgtattttcagtgtaacaaatttattataaaagtttagttcgactcttcttggtcttggagtttgagagtacagaattacggggaatgaagagaggtataagtagatattttaatggaaatgaagtataatttaatagcttgacttacccctccataagttactgctaactggagatacccttgtatgcccaacctgtaaaggaaaaagttctatttctatatttataggacattcttctcagtcaaggaacagtaagaaatatgtaggtttcaatnnnnnnnnnnnnnnnnnnnnnnnnnnnnnnnnnnnnnnnnnnnnnnnnnnnnnnnnnnnnnnnnnnnnnnttgattcgaattttcatgtaatttgagacaagacctggtcatcagtattttttttaaagttctccaggtaatttgaatgtgcaggaaggattcagaatcactggtttaatttgttattgaaaacagtaccagtattaaatgtgtttcctcttccttcttttctgt

SEQ ID NO: 128197 - DNA, 1285 bp, Homo Sapiens
ataattttgagtttattcccccttctgaaaatactcatacagtactccaagttggtaaaatttattctacatttaaattcagaaagtcagaatttcagtgtgtattacaatccacggccatttctatttctgctgaagattttcattgttcagcttcagatctccttgcatgaagactcagggtcacaagaggaacatggatccaaatattcattttgctcaacttgttaggtccacttgctccaaaggactgaagatatagcaatgtacagaaaggaagactatggaaacccatccacagcttgtaaactcgccactatcctttatgttttgtgcatgaggaaaggaacaaatttgattccccacaacactttttgcttgtcattccgtctgcaaggtaaaatctgggttgaaattccaaagtccaaagaagccttcttaaccaaacaaatgccctccaaaagaaggaaaataacatcaggtctgatatcaaagaggagttttgagcctgtagagatgaattcagaagacggagctttcacccgcctccctgggccatgatggcagctctttttagtaaacagtgcaccagttgctgccatcacttggcatcagccctccagtaattagcaaaataaggtcaacaaaccaccaaatcccaagtcctccaagcgtcaacagcttccctactgcagtgccagtgtgtcccaaacagaatcgatccacaccaaaacatcccaggaagaaggagtagagtaaagtggttatgaagtagtgtccggtatactttatacaaggtttattttctcgtagaaaggtcctaggactggcacactcaattccatctaaggcatggcactggactgaagtgtgttccacgtcgctgtaggcctgaccgccgaacttgagacaaccataaccaagttcctgggatgcagttgcatttccaacatgatccactgggtcttcacattctataaattcatcaggtaggtaagagcagaggatgaccggagagtgggggtcgccatattcccagctcgcagcacccccggggccctccggctgggcggcgccagcggatgtgagctcaggctcagcggtcgcattttgcgagtggctccgagacacacaatgcagcagaagtaaattccccagcagcaaagccgcctggccgcacagaagtaagtaactaaccgggcaaccacctagcaccatcttcccgggcacaggagcggagacccggcctcaaccggacgcgtgggtcgacgatatccaaggaatt

SEQ ID NO: 128198 - DNA, 846 bp, Homo Sapiens
ctgggccatatggcgctcttttattaacagtgcaccgttgtctgccattcactgcaatcagcccctccagtattagcaaataaggtcacaaccaccgaatcccaagtcctccaagcgtcaacagcttccctactgcagtgccagtgtgtcccaacagaatcgatccacaccagacatcccaggaagaaggagtagaggtaaagtggttatgaagtagtgtccggtatactttatacaaggtttattttctcgtagaaaggtcctaggactggcacactcaattccatctaaggcatggcactggactgaagtgtgttccacgtcgctgtaggcctgaccgccgaacttgagacaaccataaccaagttcctgggatgcagttgcatttccaacatgatccactgggtcttcacattctataaattcatcaggtctgtaattcaccagtaagatcatgatcatcatcatacggtctttgcaaatcgctgtttgcatgcacgtaatcaaaacgggcaaaagacatttcttcatcaagttttctggggttcggtttcaccctgctgacccctttccaagccaattaaactgaagcacagcaggtcaaacggacagccaccaaaatgaaccttttgttggagaagggaggtgtttctggtcctgtttctataaggattctacttctgccatggtttcatctcttcagtaggcaaacacaagattctgggggcaaaatttaagccaaagtattctcagtcctctttgcatttcccaaatgctttttcttgtttgatcaaaaagagatgttaaaaaatggcgtgattaggtaagagcagaggatgaccggag

SEQ ID NO: 128199 - DNA, 621 bp, Homo Sapiens
tgcttgagagcatcatttatggcatggactgggaacgcaatgtgttcacacaaatgcacgacaattgtacatcagcatctttacaatattaaaggagccatatacaagtctacagccattgtacacaggatggtgatggctggggagccccgcccaccagtcctctgcagtttctccaccggagaacacttggggagctgtcacaaggccagggggggtccatctttgggcctgtcgtggggcaggcagcaggtctgcaaggactcctcagggccagtcctcactggaatcaggggtcaagagcgccaggtctgcctgtgtctgggtctcatcggcaggctagtgtaacaacgtgaattaaaactgtgcatattcgcatgagaaaactggagctggggatggctccctgagctggggacctagaagacgctgctgacagatgggccccttcatggtggggcccattcctgaggtaacgtgcagccctgaggctggtccgaacgggaggagacttctccagcagcccaggtgccagtccacacagacaggactggaagcccctgggcagcaggtcaggtgacccggggagtgcagcctgagcccccaacggcagcaaacgtg

SEQ ID NO: 128200 - DNA, 756 bp, Homo Sapiens
gtggtgtgggtgtgttgttgtcgctacacgtccatttattaaacaagttccttcatgacaatttaatacaatagttattaacgattagtgttgagaaaattatttccctctacatacaaaaatacagatttgaacactatgaaaaagatcaagacaagtaccatgaaaaactggtccttcaaatgaaagggggaaaattgagggcaatgtgaggctttgcctgctgtcggggacaaatcaatagcagcaaagctttggggccccaacccactccatacatacagacttgaacccaaaagccaggccagccaggggacgcccacccagggcttccacgtcagctgaaaaaccaaacacataaacctaagtttgcccaacgggcatcgcctcagaaagcccacagttgtgtctttaaactgccgaaatgaaagagacttgatgagtaaaatgtgatagttgttaacattgccccccaaaagtgccaccaggtgaagtaccacggagaaatcatattggaaagttactacttagccatctgacttgacttccttggttatcaaataattacatattctgacccttcagaaggacaccaaaagctacaattttatgtttcaatccatctgtaccttcatttgcaatggctcagctacgtttactcaagggtttttgggaccagacataactcaccgacgcgtggtcgacatatcccgggattccgaccgtaccagcctgctttttgaaaactgtaagtaa

SEQ ID NO: 128201 - DNA, 1148 bp, Homo Sapiens
ctaggtcacacttttcagaaaaagaatctgcatcctggaaaccagaagaaaaatatgagacggggaatcatcgtgtgatgtgtgtgctgcctttggctgagtgtgtggagtcctgctcaggtgttaggtacagtgtgtttgatcgtggtggcttgaggggaacccgctgttcagagctgtgactgcggctgcactcagagaagctgcccttggctgctcgtagcgccgggccttctctcctcgtcatcatccagagcagccagtgtccgggaggcagaagatgccccactccagcctgcatccatccatcccgtgtcccaggggtcacggggcccagaaggcagccttggttctgctgagtgcctgcctggtgaccctttgggggctaggagagccaccagagcacactctccggtacctggtcctccacctagcctccctgcagctgggactgctgttaaacggggtctgcagcctggctgaggagctgcgccacatccactccaggtaccggggcagctactggaggactgtgcgggcctgcctgggctgccccctccgccgtggggccctgttgctgctgtccatctatttctactactccctcccaaatgcggtcggcccgcccttcacttggatgcttgccctcctgggcctctcgcaggcactgaacatcctcctgggcctcaagggcctggccccagctgagatctctgcagtgtgtgaaaaagggaatttcaacgtggcccatgggctggcatggtcatattacatcggatatctgcggctgatcctgccagagctccaggcccggattcgaacttacaatcagcattacaacaacctgcttacggggtgcagtgagcccagcggctgtatattctcctcccattgggactggtggggtggctggataccctgagtatggcttggccccaacattcggccttcctggataaactggccccagcagaccggtgaccgtgctggcatcaaggatcgggtttacagcaacagcatctatgagcttctgggagaacgggcagagggcgggcacctgttgtcctgggagtacgccaacccccttgcaggacttggttgccatgtcacaaataacagtcaagctggctttacccggggaagacaag

SEQ ID NO: 128202 - DNA, 977 bp, Homo Sapiens
gcttggcaagatccacccagatatccgatgtaaatataccatgccagcccatggccacgtgaattgcccgttgtcacacactgcagagatctcagctgggccaggacccttgaggcccaggaggatgttcagtgcctgcgagaggccccaggagggcaagcatctcaaagtgaatggcggtccgacgcgcatgttgggagggagtagtagaagatagatggacgagcgagcagacaggggccgccaacggctgagggggcagcccaggcagtcccgcacgagtcctccagtagctgccccggtacctgtgagtgacagccagaccccagaccccagcccggcagcccagctcagccagagaggttcaaggaggggcagggctaggcatcaagggagtgacacacgttggataccccgtccctgggtactgcagtgagtcacctggagtggatgtggcgcagcctcctcagccaggctgcagaccccgtttaacagcagtcccagctgcagggaggctaggtggaggaccaggtaccggagagtgtgctctaggtggctctccatagcccccaaagggtcaccaggcaggcacatcagcagaaccaaggctgccttgcatgggccccgtgaccctgggacacgggatggatggatgcaggctggagtggggcatcttctgcctcccaggacactggctgctctggatgatgacgaggagagaaggcccggcgctacgagcagccaagggcagcttctctgagtgcagccgcagtcacagctctgaacagcgggttcccctcaagccaccacgatcaaacacactgtacctaacacctgagcaggactccacacactcagccaaaggcagcacacacatcacacgatgattccccgtctcatatttttcttctggtttccaggatgcagattctttttctgaaaagtgtgacatcccgttactccgggcggtacagccc

SEQ ID NO: 128203 - DNA, 2549 bp, Homo Sapiens
  misc_feature (1741)..(1866): n is a, c, g, or t
actcagagaagctgcccttggctgctcgtagcgccgggccttctctcctcgtcatcatccagagcagccagtgtccgggaggcagaaggtaccggggcagctactggaggactgtgcgggcctgcctgggctgccccctccgccgtggggccctgttgctgctgtccatctatttctactactccctcccaaatgcggtcggcccgcccttcacttggatgcttgccctcctgggcctctcgcaggcactgaacatcctcctgggcctcaagggcctggccccagctgagatctctgcagtgtgtgaaaaagggaatttcaacgtggcccatgggctggcatggtcatattacatcggatatctgcggctgatcctgccagagctccaggcccggattcgaacttacaatcagcattacaacaacctgctacggggtgcagtgagccagcggctgtatattctcctcccattggactgtggggtgcctgataacctgagtatggctgaccccaacattcgcttcctggataaactgccccagcagaccggtgaccgtgctggcatcaaggatcgggtttacagcaacagcatctatgagcttctggagaacgggcagcgggcgggcacctgtgtcctggagtacgccacccccttgcagactttgtttgccatgtcacaatacagtcaagctggctttagccgggaggataggcttgagcaggccaaactcttctgccggacacttgaggacatcctggcagatgcccctgagtctcagaacaactgccgcctcattgcctaccaggaacctgcagatgacagcagcttctcgctgtcccaggaggttctccggcacctgcggcaggaggaaaaggaagaggttactgtgggcagcttgaagacctcagcggtgcccagtacctccacgatgtcccaagagcctgagctcctcatcagtggaatggaaaagcccctccctctccgcacggatttctcttgagacccagggtcaccaggccagagcctccagtggtctccaagcctctggactgggggctctcttcagtggctgaatgtccagcagagctatttccttccacagggggccttgcagggaagggtccaggacttgacatcttaagatgcgtcttgtccccttgggccagtcatttcccctctctgagcctcggtgtcttcaacctgtgaaatgggatcataatcactgccttacctccctcacggttgttgtgaggactgagtgtgtggaagtttttcataaactttggatgctagtgtacttagggggtgtgccaggtgtctttcatggggccttccagacccactccccacccttctccccttcctttgcccggggacgccgaactctctcaatggtatcaacaggctccttcgccctctggctcctggtcatgttccattattggggagccccagcagaagaatggagaggaggaggaggctgagtttggggtattgaatcccccggctcccaccctgcagcatcaaggttgctatggactctcctgccgggcaactcttgcgtaatcatgactatctctaggattctggcaccacttccttccctggccccttaagcctagctgtgtatcggcacccccaccccactagagtactccctctcacttgcggtttccttatactccacccctttctcaacggtccttttttaaagcacatctcagattaacaagagagaannnnnnnnnnnnnnnnnnnnnnnnnnnnnnnnnnnnnnnnnnnnnnnnnnnnnnnnnnnnnnnnnnnnnnnnnnnnnnnnnnnnnnnnnnnnnnnnnnnnnnnnnnnnnnnnnnnnnnnnnnnnnncgtgcgcgggggcgccgtgcagagtcatggacggccccgtgaggggactccgaagccgtcagcatcccgggaccaccgcaagacactgcatgtgtgcaacaccaacagtgggggggccctccaacgtgccagagagagacgagtgacccaatagggaacgagtaggaggacgagcggagtcccgtagcagtccgcggtcatacataggccagagcaaggggaggaatgcatagagaagcggaacaaacaacggacccggtaagggaccgaacgcgaagagaacgagcgggaacaggaacgggcacaatcgctaagatagctcacttaacgaggtgaggaggagagagagtaatacaaatcgagggagcggagacaccaaacagagccacgcaatcaccatagaggtaaacctaaggcacacgcggtctccgacagccgacacctgagagaggagagaagccaaattgacaaggtcaccaagagccggagaccgactctcgtgggggagcagttcgatcgaccgaacccaaattgcaccgaggggctagactcgataatgggcaaaccgaaggggacgtcgcaagaaaaagcgcagatagcgataggcacagcgaaacaggatgcaaaaaacccacaatagagcaaagagggacgacacacaagaagatttaaccccgaaggag

SEQ ID NO: 128204 - DNA, 983 bp, Homo Sapiens
  misc_feature (675)..(675): n is a, c, g, or t
  misc_feature (728)..(728): n is a, c, g, or t
  misc_feature (738)..(738): n is a, c, g, or t
  misc_feature (772)..(772): n is a, c, g, or t
  misc_feature (778)..(778): n is a, c, g, or t
  misc_feature (812)..(812): n is a, c, g, or t
  misc_feature (829)..(829): n is a, c, g, or t
  misc_feature (918)..(918): n is a, c, g, or t
gatttaaggaatttctttattggaattccactttacctcgccacaaggagctggctttcatgacaaagagagagtgagccctgaacaaagtattcgttaacattttacaacagacaacatatacatgtcctgcatgacatctttacaataacacattccaaaaacaatcaaacatttaacaggattattaagaaacattaatttccttctctctagatgactggtactttagctttttagcttctgcaataaaatgcgttccttctcagcatttctattcataggaatccctgaatcacttctgtcatgtaaggtgcgaattcatgttgacggtgtgttccattagttactgaatgtgtcaaaatcctctccacggtagaaccttttattgtagcataatgtgtgaataccacttccaggttatccctcatcacaaattcatcattcattatgggagttcatctgaaacttagattcagggataggatcctccactttttggccacttagatgctgcatttccaacattttcatattcttcagttggttcctcatcctcagtgctcgtcttcaaatgtgacactagttaactccttttcctgctttgcaggaacacgcggcagatcgcctcctccccggtgcacccgtctgtatgcaggtgcgcttccccagatnagggctaggacgcgcctccggggtctctattcacactggctgtggcggcgccncggaaacccnggcgcagcgggacaaagcgcggacgcacggcggnagaccngcgccggcctggggactccgcgcctctctggganctggaggatgatcgatngtcgggcgacggccgcggaaggagaagggggagccccctcggtattattgggacacttcaggcgcggctcaagccggcagaagcgtcgnggggctctggtccgtgcattacccggcgaatctggcccaggcaatcctaaggggcggctaatcgg

SEQ ID NO: 128205 - DNA, 823 bp, Homo Sapiens
tgatttaaggaatttctttattggaattccactttacctcgccacaaggagctggctttcatgacaaagagagagtgagccctgaacaaagtattcgttaacattttacaacagacaacatatacatgtcctgcatgacatctttacaataacacattccaaaaacaatcaaacatttaacaggattattaagaaacattaatttccttctctctagatgactggtactttagctttttagcttctgcaataaaatgcgttccttctcagcatttctattcataggaatccctgaatcacttctgtcatgtaaggtgcgaattcatgttgacggtgtgttccattagttactgaatgtgtcaaaatcctctccacggtagaaccttttattgtagcataatgtgtgaataccacttccaggttatccctcatcacaaattcatcattcattatgggagttcatctgaaactttaaaaaagtttcatccattcaactaatgtatcacaatagtacgttcatcaatttgcattttttatgagtgactctctcctatctcctgttagacttgtaagtctatgctttctacttttcctaaaaggaaatccaaattttgtttcagaagtcatcatcactgccccctcccaaacccaattacatcaagtttatacttaaagaccactaatattaaataaatttatattccctgaaacctatcctccctgaatttgcctgttggaggcccttagttttcccactgaccaatgtgtaattgggattcaaagctatacctgaatttcctacatttctagtaacagaatttac

SEQ ID NO: 128206 - DNA, 1216 bp, Homo Sapiens
agagtatctaatattttttattgcaatagattatacaaccccaagtttataaatattaaaatagttccaaagagttagaggaaagtccaggacaaaacaacaaaaattcctttttgtttgggtacaatactctggtaactttttccttttgcacagaaaaggatgtctgagatggaagccatgctgactttcacagaacatgcctgatttttgttgacgggcaacctcaggccttcctgtcaggtgtttgtctcccaggttcctgtgaatccagtttttgatgtagacagaggctgtctagcttctgcatatcttctgtaaggccatttctaagatcctcattgtttctcagaaattccttcaccacttccagtcgatttgagagctcttcaggcaacacctcttgttcttctgcttgaagatatatctcttgaagtttctcctttagtaactgcatttctatttcattgacttggctctcactcaggtaagttcccatttcacattcacacccatctcgctgatcttcctcggggatgtgaacagcccagtcagacgtcaacagctgttctattctggagtatactgccacaatctctgggatgttcttgaattcattcagaaaattttggatcttcatctgaaaatctcgaagccacgtagaagatactttcatctctgaagagtgcatgatctcattacgacatttaattacctctgtgactttctttcgatcaaccacgaagtgatcgcaggagttgatgagacttaaaagagcaactgcatcacattcctcaggtccttgtttgtctgctagtcctcggggcatgaaggccttggccacctcccaggcgtccacgggccagcggcccggccggcagtttccccagtgcacatctccatttctgttgacatgatgtctcaaaatctcccttttccattcagcgcacacctgacactgaggctgaaactggcgggcgcgagggctgcaccgtgagccgccgcggcagacggcgcggggccccaggccgggggctgcggcgagtaggccgcggtggaaggagagcacctcgcggccgacgaaaccctgcaggcagctgcgcagcagtagcaggcagtggcccgccttcacccagttcttgtactcggcgcagttgaggcgcgccgctagctccgacagcaccatgtctcccacttggaaccaggaggttgcccc

SEQ ID NO: 128207 - DNA, 849 bp, Homo Sapiens
gggaccggaatcggaagtggctgcgtcgtcgacgctgggctttcgggtcccgcgcccagagatgggctccaaggcaaagaagcgcgtgctgctgcccacccgcccagcgccccccacggtggagcagatcctggaggatgtgcggggtgcgccggcagaggatccagtgttcaccatcctggccccggaagaccccccagttcccttcaggatgatggaggatgcggaggccccgggagagcagctctaccagcaaagccgggcctacgtggctgccaaccagcggctgcagcaggcgggcaacgtgctgaggcagaggtgtgagctcctgcagcgagccggcgaggacctggagcgggaggtggcccagatgaagcaggcagcattaccggcagccgaggctgcctcctcaggctgacctctcggggcctgcaggcttgggcagcgcacaaggtggcctgcacccaggctttccctgggggtccgtcggccccagactggcattcacggggtcccagcccacgtgggtgttgacacaggcgcccctcctgatgctggggctgcggttcatccgtcgtctcattcatgccgagttggtgggacccacccagctggctccgtcctgcgtgacctgagggccccactggggttctggaagaggatagggacattattgctgtactgtgattctgtcgtcagctcacagtggccgtgctctgcagtgggggccctgggagcaagtgcccacttccttcctctcccgggggcaggcactcccctgtccacttctgagtcccagtggtggggatccaaggggtttacctggggattccatcccggggaatggcc

SEQ ID NO: 128208 - DNA, 1380 bp, Homo Sapiens
taggtagcgaggcctgggtggcgaattcggcacgaggagaggatccagtgttcaccatcctggccccggaagaccccccagttcccttcaggatgatggaggatgcggaggccccgggagagcagctctaccagcaaagccgggcctacgtggctgccaaccagcggctgcagcaggcgggcaacgtgctgaggcagaggtgtgagctcctgcagcgagccggcgaggacctggagcgggaggtggcccagatgaagcaggcagcattaccggcagccgaggctgcctcctcaggctgacctctcggggcctgcaggcttgggcagcgcacaaggtggcctgcacccaggctttccctgggggtccgtcggccccagactggcattcacggggtcccagcccacgtgggtgttgacacaggcgcccctcctgatgctggggctgcggttcatccgtcgtctcattcatgccgagttggtgggacccacccagctggctccgtcctgcgtgacctgagggccccactggggttctggaagaggatagggacattattgctgtactgtgattctgtcgtcagctcacagtggccgtgctctgcagtggggcccctgggagcaggtgccacctccttcctctcccggggcaggcactcgcctgtccacttctgagtccaggtgttgggatcgaggtgttaactgtgattccatccagcgagtgcccacccaatgtcagagcagcccgagggccagcctgagcccctgaccccacttccttctgggccccgggctcctcccacaagccacgttgatcttcacaacgaccctgggccgctggggtcacccaagagaagcagccctgagacccagccaggctgggcctagctccacggcacgggtgtctcccagccactgcccttgctggaggaccgctgtgagtcactggccaggagcccagggtgtcctgagtctcatagccaccctgccagctgcagcaggtcctgggcctgcttccctgcgggttctggccctgggggagggggcgttagtgcggcggagggtcttgccaaaggcttttcatcctaaatagcaacttgagtggaaacctgggcaaggcggcccagaggctgggccctgcacataaagctttcgtgtgtgtctggccgtctgaatggtgcctctgtgagcggctccgtcccggggccccggaagctggggagggatgggtaccggcgaccccgggaaccctgctcagtcctgccgggcactgcatgcagggaccgtccgcctgacccagagacctggggctgcctcaccctctctccagacccacagccagctttgtttcttgaatgtggaagatgtttcttattccctgaag

SEQ ID NO: 128209 - DNA, 1151 bp, Homo Sapiens
ttttttcaagtatatttactctttattgcattccttcatttgcattaaacaatattttttcaatacagttttggacaaaacacaaagacattaagctcatttaacaagagacataagttaacacaatgtgtgctgctttcatgaggaggaaagaggcaagatcttagaggaatccaggatactggccaccaggaatcacaggatctcacaatacaatccacttctttaaaagccacaaaataagctagggaagaaaacccaaaacaaagaagatatgacatccaagtctccaccaaaagtatacaaatggcaagatttggagatgatctgctttctcacatgaggacaaataacagaggagccacacccaagtgccactgtggccacaagcctcatgggtggcgtgtgaggtaagcaccttaggatggcttctaattgcttgtccttgcattttaagcagcagttgggagagagaggcacactccataagtctcatcaccaaatatgacctaattaaattcctgctaagtcagtcagttgtaagacaaatcaccctcaaaaggactcaacgggtgcttccttttggaagaagtgtgtggagggtaaaggaaatgtgttcaatgtattggaatggacaataaaggactgagggagagggctagaaaatgattgatttttctggagaatagtgttttagacactagatagtacagatcatttaaaataaaggataaattctaagtaagtcattaagctaaggaaaaagcagtgatactagtaagccttaatattatactaaggaattgacccacttggagttggacactaattagtgctgagaggtttgtaaattactttaataactcctttctgtttgggggtgtatgctttttccatacctatctttcacatgtttttaacaacatcttctaagtggtaataatgagcatatctcttaccacagagcaaattagttatacttaaggggaagtcacaaccaacacggtagtcatctgactttctattaagaaagatcttctgactgcaacttgaaaacatctctgacaatgattgagaacagcattttagagattcaatgccttgtttcttcaggcaaagagaataccgtcccttgtggcgctgacggtctc

SEQ ID NO: 128210 - DNA, 2629 bp, Homo Sapiens
  misc_feature (213)..(221): n is a, c, g, or t
  misc_feature (332)..(346): n is a, c, g, or t
  misc_feature (356)..(496): n is a, c, g, or t
atcccgcgaagcgggttccggggtcctcaccccccctttaggaaggtttccccgtgggcgcggatggctttataaattctccccccttctccgataatggccaggcggggggtaaatttaatttgaggctccctgggccccccttaaaaaaacccataaagacccccggaacccctctggggtgtgttcaaaccctcgggtgccccccggggnnnnnnnnnggggggggatccaacccttggtctggcccgggttttcttgggaacagggttggccccgtttcctttccttttggggccccgggcccaaaaaaaggttttaaaaagtttttnnnnnnnnnnnnnnncggccaaggnnnnnnnnnnnnnnnnnnnnnnnnnnnnnnnnnnnnnnnnnnnnnnnnnnnnnnnnnnnnnnnnnnnnnnnnnnnnnnnnnnnnnnnnnnnnnnnnnnnnnnnnnnnnnnnnnnnnnnnnnnnnnnnnnnnnnnnnnnnnngagctttaacttcagaattttagtgtatgtacaaaagtccacagctccagctgaaggccccattgttccgtgctcgcccctgccttaggacagttcagcttgctatgtgcttgtccaggcagagggcacaggagtgccaagtttctattagtgtaacatgattgatttgaaaacgatacgagaccgaacgagtaccagaaaaactgcttatgcactgtgaaaaaggctcagggacgaaccaggggcccccgagcagccttgctggtgaggacacccaaaacgggcatgaggcatagcgtccctcatcctcgcaaaccacccactcaggctcttgagcccacggcgcacctctctccgcgcgcacagcgctgactgtcggcggcgcgcaggcagctgagaaaagctatgtacatcgaggggttagcaccaagtaggcggctgctagctcctgcttgcccctgcaggacccctcctttccagaaaaaagtggggttggaaggcgatctcgcaggacggtccttagagctgcccgcaggggcgcagcctcatctgagaagactgggcgcgggcgggagggcggcggggccgcaaagcgcctcctcgatgtcctccaggcagcccagcaggtccatgtcgcggagcacgcgtcccagcagctccagcgtggcctcgcgccgcggcgtgcgccgcctccaggtcgccagcatgctgtattgcgcctcgcgcaggcagcgcccgttctgcagctccagccgatcgatctcgtggtcgctcagccctaggcgccgcacgaattccttccagcgcaacgggggcacgttctccaccacggcgtacagcgtcgcggggtcatcagtgtctaggctctgtggcttgtgggcgctgtcctcccacttctgaagggggttggggatggggtcggaggcgagggctgtcgcaaggatggggtcagccccctgatagggtggtgccacctctctgcggggagccgcaaagttgggacagtcaccgggggtataggtggagctggaggtgaaggtggaactgggcacgggactgaagcccagggtgggggtgaagcctggagtgggactgaagcttgggtttggggccaggggcttagtagtagttccttcaagctccccctctttttcaggtgtcgatttcccacaaacaatggagtagagcttggacttccaccgttggtagcgatacattaaaccaatgaagaggagggataaaaggcaaagaccaaagaaaatgaccaggggcaacagcactgtggtgcctgagtcctcagtgcccttaacattctcaatctggggtaggcacaacttcgtgcactccaggcttttcttacagttactacaggagacacactcgttttctcttagaaagaaacctgcatggcaggtgcacacggtgttctgtttctcctggcaggagaggtgcacggtcccattgaggcagaggctgcaattgaagcactggaaaaggttttcactccaataatgccggtactggttcttcctgcagccacacacggtgtcccggtccactgtgcaagaagagatctccacctgacccatttcctttcggcatttggagcagctgaggcagtgtctgaggtggttttctgaagcggtgaaggagccgctctcacactccctgcagtccgtatcctgccccgggcctggacagtcattgtacaagtaggttcctttgtggcacttggtacagcaaatcgaattattttgagggtggatatattttccttggggacacacactatctctcttctccctgtcccctaggtgagggaccagtccaataacccctgaggggtatattcccaccaacagctccaggagcaccagtggcagcagcaggtcaggcacggtggagaggcccatgccagacagctatggcctctcactcccccatttgggctcagggcagtgtggcagcggcagtgctggggcttcccgggactcggtctgtccaggacgtcccaagtgccttggggtgacagttgagggttgagactcgggcatagagatcacggcctggtcccagtgatcttgaaccccaaaggccagaactggaagcccataattccagaccggaccagca

SEQ ID NO: 128211 - DNA, 836 bp, Homo Sapiens
tacctcggtctacttgtctggcttctctgcccaggcagataggaatgcaccgcctgtgtgtgcagtgacaggtctgggaacagacaagggagagcttgtccgggaggctggaccctcacaccgatgctgcctgtgcctggctagctctgtcccgggcctcagaacagacactgaccaacacgctcctcagggtctccaggtccgggtcctggtccccggcagagcttcccatccatgggaagaagcaccgagcagccttgctggctcctcgcagggagctgggatgcatttctaagagcagcatgtgtgaagcccggggtctgggcaaaggagtgtttggggaagagtctgctgttgttggagggtcggaagtagaggggaaggaggggcacgcggtaggctgaggaggtggctggcgaccctgtggtggggacgagggggctatgagcagaccaggagccagcatcacgtttctctgtctccagaatcgaggacggagagctgccagagaggccctggcggggtgtctggggccacctaaagggcgtgggtggattaaagctgaggaaagcctcattttgggggactccgtacttaacctttgaggccctcagagctgcagcctgtggtttttcgaagtcaatcacctcccagggcctcgctcctgccttcagcgacagccatttatcagggagtctttgacccaaggagacctgaaaggtcatctggtccctctcctacccccaggcaggccacacctagaccctcccacacagatccgtcccacccttctgctgccttccaccagggaaggagggtgggcggccctcccaccc

SEQ ID NO: 128212 - DNA, 3392 bp, Homo Sapiens
aaaccagaattcagcttatctgaattattttccaaaggaatgctgtcagggagggactgttctgccagcctaataaagcaacgtagccacgtatagtacccactttctgctctttggagagaacacaggttatcaagttcatctctcttgactactcttatgatagctgatgccacagagcctatgggcaaatgccagacccagggttagacacaaggacctgaagtgacatgacggcgggacaggggaaatgtgactttctaattaggcattttatgttagtcacagtcttgaatgtataaacagcactaagactctcaggtcaggtaccttggtgatcagctactagttcttccagccctcattgaggtaacaagataaagacaaatccacttctttggccaaattcaggctttggctttatgactttcccacagagactggaatgcgtcagcctgagaccactggcctattttctcagctgccctcttgaggtcctttaacactcaaattcccagctccccactgaggtgttgtgatgcttgccttttgacctccccatcccctttagtccctgcttactactttgacattcacatcctcagtgtctcagtcttttttgccgagaaagcacagtagtctgggactgggcatttatcttctctgactgaaaatctctccttggtcttaaggaaaatactaacattgaactcactgacatgatcttagcttctttaatcagactttgtgacttaaaagtttgggggttttctttgaaagtttccagccctattcagaaagcaactcttggctgtgtgcatttttcaactccaagcagcccaggggtaagtaaacaaagtatggatgaaggtcagattttcttgtcagtttctgagaaacctggcagcctgctgttaacaacacaggccagtattgggttttattgaatttggtatgtgaccaaggtcggcctaaaggatggcgcaggtcctgggcaggaaagaatttttcctttatcacataactgtaatatttggttgctcagcataagtgatggaagcaaacactaatttctaataaaattgtgttaaactcaatggtacagagccatgtttacagtgagcaggccttgaccagcttgcggccatgggctgagttcctgtgcttctgtttatcatctgaccttgtgttctagccaggtcgtaagcgcgactgtactgttgccctgcaaccccagctccccctggaggactaaggacaagaataacaagggctggaactgtgatttaatattaattcaagaaaactacctctaacaatcactgcagtggcggaggaaaagaaatcctaagaattggggcaagatgcagcacaattcatctctggctcttggaaatctgagagaagctcaggaagtagcttgacttagtcatcaatccatacctaaagctgctcctcagccaaattcctgcatttgtggtctggatgcttggcagagtcatgctgagggctggcacacccattgctccaggaaacccgactggcttgcctccctcctctcctgggcctagcgaggccagaaatggcaatggtcggtcagtgctaagagccaggccactccgaccctgacactggcctccctctctgcatttggcagaaggtaaagtgaacaagagtccagtccagcacccccgccaactagctgagaggcacagtgaccctaggagatgtccagccagcctccaggctgagagggaaacaggcacatgccctaccaggggggcagctccctggaagggcagcaaagaaagcagtcaagggcgcacactgggtcagaaggggagcctgagactctgggagcagaaatggcaagggtggccaagcgtgcactggtttactgatcaaacctcacgtgacaggccaggaaactcctccaggcctgtggcagctgaacacagttccttggtggagaggtttactggaacatggtgtaggcagggcttatgaggaggccagccttggaggtgtcccacatgggtcttctgaagaaaagttataccacccctccccacaaaaagaaccccacaatcaaattaagagacccactgtggcccatgatggggagagaagagttctgcagcaattgtgggatgagagttgttcttcccggtgaccaagcctgggcacttggggcctcagctggcctaccagtgaaggcctgagggtggtgtcttctcatctttattgctttccagggagaagggaggaatccgaacatcaaagtgggagccatcaggtctttcaaagcggaacgtgccccacatgtgcccactggaagcctgcagcgagacgtggctgctatactggaacgcaggctgctccttggataacactggttccctgcccactacccctcggcctcgcactgtctccaaggtgccagagagactgaatatcctccagtgccgctcccggagctgtaccacatcactgtcaaggttctccaaacggatacagtagcgccaccagtacacgtgggaattctgggcttccctcatgcccatgtagaaggggatgacagtgacacgtatgttctcagttgtttcccgatgaacatcggagagctccagccaggggtgattcttctcttgccaggcccttagcgtctcccgagccacaaaaggaggtgcttttgtctggtcatacagaagaaatctttcaaagagttcatgttggatgggaacctgatcagtggaggtgtaggggaggatgtcttcatggctgacatagtccaagcctgggatggcatagagggcccgactgtcatcatggttagccaagaaggtcacagcttctgtctgagatctctgagatatatgtgggcagtcacgagcatcaatcagcacctgatagtaagtgtgagttttgcctttcacctccttggagccatggccagcagggttctctgctttttctggagctgcagaagccacatcccggtcatacagtctggcctgccagggaaacaggacgacacctcggtagccaaaaatgctatgaaggaaaagctgcccggtctcatattttccattctgttttggcacctcaaacacaccaactgtctccaacactttgccctctggtcggtttcgggacgagaggtgcctccgcgtcgtcgtggtcgacgctggcgagaaggctccagctccggccgccgcacagagcggccttggccaccgggccccagtcagcgaccgggaccaccagcggctgcccacggccagggcccgccgggctgtacaggctgccatgtcccgcccgagcgcccgcccggctgctgacacagagcccgacccgcggccgggcggcgttccgccccagatcccgggaat

SEQ ID NO: 128213 - DNA, 529 bp, Homo Sapiens
  misc_feature (468)..(468): n is a, c, g, or t
tgtgggtatgaatggtccccaggaccaaactgcggtcccacaactgcatgtggttgtaggattatctcaaggtgcaggtgtttgacatccataaaccctcctccccaccactctgaaaggctgggctgtagacgaagacagggctcagaagccctggcctgtgggcccccaccacccggccactatgtctctgaggggccggagtctggccccatctgtggaacgggctggcgctctgggtgctgctttccaggttcccgctgctcacaggaggccgaggcccggctgtgaccctggagatgaggttttatcttacaacatcctctacagcaagtgggcacggggcctcgggctgaggaaggagccacagggcctgtcgcttgtagggtgccaggggtggggaacccaccggccagggcagcctcagaccttgatctcacaggcagcgaggggcctccgtgctggcanagatcagggctgagcggtgttggctgaaataaataccaccccggagaagatgggcacatgc

SEQ ID NO: 128214 - DNA, 707 bp, Homo Sapiens
  misc_feature (201)..(248): n is a, c, g, or t
  misc_feature (313)..(366): n is a, c, g, or t
gaacagaggtggctggatgccctggagaagggggagctggatgacaatggagacctcaagaaggagatcaatgagcggctgcttactgctcgacagcgagctctgctccagaaggcgcggagtcaaccttcccctatgctgccgctgcctgtagctgagggctgcccacctcccgccctcacagaggagatgctgctgaannnnnnnnnnnnnnnnnnnnnnnnnnnnnnnnnnnnnnnnnnnnnnnnagaagagcacaagaaccagactatcgagcgcctcaccaagactgcggcgaccagtgggcggggannnnnnnnnnnnnnnnnnnnnnnnnnnnnnnnnnnnnnnnnnnnnnnnnnnnnncccatggtgcgctactgcagcggagcacagggttccaccctttccttcccacctggcgtccccgcccccacggcagtgtgtcagcggccatccccctcaggccctccgccgcgctgctctgtccccggctgtccccatccgcgccgctacgcttgctcccgcacaggccaggcactctgtagtcttcagtgctaccgcatcaacctgcagatgcggctgggggggcccgagggtcctggatccccccttttggctacgtaaggcccttaacccggactctgcgccccgtcccatgcccgctcttgagtatcttccccaccctattaaattacatccggtgc

SEQ ID NO: 128215 - DNA, 1029 bp, Homo Sapiens
  misc_feature (359)..(408): n is a, c, g, or t
  misc_feature (464)..(511): n is a, c, g, or t
  misc_feature (746)..(747): n is a, c, g, or t
  misc_feature (754)..(755): n is a, c, g, or t
  misc_feature (823)..(823): n is a, c, g, or t
  misc_feature (834)..(834): n is a, c, g, or t
  misc_feature (842)..(843): n is a, c, g, or t
  misc_feature (847)..(847): n is a, c, g, or t
  misc_feature (851)..(851): n is a, c, g, or t
  misc_feature (854)..(854): n is a, c, g, or t
  misc_feature (856)..(856): n is a, c, g, or t
  misc_feature (890)..(890): n is a, c, g, or t
  misc_feature (928)..(928): n is a, c, g, or t
  misc_feature (969)..(969): n is a, c, g, or t
  misc_feature (971)..(971): n is a, c, g, or t
ttttgcaccggatgtaatttaatagggtggggaagatactcaagagcgggcatgggacggggcgcagagtccgggttaagggccttacgtagccaaaaggggggatccaggaccctcgggcccccccagccgcatctgcaggttgatgcggtagcactgaagactacagagtgcctggcctgtgcgggagcaagcgtagcggcgcggatggggacagccggggacagagcagcgcggcggcgggcctgagggggatggccgctgagacactgccgtgggggcggggacgccaggtgggaaggaaagggtggaaccctgtgctccgctgcagtagcgcaccatgggggccggagccgcannnnnnnnnnnnnnnnnnnnnnnnnnnnnnnnnnnnnnnnnnnnnnnnnnactggtcgccgcagtcttggtgaggcgctcgatagtctggttcttgtgctcttctnnnnnnnnnnnnnnnnnnnnnnnnnnnnnnnnnnnnnnnnnnnnnnnnttcagcagcatctcctctgtgagggcgggaggtgggcagccctcagctacaggcagcggcagcataggggaaggttgactccgcgccttctggagcagagctcgctgtcgagcagtaagcagccgctcattgatctccttcttgaggtctccattgtcatccagctccccttctccagggcatccagccacctctgttcctcctcttcctcctgacccccctaccctcctgatanngtccganntggagagggagagagatactgtcttcatccagcaggcacggtactgctcaaggggactccttccatangtccctctcantatcacanncatnaggngananggtgagcgaggccctctgggatacagtgaggtangacactctggtcccaggactgtccccagctgatttganttgactgagctggcagggacgtgctggcgggtctctctgangnggtctctggtctctgggctctggttttctggaccatgcatggacgcagtcatcaggtt

SEQ ID NO: 128216 - DNA, 1245 bp, Homo Sapiens
  misc_feature (63)..(82): n is a, c, g, or t
  misc_feature (425)..(478): n is a, c, g, or t
ggccagtgccatgctaaaattaccctcactaaagggaataagcttgcggccgcctgctcaggnnnnnnnnnnnnnnnnnnnngcaccggatgtaatttaatagggtggggaagatactcaagagcgggcatgggacggggcgcagagtccgggttaagggccttacgtagccaaaaggggggatccaggaccctcgggcccccccagccgcatctgcaggttgatgcggtagcactgaagactacagagtgcctggcctttgcgggagcaagcgtagcggcgcggatggggacagccggggacagagcagcgcggcggcgggcctgagggggatggccgctgagacattgttcgtgggggcggggacgccaggtgggaaggaaagggtggaaccctgtgctccgctgcagtagcgcaccatgggnnnnnnnnnnnnnnnnnnnnnnnnnnnnnnnnnnnnnnnnnnnnnnnnnnnnnntccccgcccactggtcgccgcagtcttggtgaggcgctcgatagtctggttcttgtggctcttctgcccgccgcgccgcctggagccgccgcttccgcgcccgctcctcgcgcttcagcagcatctcctctgtgagggcgggaggtgggcagccctcagctacaggcagcggcagcataggggaaggttgactccgcgccttctggagcagagctcgctgtcgagcagtaagcagccgctcattgatctccttcttgaggtctccattgtcatccagctcccccttctccagggcatccagccacctctgttcctcctcttcctcctgaccccctaaccctcctgataggtcccgaagtggagagggagagagattactgtcttcatccagccaggcacggtactgctcaagggggactccttccataggttcctcttcattatccacaaccataaggggagagggtgagcgaggcccctctgggatcacagtgaaggtaggaacactcttggtccccaggacttgtcccccaagcttgattttgagtttgagctgaggcttggcaggggacggctgcgtgggcccggcgtcttcttcctgatggtgtttcttcattgtgtttcttcttgtgcttcttgtgttttttcttgtgcactccatggccatgggcacccgccaggctcaactccagggcttctcccggctcaggggcctccatagccccagaggtgctcccacgccgccacagcttactcatgaggtcctg

SEQ ID NO: 128217 - DNA, 1187 bp, Homo Sapiens
  misc_feature (139)..(187): n is a, c, g, or t
  misc_feature (677)..(726): n is a, c, g, or t
  misc_feature (798)..(798): n is a, c, g, or t
  misc_feature (906)..(906): n is a, c, g, or t
tggaccggtccggaattcccgggatcaggacctcatgagtaagctgtggcggcgtgggagcacctctggggctatggaggcccctgagccgggagaagccctggagttgagcctggcgggtgcccatggccatggagtnnnnnnnnnnnnnnnnnnnnnnnnnnnnnnnnnnnnnnnnnnnnnnnnncatcaggaagaagacgccgggcccacgcagccgtcccctgccaagcctcagctcaaactcaaaatcaagcttgggggacaagtcctggggaccaagagtgttcctaccttcactgtgatcccagaggggcctcgctcaccctctccccttatggttgtggataatgaagaggaacctatggaaggagtcccccttgagcagtaccgtgcctggctggatgaagacagtaatctctctccctctccacttcgggacctatcaggagggttagggggtcaggaggaagaggaggaacagaggtggctggatgccctggagaagggggagctggatgacaatggagacctcaagaaggagatcaatgagcggctgcttactgctcgacagcgagctctgctccagaaggcgcggagtcaaccttcccctatgctgccgctgcctgtagctgagggctgcccacctcccgccctcacagaggagatgctgctgnnnnnnnnnnnnnnnnnnnnnnnnnnnnnnnnnnnnnnnnnnnnnnnnnnagaagagcacaagaaacagactatcgagcgcctcaccaagactgcggcgaccagtgggcggggaggccgggnggggcgctcgcggcgagcggcggggaaggtcgggctgcggcttcggcccccatggtgcgctactgcaggggagcacagggttcccccctttctttgccgagtggggtngccgcccccacggcagtgtttcagcggccatccccctcaggcccgccgccgcgctgctctgtccccggctgtccccatccgcgccgctacgcttgttcccgcacaggccaggcactctgtagttttcagtgctaccgcatcaacctgcagatgcggctgggggggcccgagggtcctggatccccccttttggctacgtaaggcccttaacccggactttgcgccccgtcccatgcccgctcttgagtatcttccccaccctattaaattacatccggtgc

SEQ ID NO: 128218 - DNA, 441 bp, Homo Sapiens
taaattttcctgtcactgtttatttagtgcatacacatataaaaactttaataaaagctgtatacatttactcattcgaacattgagagttgagatcaaactggatgataaccagaggtttacttacttcacctctaaagaggttctgtgacctaagcctcatagaaaaagctggctgatagcagagtgaaataaatcacaaaacccttcaaaacctattgattctagcagaattgctagatctctagcagaagtataaataacatggacactttcaagtttgtacaatgaattcagaaatctttgcaatgaaatggcaaatactttgcagatggaataactaaagcaaattcacatctaactcaaggtgaaaacaaaatgcagcattctttaagttcctaaaaaaatttacttcttaactctatggaaatccatgagtca

SEQ ID NO: 128219 - DNA, 929 bp, Homo Sapiens
  misc_feature (406)..(493): n is a, c, g, or t
  misc_feature (603)..(643): n is a, c, g, or t
  misc_feature (720)..(720): n is a, c, g, or t
  misc_feature (772)..(772): n is a, c, g, or t
  misc_feature (917)..(917): n is a, c, g, or t
gtgtaacttggaactttatttttaaagtattctgaaaattttccaagaattttaaccaccacctacttcccttaaacacacacacatttttatcttacaattataacccctattgcagtacaaaacaagaaacaataattctaagttagccagccaatcaaactacttcagtaaatgatcatactacagcctggaatcactcaaacaaaaaattcttctagttctctttaaagatatttatcgtttattttttcatgaaaccaaagtaattgattcaacaatactaacagttctagcatgcaacaaaccatctactatctaatgtttaatcttcttaacatgtatattttcattcctataaagtttccataagaagcttgcaatgacaataaaggtaaataagtannnnnnnnnnnnnnnnnnnnnnnnnnnnnnnnnnnnnnnnnnnnnnnnnnnnnnnnnnnnnnnnnnnnnnnnnnnnnnnnnnnnnnnnttacataaaatgacatatttgtatataaccaacgcacatccgcctgtatactttatccctagactaatacctaatgcaatgtaaatgctatttaaataactgttatactnnnnnnnnnnnnnnnnnnnnnnnnnnnnnnnnnnnnnnnnngatctgcaattggtttaatccacagatgcagagtacatggatacagagggccaactgttttgttacaggtacttcanatagcactacagtacatctttgacaaaatttttacaatattccacctttcantatgaaacagcttaaaaaggcatgggtcaaaaataaagtatagtagtatcacttacgcaaataaagtctcagaatcatacaagcacaacactgttaggactctccctgtttaggctgggaaaacattataaaaacattttcttcnaataaattacat

SEQ ID NO: 128220 - DNA, 845 bp, Homo Sapiens
  misc_feature (181)..(268): n is a, c, g, or t
  misc_feature (378)..(418): n is a, c, g, or t
ctttaaagatatttatcgtttattttttcatgaaaccaaagtaattgattcaacaatactaacagttctagcatgcaacaaaccatctactatctaatgtttaatcttcttaacatgtatattttcattcctataaagtttccataagaagcttgcaatgacaataaaggtaaataagtannnnnnnnnnnnnnnnnnnnnnnnnnnnnnnnnnnnnnnnnnnnnnnnnnnnnnnnnnnnnnnnnnnnnnnnnnnnnnnnnnnnnnnnttacataaaatgacatatttgtatataaccaacgcacatccgcctgtatactttatccctagactaatacctaatgcaatgtaaatgctatttaaataactgttatactnnnnnnnnnnnnnnnnnnnnnnnnnnnnnnnnnnnnnnnnngatctgcaattggtttaatccacagatgcagagtacatggatacagagggccaactgttttgttacaggtacttcaaatagcactacagtacatctttgacaaaatttttacaatattccacctttcaatatgaaacagcttaaaaaggcatgggtcaaaaataaagtatagtagtatcacttacgcaaataaagtctcagaatcatacaagcacaacactgttaggactctccctgtttaggctgggaaaaacattatacaaaacattttcttcaaataaaattacataaattgcttagaaaaattgccaaaatcaataatttcaaacatattaaggagaaaaccttgaacattattcggaaaatataaactagttattccttgcttttaacagatgagttcttgacaagttttgtgtaaagcaaa

SEQ ID NO: 128221 - DNA, 602 bp, Homo Sapiens
gcaatgtagttttgttggaggccattttttattgcagacttgaagagctattactagaaaaatgcatgacagttaaggtaagtttgcatgacacaaaaaaggtaactaaatacaaattctgtttggattccgagccccaagtagagagctcacgtttcaaacgtgaatacgaatccagattagatctgcgctcctacctacattgcttatgatgtacttaattacgtgtcctaaccatgttagtctagaaagactttactggggatcctgttacctaaaacagcttcacatggcttaaaatatggggaccaatgtcttttccaatctaagtcccatttataataaagtccatgttccatttttaaaggacaatcctttcggtttaaaaccaggcacgattacccaaacaactcacaacggtaaagcactgtgaatcttctctgttctgcaatcccaacttggtttctgctcagaaaccctccctctttccaatcggtaattaaataacaaaaggaaaaaacttaagatgcttcaaccccgtttcgtgacactttgaaaaaagaacacctcttgcaaacaccggctctcgacccccgccgctg

SEQ ID NO: 128222 - DNA, 580 bp, Homo Sapiens
  misc_feature (75)..(75): n is a, c, g, or t
acagatctgtatcagcatcattttaatggctatctgatgctaatttcgagctaatatgtactataattcaccctnggagcagcctctggcagagtgactatagcataggcatttctgtaggaccatgctgtttcctgttgactgcgctcctcacttccctggtgcttctgattcttctaggtgttaacggtttgaggatgctggggattctccatgatgcagttgtgttcctcattgagcagctgtctggtgccaagcactcttttccatctttgtcctaggtctcccatccatggccggggtcttttctctagcaggtgcgaggcgggttgtaaatggccacgcccgggagccgcaagaaccacggtgatccgcgcggccgcaggtgggctggggctcgggcaaggccgccctggcctccgctgacccccgccccgcccgtctcgtcggtcccgcaggcgccctggaggatctggaacgcgcggtggagctgagcggcggccggggccgcgccgcccgccagagctttgtgcagcgcggactcctggcgcggctgcagggccgagacgacgacgcccgc

SEQ ID NO: 128223 - DNA, 785 bp, Homo Sapiens
ttttgttgtttttacgagagacccctaatgaccgggattaatttggggtcccaagtcatccaccttgaagtccagaaggcgtttgaagtttcgccggggatcttcatgatgagcaggtacagggctcatcatggcaggactgtgatagagtcagaaactgactctgttgacctgggcgcccccactgcaggtacgggaaagttccccctgttccagcagggcaatgcaattacctcggccacttcgtaagggtgcacagaccgtacaaaatctgtcaaagctggggccaaggaactttgggttttaatcatcatcagcacctcactgtcttcctcgatcttccctttccactcatagatggatgtaatctgagggatgaggttgacgcaggctgctaggcgcttctccaccacggccctggcgatctccttggcgaccttctcgttggggcaagtaacaaaggctgcagagaccgagcccggaacgtagccagagccggaatccgaggccggcgagggctgggtcggagggcttccagaggccatggtcagcaagactcggggtagcaacaaaaggcgggaggccacaggcagcagcgccggcatccaaacaaaagacaggagcagagaggccactccgccgagcaggaccgcgggagcccgccccccactcatgcggcctacgctggtacaggagagttgatctcaaaggccacacgtcacacggagaaacaaccccaggaagagcggcctcttcttacctgggtggcagccacgtgattcccc

SEQ ID NO: 128224 - DNA, 880 bp, Homo Sapiens
  misc_feature (801)..(835): n is a, c, g, or t
cagagagacctcaagacgggattttattggggggcccagtcatcacctggaagtcagaaggcgttgaagtatcgcggggatcttcatgatgagcaggaacagggctcatcatggcaggactgtgatagagtcagaaactgactctgtgacctggcgcacccactgcaggtacggaaagttcccctgttccacaggcaatgcaattacctcggccacttcgtaagggtgcacagaacgaacaaaatctgtcaaagctgggaccaaggaactttgggttttaatcatcatcagcacctcactgtcttcctcgatcttccctttccactcatagatggatgtaatctgagggatgaggttgacgcaggctgctaggcgcttctccaccacggccctggcgatctccttggcgaccttctcgttggggcaagtaacaaaggctgcagagaccgagcccggaacgtagccagagccggaatccgaggccggcgagggctgggtcggagggcttccagaggccatggtcagcaagactcggggtagcaacaaaaggcgggaggccacaggcagcagcgccggcatccaaacaaaagacaggagcagagaggccactccgccgagcaggaccgcgggagcccgccccccactcatgcggcctacgctggtacaggagagttgatctcaaaggccacacgtcacacggagaaacaaccccaggaagagcggcctcttcttacctgggtggcagccacccccggccgtaatggccgaattcccgggcatatgtccggtaccgtcgactgnnnnnnnnnnnnnnnnnnnnnnnnnnnnnnnnnnncggccgcttcctcgctcactacttcgctgcgctcggtcgttcggc

SEQ ID NO: 128225 - DNA, 1003 bp, Homo Sapiens
tttcagagagacccaaagacgggatttattgggggcccagtcatcacctggaagtcagaaggcgttgaagtatcgcggggatcttcatgatgagcaggaacagggctcatcatggcaggactgtgatagagtcagaaactgactctgtgacctggcgcacccactgcaggtacggaaagttcccctgttccacaggcaatgcaattacctcggccacttcgtaagggtgcacagaacgaacaaaatctgtcaaagctgggaccaaggaactttgggttttaatcatcatcagcacctcactgtcttcctcgatcttccctttccactcatagatggatgtaatctgagggatgaggttgacgcaggctgctaggcgcttctccaccacggccctggcgatctccttggcgaccttctcgttggggcaagtaacaaaggctgcagagaccgagcccggaacgtagccagagccggaatccgaggccggcgagggctgggtcggagggcttccagaggccatggtcagcaagactcggggtagcaacaaaaggcgggaggccacaggcagcagcgccggcatccaaacaaaagacaggagcagagaggcctgagagcaggaggcgaattcgatctctcctcacaaacagcccaggaaattacacccggggaagccttcgcttagatcctcaggctctgccctccctctgatgcacccccgaagaatgcccctgaaggtgagagagaaacttggaaaataaagcaaaagctcatttcactcacacctcagggggccaacctctgggatttagggtgcgggtagcggtcgaggcttcgaggaccggaaggggcggggcggggccggtcactcaccactccgccgagcaggaccgcgggagcccgccccccactcatgcggcctacgctggtacaggagagttgatctcaaaggccacacgtcacacggagaaacaaccccaggaagagcggcctcttcttacctggg

SEQ ID NO: 128226 - DNA, 689 bp, Homo Sapiens
  misc_feature (383)..(383): n is a, c, g, or t
gacccaaagacgggatttattggggcccagtcatcacctggaagtcagaaggcgttgaagtatcgcggggatcttcatgatgagcaaggaacagggctcatcatggcaggactgtgatagagtcagaaactgactctgtgacctggcgcacccactgcaggtacggaaagttcccctgttccacaggcaatgcaattacctcggccacttcgtaagggtgcacagaacgaacaaaatctgtcaaagctgggaccaaggaactttgggttttaatcatcatcagcacctcactgtcttcctcgatcttccctttccactcatagatggatgtaatcttgagggatgaggttgacgcaggctgctaggcgcttctccaccacggnccctggcgatctccttggcgaccttctcgttggggcaagtaacaaaggctgcagagaccgagcccggaacgtagccagagccggaatccgaggccggcgagggctgggtcggagggcttccagaggccatggtcagcaagactcggggtagcaacaaaaggcgggaggccacaggcagcagcgccggcatccaaacaaaagacaggagcagagaggcctgggtggcagccacgtgattagaaaacagcgcgcaccatgtgaccctcgtgccgattcaacaccccagcctcgtacctagcctatgtt

SEQ ID NO: 128227 - DNA, 800 bp, Homo Sapiens
  misc_feature (90)..(95): n is a, c, g, or t
  misc_feature (97)..(98): n is a, c, g, or t
  misc_feature (101)..(106): n is a, c, g, or t
  misc_feature (108)..(112): n is a, c, g, or t
  misc_feature (114)..(120): n is a, c, g, or t
  misc_feature (124)..(124): n is a, c, g, or t
aactgggggcccgcgccgcccccccaaaaaggaaatggtttttagaaaaagtttccttggaaggggcgcgagggcggcccgaccaagggnnnnnntnnttnnnnnntnnnnntnnnnnnngggnggaccccaaagaccgggattttattggggggcccaggtcatcaccctggaagtcagaagggcgttgaagtatcgcggggatcttcatgatgagcaggaacaggggctcatcatggcaggactgtgatagagtcagaaactgactctgtgacctggcgcacccactgcaggtacggaaagttcccctgttccacaggcaatgcaattacctcggccacttcgtaagggtgcacagaacgaacaaaatctgtcaaagctgggaccaaggaactttgggttttaatcatcatcagcacctcactgtcttcctcgatcttccctttccactcatagatggatgtaatctgagggatgaggttgacgcaggctgctaggcgcttctccaccacggccctggcgatctccttggcgaccttctcgttggggcaagtaacaaaggctgcagagaccgagcccggaacgtagccagagccggaatccgaggccggcgagggctgggtcggagggcttccagaggccatggtcagcaagactcggggtagcaacaaaaggcgggaggccacaggcagcagcgccggcatccaaacaaaagacaggagcagagaggcacctcagggggccaacctctgggatttagggtgcgggtagcggtcgaggcttcgaggaccggaaggccc

SEQ ID NO: 128228 - DNA, 695 bp, Homo Sapiens
  misc_feature (242)..(267): n is a, c, g, or t
atttccatacatatttattatatacacactgcctatagattctgtttaaataatctctaagaaaaaaatcaaacttttctgagcaggtgattaagctgaaaacaaccaattaaaaccaccactttttaagtgacctttggtcacacatgtcaaaatgtttccacaccctttccaccctcaaacaagagacaaactgtttttgataaactctagtatttattaaattataaattttgtaatcnnnnnnnnnnnnnnnnnnnnnnnnnncctcaaactataagactagacagcaaagcctatgggaacaccatgaagtgtgttacaaacattctgaaacataagttactggctgttttcatttccatttcaataactttactataaaatagttgttattcatctattttgaaatcccaaattcacatctattcatacattaaattatgtttcctgttcataatatcaaacatctcacaggtgccaaattttagtaatggtcttatgccaatccatgcagaaaaataagacacaatgcaggagtcagatgaggaccattaatgcacagataatacaaacacactggccaaaagaactacagaagtttttaaaaagtataaagtaaacagacctcaagaaaactgggttattactaaacagctctcaactattaacacccaagttccttacattaaata

SEQ ID NO: 128229 - DNA, 3322 bp, Homo Sapiens
ttttttcagccaaccacagccacaaaggtttaatcagtttttatctcacaaggcagtaacaatgaggggcacagtggtggtcagggtggtggccccagtggccaactaggggagtatggcctcctccacagagccgctgcctggggaagatgctgtcagggcacgaccacagcccagcacttgccccactcaataaaaggctgtagtgctctggtgggctgtgcaccgtgcgcagatcctcctggtgggcactggaggccagggagaaaaagagcctccccgcagcccagatccagcatgcaaggtgctagatttctcggcaattccacagggaaggacagtagcctgttccctgccctctctcttgggcaatgggaggcaggttgccagccttggggaggggcaaggctgtgaggggctcacccccacctcccagtgccaggcctgctgtccaagcagagcacaaatgggttcctccgggacccctggtcctttttccagacgaggctgtggcactggtggaaagggagggagaatggagcctggcccttgtgtgtacaacaggaaatgcacctcaggacacagcaggagtcagcgggagggcacagacctgccccctgccaggcagaaaatgggcctcctcaagcacaaaagtgaccaagtacaattttcagttgctaaaacaagaaaaggcttcagctagtttcatttccatgtgtagttattttctcttttgaataagcaaaaccaagctaagctgtgtcagccaacttcatcctgaccaaggcctctgagacagcagacacaagcacccactccagtgtccccctcagtcatcccgggttccaagcacccacacaatgcccattggatggctacaaagggaaagccccatctgggtccatgacccatataccaggtgcagagccaggacagagggcagggggcagggggctgtgaaggcgatgcctagaggatccgacccctcccggcatggccaggaggcagggctgggcaggatgactggggctacatggggcttggcccttccctgtggctggcagcccagatgctgcagtaacactcattcccaggcttcactatggccactggcccagaccccagaatccagaggctcaacactaaagacatcggctaatacatagcaagatgtgtgcaaagttctgggggagcccagcaggtggctccacctgactcccactctgggtggggcaggtgctgaagctgcagggctggccacgaccctttgtactgtcaactctggcttcctttacaagaaactaggagcacttctagcacattccttccttaccctgctctctcaaaaccaccctgacccccatggcccctcctggaaacatggtactcagaaaagcagggaccaccagcggctggcaaagtgtttggggaaaaaaggaggtgcaaagtcagcaagaaaacaaatgcccgctggtcccgccaaggcagggtgtgcctagtcccgggggatgttggggggcgggatctgcaggtcggagggctccacaccccagatctcccgtgcatactccgtgatggtccggtcactggagaacttgcccgagcaggcgatcagcccagattctgcagtaacactcattcccaggctttcactaggccggctggcccagtgtttggggaaatccggaggttcaaagtcagctagaagacaaatgccggctaatacatagccaagatggtgtgcaaagttctgggggatgcccagcaggtggctccacctgactccccactctgggtggggcaggtgctgaagctgcagggctggccacgaccctttgtactgtcaactctggcttcctttacaagaaactaggagcacttctagcacattccttccttaccctgctctctcaaaacccaccctgacccccatggcccctcctggaaacatggtactcagaaaagcagggaccaccagtggctggcaaagtgtttggggaaaaaaggaggtgcaaagtcagcaagaaaacaaatgcccgctggtcccgccaaggcagggtgtgcctagtcccgggggatgttggggggcgggatctgcaggtcggagggctccacaccccagatctcccgtgcatactccgtgatggtccggtcactggagaacttgcccgagcaggcgatgttcctgatgaccttcttggtccactccttggggttccggtacagctggtccacctgtgcctggcactgcatgtaggcttcatagtctgcaaacaccttgaacctgtcatggtgcatcagcatgttcacgatgtccttgaagcagtctggctccttgggagaaaaaaagccactgctgatctggtccacggcctgcttcagctcgggcaggtggtcgtagtactccctggcattgtaccctttccggtccaaggcctcgacatcctccacccgcaggccgaagatgaagaggttctcggccccggcctcctcggccatctccacgttggcgccgtccatggtgccgatggtgagggccccgttgagcatgaacttcatgttgcctgtgcctgaggcctcggtgcctgcagtggagatctgctgcgacagatcagcggccgggatcactttctcagccaaggacacacggtagttctccaggaagatcactttcaacctgtcacccacaactgggtcatgattgacgacgtcgccgatggaggtgaccaacttgatgatcagcttggccatgtggtaaccgggcgctgccttgcccccaatcataacagtcctgggcacaaaagccttggccgggtctctcttgattcgattgtacagggtgacgacgtgcaggcagttgagcagctgccgcttgtactcgtggatcctcttcacatgcacatcgaacatggaggaggggttgatcttcaccttgtactccttctccaggaaggccgagaacttgagcttgttctcctgtttgaccttggccacgtccctgatgaacacctcgtcactgaccagcggcagcagcttcttcagctggctcaggtcagtcaggaactcctccccaattttctccacgatggtatcggccagccccgggttgcacagcagcagccaccggcggggggtgatgccattggtcttattctggaacttctctggctccagttcataaaaatccttaaagaccgactgtttcacgatctccgagtggatcctcgccacaccattgacagcatgggacccaatcacacacaggtgggccatgttgatccgcttgcagtccccctcctcgatcacagacatcctgcgcagg

SEQ ID NO: 128230 - DNA, 735 bp, Homo Sapiens
  misc_feature (703)..(703): n is a, c, g, or t
tttcagtaagcacaggtagtcagtgtggtttatttgacttccttcctgctgggcacaggaagctctcacagggctagggtttaagctggcttccacagagggcagtcacgtgcacgtgggcctgaggccagccccaggtcaggtcccgatccccggtcctcaggtgcttccactcaggcttgaggcaggagtctgacggcagcagctcccgagagcccttgccgatgcctggctccatccagagccagcccagcccagggaggctgcatggggccagcgctaggtggctgactcagcagcagccatggggctggagagccttcctgatgccagtggccagggcttgtggcgtggggctctctgcagtgcagcttacaggaaggccctgggcggccagcgcgcgagccgtagtggggccgatggctgcaaacttaatttgatcgatattgtcaccagataactcctgaatgtgcttgagactgtatgtgaggccagagggactaaaaaatgtgatgctggctggaaccccctgctgggaatagtagctgttcaggttcccttggattcctgggtgtgcaactgtctgatacacagttatgctttccatggcaatccctgggcacaatcaaaagcaggaaagactttaccgcactgggcacacaatggggcctccaccacttcacagcacagttggtgaaactcncaatacagcaccacctcctggaacgagctgct

SEQ ID NO: 128231 - DNA, 1209 bp, Homo Sapiens
  misc_feature (158)..(158): n is a, c, g, or t
gagcagaatccgacggcacagctcccgagaccctgccgatgcctggctccatcccagagccagccccagccccagggaggctgcatggggccagcgctaaggtggctgactcagcaagcagccatggggctggagagcctttcctgatgccaagtggnccagggcttgtggcgtggggctctctgcagtgcagcttacaggaaggccctgggcggccagcgcgcgagccgtagtggggccgatggctgcaaacttaatttgatcgatattgtcaccagataactcctgaatgtgcttgagactgtatgtgaggccagagggactaaaaaatgtgatgctggctggaaccccctgctgggaatagtagctgttcaggttcccttggattcctgggtgtgcaactgtctgatacacagttatgctttccatggcaatccctttgtccttgagcgcttttggcaggatttctcttttgaggttttccacagggaaatagaagaggcagtgctgaggactccctggaacaaatatattctgcaagcttttctgcatttccacaggtttctccttctgtatccaggccaattttactcactagagaagcagtagcatttccaaccacatacactgacttggcattccatttttctttcagagacctttcccagacttcagttttattgttttgctccaaacataactctgctgcttccactgctctggggctggtaaaaatgagtcccccgtaatcttcaggatgagaaagcttctcagagaaactgggaagagacaaaaactcaaacgataaaacagggatcaaagtggcttcaagtccatataatcctaattgcctgatatacggatcctggccacagtcatcttccttcgcatccttcagtaaaagaaccttcattattgcctggcagtccttatagggcactcgcgggaccgtgcccagcacccggcctggcacacagcgggcacccggtcggggggcggtgtcgcgcagtcccagcgaaaaggctgcaggagcaatgacaacaggggcggaagccccctccccacgcagcccgaggggccgcggcggccacccgcgccgggccccaggaccccgcacctcagactgggtcgcgtgggtgctgcgcgcagctaggcgctcgcgcatgcctcgtgccgaattcaacacccaggcctcgtacctagccctat

SEQ ID NO: 128232 - DNA, 1107 bp, Homo Sapiens
  misc_feature (118)..(118): n is a, c, g, or t
  misc_feature (201)..(201): n is a, c, g, or t
tcccgagagcattgccgaatgcttggctccatccagagcatgccagccccaggtaggctgcatggggccagcgctaggtggctgactcagcagcagccatggggctggagagccttcntgatgccagtggccagggcttgtggcgtggggctctctgcagtgcagcttacaggaaggccctgggcggccagcgcgcgagcngtagtggggccgatggctgcaaacttaatttgatcgatattgtcaccagataactcctgaatgtgcttgagactgtatttgaggccaggggggactaaaaaatgtgatgctggctggaaaccccctgctgggaatagtagctgttcaggttcccttggattcctgggtgtgcaactgtctgatacacagttatgctttccatggcaatccctttgtccttgagcgcttttggcaggatttctcttttgaggtttccacagggaaatagaagaggcagtgctgaggactccctggaacaaatatattctgcaagcttttctgcatttccacaggtttctccttctgtatccaggccaattttactcactagagaagcagtagcatttccaaccacatacactgacttggcattccatttttctttcagagacctttcccagacttcagttttattgttttgctccaaacataactctgctgcttccactgctctggggctggtaaaaatgagtcccccgtaatcttcaggatgagaaagcctgatatacggatcctggccacagtcatcttccttcgcatccttcagtaaaagaaccttcattattgcctggcagtccttatagggcactggcgggaccgtgcccagcacccggcctggcacacagcgggcacccggtcggggggcggtgtcgcgcagtcccagcgaaaaggctgcaggagcaatgacaacaggggcggaagccccctccccacgcagcccgaggggccgcggcggccacccgcgccgggccccaggaccccgcacctcagactggggtcgcgtgggtggctgcgcgcagctaggcgctcgcgcatgcgcaccgccacctcgtgccgattcaaccacccaggcctcgtacctagccc

SEQ ID NO: 128233 - DNA, 969 bp, Homo Sapiens
  misc_feature (11)..(11): n is a, c, g, or t
  misc_feature (43)..(43): n is a, c, g, or t
  misc_feature (54)..(54): n is a, c, g, or t
ttgaaggtggnaaatgtattcatgtctgcattacaaccattgncttgagcttanaaagctccctctccagctcttgctgatactctgaactagcatcaacaggtcctccagatgtctgtcgcttagatttgtattctctaatcttgtccacaaagagtttctgtataggatcaagttccttattaaatgccactgctgtaacacaatgttcctccgcaaatggactgagacggctgaccgaatgacagaggagaacctgaagagcctctgaagaatcatgctgattctcgtgagcctccgttgccttgggcggtcgttttgcgcaccctgccgggagttgtagtcctggacccgaaggtgcctgggaggcgggaggggggttggggcttctcagcgccgattccgcgggaagggccctgggacctcacacttctagtcgcgggagctgcaggtcttccccggagagacgctgcacgtggagccctcgccgctgccgttctcagccggctctggagtgcgggcgggggcgacagggccgattccggagtgggactgatcctttgaaatactccagccatgacaaaaagagaagcagaggagctgatagaaattgagattgatggaacagagaaagcagagtgcacagaagaaagcattgtagaacaaacctacgcgccagctgaatgtgtaagccaggccatagacatcaatgaaccaataggcaatttaaagaaactgctagaaccaagactacagtgttctttggatgctcatgaaatttgtctgcaagatatccagctggatccagaacgaagtttatttgaccaaggagtaaaaacagatggaactgtacagcttagtgtacaggtaatttcttaccaaggaattgaaccaaagttaaacatccttgaaattgttaaacctgcggacactgttgaggttgttattgatccagatgcccaccatgct

SEQ ID NO: 128234 - DNA, 702 bp, Homo Sapiens
gttccctttagggaaaaagccaggccttatggcccccaaggtttcccactttacccttactgggggccccggcgcgccccaaaacggaaatggtcttagaaaagcttttttgagggggccgaaggcgggccgaccattgttttgtgtttcatttcccgtggcttttttccaccatccccaaattaatttatttggactcaggaataaaaagaccatttgccagttatgaaatgcatgtttattgtgaaacttctaactagttgtacaactaatccgtgacaaattaccagattaattgtactttatttcttcaggcctggggtttttcgatgacttcaaatttgggatcttcaaatttgaaggtgggaaatgtattcatgtctgcattaccaaacatttgcttgagcttaaaaagctccctctccagctcttgctgatactctgaactagcatcaacaggtcctccagatgtctgtcgcttagatttgtattctctaatcttgtccacaaagagtttctgtataggatcaagttccttattaaatgccactgctgtaacaccaatgttcctccgcaaatggactgagacggctgaccgaatgacagaggagaacctgaagagcctctgaagaatcatgctgattcttgcactcagtcccgagctgccaaagcctccgccgccaccacctccgctctactccc

SEQ ID NO: 128235 - DNA, 899 bp, Homo Sapiens
  misc_feature (45)..(81): n is a, c, g, or t
  misc_feature (111)..(128): n is a, c, g, or t
  misc_feature (138)..(150): n is a, c, g, or t
  misc_feature (155)..(155): n is a, c, g, or t
  misc_feature (162)..(162): n is a, c, g, or t
  misc_feature (164)..(165): n is a, c, g, or t
  misc_feature (170)..(171): n is a, c, g, or t
  misc_feature (175)..(209): n is a, c, g, or t
  misc_feature (211)..(218): n is a, c, g, or t
  misc_feature (220)..(233): n is a, c, g, or t
  misc_feature (235)..(241): n is a, c, g, or t
  misc_feature (243)..(245): n is a, c, g, or t
cctttttttgtaccgcggggtttttttgggagaaacaattagggnnnnnnnnnnnnnnnnnnnnnnnnnnnnnnnnnnnnnaaagaagaggtgttaaaaaggtattttttnnnnnnnnnnnnnnnnnnaaaaattttnnnnnnnnnnnnnggggnttggggngnngaggnngggnnnnnnnnnnnnnnnnnnnnnnnnnnnnnnnnnnngnnnnnnnngnnnnnnnnnnnnnntnnnnnnngnnnttaaaagaggttttctgggggggccgaggcgcgcggccatttttattttttgtgttttctcgaagggttcccggggcggaggcagaagggtgtgttttcaacatcaccaaataatttatttggactcagaattaaaagaacatttgacagttatgaaatgcatgtttattctgaaacttctaactagttgtacaactaatccgtgacaaattaccagattaattttactttatttcttcaggcctggggtttttcgatgacttcaaatttgggatcttcaaatttgaaggtgggaaatgtattcatgtctgcattaccaaacatttgcttgagcttaaaaagctccctctccagctcttgctgatactctgaactagcatcaacaggtcctccagatgtctgtcgcttagatttgtattctctaatcttgtccacaaagagtttctgtataggatcaagttccttattaaatgccactgctgtaacaccaatgttcctccgcaaatggactgagacggctgaccgaatgacagaggagaacctgaagagcctctgaagaatcatgctgattcttgcactcagtcccgagctgccaaagcctccgccgccaccacctccgctctacttccggccctggctccgcccccacacccc

SEQ ID NO: 128236 - DNA, 1077 bp, Homo Sapiens
  misc_feature (897)..(917): n is a, c, g, or t
ggaccgactcacccactccggaatcggccctgtcgcccccgcccgcactccagagccggctgagaacggagcggcgagggctccacgtgcagcgtctctccgggtaagacctgcagctcccgcgactagaagtgtgaggtcccagggcccttcccgcggaatcggcgctgagaagccccaacccccctcccgcctcccaggcaccttcgggtccaggactacaactcccggcagtgtgcgcaaaacgaccgcccaaggcaacggaggctcacgaggtacaaggaagcacaacgccccaatccgctttgttttacacagtctcactttccctgcacctttatacacttcgataaccctaacgaacaggacgctgactcggaggggagcttgaactaggggaaaggccactcaaagagcgcatgcgtacagagcaaggtttcaaggaggggaaaaagaacgggtcaaattaggcgaacaaaagatggcggaggctgtgccaggggaccccggaagcacttaccctccacttcctcctcctgtttggcttctgtctcacctagacccgtccggtcgcagactgtctccgagacgcttcctgtccgaatcagcatgattcttcatgggctcttcaggctctcctctgtcattcgggcagccgtctcagtccatttgcggaggaacattggggttaccgcgacggcatttcctaagggacttggaccctatacacaacctctttgtggacccagatcacaccacacaccccccatgtcacacgacctcctgaaggacctggttgatgcctagttcacgaacatttagccggaagttgcgcggagggaagctttttcccgcgctcagagcaaaatgcccctggcaatgcgcccacttgtactnnnnnnnnnnnnnnnnnnnnnaaaattctccaaccgacccgtcaccattttcgcccacgtctatttcaacaaaatcctctccacggtcccgcggcggtacctatcgctcgtaccacccttaccgcccctgtggtacacgtcctggccgccccggacctttatacttcggcatccaaagtac

SEQ ID NO: 128237 - DNA, 765 bp, Homo Sapiens
  misc_feature (728)..(728): n is a, c, g, or t
ttttttgagttgtgagccctttattagcaactaaaatagaaggtatctgttgtacaacatgggtagtaattgactataactggagatttattatattctaatacagatcatttataaatgcaatttctttattaaaaagcttccacctttttgtttgtttgtgtacaatttgcaaaactattctgaaagcggaatatatgtgcacaagtctgcaaagagtgcaaatttaggatatggtaaatgctttacaagttactttcaaaaaactgtctgccacaactgagcctttacattgtcatcttttttgatcaaaatattttgatgccagccttccttccactgccctaaactataaagcattttttaatgagttgaaattaaggaaggactacacctactagaaaaaaagagaagaaagttctattagtttgaggtttcagaatccccccaaaccaggaccagtatcgtggtaaaggctaggctgggaccccggacagagtatgagaatgtgcaggtggcatccctgaggattcagagcttcagtggaccgtgagtgctccagctgcataactcactgaactgtcttgccagtttctacactggctcgactgggcataattcaaaaacgaaaaactcatattcattccattcttctggagctctgtgatagcatttaatacaccccaatgggatgtcttccacatatagtattatggtatttcttcaangtattgctaaaagatacagggtctaatttgttctata

SEQ ID NO: 128238 - DNA, 571 bp, Homo Sapiens
ttgagcccaagaataaagactacagttctcagactccttcgcaaataaattttgtgactaaactgtagtcaacagtaagtgtcatgtagcagctcctgggaatctcctttaaacagagagcttgtttatacctattgtcatctctgttcttctgtgccccttcttccattttgctgcctggaaagcagatgtgatggctggaattccagtcaccattttggaccatgaggacaacaccctagagatgtggagtggctaaaagaagcctgtgttcctgagaacttagaggaccaggacctctattccaggcttggacacctacatttagactattatatgaggaagcaatcaacttctcacttgtttcaaccactttcacttgcagtcaaacctgaattgtaagtgaaattgctttcctgatagcaaacctgttggattttctccagaatccctgggccacttttagcagtcagattcgtctaatcctcctttaaagatggtggcagtgaaactggtacatgggacctgactgggctttgtttgcaactttctgataatttataattatttc

SEQ ID NO: 128239 - DNA, 2323 bp, Homo Sapiens
  misc_feature (53)..(96): n is a, c, g, or t
gcggtgaactacagaatttattaaataagaaagctatcaattggaacaggagnnnnnnnnnnnnnnnnnnnnnnnnnnnnnnnnnnnnnnnnnnnngcatttagtgctcatcgccgtccctctgaggggggccgtcagaaaggcaactgggacctgacagacccgggcacatacttgaaattcctgaattctaacctgcattgtacaaaatgccacttgaaacgtccaccagaacccccagccaaagaggcacatctggacagcttcacagcacggaacgtgtgaccttggtccccgtgggtcccggaggaggacagcagcagccacgcggtggcccctgcgcactcaggccatgactgcagggaccacccactggggccacaagagtgacccgggagccagagggagccctgagcatcggcggaaggcacaggtccctgcccggggtggccatctcagaggcacatttagtgtttgttctacttatgaaatcaaggacaaccaattgtacttatcttacaactgatgttctgggatgggactggaaaacattgattccagaaccactctttttcttaaaatcactggcttttatgacaatgtcttccaagagctcattagaatctataagatcgcaggaatttcgccaagaagggctgcatagaaaccacagagacaactcggccagggctgctcccattgtggtggccaagaactggctgagggcacgacactggactcttgcgatcaacactttactctgggtgaagactgcatatttaaggacacaactgcacatttagatcgagcggtggtgacctcagggtatacacggagcttcatgctgagaacacccaggggtcctcaagagtcttcctcctcgtctttaacttcagaaattctgtctatagatttaaggatttcggcaacaagattcagtgtctcagctccggaaaccagttgcttgatggaagcctgtgcactgttcatgaccacccggaggttctgcagggccacgtcggcgttctgcttcaccacggtcaggctggcaccctggccgcaccgcagggcttcattctctcgctggaagttggagacctgcgcctggagcaaactgatttcctgttttagtttcacgacgtggttttctgcctttacagcccgtttggtcatcagctccaggttctgctccacctgctgaaccaccgactccaggtcgtggtagtcgctttcctccttgatcatttttgcttctaacttccgctcaagcgtcctcaccatttctgtttgagcttcagagaagctctgaacctcattcagctttcttctcagcttagaattttcatctttcagtgcgtcgtaacttatctgcagcgtccgcaggtgcctgtctcccagagactctccatgaaccgcaaagtctgcgctaggactccctgccggagaggccggagacacgcgagaatcagtgtcactcaacgcccacgagggcagagactcaggccctgccagctccgacggggtggagaaaaaggaaaggtatgtgctgcagggcgacgtgccggcagggaccctctcggggtgagtctgctcgatggcggacggcaggtaggccccactccatccggtgtcctcatcctcctcctcatccaggaggtcaccagcccctgtcggatcctcgaaaaatggctgctgatactccaggccatacccgccggtttgggagggtggggagttgtggtcaagtcccagggaatgcctcgaggcttcctttgcataaattctgctggccggatcctcgttcgagaggccgaggttcttggtcttcagaaactctctaaaagagaatggatttgcctcttccagatcttcaaatctgtcatctgtgtctcccacggaagccagcaccgggctgggcacatagcacataaaggccggccgaatgccgaagaagggggagtccaggtccctgccatgggggcgctcacaatttagctgggggagacaagaccggcgctcatagaacgctggagctggaagcaacgacaacagcgactttactgcgtgccggggcggccgccgcccacctggaccgctggactcggcccctgccccgctcaccgtcgggaatggcgaggctccgggctcgggacagcggggtggcgcccgggcggcgctggtagcccgacatcgccgccggcccggcggggcacgacctgcctagcccggcagcggcggctccatggccccggctccgcccgtgccctcgtgccgaattcgccacccaggcctcgctaccttagaccgtagtagtactgctcct

SEQ ID NO: 128240 - DNA, 1551 bp, Homo Sapiens
  misc_feature (110)..(305): n is a, c, g, or t
  misc_feature (584)..(632): n is a, c, g, or t
  misc_feature (708)..(741): n is a, c, g, or t
  misc_feature (743)..(759): n is a, c, g, or t
  misc_feature (985)..(985): n is a, c, g, or t
tcgttcccgcagcgaacgacgagccagcgatcatgagcgaggagcggagagcgccatacgcaaaccgctttcccgcgcgttgcgattcattatgcagctgcacgacagtnnnnnnnnnnnnnnnnnnnnnnnnnnnnnnnnnnnnnnnnnnnnnnnnnnnnnnnnnnnnnnnnnnnnnnnnnnnnnnnnnnnnnnnnnnnnnnnnnnnnnnnnnnnnnnnnnnnnnnnnnnnnnnnnnnnnnnnnnnnnnnnnnnnnnnnnnnnnnnnnnnnnnnnnnnnnnnnnnnnnnnnnnnnnnnnnnnnnaagaattcggcacgagtttttttcagtagggaagaaacaatcttatttattaatggcctgcatatttagaaagggtttaaaaacacatacatttcctgggacacaaacttacttaccaaatgtatgtccttacaaaataacttcacagatcaatagtcttgaacttacacaaagacatatatatgacatacattaggttaatatacatttcaaatgtttttgcagcaactttctaccagaaagtacactaatgtgagaatgtatgttctctttaacccnnnnnnnnnnnnnnnnnnnnnnnnnnnnnnnnnnnnnnnnnnnnnnnnnggctgagactacatattctagtattaataaagtcaaacaaacaatagttataaaacttggtgctgctgaatatttnnnnnnnnnnnnnnnnnnnnnnnnnnnnnnnnnncnnnnnnnnnnnnnnnnnggataagtcttttgaaatttgaaatgctaccactgtcacaagttcactcattgatttaatgttgttctgggtatcttaacatttcaattcccaaatacctgtgcttttaaaatttttatcctgaattctgcattgagtttcctcacatatttacaattaaacatctagcctctagaacctcccttacacaaaagacaaaacatctttgttaaataaattcacgcanaagtattaaaagggttttcaagaaatagttctgacatgttcattatatttatactgaaaaatagtacatgtacttttcttcaggattaataaatgccatgtgccagttttacagtcactgccacattagcacattttcctcttacacatttgcaaggtagtgacaaccaaagggcataatgtctggaataattccagtaaatccataatgtccagtaagattcataaaattgaatggttgtttccagtcccatctgaatcgaaatggaaattcatgcccaggtacttgtattgtccccagaaatactcagtctggtaagtcaccctcttggtcttctgaaacagagatgcagaaagcagggcattcttactgagaccaatggcctcttctctctgtcacctctcatacatctgttttggttataatcctattttgtcttgtagcttctcgtctcattcttttaggaggaactggacaatctgtcgtctcaacctttggtgaatgacgcaatgagtcattacacttacgtatgggagtcatacctagtttttcctctattagtttga

SEQ ID NO: 128241 - DNA, 763 bp, Homo Sapiens
  misc_feature (42)..(58): n is a, c, g, or t
acctcactaaagggaataagcttgcggccgcggctgtaggcnnnnnnnnnnnnnnnnngtcattcacttttctgcatactttatttgttacaaacatacaattttttttaaatatagactgtaaaactccatttgcaaaagtctattgtaaggagtgcacaccagcaggaaggattcttacattttttctctgtgagtttttctgtcagttttgctagttagtggtaaatacgggacccgccatttttacagaccagtctgaagcttctgactgtattcacattgctcttttgaagcagccctgctcctctcaaaattgatcagaatctgagcttcaacctacaggcagtgagatcaacagcccgtctggactctgcttttgaacggttttcaggaagtgtgatttctgaatgggtactgcacttcacagatttgtttgaattgcccatgcagctctatgtttgttaaagtgcattcttctttaaaaaataagaggaataatctttactctttaaccaaggtacttaaaaaaatgaactttttggtctctcagcagatattcccaaattgatcctatcactacaaattttagtgttttatttacagacatttatagggttacaggtggaggggaccttataaaattaaaggtgcagcttctcttgaagcagaaatcagttctacaaattcatacacaggaatacacacttggtttacaatgcataagcatgtgggtatttacacagagattgaagacatcccc

SEQ ID NO: 128242 - DNA, 2118 bp, Homo Sapiens
  misc_feature (109)..(149): n is a, c, g, or t
  misc_feature (1405)..(1470): n is a, c, g, or t
  misc_feature (1551)..(1612): n is a, c, g, or t
aatcttaaaattgcctttgcactgaagtattttcatagctgtttatatctcttttattcatttatttaacatactgtctaattttaaaaataggtttttaaagctttcnnnnnnnnnnnnnnnnnnnnnnnnnnnnnnnnnnnnnnnnntctggtgagagttttgactgaatgttccaatctctgatgaatgcgaattttcagatttgattttattctctacacacacctcttcttttcttggtatttctggtggcagtgattagttgaacagcacatttaaggcacgataatttgctacactttttctttacaatttgttgcaatttcatctgctttctatgtttcattgttaattgccatccttcagccttaaaaatagaagattctcacgtgaaggtttagtaagttgggtcccagctctgcctgtgtggagatagtcaccatgtacctctgacaacaagttttagtgtgaaagtcactaaacttttacacactcccaaacgtctttttaaaaattgcttgggaaattattaaatgaatgtgcctgatgatttgaaatagacaaggggcacgagataaaaaagaaaaggatgagaagatcctcagtgaatgacgttgcagggtcttcatgcaattttccacctcgcagtagttagtatttacttgccttaaactaactttgaagcaagtaatgtcaactttgagcactttgttgagttttgaaaaatcttatttgttgctgcacaggttaataaattatcaatttgtaattcagcatgttggtcagagacacggtcactgattcacacccagtccctgccacagaccgtctcagacacgcacagtgggcctgctgcatgattcacacccagtccctgccacagaccgtctcagacacgcacagtgggcctgctgcatgattcacacccagtccctgccaccagaccgtctcagacacgcacagtggggcctgctgcatgcgtgttaacctgggcttttggctccacgctcactcatagccatgtccacatgggggcttgcacacaggatcactcacatatgtacatgtacccaccacaaacgtgcaagctcctgcacacatgcatgcacacaaacgtgtacacaagtgtgagctcctacacgcatacacacacacacgtgtacatgcaccaaagcatgtgtgacctacagacatgcagaacatgcacgtgtacacataccacagacacgcgtgtgcatgctcctacacaatacatatgcacatatcatgaacagcgtaagttcctacacacggacgtgtgatacacacatgcatgtacaggtaagcacacatgtacaagctcctacaggcttgctctcacacacgtgtatgcacagcagagagacgtatgagcttttactgnnnnnnnnnnnnnnnnnnnnnnnnnnnnnnnnnnnnnnnnnnnnnnnnnnnnnnnnnnnnnnnnnnattcatgtgtacaccacaaatgagttcccagacgtgtaaacacacgtgcacacatcgtacacatgtgagctcccacacgtnnnnnnnnnnnnnnnnnnnnnnnnnnnnnnnnnnnnnnnnnnnnnnnnnnnnnnnnnnnnnntgtacaccacaaacgagctcccagacatgtaaacacacgtctcccacacgtgagctcccacacatgtacacatgcacatgtacgcaccacaaacacatgcacactgtcctggtgtcctgcactgcatcctgcctccttgctgaggggcccctgtgagaggcctctggatgggcatgggaagatgggctccctggcccccagcccatgcctccctgggatgaagagtccccctcctggcagaatgtctgggctttgcagagcaggccccgggggtgaagtcgcagcttcacttacaccagctgctctgtgagcaaggcttggtgccctggacaaggcccttcccctttagggaggtccagccttgcaagctgaaacctcccctcggctcagccctataccaggcggccacagcaggactggccacacccacgccgcacctcatccgtgcacgcgtcggagcatggccagccttccgccacgagccagctgggaagggccgcggccgc

SEQ ID NO: 128243 - DNA, 1098 bp, Homo Sapiens
tttttttaaaatccccttggggggcccccggagattttaagaaaaaaatacctttccgggcccccttttccccccttccaatggatttgaacccagggaagggggagttccagatttctaggttttttcttgaaggaatccaaggttccagaattagtacctttaaagggcatccaaaattccatatgctcaaaagttaaattttatttaccctgttcactggcccaaacttaaaatccttatatcacataaagatttcatggaccgttccctctccctgccaaaaatacgtattaggaacaaattaagagtaagagttgggttttaaactgcactttatttgttactgtaacattcttttttaactgatcaaccataagcatgcaaaaagttctctgaaactgcttccactgcctgttgtatagaaatgggtaaattataaaggtgattcaatttggagctctttccttttttatagcacttctaagctgtgtgcgcgacacacaccacagaggtaggaaggaccacctttaataaattatcttcttaatcgcagagaatttctgaagataaaactgacaaaatgctaaaccaaggctttgatgagtcccaaaggaccacagatccatcggctcctatttgaagaattcatcccctgtagtgttctagcctttgtagggcactggattacaagatccaccagggctctgaacaactgcgctaagaagccttctaaccactctcatttgccgattctttggaccacccagtcctgctggcagagagggcagcgattgttctgtttcacccacagggacatgcagcagttgtggaaggaatgattacattctccccagaccacaacacagtcctcttgtttgttttcagcttgacatctaagacaggcatccatcacctggaccctgcagatggcgcacgtatcgcactccacgtcccagctccacatggccaccgcgttccacttcttgagggagaacatcttgtcgcctcccgactttgagcctgagctcccggagtgagaggccagggcgcaggtttcctctccgtcttccacgtcggccatggcggcgccgcgga

SEQ ID NO: 128244 - DNA, 1836 bp, Homo Sapiens
  misc_feature (511)..(514): n is a, c, g, or t
  misc_feature (1572)..(1681): n is a, c, g, or t
  misc_feature (1683)..(1683): n is a, c, g, or t
  misc_feature (1687)..(1687): n is a, c, g, or t
  misc_feature (1689)..(1691): n is a, c, g, or t
  misc_feature (1693)..(1693): n is a, c, g, or t
  misc_feature (1699)..(1699): n is a, c, g, or t
  misc_feature (1705)..(1752): n is a, c, g, or t
aagtgcaaactgtgggatgaagcttcaacttgtgcacaaaagttttgtgcatttaatgatacccgggaagaaggtaaggccttactccggcaaatcctacagcttcggaaccaaggcgagactcctaccaccgaggtgcctgctccctttttcctacctgcttcactctctgctaacaatacccccacacgcagagtttctccactcaacttgtcttctgtcacgccatagttggctactctcaagccagcacattgttagacccatcttaaattaaggcttacctccatgtaaagaacagcacgtctgttccaaggacctcagctcttcttgtttctacagatggcaacagctccatagggacagcttgtataattaccttcagaggccaactgacagaatcctggcaggaacagacattatcttgccagttagaagtacttctgtagctcacttgatgtcgaaagcagtggttttcgctctctggccagttcttttttgaagtgcaaannnnctgtgggctcccagaagcttccctttttgtagcactttttagcacaggcaatgctacaggaacaaagtttcaatgctgctgagagtgaaagaaaggaggaaagtctgccactctaccctgagctggcagtagggcactgagtaccctaggaagaagtcagagcaatggatacaaatgaccttgctcttggatttgctgagcatgatccctattctgatgtcagagattaggtttaaatggaatagagctatccatttgttcttactctctagggagacaatcttccaaaacagttttgggggggtcttctaaagctttcaaattggaagtaactttattcaactagagttgaataaaagaagggcaaaaataatctcacagagcttggaactgctgatagcccttactgagggcaaaagatggctatattgttagctatactcctaccaaagcaagcaaggagataggattatagataatttcacggacatttggaaataacattggtgattatacagacaagaataaactcacttcaagctggtctgttttaataaattttcaacgtaattgtctatttttttccctcccatctgcaacagaatacatttttttcagcctttatctagatgaggtaaagggaatcattcttatggtgctcttggagagtttcaggcctgtgcatgtgtgtacagcaggaggtaatatgctataatgtctgctgtaatatatttgcacagtagatgctatggatcattctgagctcagggtccagactttattcttattcccagaattttgtgttacgtttttacctcctaacatatgacacttcatcttatattaaggaaggtttagaatatctaatacgacttgaattcatttgttactaagccttctcaggcaagctgtatactagttactggtctccactgccatgccttttcaaggttcccatggtccagagtgatgtttgattcttaatttttctgtcccttttataatttgttttaatgattttgctacatttggaattcaataaaaaatgtgaacaatannnnnnnnnnnnnnnnnnnnnnnnnnnnnnnnnnnnnnnnnnnnnnnnnnnnnnnnnnnnnnnnnnnnnnnnnnnnnnnnnnnnnnnnnnnnnnnnnnnnnnnnnnnnnnanaacnannncnaaaaanaaaggnnnnnnnnnnnnnnnnnnnnnnnnnnnnnnnnnnnnnnnnnnnnnnnncctagtagccaattccccccggagaattggcaccctatcaaaaacagacccggggtaacatccctggggtttgagatcttccgc

SEQ ID NO: 128245 - DNA, 511 bp, Homo Sapiens
gggtaaatgatgtctgtaatgggttgagttactgagatgacaatctcctgtgccatttggtttgaatgtacttgataggctgcttcaaatcagtcacttcaatgcattttgtgtaaacccagttgtccttttttattcctctttagacataaatgtgctaactattcctttctatacacaatttattttctaagattaaaaataataattgctaggtttggtggcacatgcgtacagccccagctacttaggaggctgaagcaggaggatccctagagcccaggagttctgggctgtggtacactatgccagttgggtgtaagtttggcatcaatatggtgatgtccctgaagcaggaaaccacaaacttgcatcaggacgggtgaacccagcccaggttggaaatggagcaggccaaaactcccaggctgatcagtaatgggatcttgcctatgaatagccagtgcactgcagccaggacaacagagtgagaacctgtttttaaaaaaaa

SEQ ID NO: 128246 - DNA, 665 bp, Homo Sapiens
tttgggagaacacacaccaagttttattgggagaagggagtatttacaggagcaggtaaaagagagggaagtcacacagggtgggagagggggcggggagactgtgggtacaaggcagacagggaacacggtgacccctgcacccaccccaaccccaggaagggcaggggagcagcgagggcccaggaagaccggggccggggaaggacagcaacagggtctgagtccctgggcaggggggctcaggggcttgtaaacattgaccactctcagaaggggatgggggtgggagagggctccccctatacttcctcacagggttaaggcctctccaggctcatgggccccctaagtccaaagtctctttagctggggagaagagacaggaagagtgtcccccttcccctgcattggctgcggcaggggtgggggggttacattcagtcacaacaggagtctcccccacacctggcaagagggaaggggagctgggggccagcagcagcaaacactccccccggcccgtcaccccttattgctttagagagaatattgtcttttcagggacgctaacactgtgggaaccagggagaggcaggtgggggccccccaccccgaggccagcttgatcccccaacactgacctagttgccacttttggtgca

SEQ ID NO: 128247 - DNA, 1271 bp, Homo Sapiens
  misc_feature (1210)..(1210): n is a, c, g, or t
tttcttatttggttgtttttattgttctgtggcctcctcccacctgctaacatttaggcctcagcacatccggtggctacaactaggaatcacacattagtaagcaagttcatttccatttcctgaaggatgaatttatcttgggaacatttgagatgggtacatacctcccagagccagacttgggaggaatctgtcaaaaatatcaagatgctgagccttgtcttagaaaggggcttcagaaatgctttcatgggcggcggcttcttcccggggtaaaggtctcgtggagctgcagggccttgctcccaggatggtaaaacagggacccagagctgttaagtggctcccacaaagtcacccaaccaggctgggccaaactgggtttgatggccaggtgtcctgtctctaagcatctctggggtcttgctctgctgagctgaatgtgaactgtgagggtcaaactacttttcccaactgtttccaaggcttagcagaaagtagaggaatgttcttgcaacctagctgcttgccgttgctttactgaaagtgcttctgttgtccccttccaggttctgccacattctttgagtcaccttctggatattctttgtaaagtttgtgtcgtaggattcgcccatctgcttgccggcgctgcttgacgcactgcccacggttggggataccttcggccacgtcacctgggctcaggatgtggcactcatagcccgagggacagagcaggggttcggccccatcctccgtggtgctgcacgcctctgcttgtaacacctcctcagggccatccaggagccagccattgccaccaagccatcgaggtttcggctgcaccagccagtctaagactggcgggggcggcacagcttctaggcaggcgtaggcgcatccgttgtagcagcagcgccggtgccgcgggcactcggagtccgcctgacagcgcgcggcctggcaggcgccggggggcagcgtccgcggaggcggcgggcagcggtctgctcggggctgccgggggccgccgggcgcgcccgcctcctcggcacgggatttctcggccagcctcgcaggcaatgcccgtttccagatattcttggcagagccggcgtggaggagaagtagcaagaggcacagagcccggatgatctgcctcctgcagctgcccggccccacgccggttaaaggcatttcctcncctgggcagcgaccttccagacgcacacagaagaggggcccccctcgctgcgtgggcctgt

SEQ ID NO: 128248 - DNA, 2343 bp, Homo Sapiens
  misc_feature (1089)..(1089): n is a, c, g, or t
tggtttcttcaaaattttattaacaaaacccagggagaggaggcaaggatgagtggactccgcagccccaccaggcactgaacatgtcgacggggacagtccctctgataaaggcagatgggcggtcaaccggtggatgggcacagggagaaccggagaaacagatgagtggaggaacggacacacgggcaccgggcggctcccccatctggaatgcagggtgtaaggggtccgggccaggaggctcagcggtcggcactggagcgcaggtcggtagtgaggggatcgtgctggatcgtctggtgcagcatcagggccagcaatcccgcgcggtttgtcatggctgtgcgcacattgcgctcctgctcaaacagctcgtccagcttgtaccacacacgcacgcgctccaagtccacttccgcacgccgcagcttctcccagcagtaatggcgattgcactggcgcttgggcaggcggcagaagtcacccgtgagctcaaagacatcacgtacaagggggcacccgcatacctcgtcagctggcactttggggtcccgtgagtgctcggggcacagcacctggagccgcttacagtatgttttgctctgaggattatacacatcacagaagagtcgtgtggccccttcaatgcgtgtggggtacatggacccaaaggacgtctggctctcatacttggcgtagcagcgctccatgtggcgcaaggcaacacgtgggttgatggggtgcccaaggaaacacagaagatctgcaggtctgtgtcattcactgtcaccctcgttgctctcctcatcctcgcgcacagcctgctgcttggcacgtagaatgatggcctcaagctcatggaatcggcgttccatttcctgaaggcgggtgcgggcactctgctgctctcggcgaatgcgttcgagcagcttcttgccgtgctcttcagcaatgcaagggctctgctgccactgctggatgcgctgggggaggatctcgtagatgcggttggctgccagcttcatgccacagtcatctgagcaatacttggagctgggctgggcggggcgcacacagccgggcccncaggcactggggcagtgacgcagggtccttggcatcagccctctctgggtgtttccatttatccttgtgcttctgcttctgccgatgccgcttgtatcgctcctccttcttcttctcagacttcttctcccgacgcttcacatgcttcactttcactgccctcttccgcagcgcggggtccaggaatggggactcttctgtgtcgctcatccagggcaggccatggtcatcaaaggcccctgcacagaagtcctgatacaggtcaggatccagaggtaggtcctcatctgagagtggctcaggtgtggctgtagcctcaggaggctccttgactgttgatgacgccactgccccctcatcttcacggatgcgccctaacttctgtgatggctgtggctgctgttgggtgggcagtggccggcggggccttggcagggactctgagggcgtcactggtgagagcgaggaagggaagtacttgtacgattcccgggcccgcagctggcactggcgcagccggcacttctgccggatcttgttggggcccccgaacttcttcatgtcccgacagaaatcacagtgaccacagtcctcagtgcgccgacatgcctcacactcaccacacatgcgggctgaccgtttgatctgctgctgctgctgctggtgatgctggctgggtgtggccaccaagggctgcggagaggatttgtggggcgaagcagagccccgagcaagcatggccccaacccctgtccctgaccctgcccggcgctgcaggtctggatcagggacaggcctcttgcgccctccaccctcatcccggggctcactgctgtcccgctcattgccatcccgctcccgtgacttcttgtgccgatagcgaatctctagcttggggtctttctctctgcactcccgacagtaccactcccggatggccttggccatcttctcagtgatccggatgcagtccccatggaaccactcattgcagttgtcacacccgatcatgaagcagttgatgtccggtttgcggcagatgcagtagatgggcgcattctccccattctcggacttgctgtcctccccggcatctggaggctctgggtctgaaccatctccctccatatctccgctcccggcgcactccctcacgacccccgccagcgacccgcgaacctgcacagaccactcggcgcctcgtgccgaattcgccacccaggcctcgctacctaagaccggtatagtactgcc

SEQ ID NO: 128249 - DNA, 1074 bp, Homo Sapiens
  misc_feature (784)..(823): n is a, c, g, or t
tttttaacgtcatcaaaatatttattaaaaccaaagcaggagggaacagagctgttaggaagcaaatcaaagtgcagattggagggtggggcagagcagtggggaggcaggcgcttcagacactgcaggagggaccacagggtctgggctgggggaggccttcaccacccctcctgcccacatcagtgaaggtcccccactcacctctcccatctcatatccatcctggggggcagctggggccctgaactggccccctggagagggcccaccccaccatctgaccacccatggctgtcagtcagtctgtctccctccctcactttcccaataaataaatcacccaggcctcagttccttcagtatggggcagaagaacagctcagggacccctgcccttgctcaagggtagagggagttggggtatcaaccccacacccctcctcccctttgctgattccccaggctcaccaaagaggcctcgataaataaataacgctccattaaagcttcaatcagaaaaaacctttaagacagaagtgctctcaccgtcctacacgcccagccagccaaagcctccccacctggcctggtcagagcaccagattctgggagcaggcactgccctgggccttgtgggacccccagagcaaaagggccgaaagtgcagttagagcccccccacgcgcacacatggactcatgcacacacatgtggacacactggggcgtgtctgcagtgcacacacagaggtgtatgttcaccttcattccccggtacatgnnnnnnnnnnnnnnnnnnnnnnnnnnnnnnnnnnnnnnnngtgtgggtgtaggctgcatgcacatacacaccacacagactccttcccttcctggcttgctcagcctccctagcggtagccagaccccagagctagaagcttctggagacagaggagaggggtatccacttaaatgtttccaaacaggctgggaggacggccagggacagggggctccagggctgcagagaacaaggtgagcatctctgcctcgtgccgaattcgaccacccagcctcgcacctagcccta

SEQ ID NO: 128250 - DNA, 975 bp, Homo Sapiens
  misc_feature (108)..(152): n is a, c, g, or t
  misc_feature (479)..(524): n is a, c, g, or t
gttacaaaggcgtttagtttattctcatcagtatcactgatattctcatggttcacatttgccaacgccgctcctctccttacagtagttaaatgtgcaatctcactnnnnnnnnnnnnnnnnnnnnnnnnnnnnnnnnnnnnnnnnnnnnncgttggcacttcacgtggacagggtgggcagcctgtcctgcgtgaaagaggtgtgggttgagtgggcggccagggaaggggagttggcaggggagggccccacagtcttttttctctggtggttggtgattctccattcagattccttcctggctgcccagggtgggggaaccatgcagctcagggcaggggaggaagagaaggaaaaagcagcaggccgcccaggggtaggggtggagggtgaatggcagggcaaggggggtacaggggtggctcctggggtaaggcacaaccctgtctttggctctcctggtgaggagtttcctnnnnnnnnnnnnnnnnnnnnnnnnnnnnnnnnnnnnnnnnnnnnnnggacccacacacagtcctgggagccagggggcacctcctggggtccctgaaacaagtgggctctgccacccaagccaatgccacaggggctcgaggagggacacccgaggaaaaggcagagaggggcaggcaggggcctacccaggacaagggggtgggggtgagaagaccccaggcccaggagctggcccccccaccccaactaaggcctggaagtgggggagcaccttcctttcaggggtctggcactcatgactgacccccgcaacaagcagatgttaagagggacccccagtgggccggcggggctgctggtcccatcggggggatggtctccaaatcagattacaagggtccagtaggggctggcccccaccccatctcctaaaatccccctgcccctggagagacccctgggcctcgtgccgaattcgccacccaggcctcgcta

SEQ ID NO: 128251 - DNA, 748 bp, Homo Sapiens
tttttggagttgcatacagttttttttaatccaaagaagtaagcctcctaagtattgcttagacaggtttatcagaattaagtaggcacaacactcatactttcagaaaagcatttccagccaggggagtaacgtggcactcaccagcatgatgtctgttttgccaacttgctgaagaacgagtaacctgaaatgaaggagcgagaatcccaccctcagccccccaacagcttcctcagcttctttttcttctgagtcacccctgaaacagtcgctgcatctaagaccagcctcgggctaaacccagctggcctgaaggctcaactcacatcaaacggagctgggagtcgcttttgcgtgtgtccgcagtttgaagtgtcctctccgaaggtgaagtgggggaagcaggtgcgctccgggatgaagtgcagggaggcaaactctggctgggttcctgtaaacatccatcgcagctgcaaataatcagaagccaaggccaggccatcgatttgacactgcaggcagatgaggtcttgggatgcctcttgcgttcccccttctgtgggagcaggtgccttcccaacctcagcactcagtcccaatctctcttccactctcctgggttcaaacaggaacctcatctgttggcacgaagcttttgaggggagcaggtaggcctacggaggcaggggagggtctcctccgtgggcctcgtgccgattcaacacccagcctcgtacctagccga

SEQ ID NO: 128252 - DNA, 1139 bp, Homo Sapiens
gaaggttgaagcagtattatttttattatccaaggcaagaccagtaaaacacaaagccccttaaacattatttctgcagaattccaagaacacaggagaaactagtaaattgtataggattaataaagaatatggattgacagaagaacaatcataaaacattcatattggcattcttggcaggcacagctctactccatggccatgtggattatcagaggtctcgagttccactctctgacaggaatcaggctagattgcatggtcaaaggccactgagttgataaccatgaaattcttcaggttgtacttgtagggtgtataattcccgtgccaggccacaacattgaacggggagacatccttttaggaagacccaaggaatcaattggtccaaggtcaggtaactcaaagtgggcaccataggcgcttcccagatgtagccccttggtctccttcaaagacatctatggtgaaccgcattcctctctgaatgacgcagatctcattgggctgtacaagcatcttgccaaactcggtgtaaatgagaaggttccctttctgcggaacaatcaagaagtccccatctgaattgtaaaagcatctgttctccatggaggtattgcagaggaaaatgtggatagcaagcccattgttagactttatgtctccagctccacacaaggtatgcaggccactcacaaagtctactttcttctgagatgcttttggaatctcaaatggtttccatctaagctggttaggatcaggatcaacttcatcccagttgtgagtgacatggccttcgtcaatggattcaaagggcttgtgagaaactgaaggtagaatcctatacagccagcttctcttattggtgctccgtggacaagtgaaagccgatcctgagagctgctcagcatagagattgtaggggcagacctgaggattattctgtccttctggcagggaacctgggcagcgaggatcctctgaagaacactcattcccaaatccagaaatgtactttaactcagccattttctctctcctctatgtgtggtgacttcaggaaacccaggcccagaggatataaagccacaatgcttctttctccttcaaaccactctttggatattccc

SEQ ID NO: 128253 - DNA, 756 bp, Homo Sapiens
  misc_feature (101)..(154): n is a, c, g, or t
ttttcaggtgctcaaacttttattttcttacaaaatgttatagaaatgaacccaaactaaacagatatgtacatgtatatatgtacaaaattttacttctnnnnnnnnnnnnnnnnnnnnnnnnnnnnnnnnnnnnnnnnnnnnnnnnnnnnnnccaatactatgaaattgattttcttaaagtaatagtaatcttaaattgctggttgtagttggttttccaggcttatttatatgtttgattgtggttggatatataaaggagtttctttcatttcagaatgcctccagtctcattttattatatcaaagagtccagaattttttttcccttcacaaatccttcaacatcaggacaaggcatgttaagttacaaatcacctttggtcatcatcttcttcttgagtcacaggtctgaaaggcaatgtagtttgtcctctttcaggatcagacattcggagaattcttatcagtttactggatggaagtgaactcatgctttgaggtgtgagcaagataaactgtctaaaacgctgggaatctgccatcttcagtatcaagtccatggcaattctcctattaaccatatccatgtagacatcaaattcatccaggcatctgaaaggagattctgcgatggaccacagggaaagaataaaacacactgtggagaaagaacgttcacctccagacaaggctctcatgtcattgaaagcagctttatttccttctccaggctgaaccttgaagagaatg

SEQ ID NO: 128254 - DNA, 595 bp, Homo Sapiens
ttttaaaatttttattttcagtacattaaatttactcataaaaacattctaaaaatgtacaatttgtcctttttaacaaagtataataaaacataaaaaccccaaaaacagaatacttgacatttacaattcaaaatcaaattagcggaatattaaatatttacaaaactatatcttttaaaaatatttataaagttacatgcaattttgtagaattgacaaaagaatggctcaaaaatgggagaattttccttcattcctaaaaagaaaatatgtccaatagaagctgtgaaggtatcgagtacacaaggtgtccagtttcagtaccaaagccttctctttttgtgcacgtaagactcacacatgtgatgagggcttgttacaacgcacgtgaggccgcggcggatggccactgcccccttccttggtgaacagtggagcaatgttaacctttggcctcaaccagcacagtatatggttttctagaatattgcgagtgttgagtgttgattaaagatgctttcattcagacccttgggacttttcaacagattcgcctcttcacaacccatgggtttcacgtgcacctgactca

SEQ ID NO: 128255 - DNA, 1099 bp, Homo Sapiens
ttttttttctggttttaaactttattttccatgtacagtttcagattatacaaaacatagaaaatggactattttaaaggtacattaagtagaaagtttctaactaccctaaagtcacaaaccaagattcaaaatgaacctctaggccttgccctaacatttccccaacaccacaaaattgtccaacttgctctattgtaagtaacctttaaactattagcgagtttagtaacatcccgcgaggcagattttaaactacgatacagtttctatctaggccactgtgtttagtgtgtttacaaacaggcttggagttctaggtttcttcatcatcagtgaacacagagcgtcctagagcgccagcctgttcatgaggggtgtccacaaaagcacgcaaactatagcagagtgtgtgggagtgaataggtctccgatgttcctgtattcaggtatatatatatacacatttacacagaccaacaagtcaagcattctccaaactcatttgaacagagacccaaaataattttaatgcaaataacaaaatgagttagtctgtctccatcacatagcccctcaatgaaagaattacagtactttataaaaatgtcataaaatgcgcaaactacagttccttcaaatacagttgatgctatctttggtcctaatatgtgcttcttggatgtctactaattttgttgttgttattgttcttgaataactggtaataagcaccaagtgagggctgattctatctacaggtaagaagcttggatgttttctccctgattttgtcatttctttccaacttcccaaatgcatgtcatacagcagggaagaggcatctctcatgtctcaaaaaagcttaatggcacagatggatgtgggcactgaatgttgtacagtagtggcaaccagccgggaaaatccataggatcatttcagaccgcattcaacacagatactcatgtagccccgacgtttcttgtgaagggaattgatgtattgcttgagggggtcgatctctggttctaaggtgttttgtttgtttccatcgtgactaccagaaaattatagaaggccagacgcagtggctcat

SEQ ID NO: 128256 - DNA, 262 bp, Homo Sapiens
ggcacgaggggacatggactactcacgcatcatcgagcgcctcctgaagctggcggtgagtgcggacaggtggcgcatgcacaggacaggaggggacagtggcatgtgggggaaggttctagaacttggtgcccacccccacctccctgccaggtccccaatcacctcatctggctcatcttcttctactggctcttccactcctgcctgaatgccgtggctggggacctggctgttaccattctgatgttggagcggccgc

SEQ ID NO: 128257 - DNA, 1991 bp, Homo Sapiens
  misc_feature (1445)..(1445): n is a, c, g, or t
cacaccagaaaggccctgtggactgcccatccctgggccatcctggctggagcccacttcccgcaaacccagggccgacctcttcccaagctgaagctgagcacggtgggtgcaagttgaccatcctgcactgagggccagagtgccgattcccgcacacccagcaggagtagcaccaggagagacgcctgagctgagcttttctaggtaggggagtgtggggaatgggggcgtctgcctggccttgcactccccctaccggccatgcccgccctgctgcagtggagctgctgctccccggcagtcctggacagctgtccacacagctctggcactcgcccttgtgggtgtggccataccccccaccaggccccaggcgcctggcaggctgaagaggtcactggacagcactttattgacaccctcggacccggggcagggtcagcaagactcccagctggcatcagactgtgtctggcctgctgtcgccatccctgaggggtgcaggacagagccccataggggcagagaggcctccctgggaccagaggaggatgctgtgcagccaggcccatccccagcactcgaggcctaggaggagaggtgggctctggcagcgggtgtgaggtggcagtgagaagccaggccctcaggtgcagctcaggcctctgccgctggggcctcatagttgagcacgtagtagtcgtggacgtacatgaggacggctattggctgtccgatgatgagcgacagccacacagctgcgttgccatagttgccctggaaaaagcggcccacgaaccaggccagtgggatctgagccatcatgcccgtgaacgcccagaggcggaacattcgcagagggacgctcaccaggtactcgtggaagaaggccgaggccaggaacacccctgtcctggccatccacttgctgctgccccgtcgaagcatgggcttgtagaagtgtctgatgcaccacttgtgcacagggatgttccagttctgccagaagtaggtgacagactcggagttccaccagtcccggtagaactcccggtctccaaactgcatgagctcagccacggcattcaggcaggagtggaagagccagtagaagaagatgagccagatgaggtgattggggaccgccagcttcaggaggcgctcgatgatgcgtgagtagtccatgtccttgaagggcttcatggagttctggatggtggggaccatccactgctggatcagccccacctggagctgggtgaagaacagcatctcaaggatccgtcgcagcagaaagcgcttccggatgcggggagagcggggaaagttgagctcgtagcacaaggtgggggcgaagaggaagtagtagagatcgcggtaggtcagattgtccgggtagctcacggtgtgcggggcagcagcactgctggccttcttccctngcagaggcagccttggccctggccctgcggcaccatgagttgacgtcgcggtaggagaagagcttgaggaagaggatggtgtgcgccatcagcgccagcagggagcccactggagtgatagactcaaccagtaagaccacagccgctgggaaacacagaatggtggccaggttggccacgtgcagcagcagtcccgcctgctccgtcagggcacccaccgccaggcgcttctcaacctggaatgcagccacagcaaagacattggccgcaataaccaggcatggggcgggccagctatagggatccttcaggaacagagaaaccacctggatggggtccaccaggatgccataacttgatgaggttctccagaaataaccgggcattgctcaagatcagcatcaccacacaccagttcaggatgccacggtagttgctgaagccactgtcagagctgaataaagaatcctgcaggcgatggcacctgccacggggccggaagaaaggagctcacacccagagcccagccctaggtgagcaggaaat

SEQ ID NO: 128258 - DNA, 645 bp, Homo Sapiens
  misc_feature (478)..(496): n is a, c, g, or t
tggattcaaaattttaataataaattgtgccagtagaagcttttcaaaggtaatgatatatcaataaataatagttaaactgagttcctgagaaagaacctaccacatgaaagtatgtcagagcgctgtgagtaacaacatggcacgactataaaatagcgagaatactgacagtcacgacgacaggcacagcagacttgagtatgccactcacacaaatgtaaaccagtacacaggaatctttatttttttagtttaaacactgataaacttctaagtgttgttgcctagatatatactaagtaatggatacattatgctaagaacttcaaggaaaaatatgtggaataatataatgaaaattatgaagcatcagattttttaaaaagcaaaaaagaattgaactttttactcaaatataaatcactttaaataggaatcatactaatttgaaataaggaatattgtgtttatctcnnnnnnnnnnnnnnnnnnnatacacgcacatacatctatacttctaagaaaatacgtatggcttactttttatttcaatgtcattttgaagaatctttgcttttttacaaggttagcggacgcgtggtcgacgatatcccgggatatccggaccggtaccagcctgcc

SEQ ID NO: 128259 - DNA, 1500 bp, Homo Sapiens
cacaattgcaaactcaatctttattgcagctgaaatactattttcgttaagtctcggacacttagacccactgatcctgttactctgcttgtctctggtgtgcagggaatcactttgctggattagaggaaaggtgccgccgtctgtttccatgacttctttaaaaactgccttgaaatgaaattagttcatctgcttgcttccgtgtggcagcctcctggcccgcggctgtgccaggcaccagtcctaagaggcatctatagactagtgcttatgtgggagcccaagcctcggcacagctccataccacctatcctgagctgcctcctgggggaccgtgctcttcagcttctaccagcaaggagggcagatacgggtgcgtgcgtggggcagaagacacacagccttctgagttcagggtctcccagatcttcactgggctctgaccttcttggcctgtggctcctctgtgtgggcccgcttctgctgaggctccccatcctccaggccgcctgccagctccctggacaggagggccgcccgcacctgccgcagctcccgcttctccctgcgctcctccatctcctcgatgtcgccagcaaacagggctttcagtgggggaatcagcttgggcattgttggaaagtctccaaagcagaccttcatgtggtcaaaggcaactcccactttctcgctgaagttggggctgaagagggggaccttggcatagcgctggctgaagtggttcagcataatgaactccgcgttcatccgcatccccacgctgatggcttgggacgttgtgctgtgtgtcttttccactgcttcctcttccaaaccatcttccagggtggcttcatgtatcaggagggtggcatctttccccatccggaccagagcctcgcagggcatggtgtccccggaatagaccactttccagccagaggtgtgcaccagcgcacagccaaacgcatgcttgcagtgccgcaccagacaggtctgaaactcttccaaatcacatgttcgcaacagcgaactgatcaatctttccactgcaggactggagatctcagccccttcctgaaggcatttggcaggaatcatactgatgtggtgcaggacctcctggcactggttgtggtactgctggagccaggctttgagctggttgggggcaaccaccagcaaagggtgaagcggctttcccaaagatgccaaggcgcgttctctctgcagcaagatacttggcaagcccgtgtggtgatctgcgtgcaggtgggacacaaacacagcagccagggtgcccaggaccctgtccacctggtctccgtaatgacggcacagctgcccaaacgtgccctcaccacagtccagtagcagagacgtgtcggggcttatgttgacaagtgtggcactgacatttcgaatcttcatcgggatggcagacctgttcccctcgtgccgatttcaccccaggcctctacctagctaggtttgcca

SEQ ID NO: 128260 - DNA, 354 bp, Homo Sapiens
ccacccccaccccaccccagatgaaagtggaaagaccatggcaatacagaataagtggtcactgcagtgtcttctcccttcaaaagatccaactgctgctgaggtagaaatcgaacgttggcgccccctagtcctcttcggcagactcttgtgaggatgtctcttcagtttcctcctgagcaggcttcttctgaacaacttgttgtggccatttcctaggtctgcctcttggccgtttttctccagtggcttctgctttcttttgagctgctttagagggactcttgtttttgctgcctttgggtcttcccctgggtctcttaggagagggctcaccggttggttcttgctgct

SEQ ID NO: 128261 - DNA, 1074 bp, Homo Sapiens
  misc_feature (324)..(343): n is a, c, g, or t
cggtttcgcgtcttttcttctctgttgctgtctcgtcttcatcgctttgtgctcctgtcctggtgccttccccttgttgccctcatgtgagtcccggccgatctcgcctccggcttttgccatgtccttgggtgtgtttctcctctaactcgggttctgcttgccctttgccctattttgggtgcactattatgtactagttgtacaaaactcaggtggttccgtccgggatcccggatatcgtcgacccacgcgtctctgacgcgttggttttgtgcacattgtttgcatgtgtctgcgaatgtgcatgtcatctgcgtgccnnnnnnnnnnnnnnnnnnnnctaaatgccgtggtgtttaccagcgcatgaatgcccccgtgtccacgtgtatctgcgtgcatgtgcttacacgcgtgttcgtgtgtatctgcatgcatgtctccgtgtatgtgcgcgctcgcccgcccgcaaggctctgtggtgagggcattccgaggcggagtacgtctgtcaggggacctctcccactccactgcagtcccttcccactcacagtgaaccggtgcgctgcctgaggtgcagcctagacgcttcctgcaaagtgttggctcggcacggtagaggcgcaggaaccaaccggtgagccctctcctaagagacccaggggaagacccaaaggcagcaaaaacaagagtccctctaaagcagctcaaaaggaaccaaccggtgagccctctcctaagagacccaggggaagacccaaaggcagcaaaaacaagagtcccctctaaagcagctcaaaagaaagcagaagccactggagaaaacacggccaagaggcagacctaggaaatggtctggaagctagcaaaagcttttgcagagaactgaaactgtgtcacagagcaccagcagtgtatcttgttatcatctttggccttcagttttattaatgcttgtttgatgtgttagccctagctaatacaaaagaaggaacttagggtttgtgtgtttagcagtataaggttaaataatgttgtctataaattaaggggggtttcatttaaacc

SEQ ID NO: 128262 - DNA, 1892 bp, Homo Sapiens
cactggtttgtggtactgctggagccagggctttgagctggtttgggggcaaccaccagcaaaagggtgaagcggcttcccaaaggatgccaaggcgcgttctctctgcagcaagatacttggcaagcccggtgtggtgatctgcgtgcaggtgggacacaaacacagcagccagggtgcccaggaccctgtccacctggtctccgtaatgacggcacagctgcccaaatgtgccctcaccacagtccagtagcagagacgtgtcggggcttatgttgacaagtgtggcactgacatttcgaatcttcatcgggatggcagaccctgttccaaggaagatgatttctgggtactgacttcttttctctgctggggctgggccgtcctgcgcactcctcctgtactcctgcacgctctgctggaagttgggaagctgcagcgcctcaactatgaattcctcaggattgcaagtaataatggcatccctctgccactccctcctgggacggagctggtacttgaggaggcattcaccctgaaccatgggcacactgagggtggggccctccttcttacagcggaaactggtgagcagggggaagatgtccgggtggatgaggttgagctgggtttgaatcttgtggctgcgaaggttgtgaactgaggcacagttctcattcaggaccaagtgctgggtgtcaggcccaaacctctccatccactgctggtacctgctgtccacaagcacagatgctggggccatgtgaaccaccaaggccacgggggcatctgcctttccttggtacctctgaaaggtggcattctcacagatgggttgaatgaagctttcatctggacattctaccaccacaaaagcagcaccaggatctggaggagtacacagctcttcagccaaaatctctcttccttcatgagtgatgcttttcccgtccttgacagcagcaatgatgggagcgatggcagctgtcccaactgggaggcccatctcctttgctttgagcaccaagaagtttcctctctttaagtgaagcttacagatgaaagctacgaccagggaagagtccctgacccctcttctctggctaacaccatgtggaaggtgtggctcattttcattcgactcggagtctgaagatcgctctggactgagcctgctgagaggcctttctggactctgccatggttggtgctttcccctcctctgttcactgtgtatggggatctggtaaactgtcatggtttcatcctcgtattctggggcagagtggggccgcacagccagttctattcctttcaatggaccagaaaatattttgattgcttcgaggtatttttccagttgtggaggtccagaaagtacacactttggaagcccggtttcctttaaagtaagaatcattccacttaagcccccaacattagaccagtgcattcgtgtcaggaatatgttgtccaggcgagcaacctttaacttgtgctcctgcatgagtctctgaacgccttctccacagttgaagagataccggttgaactcggagaagacgtagagcgcggcgcccgagtcccggctacccgctgccaccacctgcaggtacacggtgtttgggccgccggagcaccccgacggtccgcgcttctctcgcgtgcgcaggtgccgcagcgggtccttgcgcggccgctcgcggcgggcgggtgcctgcgatatggtgcgtccctgcgacatggtgcgtccggccgcggaccgcagcagcgagcaaagcgcccacatgcgcccgtctccaccaaaactgagaaagccgccggtcacctacgcccgcgtttcccgcctcgtgccgaattcggcgcgccgtcgacttcatactcttcgccct

SEQ ID NO: 128263 - DNA, 956 bp, Homo Sapiens
  misc_feature (97)..(129): n is a, c, g, or t
cttgggccatagccgttgggctgaaagtgggtccagccataatgaaatcccgggtttcatccggcatcccccacgctgatggctttggaacgttggnnnnnnnnnnnnnnnnnnnnnnnnnnnnnnnnnaaaccatctttccagggtgggcttcatgtatcaggagggtgggcatctttccccatccggaccagagctcgcaggggcatggtgtccccggaatagaccactttccagccagaggtgtgcaccagcgcacagccaaacgcatgcttgcagtgccgcaccagacaggtctgaaactcttccaaatcacatgttcgcaacagcgaactgatcaatctttcccttgcaggactggagatctcatccccttcctgaaggcatttggcaggaatcatactgatgtggtgcaggacctcctggcactggttgtggtactgctggagccaggctttgagctggttgggggcaaccaccagcaaagggtgaagcggctttcccaaagatgccaaggcgcgttctctctgcagcaagatacttggcaagcccttttgagctgctttagagggactcttgtttttgctgcctttgggtcttcccctgggtctcttaggagagggctcaccggttggttcttgctgctgcttcctggggcggccgcgtcctctcttctgaggcgctggggcggcaggttgtccctgggctgaagtggacggctgccccgcgccctcaccgcgtgcgctcatcctgcctcccgccgccgctaccgccgctgcagccgcttcgcctcgaccgccccggagctgcccagcacctttcgggagatgaggtgatagggctggggacgccggcggggcgagcgcgagctggcgggctgcgagggctgctgcctcgtgccgaattcgccacccaggcctcgctacttagtacgtttaggtcgtcgcccaccgaac

SEQ ID NO: 128264 - DNA, 3397 bp, Homo Sapiens
ttttttctagaacaacaacataggcattttatttcttttcattaagcttcttagtttcttagtatcacaatggaatgatgagaaaacaacaaaaacgtgagtctttgcaaatctctgacaaagagcagagatctcaaggcaattggggcgggggaggcttgacagaagtgccagagcagttccaacgtcacatctctccttggctggaatggtgagaaggtggcactgtcgtgagctgtccttggcaattctgccccatgagccacgtgcgcctggtctgcatgggccaccccgcgggatttcctggtgcctcctagtacctggccacacacccctccgcctgctccaacgccctgggagcaccgtccagtgctcaggtggacccagaagccagctctgctgggcagcggcaagatgtggaggagcggcagaggcaggcagcgttgcttgcggtgggagaagccaaggagtgtgaccaaggcccatctgggagacatctgtggtggaaggtagggctggcgcaggtggcagcagcagaagtccgtgtccccaggcagtagcaggcctagagcttcacagtgccagggggcaggctgtcgttgcagagtctgtagtagcgcaggtcgttgaccagcctgtgcacattctgggtgaatgagggcaggtcccgatccatcttgaaattccgccccagcacacttttctggttggcatccacaccatcacagctggtcaggaactctgggaggaaggcggcaaagaagccatcaaagtcgactgaggccatgttgtagatggcgatgccaatctcctcctgcagaagatcatgggacttgtggaccaggacctggagcagcacgttcacaaactggaacagcatggcagtccggaagatcttcttgtggtacagcttctgcttggtgttgagagtctccaagtagaagagattttgtttaaaaaggtggatgtcgggctggagaaaggactgtccgaaagcctgcatgatggcactgaactggggctcattctccatctgctcctcagcgatccccctctggacactggccagcacggtggacttgaagaagtacctccagttgtgatggagcgtccggaaaaggagctcaaacagctcggccttcacatcaggggagggacgctcggcaatgatgggatacacttgctccatgcacagggcgatgatgctggggaggaagggcttgaacacctggcctggctcctggaccaccacctgcaggatcttcagaaacttctccaccacccggcagcctgtgctgccctcgtggaggatgctctcggctaactgctctctggtaaacatgttgaggaaagtctgtatgatttgctcagtgaaaggcacacccatctgtactctaaggcctcgaaacagagtgaggaagaagctcagcatctcatcagtcacatctgactgatggataaaagctggaaagagggccagggagacctgaacagattcctgcagcgactggtagcaaatctgtcgagacttggtggactcccccgagatattctccacaatatcttctaagacgctgagtgtctggtggataatcagtttggtgtcatccagtggcatctttctctgtggggcaacagcactgggcttcaggttgcgatagtcccgggagagtgcagagatgaggctggcgtggttgatggagcgcacgggccactgctgctcattctctggaaggtttggccacggaagcagcaagatgttagagagggctcggcacaccaacacctgggccttatcgacaagtcgcagggcagaggcatcagtgattctgttgaatactttctgcactgcagggatgctgatcagaaagacgggccgcacggtggtggccagtgagaccagtaagtggcacgcagatagcagcagcttgtcttggaccttggtgctgattagaggtgtgattgcatccatggtagtagagatgagtgtcacgaactgctgcgtgttctgccggtgaacttcactgcaatactgtgctaaccagtgagagtaagcctgcagcgcagccagggactgagcatgcacatcaatgaggtcaggtttcaatactgatggcacagcagtttcaatgttgtacaattttatctgagatccgtacagagtgactttgaccaacctttccacgactgtgagggcatcattgaaccgtgcagcaaacacatccccgataaagtactcggccaggcggcccacggcctgcagcagggagctcaagtctctcagggagcagtgcagccgccggcagtcgttctccgccgtgatgttcaacctgtgtcctgaccctgaagtgactataaactgttgtaatcccaaataaacttctaaattgtcctgaagaacagggaacagtgtggagaaggcgtgcgtgggcaggagctccatcactttggccaccacctccaagctctgccgtaagtaccgctgccactccgtctgctgatcgtcatccagagtctcatcatccaactcctccagctgggcttggttgtatctgaactggattcgattcaacacctctgtgagcaggagcaccagggcatcttcgtacctgttgagaactgcttccttgtctccaagacgacttttaattttacttgtcagatagtccaaaaacagcgtccagatatccaaacaagagaagtaaccttcatgagtaggctgatgaaatgtgtacttgaacaaaagtgtcaaaaactccaccacagggaactgggagtaagactcgattcttcttaggtgaacactcacaaagagccgaagaaagtcagtaaacttctcgatatagctctcatcgagctcttctagcctgctcttcactgtgtgggcattgttatccttggtgattttctgcaggaggtagaaagtctgctggaacatacgcagtaaatactcctcaaattccataggcacacagttcttggacatgagttcattgatgcaggacatggccaggacccccagccggccgcgctcctgacccgagacacagttctggctgctgccgttaactgacgccatctttctggcccggatgtcacagccaaatcgtgcaaagtggaagatggtggtaaggagggatggggtgatgctggcagacagaggaatccaactgaagagatgggccaggcactccaaagccagggaacagatatactcactctccacatcaaggatgggaattggctgattcaacagtttggctgaactgggactctgcaacaggttactcagtaagtcaccactttctcctgaggtcggggatggtggtggagtggcagcagtaacactggtttgtccctcgtgccgaatcggcgcgcctcgattcatctctcccca

SEQ ID NO: 128265 - DNA, 872 bp, Homo Sapiens
gacaaataggctgggcttttatttttatctgcttgggctttaagctttccttcattcaagtgacagattctgcctttgacgggatgcttaaaatcactatattagatctaagatcatttctaaaacctgtttttttaatgaacctaaagacttcacagcagatgagtacataaaaatgttactggaataaggaataccattaaagctctaatatccaatgtcaagttttatattaaaatctttcccaagttatctctgccagggcattttgttgatgtcttagtgcaagattaccaaaaacttagtcaaattgaacaggatattcattttcttctccaactaccaaaacacagtcttcattataaggtgattggggtgcggttgaaaaaactgtggtgaaacgagaatcagaatgttttttgtacaggaaccaaatgattgctcccaaaactgtcaaaattaccgtgctagcaatcaccaatgctgatattaaaatgtggttatctgataaatatttccttttgtatgggatagctgttttgcatagtgttccttccacagaagaaacttcacaatttccttttttccattcacctgtcttgatgtgcagaaaagcacaggtgtcaactaaatcctcatcatcatcttggtctgtccacttatcaaatgtcatatttgaattatcaaaccacttgaaactcgcatcatctgtgtcataaaacatgcctagtaggatatcatctgggcctttccattgctttttcaaagtatccagtataaaagcattttcttcttccttatgtatgcttatcatgtccgctccatggtcagtacactgatttctgacatcctctatgctttctactttgatg

SEQ ID NO: 128266 - DNA, 1556 bp, Homo Sapiens
  misc_feature (18)..(18): n is a, c, g, or t
agcgggcgcgcgcacttnccgggggggtatgccgcaccccacatattggcagcagagggacacatagttctgaaaatgaacatatgttctcttccccgcgcttccctatcccgacatgaaaggtttgccccagagagagccggcgggtcccctacaaatttctggggatttgttcgcgagagcctcttcactcttgtttgcacaccccccccgggggtgccaatgcgggtacccccaggcttagatggcgactccttcaggggggaagtttcccccctcttacggggaatgttgtgtgtgtgcaagagaacccgcctttcgggtgtttggatccggccccccgggcagcacacgtctggtttctacatgtgggggtcggagagaggatttcccaacaaaagcccgtgtgagggtcacaatgggagaccccaggggggggttctttccggttgggggaaagagcccatttcttagtggggcccactggtttccaatttttaccctatacggggggggccggagcgggcccaaaagggaaatgggttgtagaaaagcctttctcgcaggggcccgaggcgggccccgaccacgcccccggcgatcgtttttccccggcgcgcccgcccgaggaaggtcaaaagacccgtttattaagcacctcctgtatgcggcacccctggggggtgaccttgggttggggtcacaacctcccggtcatgttctttcttcccctgcagcctgaatcttggccagggctcagggaagggaccagccagtggtttcggggcagaggagcagggcccgcacaacacgagcgcccacgggttctgctgtggggcactgggtaggcccccgggaagggctgctgcccccaaggaaggttcctccgaccctcagctccatggacgagtcaaggactgggcagatggccgtgtggggctcagaccaggccctgggaggggactgggcctgagtgggacccagacggtgtcctgggtggacgccccttgtggccagccctgccagccttctgtcgcttcagcgtctcctccaccttctccttgaagcgccggttcttctgcttgatcttggccagctcagccttgcgcttggcctccaggtcagggtccttcccctccaggatcagctgcttccgtttgttgatctccttcttttcgtcaaagtgggccgcctccagtttgatctcacactctcttcgcaccacgttgacctgtgtgaggatctgtagcacctcggcctcttccacggagaactcctccagcttcttcttgatctgctcctcgatggcgtgcaccaggtggatgtcgtactgtgtcaccagcgtgatggcctgaccctgccggcctgcacgggccgtccgggcgactcggtggatgtagatcttggggagcccgggggtgttgtggttgatgaccacctgtaccgtagggatgtccaggccccgggaggccacgtctgttgcgatcaggatccggtagatgctggacttgaacttggctagggcggcaaagcgttctttctgcttcatcatggag

SEQ ID NO: 128267 - DNA, 861 bp, Homo Sapiens
gtggatacatcaaaggtctttattagcataggaacaacacacggtgtgcatctgtgtgttccccaaatgcacacaaaccctgtctctctcaagaatcactgatgtatttcatcgtagagttgagaatttctaggccatgaagctttctcagttgagcagcaaatctgggctcagctgtgcacagcttccccagagcaatgcctgcgttcacctgcacggccgtcttctgtgtgtcactgcctgcaagctttaacaagacctgcaaaaggtccgtctttagcagggaagacgcaacgttgggcacctccatgcagttaccaaggcagagggcagcgttgcccaccagaacctcatcctccgagctgagcagcttcatcataacgctcaactttttatccagtcttattacttcttcccgagcttcatgataactattcgtgcagatagctagtatctttatagcataacgtgatgcagtctcacctcctgtcttcaggaatttcatcattttctttaccactcctgctcgcaaggcctcctcaacaattttcagagaggaagaaagggtccggctcagaacaccagcagctcttgtcaggattcctccatcctggctgtttagtaaagacaggcaccttctgctcacctccacagcccaaacctcagagacaaagggagcctgaagacacaggttcatcatgagtcccaggagtgtgtagataacctctctgaacaggtccacatcctcctcacacctggccaggaggctcaagcagccatccccaaattcctcacaggccgccatgtgtcttcgggtagtgggctcagcactgaggtttccgatgatggcaatgcggccgc

SEQ ID NO: 128268 - DNA, 1046 bp, Homo Sapiens
tttttaaaaaactcactattttactgtgttaaaaaaaagatggcacatttattgctacataaatgttatatacatattgtgttttctgttacagtgacagaaaaaaatttgaacttcttgctgctggttgaaaaggtttatcaataataccttgaatttgacacaggatacaaatctgcaataaaccaacaatggaaactggagaacaagatgagaagcaattcatctccaacaattagctcttacaatactccataggtactacacggtatgctagaatcctactatggtcttaaaatgctattgtaaatttctgatattaatgaacaggttatggtaaataaccctacattttttactacctaatataataaaataaagtaagaaactttttactgaaaactttttgatttcaaaaatctagaaagagtaatatttagaattcaagaaattttcttacaagattattgtataaaagactagctacagtgaaaaataagccaaatgtttttttctttctattttatgaaggaaagcttctgggcatactgcaaagtctaatatagcgaaaaagacaacaagctctgaagaaaaaaaggccaggcagtggcatatgttcactcacacatcataagcaacaacttctgtttagctgattaacactgaaatgaagaacaaggccacagatagagtccgatgtaactggagaatatatgcaaattaaagtaaccaaaaagtccactaagttcacaaatgactgacttgttaggaatcatcctgattagagtaccagaagttctgtcttgtttttgttctttcaaattaacagaaatctttaagctacatagtgatttgggtcctttcctctgtgtgctgattgccactgttgatattggctataaggaattattaagccaagatacctcctttagcatgtttttctctcccagggttgttgtggtggaagacaggtttcatggaagttcaaagtgattatgtccggacgcgtgggtcgacgatatcccgggaattccggaccggtccac

SEQ ID NO: 128269 - DNA, 519 bp, Homo Sapiens
tacagtgggcttttttggtttatttatggtcttctataaaaggtcaccatagggagaagtgggagtaacagggaactctcaaggcaacggaaatgtaaatcttaacatcttgtctatttcaggtgatattcttgccctttacaatacagcactgaagccaggacatgcagctgcattttcagaagattgtgattcagcctctactaaagttgtcatccgtggagcaggaaaccaggtaaattgcttaccaaacacccctcttcctacaatattgtttaatgggaagaggttgcaaattcagggaactcttttgctgcaatttacactccccaatcatttcatcccaaaactcaagcctgcttttctgtagactgttcacctgctgtagtctcctcagacagtgcctcccctgtctcttctgcagcaaacatgcctgagctgttttcatcaacttcttcatcaacagtttcctggtcactgtctttgtcatcctccctctcctcctgcttcctttctttc

SEQ ID NO: 128270 - DNA, 510 bp, Homo Sapiens
  misc_feature (458)..(458): n is a, c, g, or t
ctcacctgggccagtctgcacgtgcccacggaaagaaaatattgggcctcaaacctggctcagacgctgcttccttacgaaaatctagcctagtcttccccaccctctgcccggcttcgttccgcagaatgagcccgcgcggttaacatgatcgccgtagggacttccaactctcggttctaccaggaaatagggccaaggcctacgcgtaggctcccacccccataccagcagagacaaagccgtagccgtagaagagcgtcgtggtggctgcagcaacttccagacgtgggtccctccacgcccgcgtctcgaccccacttattaggccttttcatattggctgtagaaggaagcacaaacacagcaacctgcctccgctggcgccacgtgtgaactgaagccactgacgagcgtcacgcacttacggtgccgccgtaaagtgcgtcaccgcctcntctgtgcgcgggcacgcagtgtcgcgcggagcagggatcgcttggcggccgc

SEQ ID NO: 128271 - DNA, 2018 bp, Homo Sapiens
  misc_feature (197)..(205): n is a, c, g, or t
ttttttttcaataggtatcttctttttttattccagataactacttccactcacaatgagatgaattgtctttttacagaatttagggattccaagttgcctggttttaatataatacatattcacaaaatttacacagctcatgcataccataacttatacagagaacagtttagcagtctgcttaaaatgttaannnnnnnnntcataaaaagccattgttctgttacacataatctgtactgaagtcataagcatcatcctcttcaatgattttatccaagataaaagaccttgtagactgttcacctgctgtagtctcctcagacagtgcctcccctgtctcttctgcagcaaacatgcctgagctgttttcatcaacttcttcatcaacagtttcctggtcactgtctttgtcatcctccctctcctcctgcttcctttctttccgttttggcaattcttcatgtatgtccttttcttctattattccatttgtcagaccggaagactggaaaaggatgctattggccaaatgagggcccttgatggctcttatgctctgtgcattgttcttttccagttcttccagattgaagccgcttttcatgtctaccacaatactctcattaaaatatggaggaggagtccaagatgtagggggatggcaatagtaagctaatgaggcacctgtccactcagaccacagcagtttggcagcaccttcaacatttgggattccacctttttggtgcatacctcttctctgagcaagccctagtaaaaaattcccagagaatttcctgtagcctggggacagtatatttcagtactacctgtcgagcatcagcctgggaaaggatggcactggcagcctccatcgggttttactacttcaatacttgctggacttcgcagagcaagcgcagaggaggaattaagtggagatacgatgaagctcggactatctatgattgtgatctgtttgtccaaggggacaacttgcatgctccttgtaagccccatggatacaccaacattacacatctgttcttgttttaagctattgataatgctgcttttccccacatttgggaaaccaattactccaacccgaatggctttgctgcaagtttcctgaaaacctccaagaagtttccaaaggccctctttcccaaagcagacttcacttctgaatggagcagcattcttctttgccttcacacgcttggttatcttccctttatcctttggtttttgttgaggctctgaacaccactgttggcaattctttcttcaaataatttagccagctctccaaattctcctttggtaccagatctgatttatttaatataagtaccagctttttctgtccactctggacaatggcctcttctacctgaggacatctgcaaccaagaggatctctggcatccaacacctctaggacaacatcggaggcttcaatcacctttttaagttcttggcagtacagcttctttgaattctgtttgcccgacttggctttgttctcagttttgcaaagcccaaactccttttccataggttccacatttgatggcttaatatcaggattagtttcaagttttcttttcttttctagttccttctgcctgtcaagtttctgctgctgttttagttcttcaagcctctgtttccttagctcagcttccctaagaagagcctccttaaagggagcactgtttggaactcctgggtctttcctaggcttcttgtgaccctgctttttagcctcctttcttaattttcgatgatgttctcgaacctttttttggattttataccgcttatggcaggtcatgcgtttacttgctttctttaacttaggccttttcatattggctgtagaaggaagcacaaacacagcaacctgcctccgctggcgccacgtgtgaactgaagccactgacgagcgcctcgtgccgaattcgccacccaggcctcgctaccttagaaccgttagagttactgcc

SEQ ID NO: 128272 - DNA, 1046 bp, Homo Sapiens
tattaaggccagaagggagggtgtttgtgaatgccttccaagcccaggggtttctgtttataccagtccccttctttttaccattgagttttcattccatttttttccagttggttaggttatattccgtcgtttcccatcccgtcaggtttgccaccaaaaacttccagggattaaatgagcaagtgctggttttcatggaaagcttacgaattctttcctttttatagtcaagatagccaatgtaattgtactggtttcctgctccacggatgacaactttagtagaggctgaatcacaatcttctgaaaatgcagctgcatgtcctggcttcagtgctgtattgtaaagggcaagaatatcaccttgcacaattacatcatcatccatgtatatggccttctttgcgctgggaaccagaattggcaagtagaaccttgcaaaggttaaaggtttcatggattccccctggtcaggatcctcctttacttttccttccaaaagtttagggtcaaaattgacaattttgtatctgatgcttttcagggaatcactgttgagccaggaccggagatggtctgctgtattgttgagagtaacaatgtagaaaatcacattggagcgagtgttgtgctgaatgctgtttatagctgcaatggcccccccaagcctgtcttcagatgcagcgatgaccacaggaatctcctcttgtctcccatctactgcatgtcggagagcatttgggacaaagtctataggttgaggccctacaattcctgaatctgtaacctcattccttaacaaactgctcaagctgaggaagttatggtgcaaaaccagtaagaagagagcaacagccaggaccaagatgatgatgtttactttacggaatgacatctttttcttctgtcatataaatattagtttttaaccactttgaagtgatcggaaagtgatgtgacgctccggggatcccaccaggctcagagatacccctggttagggctccgacaagtcgttcccctcaaaggctcgccgcggccgc

SEQ ID NO: 128273 - DNA, 420 bp, Homo Sapiens
gagagcaacagccaggaccaagatgatgatgtttactttacggaatgacatctttttcttctgtcatataaatattagtttttaacccctttcatctggctggctcccacttggcattcaaaggtcaaggtagcctcctccaaactccgcgttgaggtgcgcgtcccttgagcttccacatctgggcctccctctcccagggctaatcgcgctgtcatgtatttctggcgtgatgtggcatgtctcccttggcgcgctgtgggctcttccaaggcaacagcctggtcttggtaccaaccgtgtcctcggtctgctgtactttgaagtgatcggaaagtgatgtgacgctccggggatcccaccaggctcagagatacccctggttagggctccgacaagtcgttcccctcaaaggctctc

SEQ ID NO: 128274 - DNA, 368 bp, Homo Sapiens
cctgtcaagtttctgctgctgttttagttcttcaagcctctgtttccttagctcagcttccctaagaagagcctccttaaagggagcactgtttggaactcctgggtctttcctaggcttcttgtgaccctgctttttagcctcctttcttaattttcgatgatgttctcgaacctttttttggattttataccgcttatggcaggtcatgcgtttacttgctttctttaactctccgctggcgccacgtgtgaactgaagccactgacgagcgtcacgcacttacgctgccgccgtaaagtgcgtcaccgcctctctgcgtgcgcgggcacgcagtattcgcggagcagggatcgcttggcggccgc

SEQ ID NO: 128275 - DNA, 570 bp, Homo Sapiens
ttattttaaaaagttttattttggagatttagaaatttgagatttttaataacggcaaaagaaattcagtcacacctaatgattaacagaatgtagtggtgtattatctaaacagaaatcgtgctgatgtgccataataaattgtctattagtaaaaaaatacactttagggcacagcattgtatcacaaattacagtagggatactttgcaagaatttaatcaaactagagaattctgagtaactgtatcttttaaatgcagcacttaaaaatgtaacaactctgtgcatcctttttcttaaaaaaaatgaccttgcatgtgtcatagaaacgctgctttattgctgcagaggtcaaagttcaaggctcaagaggtacaggagagaatacaaaggtagcctttagaaacgtggtcttgtttatgtataaaaaaggtaaagtttataaaagttaatttacaaaccaagaacaaaagtggtatgcacgcattatgtacaagcatccttaaaacatcaaaattttcaaatgcatagccagaaagaacagaaaaccaccactgccccttgtca

SEQ ID NO: 128276 - DNA, 682 bp, Homo Sapiens
  misc_feature (444)..(483): n is a, c, g, or t
aaggtagcgaggcctgggtggcgaattcggcacgaggcgagggtgcatgttgcaggagggagagggcagggaagactcacagcagagcaggagggggcctgtgcttctcggggtctgcaccccaggcacagcggtgtcaccccgcaggaccgcgggcctgccccaacccccagcattcccgggtgggcccagaccccatcaccaagactggccacccgctgcgtgtgtgtgcgcgcgcgtgtacgtgtggccccacatccgccgccttccacgctaggatgtaagaggtcgcctcctattgtacatttggggaaagccttgggtgtaaatcagtgtaaacttggaggagagatttttctatcatgtagagtaggtattttttatagattgaaggttgatcaattttttaatactttcaagagaaaactgtgtatacacatgaannnnnnnnnnnnnnnnnnnnnnnnnnnnnnnnnnnnnnnnaagactggcaccctgcctctctgtgcccaggcccagccctggtgacatggcaccactcagcagtgctgtcactgtaagcatggactcccaggagacagtgtgggaaacgctcctgctttaattccccgagaaacggctcttcctgcctggatgcaggagggcaggggccaccacagattaaagctgttactgcacacgc

SEQ ID NO: 128277 - DNA, 2675 bp, Homo Sapiens
  misc_feature (71)..(71): n is a, c, g, or t
aggactgggaaatgacttcccaagctttgcccacttaattagcccacataacaaggcaaaatcacattctntaattctcattttaaaaataaaagatgcctcaaggagattattttgacaatccttagcagatcaaagttctaaaaagctaaaaataactgatttaagttaccctctaaatcaaatatgactaatgctaacaacaacaaaccaaaaccaagaatttccttttaacatgattggtttaacaagcctttgaagaaaaatatttaaaacttgtcttcaagtctactaattgtacggcaatcatttaaaatagtaaaactatttaaatctaaaaaaaatgtagtgtgtggaggtggggagaaaagggatcattaaatgcaatgcaagaacaccaagcagaattaaaataaagaaataatgtaaacaggataagatagcaaaagctttttctaaggaaaactgtttcaaagcatgcagtgtgaaattttgcaatctatcccaaacaatatactgcataggcatcgtctttaaatacacacattttctgtttccaagtactacagataactcataattcctataaaaaattacacaatttaatcaagatggtagtacgtggagattatttccttttagtttattgtttaaatacatgtcttgccaatcacaaaatatctagtgtagccaaagacataagaaatccctgtatgaatcaaaaagtgcccttcttgcagctttctgtcacaaggatgctgagaaatgtactgtaacagtttaggaaacacaagattgtctcaattttaagtttcaatcattaatcctcttcagaactggaatcaccctcttggtcagaaagttcgggaacagggaagcggagaatggcagctaccccagtcaactggctgagctgttccccagaaacgtgaagactagagaatatcctaacggtgcctgcattctctttcacactgtccaccagcctcacataccggctccgtgtggctacatcctgatgcctgaagagctcatcgctgatgagcaatgtgtcaattgccatggcttcattggccttctccacctgcttgagtccatagaaagctcgatccggttcatgctgtaacattttatagaagtcatccaaggctttgacttccccagcagctttagtgtctgaaaggcggctagccacagtagggtcacaaagggcctctttcagggagtacttgtgtccggaggaggcatgtacctgaagaaatttggaccggttttccaggagcagtttgttgtcggtcttcactgcttgttgaaacatgtagtcgcagaactgctccctcacaaatcctgggctgcccaccaggatgcactttaccacctcagagtgtatgtggcgctggatagcctggacccacctgttcatagaaccgctgccaaggcccggtcatgctgagagcaattgcctttcctttttcctagggatgttcacctgccaccttggcccgagtgagggtcatgctgggagtgactaagcagatatgggcgaggccttcctgcatgaccacagccgccacatcagcgctccaggctgggtcacaggcctgctcgatgcgctccagtaccacactatcccactgcttcttggccagggtgaactggcggttgggctccagctcgatggtgtggtaagcccccatcttgacatactcattctcttggatgttggtccccttaacccgcagctggcaggcttgagagtcgaagtcgatggcctccacgcagagagtgagggtagtgcggacccggttgctgcccacgctgcccgtggaggactctgtctgtaccttgcggatggtggaggcgcgcaggctgtcgcccacctgcacgaggttgtaagtgtgccacatgtcctcaggctcctcggggaccagggtcacctggcccgcattgtccttctcgatgttcttcctcacgagcttcatggccaaggaaggggctcactgacagaaccaaaggaaccaaggaggtcctcacctccgccccgggagaggggatgggaatgcaggccaggaagggggcggggcccggtttctaagggcacttgcctggcgggaaggaaacacgcttgcttcgactcatgcagcctagggcagcacttcctctatcctttcctctctcagtctcccggcgcgctgcgtctaacaggctcggggaacactgcagcgaaaatctacccctacacagttcccgctggcagcacgcaacagcgggctgacgaaatgaaggcgcatgcgcagcccccgtcccgcgacccgacgcacgtctcccgtccccaaaggagaggcggggccgcagttcgcgcgtgcgcaggcgcactaagctgtgaggcgctccggacgaatgaactccctcaagaaggtgcacagagtggtggcgagtcctttattttaatgccaaacttcaacttcataagttttctcttccatcccagtgaggagccagcagcaggcgacagcgacccctgggcgggcgcggggccgaggggccatggccggagcagcctcagcgccagggggccgcgctggttcgcagggcaggaccgggcgcgggagctgcgctctctggctgggccacttatcccgctgccgcggttcccagtcctctgccccagtggc

SEQ ID NO: 128278 - DNA, 595 bp, Homo Sapiens
cttggtgaagacatttatttaatatggggggtggggtattgctgtctctgtcagtgtgtatagggtggtagggagacaactagagggactcctgtcctggggtaggctgttctggccccaggctgggggatggggagcagactgacaggggtggggaggtgtgtaagaagggtagggtgaagctctgcacacatccttgggaccacagtccaggctcacccagtcaccaaagcaagaaccgaataaataaagtgcaaccgtgggggtgggggtaggagagggaaggggcaccgggtgcacccatgcccacagcccacattcagtgctgccaggtctggcccacctcccagccagaccctcttgtccaatcaccccaatgtctgtccctccacaagccaggcagggcctctgtacagctactggaggtagcgataggctttaaagcagtggttgccagcatcagccaccaccacatggccatccgaggtcagtgccaggccctgtggaccatacagtggttctgcagatgtgttgatataggacaggaaggagccagagctgtcgaatacctggatgcggctgttgccccagtcag

SEQ ID NO: 128279 - DNA, 935 bp, Homo Sapiens
ccaagcaccaacatgtcaggtttatttctccttcgctctcaactgagagcggggcatccaaatcataacaaaaccagggcccaagagtgggaagcggccccctgggtgggcctgaaccccaatttcacccttcccccgggcatagggcccaggccaggacgctcacccgaatgtggctgggactccttgtgccctaggcccacggggcggaggcagcaccaacattggggatggtcccccaagaacagaggaggaagcccagcctccggcaggcagtatccacatccacgcccacctgctcaggcctgcagcctccagacctctagcgacaggtctccagagccggccaccaccaggttgccctcagcacagaccctattgagcccattgtcatgccttcgggtgcaaatggtccttggtgggtctgtgggcacgtgcacccggatggtcttgtcagtggatgtggtgtacaaggctcccacggagtactggatcccagtgatgggaaagctgtggcccacatcaaaggaccggataagctggaagcagccgttgcggttggcgaagacgtgcagcaggccctggttgtcaccagcccagagctggggttcctggtaggacatgcagagcaggtaggagtccagctgcagacgctgcaggacgctgttggctcggcggtccaccaccaccagggtgtggtcctcgctgcctgagatgatgtgccggtcatccgccagcagggtcagcacgggtctggagtgtagttgctggtgcttcaacagggctgggccggctctggggtcgtagatggtcaccttcttgtcataggtgccagtcaccaggatgtcaggcaggtaggagaggcacagcacggcctgagctggcctttatctcgccgaactgctgcccatccgctgccatgtcccagagcttca

SEQ ID NO: 128280 - DNA, 757 bp, Homo Sapiens
  misc_feature (123)..(134): n is a, c, g, or t
  misc_feature (285)..(293): n is a, c, g, or t
tttttttaacatgttgccaattatctccatgtttatttaaatattttgctctaaaggaagcaatcattcctttatacttctttaaatttagtattgacatttttattttgggaaaggaggtcnnnnnnnnnnnnaacatggatacaggaaaagaaaactctccaataaaaatattgtctaaaaagtttgttttgtctgcatgatttactaaatatgtacaatttcaattcacagcgaaggtaacaaagatttaaacagccaacatcacaaatgtctcaagttctnnnnnnnnntcactgtgcacagtttaacaatttaattgaaaaaaccaaagctaagccttcagtctgaatctttttttatgatgggcacaagccatgtattttcttcatctttgttacacgatgcatatttcagtgactaaaagccccttcccattttagtatattaggttatgtcagtacatacttaagagaggcataaattgcctcttggtacaccaatatgatttgtgatgtgttcacatatatgtcataatatttattaatatatagaatgatcagatgagtcacctgtgatttttcttaatgtcttcaaatgtaggaatgttttgttgcatgtataaaatttttcagaatttataggagtgcttatataagcgataataattggaccagtgtcccttgatgtaaggtgtctagaaagaactcttctgctcttgaaatatagagatttcacatctctacacaatacaggt

SEQ ID NO: 128281 - DNA, 3010 bp, Homo Sapiens
  misc_feature (489)..(490): n is a, c, g, or t
  misc_feature (608)..(617): n is a, c, g, or t
  misc_feature (652)..(734): n is a, c, g, or t
actcgattgcgttgatatcggtgtgtgcgcaccttcagtcccataggcttctgtcggcttctcctactctccgttctcgctgtgtgtctgccatctatctccggtagcgctcgcactgtctctataatcccctcattgcgcggtccttgcgcaacgtttttttgtcgcttccctgatcatgtgtcgcccggctcctcactgtgacccctttctcctgctgtttagctggctcacgtttctaaagtcgggcgtgatacgggctcctttagagcacccttcatgtatgtccgcctggtaggcccgttatcgttcggtcgtcagattgttctgtgctgttgtttgcccgcctccgtagctcgtctgttgctggtggcgttctgcttactcgtctcactgttctctcgcgactagatgaatttgtgagatgtactctctttgaggccctatagagacgactcgtctgatagtcgtctggtatatatagcccgnnttctcccgcgggagctatataaaaccgagagtaacacctgcgcttttattcggaaatttaaaatcgacgctcccctaattatggggggcccgcggctgagacgttccccccgttggtnnnnnnnnnnggggccaggaacaacgccaccgggccccttcaaannnnnnnnnnnnnnnnnnnnnnnnnnnnnnnnnnnnnnnnnnnnnnnnnnnnnnnnnnnnnnnnnnnnnnnnnnnnnnnnnnncaggtttcaaccgttttattgggaggttttgttttctgtgaaatacactagagggtggggaaggggacacattcactttgcaagataagggtttcccaccactaaaggaaaggcatggggcagggcacactggggtttgggtccgttttcccacctccttctgcttggctcacttttcttttctctcagcaagtaccacagaacacaaagacaagaaacaaaacagcaaatcaacctccaacggggccatgcccaagccttccccactcccccaggctgggcaagggctgggaggggctggggcagctcactcgacagccctcaggccacacgggaaggctgcaggctcagaaagggtgggtcaaagttaataaattagaataaattaggggggaggaatgcaactttgtgctgggagggccccttctctccaacacgcgagagttggtgggggggaggtgggggcatctccaaaggccactacagtgggggtaagagcggtgggggcagaagtcaccttttcctccacgtcttcccaaacagagcagaagaattaggggtggggggaagagacacacacaaggagaggaaccctcttttcctaggataaggaagggccaagaaagaggatgctatccaaccccccatctcccaagccatcgctagggttaaggatttggtcagtggatcaatgaggtgggtgatgggaacgtggtgggggaagcagaggatgctggagccctcgaggagaacagacacaggctggggcagcaggggctgggggcggccacaatcactgctcagcttctccaaagacgtcgttctgtttgcgcttcatgttctcaaagtcaaaggccgtgccagccatgcgtttgtagatgtctttgatgtcgttgcaggttgtctcaaagtgtgtggtggcatcgtaggagcaggaacagaacacctggctctcacaaccatcatcaatgggctcatacaagtcactgatagccacaaacttctggtcaatgggctccaacagctccagagccggctccacctccttttcagggtccgtggtctccacagtagtgctggcaatagctatgtacttgccctgggccgccacgttgtgtgcataggagatcatgcacacgtagatgtctgacttcctgttgacctggttctgggggatgattatttggcaggagttggcgtcgttggtgttcttgatggggtggctaaggatacagatgatgcggataacctggccagccttccgcacacggtccgggatgtagctggggtcacagatcagctgcttgcagcgggccacctctccctcagacttcacgcccaccaccttgccgttctccatgatgatgtcatccacaggtttgttcagcatatatgtccccccatagatggcactcaatcttgcaaaaccctggggcagctcgcccaagccgtagagcgggtataaatatgggctcttgccataccgggccagggactcactgtacaacttgatgcggttgacggtctcaaggcagggctggtccaggtagtcatcagtgcggtagagcgccagggcatggccagtgaaatcgatgacatcctggcccagatcaaacttccggtagacgtcacgcatgctggtagtctgggggtcaacgccctcaaaggtcttggggtcattctcatcgaagtttgccacaaacaccaggaacttgcggaagcgccgtttctcaaacatgcccatcagattggaagccaaggcctcagtctcagtggacggcactttgtagatcttgccccccttgtagacaaagctgccctccaccaccttgaagtccaggtagcgagtcacctctgtatacagtagcatctttaccagctgcccgttagccatgaggaatttgggaatcaggtcaacattccagtctcggcctcggcccatcgactcagggggcccctccagcaactgaaaacgcttatacagctcctccaggggtgtgatggaggagctctcgcccccgtagtaggggttccggtccatgtgcagcaccttcttcccgttcacagacatgatgcccgacaggatgcattcggtgagaccggtccccagcacgatcacatcgtattcctcgtccatggtcaggcctcggtgccagcgcccgctcggctcctcctcctccttcaccgcagcagtcgccgccgccaccgccgtcacgccgccaccgcaccctcgtgccgaatttaacacccaggcctcgtacctagccctatggctt

SEQ ID NO: 128282 - DNA, 338 bp, Homo Sapiens
agtggttgtgggtagcatcgtaggagcagtaacagaacacctggctctcacaaccatcatcaatgggctcatacaagtcactgatagccacaaacttctggtcaatgggctccaacagctccagagccggctccacctccttttcaggggtccgtggtctccacagtagtgctggcaatagctatgtacttgccctgggccgccacgttgtgtgcataggagatcatgcacacgtagatgtctggccacaggaagagctccgttaactcaggccagaggcgctggccatacgcagagaggggttccagtggctggacacaagtctggcccgactgccc

SEQ ID NO: 128283 - DNA, 412 bp, Homo Sapiens
ttgtggttaggatggggcacggccgggcgagggggctgccaccacccagcttccccttactcatcagtgcggtagagcgccagggcatggccagtgaaatcgatgacatcctggcgcagatcaaacttccggtagacgtcacgcatgctgttagtctgggggtcaacgccctcaaaggtcttggggtcattctcatcgaagtttgccacaaacaccaggaacttgcggaagcgccgtttctcaaacatgcccatcagatctggatgaagaggggattggcctggatgggctctaagggccttcctggctcagacacttggcgatgtctcggggattcagtggaggcctggaaaccaaggcctcagtctcagtggacggcactttgtagatcttgcccccctcgtagacaaag

SEQ ID NO: 128284 - DNA, 3206 bp, Homo Sapiens
ttttttttcaagcaaaaaatgtttttccttgtgttttgtacaaaaagggggtgggaggtagttccgtgtgctggtggtgacggcatccacggggctagaagtgggcggtgacgcggtccgtctccagcaagtcgtccaggattatgtctggtgtggtgccgatcttcttggctagctcgctgcgctccatggtgctcaggtacaggtagcggttgagcagctccccatccagcacgttgcgcacggcattctggagggtgcggcggtccacgtgcagcatccggaaggcgcgggggttgaggccggcgtggtgtggcagcatggtggtcagcgcgttctgcagcatcagcagccgccggtaggtcttctcctgcatgggcagcagcagcccgatgccgccgtccagggtggcaaaccacgtgatgtgcttattctcccacacgaccgactttttgctgagcccttcagtggccccccggcacggggtcctccagaacgtgttcacgtgggcacccacgtggaagtctgcccgacgcagcaggcgcatgcccccgaaactctccttggcttcgggcaggtacatgtacaccatgaggttgcggtcgcggtcagacaccagaaaacccagctgggcattgtccaccatgaagtccacgctgtacacctccaggggcttggcatcccgcgacaccaggctcagcgtcttgctttcctcctggtagcgcagcagcgaaatgctcttcatgacgtcggctgccaggatgaagttcttgacgctgatcatctggtgtatgtagagctgcgtgtcgatgaaggccatgcccgtcagctcgctggcccgcaggctccacaggaaaatcttctggccgatggccgacaccaggtggccattgcagtggcacagggcggtcacgggccccttctgctccttctcgtaaaggactttgaacttgttcttggtcaagggctggccaggctcgggcaccacctcaatcacatccatgatcaagatccgccctcggcacgtgacctcctccccctgcatgaggcaggtcccggcggccacgtagcctttgaggcccgacacggtctcctcactgcgcagagacactgtcttcatgcaggtcacatgctcccactcctgcagctcgatcctggcattgggaatagcctcccagctgaccggggagatgagctggatggagaaggcctcctgctgggggtggatgtaccgctcatctctctcgatggtctcaaactccttctcctcgccagtcatgcgtgggatgcgggcacacggcgtgttggtgctggtggccacagcatacaccttagactccacgtggtaagccacatagtgggccgtgcagcgcagcgggatcttcctgacaggccatggggcatcataggacaggtaggcaggcaggacactgatcctcagctcgccctgtctgttgaagtacaggaagccgcggggacagttgacattgtggaatggagcgaaagagtcgaccgggccgtcgatggccatggggtgtagccgcagagcccctcggccggtcaccaagagccagtgaggggaggggccgcagatgaagacccctgagtagccataaatatcctcgaagtagcggaaacgcgccacgcggccccgggccccagccccctcctctgcgccgccaccttctgctttcttcttggatggctttggcttcttctcacggaagttgatgttgtgagggaccttcttaaagcggactttgagattgccctggccgagctgagagtcgtgggggaaggcctcgtagataagcagctcttggtccacatgcaccagcaggtagggcctgctctggcggctgcccagcgccaccagcagcacctccttgacgaggggcagctccccctggcgcgtggcctcctccctgcgggcctcgccctgtgtagtgggctgtccaaaggagctgtccacaaggacccgctgccccacagggaagttcttcaccaggaacaccagccgccagtcgggaagctggtagatctccatggtgccattctcccgcaccagcaggcaccagtgggtaggctctgcccggaagggtgcagggtcccggtcagcagggggctggctgcttcttcgggcctcctccttgctggggctgaagagggagcccgaatccccatacagcatctcctcctcgtcatccactgtggggcttggactgatggtgcagcgggggcttgtgcagcgccaggcggtggtggcggccaccgtaggagtcactcttcagcaggaacatggtgacgtggccctcggcactcatgatgaccacataggggtcggccacggcgcattgcacgatgggggcgcccaggtccacggggatgaagtgcagctgattcactccttccagcaggcggatgcccagtggtgacacttggacaatgtagcggttgtccccgatgttcccagcaaagaccgtggggccctgagtggcgaagccactggtgtccagctccatgatctcctgccccgtctgcaggatcatggtggagtcttccgggctcagaatcaggaatccgtgtctgcggccgtcgtcgtctgcttcaggggtggtgctgggttcctgctctgtgccctcccccttgggattgtcctcctcctccttacgcaccggggcgatgactgtccacatgtcatagcagccgggaagctcaaaggttgtcaccacctggggccggatgctcttctgcagcaccgacaaagccccgttcttcccgtggccggagcaaaccacaatctccaggtccggctcggggctgttctgaaactcttcagagaggaaggcaggctcgcccacgtcggcattggcacagggtccaatgttcaggatgctgtcacacacctcaaaggagtaggtggccagctgtgttcccgactgggcctcgctgccgtacacttcaatctcgtccacctcatcctgcggcaccgacttacccgcagctgaccagccggccgtcgcatccactcgcttcttctttgagggaggctcttccttgtcggcagcctcacggacagcactggccgggggctcctgcagcttctccgtgtacttgaggaggagggaattgcccaggcgagaacccaggaacaggtacccgggctccatggtgaccatgctggtggtgaggacgctggcggccgc

SEQ ID NO: 128285 - DNA, 1441 bp, Homo Sapiens
tgtggcttggtgacatctgagggagggcaggtgtgtgatggctgggccgggtctggacccagacccaacccctagtcccaactcacgctggtggtgaggacgctggcggccgccttgtaaaagtggaacgctcggacactgcgcatgccgtcggtgaagagggaattgcccagggtacaacccacgaacacgtacctcggtgctcaataggtgaccatctgaggaagggcagatgtgtgatggctgggccgggtctggacccagacccaacccctagtcccaactcacgctggtggtgaggacgctggcggccgccttgtcaaagtggaacgctcggacactgcgcatgccgtcggtgatgagggtcagcacgtagatctcgccgcccttgagggagatgaccatcttgtcgtaggagatgaaggtggcctgggcgcagtccagggtgatccgcacaccctcctgggtgcgaagcgggaaagccgtggttcctgtggtgaggctgttgagagccacgccatacggggggacgctctggttcaggtacaacagcgagttgacggcaaacaccaccaccccacctatgggcttgggcacagccaggagcctgggtgcagtcaaagggcaggctggtgagggaccagatgacggggtgcacctttctgcgtgatgttcagtgagatggccacaatggagcacgtgtcctgccgcacggccacgcgcccaggccaggtctggttgggctcaaacaggatgaggagggtaggctcgtagtagccatgcaggaactgcaggtcgatgatgttgagcagcttctcgtctagggcccgcacgtcgatgatgtagctgggcaggaagctggacctctgcccctcacccacgagcccctcgtgctcctcagccaggctctccctgcggaagggcaggaccaccagccgcgtgccgtagacaagcatggctgcacagcgcccgtcggggtccacccgcactcgcggcgtgtgtacattctgcacaaacccgtcccgaagctcaggctcctcaaagtagtgcagtgacagggtcttcaggtcatgggtgcccgggtcgtactccaccacagacagcttggcatccttgaagcttaggagcagggcatcccgcttggctcctgccagctgcacgctggccatggacatgacgttgccaaagaaggagaaggaggcagcaagctcgagcttctcccggtgggccttcccctctgtgctcctgtcattcttggtcagagcctcggcgtcgcggttgaggcggtacacgtagagctgcgaggtcccggccactaccaggttgcgctcgctgttgttgaagaagttgcagtacatggagaactccagaccggtgggcggatgcgcctgtttgtacacggcgtacatggcgccaacccgggctggcagttggagccgac

SEQ ID NO: 128286 - DNA, 596 bp, Homo Sapiens
  misc_feature (18)..(18): n is a, c, g, or t
ccattttctgtcactttntcaggatgaataggggcaattatattcctgcctaactatgaggggctcttgtattcagagtagagaggagcttagtcagaaagcatcagtatggtgagggccactcataactcttgagttctgacaaaaggtgatatagtttccaaattctagagaaaacaggtagagagagactaatatgctccaaagtttgttcacaggaatatactttactcaatttttaaaagctataaatagctcaaaggaaaagttttcttgattccaaagtcagccaattgtggtgcttcggtctatttcctttgggttgggggtctcctcagtttagttgcttcatggtttgccaggaagatgttactggaaaggggtcctgatccagaccccaagagagggttgttggacctcacacaagaaagaagttggggagagtccattgagaaaagtgaaagcaagtttattaagaaagtaaaggaataaagaagggctactccataggcagagcagccaggagtttctttttgggtgatgaaaatgttctgaaattaatggcaatggttgcacagttctgttaatgtaccaaa

SEQ ID NO: 128287 - DNA, 975 bp, Homo Sapiens
  misc_feature (155)..(247): n is a, c, g, or t
  misc_feature (535)..(576): n is a, c, g, or t
ttagtgcagcacttgctaccatcttccaatcctttccccaaccaggtgggatagaagatgccatctgattggaatatgaaaattaaagcatttctctaataacatagtaccattgatgaagtctccatagattttctaacccaaatgtgtgtgannnnnnnnnnnnnnnnnnnnnnnnnnnnnnnnnnnnnnnnnnnnnnnnnnnnnnnnnnnnnnnnnnnnnnnnnnnnnnnnnnnnnnnnnnnnnagatactttctgtcgccattacgttgcaccgttcagagctgcaagacagcagtacagatagggagaaatgcccaggagcatctcatcatgtggtgcatttagctcacttcacaagccgtgcagctgtccagagtctgtctttccatcagtcctcctcttttctcttcacttctgcttggtttttatgaaaacaatggctctgatggattttgcacctgtgctagcgcttgggaaaggtccatgcaggaatgggcacagtcacatgatgaatgagatggcatcatcccnnnnnnnnnnnnnnnnnnnnnnnnnnnnnnnnnnnnnnnnnngaacaggactagaaaacttaattttttttgacatatctaaaaaaggggacaagaacagtagcatttgttctccccatggggacaggaatgaagagggaggagggaagagggacttgatttcttctgttcacaagagaatggttggaggggattcttcagagtttttcaggggatgggacccaaatgtagtgcccagactggtcctcaatgatttgtttgattttgttataaatctcttccagtgagtcaccctgtacaatggctgtaaagtactctccaaattcctgctccagtttcatggctttgtcatagatcttatttgcttgttcatatgtctgccttcggttcatttccatagatcttatttgcttgttcatatgtctgccttcgcctcgtgcc

SEQ ID NO: 128288 - DNA, 1794 bp, Homo Sapiens
  misc_feature (80)..(166): n is a, c, g, or t
  misc_feature (1062)..(1074): n is a, c, g, or t
aggatgtggggacctccccatcttgggttggtgggctatttggaaacccagtgttcctgggggcttgggggtggaaggannnnnnnnnnnnnnnnnnnnnnnnnnnnnnnnnnnnnnnnnnnnnnnnnnnnnnnnnnnnnnnnnnnnnnnnnnnnnnnnnnnnnnncagctcgggctagcttgatcatccattaaggaagagagcccctctggccccccaaaagtttggggatgttcttccccactgctttgccccacgccctcccttctccaactactttaagaaaggtctctgagcccacagttcattgcaactatcgtttattaaaaaatatatgtctccttggaagaaacactggtaaacccactagtatcatgcttactttgaatctttgtttctcttccctgggagggggagggctgagcacggttgagactttgccacttagttaacatcagagaatcaacctccctgctcacccctcctcaccagagtcacagtcggctgtcactttatccctttttgccttcaagccattgtactgcccagggaaagccgctgtcctttccttatcctcatcctgggtcccatgctttatacagttagcctcattctgctggttggacaactgttaacagagttcccggattcggctggtagtgcttaaagcatcctcaacattgcctcgcttgcaccagccctaacccagcgggctaggaaacaagtgcctcaatcctagggccaagcacttctctgttctcccctgcgtcgtccctccagtatggaggcgagggaggcacgttggcttcaaaggagcacagtggtgtggggggggacctgaaccacacctgctgcctgcacttgtggcggtgaagattcccttgatcacagtcactgccatcagactctgggaaaaagcaacaaggtttcacagctcaccagtaagcgaatcttagctctacagctcaaatgtacagcataaagtctactttcctcttgaagaaaccataagctaccagctgttggggaggggctggagcagagcatatgaagcagctgcnnnnnnnnnnnnnccaaatcagactcatgacgcagctgggccaagcaagccaagtgctgtcccgccatcccagcacagaactggaaggcaagtgactccctgtccctgttggtggaacccaggaaggaacctcagcagagccctccgtgtcctcctctcagcccagcccctgctttcccttctgctgacaggacaaccaggcctgtgtcacctactccatcacaaggcctggctccttcaggacctcataagcctttagaaccttggcaaattggattctatgcattcacttaaatagtaaaagtaaaatttgcaataatgaaaaggctgacacagtagcacaacatggttttggtttaacagcagcttaaaaaggaacaaaaaggaaacctctcatgcagacacatcaggtggcataaaacaataggcaattccacgcggagcatcattagccattctctctgtccgcacacaggactctggctgcacctcaggggcagcagctgcatttcaggtcaagtctctcaccctctcaccccaggcaaaagcccttcctctccggcctcaggctgacccctcctagctctcaagagaatgaccaaatgcgagtgcccttagtgcagcacttgctcgacgcgtgggcgaacgcgtgggtcgacgatatcccgggaaatccggaccggtaccagcctgcttgtttttaacacagcggttctatagttcactattgcct

SEQ ID NO: 128289 - DNA, 402 bp, Homo Sapiens
  misc_feature (330)..(342): n is a, c, g, or t
aactactacatttaatagccttcttctctaacacagtaatttttatttaaaaaggagactaaacagaagtcaggggtaggtggttctccatgactgcaaataataataataatgatgattttttttaatgtacagctctcacacaaatttcattttgtgaacacactggtaagtacacgatgctggggcttccaaaatgtggcgtatcccactgatggctccaacttgcgagtgggctcagttctgtaattggaatgaaaggaattttaacactatttagacaaagatcaaacgcagcgtaaaggggaaagctagatttcctcatatgannnnnnnnnnnnnaaatttagagacttattgtaatgaatggcacttactcaggatttaggagttctttgtaag

SEQ ID NO: 128290 - DNA, 685 bp, Homo Sapiens
tctaccaagcccagaaacaactatacattttattgttgagaaacattttcctaaataagtgttttcacttcattctttactgaaacagctcttccttgacctgtcgaaactgtgctggctgtgttcaacataactagaggtatctttggcattttcttcccttagcttcataacttgtagaatatcttgtacaaaaaactgtagatttacagaaaaatatgcatataaatcacttattaatcccaaaatgtagtaaataactagcaaaaactttatcaaatccatttcatacacaaactggacagatcagttgcacataacctctacatctgcagcgttttataaattggtgctttgacattgaaaaggaggtttacaaaaagacccctctcgtaatatcagtgactctaaattatcccgctgccattgcttctcaaattccattgaatttatactaatcactccaatatcaccgttcttacaaaagcagttattttaaggaaaaagttgcagtgcaatcatgataaagtaacattcagaatttcatgttaccaagagtcgagcagagtactaattttccctttacaaacacacatcgaaaacaagagcttcatgcacatccacgtagaaattcgaagtccgacggggtagtgtgtttcatcacacggaaggcgtcgacacattc

SEQ ID NO: 128291 - DNA, 953 bp, Homo Sapiens
acccccttactgccattctgcatctttaatcttgatccaggtctaggataggatttaattggaccagccccattacgagcttcaaccatggtcttgtgtttagatcctgtgttgtgtgcctctagctgtgacagggagttcacagccactttgcatagtgaacaataaagtaattttttggctttttcttcttctgattcaacacagtaccgggagctccatttgtgctcttggaggcgagaagtggctgctccaggtggcatgggttgttttgccagattttgaggagaaatgagccagctttcagaggcttgatgggctgactggaactgctggctttttagcttcccttgtatcttctgatttgtcagagttgttgcctgtgattggaggtgatggagcagctgggattagcctttgcgctgtccttggaaggagccattttgggtttatttttcgttgcgtctagtgctttgaccttcttggcatgtttacttcctttgtagtgggcctcggcctggctatctgagttaaagcgaagctgacagacattacaagaaataacttgtttcttctttgggggaatggatactccaaatgtatggcttaataaccgctttttgcacaggatccattgtgttaaaatttggaaagagcccaacagcagaactactgtccagctggaaaagacataaatggtttgatatccagtgaaggctgcatcatcagggtaggtgtgcgcacaagagcaggaagggtagtagtgtggcatgtactgcctttgtttttaaggttacagtccacgttcacgtctgcatttgagcactgtacgagatgttacatttaaaagtaaataattccatcatctcaacctggtgctcccgtgaaatgtggtgcttaggaaacagccggcaggcagtgcttctgaacaatcatacgtcctgtaattgccg

SEQ ID NO: 128292 - DNA, 1687 bp, Homo Sapiens
  misc_feature (566)..(566): n is a, c, g, or t
ttttttattgtcaattattttattcaaatgtttggaacttaaacacaaaatcatcattaagttttcacaaaatgaggcatctgtcgcttgaaaggcaaaaaatatttcagaaatatgtttacagaaatgtaaaaatattaggcatcaagacagatgtgaacgtattcagtagcttgtcttgtctgtcagtcttcctctgagccgaagatcttactgtactcactcagcatgagctcagctatctggttctggtagaccatgtggatcgccatgtttcctgtttcattttcagctcgcagaagggtaggtccaaatacaatccccaagctttgcgtggacatgaggttcttggaggctttggccactatcttagttagatgtccaaagaggactttcatggtgtcacgatttggcggagggagtttttgtacaagagattttacagcttcaattcttgtgttgttgtcttgctttttgatcgcttccacaaactgctcaaagaaactgtaagggaagagcggctcaggcagctcccggaaaaacatcttcagtgctccggtgacaancgtgatgtcctcccactggctgtcgtccaaattcagcttctcttcttgttgacaattaatcttaacttctgtattgttgccagattgccactaactcgatatattccatcaacatctagacctcttttctcaacagcttcaatgcattgctttacaaaccacggaactgtggaattttcacgttcacacactttgtgcagatgagagccaaaaatttgatctttaataagtcctttttcttgcagagttttcagggaaggtcttcgggtaataaacttctttaatctgcttttaactcgatttttgtcgcttgtatcgggaagcaactgtgatgcagtctgaacattaaagattttctgtgctcctggtttctgttcttttatatcactgtcgtagtgacttagcaattcagtgctagaggatctttggattttgaataattccaggtttcttgatggacaacttgaatcctttggcaatctgtcaattgcatttttgatagcgtggaaccaatccaatatgatgaagtcaatatctgactgtagaaggaactcatttcctgatactgttgtgatctgaaagacattctttctgctcgatttttccttggcccattcaatgtgtgctccacacaaatccacactttctggtttgtgcccagttttcatattggacagagcctgttgcttggattctttgtaaaattcaattcttcgactagaaagaacaatccaggaagtagaccagtttttccttagtttctttcctccatctgcaattttagctttttgcagataaccttctttttcaaccatcagttgttccaatggaggaatgacatctttcaagatatgctgtgaatgattccttctgtgtctggatataggttcagtgaccttcccgacatcggtgaggatcatggatttactttggctgagcctgtcatggtggctgttggcatttttgattctcatttgcacagctcctgtgccttggcgggtagaattcagtgtttccacggaagtatcagaatttgtagatttctgcatattatagtgctatccttttctcggcaatgacctgttattgaaactgccatcaactcctaactgttaatgact

SEQ ID NO: 128293 - DNA, 1626 bp, Homo Sapiens
  misc_feature (1507)..(1541): n is a, c, g, or t
ttttttactggagcaaaatgaattttttttattgtacttcagggcaacaagtcaacagctgcaggaaaacaaaaccaggtccaatctatgatctaagaggaagtcaggaaaggcttggaagagagatccaaaggccggcctggcaaggggaatcccacatgagaattcctgggagagagcaggccccaggcagcaaggtcatcttgcctgcttctctgtaagttaatccttcacagggagccaaggcttctcttgactgcttggacaagagggtaagggccctggttgcaggatttgccagtgaagtcatccatgtcaatagaccagatcatggctcctcccaggtttaaattctttaagaactgaaccttggtctccatactcttcacatcatcatagcccacccactggttccccttgactgcgtagggaacctgctgatcctggagccgcgtgatcttggctcctttcaggaactggcagatctcataataggccaggaagcctgaagactctgtgatgggtccagcagctccagggccagaggcaggggcccccacggtggtttctgcagaggccagtgtgaaggagtgcccatatgtggggatgcccatgaccaccttctctgatggcattcccttatgtatccagtaccccacagcatattccacattgtagtaggagcttggccctctgtcctgccaccccttgctcagagggctgttgtggccagtgataaggggcttttcccaagacccatggaagtcaaaggacaggaggttgatgaaatccagatcttttgccagtttctcaacttgatagctgttatcaatcatttgcctccctgcagatacgcccgcagtcaagagaagcctttccttggtggattttgtgaagtccttctgaaaggcttctgctaactcatgaatcagcacagtgaaatgagtgttttctttctgatctgggtagatccagcttacatccagtccatcaaagttatggttcctcagaaacaggattatggagttaatgaattccaagcgtgatgtagaagaatccaccatagggtggaaccctttggaaccaaacaggtaccctccaatggacaagagaattttcagtttgggattcttggttttgagactgttgatggtctggtagagcatcacttcactcttgtccttgatgataaccttgttgttttcgatgctggcgaatgaatagatgagatgagagcataggaaggggtcaatattctcaggggtgaattttcctggttcctgccggtcctgggaccagttggtaaagtagcaaaccagtttgtaggcagatcctccctggagaagcagcaagaccactacacctgcccagagagacttctggtccatggtggttgctcccatatccttggccagcttcttctgggatacacattctctaggtcttttatccactccccggccgtaatggccgaattcccgggcatatgtccggtaccgtcgactgnnnnnnnnnnnnnnnnnnnnnnnnnnnnnnnnnnncggccgcttcctcgctcactacttcgctgcgctcggtcgttcggactaatacccgcctagcgccctatagtgatctattacattt

SEQ ID NO: 128294 - DNA, 820 bp, Homo Sapiens
aggctgggcccttctgtccctggccacccccttggttcagaggggctgttgtggccaaggattaaggggctttttccccaagaccccatggaagtcaaaggaacaagaggttggagaaaatccagatttttttgccagtttctcaaacttgatagctgttatcaattcatttgcctctcctgcagatacgcccgcagtcaagagaaagcctttccttgggtggattttgtgaagtccttctgaaaggctttctgctaactcatgaatcagcacagtgaaatgagtgttttctttctgatctgggtagatccagcttacatccagtccatcaaagttatggttcctcagaaacaggattatggagttaatgaattccaagcgtgatgtagaagaatccaccatagggtggaaccctttggaaccaaacaggtaccctccaatggacaagagaattttcagtttgggattcttggttttgagactgttgatggtctggtagagcatcacttcactcttgtccttgatgataaccttgttgttttcgatgctggcgaatgaatagatgagatgagagcataggaaggggtcaatattctcaggggtgaattttcctggttcctgccggtcctgggaccagttggtaaagtagcaaaccagtttgtaggcagatcctccctggagaagcagcaagaccactacacctgcaatagatgggtggaaagagaaatctgttgagccaaacctggttctgctgtcccagataatggcagtgaaaatgtgggtgtgctcacatacaagatagagccacacttcatctccc

SEQ ID NO: 128295 - DNA, 269 bp, Homo Sapiens
gatctagaggatcccggctcgcgagcagatacgcccgcagtcaagagaagcctttccttggtggattttgtgaagtccttctgaaaggcttctgctaactcctaggaaaaacaaagaaacaaggtgcaatattccccttcccagagtacagtgctaagcttcttgcctggaatccatgaggtttctagaaccacattagatggaaaggatcaaccctttcctccccaccccacatggggatgccttgtgcctgtatctgctcgcgagcc

SEQ ID NO: 128296 - DNA, 714 bp, Homo Sapiens
aaagccctgcatagaaattcccaaggtatcaaaaacaaatgagagaagccttattcattacattagccaagaatgggtgtggacgtgaacattctggaagggtgacgctgatgacttgagaatgtctaaggcacactttgtgttctttgcaacatcccatgagcaagtacgcaggggactgtgtcctcgggattcaggggagctcttcctttccctggcatggccctgggtgcctggtgaccgatatgcagcacccctgggcagaactccgtctggattcagtgcacgccctgcttgggccagcacagctctcgtgcaaaagcacctttgcagcttctgatcgcatcgtcgagctctaggcacttgttcaggcctggcactgcagatctccagccgatgaagccctgggtggtctgtgggactgggggggatggaaagaccttgatgtacttctccactggggtcaccggccggatgcggaaacgctcaggaagctcgattttgggctttggggtggggagatcttcttcacacttgatcaactcctcaaaaggggttgttaaaaacccccagttctggggccagttctgccgtgcttccgattcagccttcagacggtatttccagatctcatcctgacccacaaggttcatgcgttcagccgccgcggtgctgagaggtttctgcgccatgaggcctgggggctctgtgcgc

SEQ ID NO: 128297 - DNA, 673 bp, Homo Sapiens
ctcacgcttcatgtaatctgaagaatattacaggctctccgtcttcagatataaattatttataacgttacagaacaagcagcgaattcaaccacttaagaactaaggaagtctacatggtgttaattgctggccacagtcctcccgatctggttttttaaaaaagtcccccgggcccccatttcagtagacgtgcaccatgccgtagaggaacgtccagaacaggacgtaggtgaagaggcccccgatgaggcctcctgtaaagagaggtctccgtgatttgaaatatttgttccacctccttcccgccttgagaatgaggagcagggagagcaggacggaggcgagcaggtagaagatgaagccgtagaggccggtgaggccgaggatgccggccgtggcccccgacagcgctgacaccgaggtccggcaataatccaggacggcggcgttgccccgcacggccgcctcgctgatgaacggcggcccttcccgcttggccaccaccgcggccatcgcaccagcccgggctcggcctctcgctttctcgcggaacaccgcggagctggaacacggcgccggacacactacttagcgttccctcagacgggcagtggaagaaagcccgcggcgcctcgtgccgaattctcaacccagcctcgtacctagccga

SEQ ID NO: 128298 - DNA, 943 bp, Homo Sapiens
gatacaacaaaatcaccacaaacctgttaactaacttaattaaattcctggcttaactctgggggccagtaggcccgccaagaaggtcctcccaaagccaaggaagagtttccacgacagcctttgtaacccgccccggcctgcctataatacgcccccctattgggccactgtgaacaaaaaacggggatacgcctaaacttgggcccccgcacggatatcttttacccgccgcccctttgttttctttgtattttttttgtctcacgcttcatttaatctgaagaatattacaggctctccgtcttcagatataaattatttataacgttacagaacaagcagcgaattcaaccacttaagaactaaggaagtctacatggtgttaattgctggccacagtcctcccgatctggttttttaaaaaagtcccccgggcccccatttcagtagacgtgcaccatgccgtagaggaacgtccagaacaggacgtaggtgaagaggcccccgatgaggcctcctgtaaagagaggtctccgtgatttgaaatatttgttccacctccttcccgccttgagaatgaggagcagggagagcaggacggaggcgagcaggtagaagatgaagccgtagaggccggtgaggccgaggatgccggccgtggcccccgacagcgctgacaccgaggtccggcaataatccaggacggcggcgttgccccgcacggccgcctcgctgatgaacggcggcccttcccgcttggccaccaccgcggccatcgcaccagcccgggctcggcctctcgctttctcgcggaacaacgcggagctggaacacggcgccggacacactacttagcgttccctcagacgggcagtggaagaaatgcccgcaggcgccatcttgctcctcggccgattccaaccagcctgacctagctagt

SEQ ID NO: 128299 - DNA, 792 bp, Homo Sapiens
tccaaataattctcaagacacatgtgcggtgtctggtttattcaaagtggctgtcagaggcccgaccatggagcaggaaccaaatagttgggagctgtggggctgaacagggcagggatttccaggtatcagaaggtaaaaggaggtcagctgagcagccacagcagcattagggccaggctaagcaggaaaggccaggctgcccagggcccagccccactcatggctgcagcatagaacctcgccacctcctcattggggttgccctgggctgggtcgaaccacatctggatgcagcggccactccctcggctgtagttgctgaccttgtaggagtgagtccagatttcattgcacagaacagtgggtgtggggaagtagaaatggaaaggttggcaggcagctcccactgcgcacttgttaaaccctgaagtccagttccagcccttgtgccagttgctcttgcaggtgtaggaggtgcgacaatcttcccaccattgctcacagtcctctttgcacaggggcacgttcagtacccgctctttgcgccagctctgatccacctgctggatccagggccccaagttgggggagcactcgtagaggcaggtgtcctggatgaaatgccgtttgcaggcaggtgccatctctccacagtggttccagttgaatctatataggtaggaaacatccttatgggcttcctggctggtgttggtagaacagcaggcattcttcctccagggtcgacactgctcagtacgagaggaaccgcggttcagacattatggt

SEQ ID NO: 128300 - DNA, 1009 bp, Homo Sapiens
tgcagagggctccaagccccgcccatggccggaccaatagtggaccttggcgtaacaggcaggattccaggtacagaagtacaagaagtcacctgacaaccccaacaccattaggcccagctaagcagcaaacccggcctgcccaggcccacccccactcatgctgcagcatagacctcgccacctcctcattggggctgcctgggctggtcgaaccacatctggatgcacggccaactccctcggctgtagttgctgacctttgtaggagtgagtccaagatttcattgcacagaacagtgggtgtggggaagtagaaatggaaaggttggcaggcagctcccactgcgcacttgttaaaccctgaagtccagttccagcccttgtgccagttgctcttgcaggtgtaggaggtgcgacaatcttcccaccattgctcacagtcctctttgcacaggggcacgttcagtacccgctctttgcgccagctctgatccacctgctggatccagggccccaagttgggggagcactcgtagaggcaggtgtcctggatgaaatgccgtttgcaggcaggtgccatctctccacagtggttccagttgaatctatataggtaggaaacatccttatgggcttcctggctggtgttggtagaacagcaggcattcttcctccagggtcgacactgctcatgcaacttgtcctcggggcctggcttttccttgtggtgcttggcgttcatgcagacattgagaagctcagtcctggcccatgcaatccttgtctgagcctcccctactacagccacccacactagaaggagcagcagctgtgttgtcatccgctgagccatgtctgtcccttgaggccacgccggagaaatctgtactctcagggaataccaggtgatcctttgggttcagttcctgggagaggaggtggctctccgtctggctcaggcttctgctctgctctacactcccccttgccttcaatcgtgccgaat

SEQ ID NO: 128301 - DNA, 923 bp, Homo Sapiens
atgtttgctttgttttattaactccttggagggacagaacactaccaattacacccacaaacgttatcgacatcaacagaactgtaaatgacaacacggcaatattctgcactttccctatgcctaggagctaattccactttacatatattatcttattatttcacacattaaccctggaggcatgtttggagttgcctaatttttatgtacactttttgataaggaactaacaaaaataacttgctgaaggaagaaaagggagactaagtccagaactgaatgaaaagcacatggtttcttcatcctccatcaccaggctgtctaacgaggctgaagaagtaccatccatgagtaagtgcgtcaagggcaaacaaacatcatcgcatatggacagtggtgtgaaattcgagaaatccgaggagggttaacaacaacaaaaagcacaccaccacgccgatcttcctcgggtcccaggttggcaactcaacgcccgggaggaatccccccggaggcgcgccggtcctactggcctcactccctacctcctggaggtccggagtcccgctcctttccctcagcggtacaatacccgtgtcggtccattccctcaccgtgagtcgaggactagttctcctgactaggcgaccggcacacaccgcctgcgaccagctccacagcagcggtcctgctactgcgaagtaggctcaggtcaaccggcaggaaacgactcaacgcgcagccgccgcggcctccaaccaccggtgggcagaggggcgctaggcagtcctcgatccgctcgccgcgatccggcggaggaggaggagcagagggaggcgagccgcagcgctgcggcgaggagcccagggaggtaggttgtcgtggggctcggtccgccattctggcaattccagtcaaacggc

SEQ ID NO: 128302 - DNA, 893 bp, Homo Sapiens
  misc_feature (793)..(793): n is a, c, g, or t
ggggacccttttttgcagtctcaggacgggcgctttggagccggccccaggcagcgtgtgtcggtcgcctagtctggagaactagtcctcgactcacgtgcaaggatgatgctgaaaggaataacaaggcttatctctaggatccataagttggaccctgggcgtttttttacacatggggacccaggctcgccaaagcattgctgctcacctagataaccaggttccagttgagagtccgagagctatttcccgcaccaatgagaatgacccggccaagcatggggatcagcacgagggtcagcactacaacatctccccccaggatttggagactgtatttccccatggccttcctcctcgctttgtgatgcaggtgaagacattcagtgaagcttgcctgatggtaaggaaaccagccctagaacttctgcattacctgaaaaacaccagttttgcttatccagctatacgatatcttctgtatggagagaagggaacaggaaaaaccctaagtctttgccatgttattcatttctgtgcaaaacaggactggctgatactacatattccagatgctcatctttgggtgaaaaattgtcgggatcttctgcagtccagctacaacaaacagcgcttttgatccaacctttagaggcttcaacctggctgaagaatttcaaaactacaaatgagcgcttcctgaaccagataaaagtttcaagagaagtatgtctgggataagagagaaagcactgaggaaagggagtcctctgggaagaagtggttgaancagggcataaacacggcgtaagggaacgccacaggatgcagtttggaattggggctgaaaagagctaaaagaggcaaaggttctttggggtatgttttcc

SEQ ID NO: 128303 - DNA, 975 bp, Homo Sapiens
aaaggacttttgcccttcttagtctctttcagccccaatttccaaatggcatttggggcgttccctccacccggtgttatgccctggttcaacccattcttcccagagggactcccctttctccagtgctttctctcttattcccagacatatttctcttgaacttttattctggttcaggaagccgctcatttgtagttttgaaattcttcagccaggttgaagcctctaaaggttgatcaaagcgctgtttgttgtagctggactgcagaagatcccgacaatttttcacccaaagatgagcatctggaatatgtagtatcagccagtcctgttttgcacagaaatgaataacatggcaaagacttagggtttttcctgttcccttctctccatacagaagatatcgtatagctggataagcaaaactggtgtttttcaggtaatgcagaagttctagggctggtttccttaccatcaggcaagcttcactgaatgtcttcacctgcatcacaaagcgaggaggaaggccatggggaaatacagtctccaaatcctggggggagatgttgtagtgctgaccctcgtgctgatccccatgcttggccgggtcattctcattggtgcgggaaatagctctcggactctcaactggaacctggttatctaggtgagcagcaatgctttggcgagcctgggtccccatgtgtaaaaaacgcccagggtccaacttatggatcctagagataagccttgttattcctttcagcatcatccttgcactcctggaggtccggagtcccgctcctttccctcagcggtacaatacccgtgtcggtccattccctcaccgtgagtcgaggactagttctccagactaggcgaccgacacacgctgcctggggccggctccaaagcgccggacgcgtgggtcgacgatatcccgggtattccggaccggtaccagccttgctt

SEQ ID NO: 128304 - DNA, 1631 bp, Homo Sapiens
gggggccaaggacggccccaccaaaaaatatattgaatggggggccggtataggaaaaggttgggtggagtgggtggatgagggagggaatgggggggctgttagggggtcttggcgaagaaagatattttattttttaggaaaagagccataattatcttaaatgtgaaaaaccacatccaataaactgatataaagttttaggaacaagggaatatcttattgtcacgcattcacagtgaaacccattttaatgcaggtccagagccaactgcagtcctgtccaatcccataggtacaagggcctggctcctcttcctgtgtactgcccgacttcctcatcttactgggtccagcataaagcagatgtccactgtcttcctcacatgctgtgatcttggcttagaggtaggcacagtgccgctccagcagcgaggggttcgcgttacttaggaacagcagctcttttttcccttcttctgtaggagctttctcatgttgaagccaattgttttccaaataatactgaatacaactttcaaattcctttgggttatagttggaaaccaggatgggaataaagggatccagggcatcaaatccttcctttcccagcaactcctggggcagataggctttccggggcttaaagagagacccagtctggctcaaagccgacacaatggcgcctccatgccaatcatttttcatcattttcctcaagttgtgaacaagtgctaattcctcgggggcaatcgggcttttatcttctcttttcagagtggttcttccccaaagagcattgattccatccacggccactaggaggtgaaacatacccaaagaactttgcctctttagctctttcagcacaattccaactgcatctgtggcgttcctcacccgtgttatgccctgttcaaccacttctcccagaggactccctttctcagtgctttctctcttattccagacatacttctcttgaacttttatctggttcaggaagcgctcatttgtagttttgaaattcttcagccaggttgaagcctctaaaggttgatcaaagcgctgtttgttgtagctggactgcagaagatcccgacaatttttcacccaaagatgagcatctggaatatgtagtatcagccagtcctgttttgcacagaaatgaataacatggcaaagacttagggtttttcctgttcccttctctccatacagaagatatcgtatagctggataagcaaaactggtgtttttcaggtaatgcagaagttctagggctggtttccttaccatcaggcaagcttcactgaatgtcttcacctgcatcacaaagcgaggaggaaggccatggggaaatacagtctccaaatcctggggggagatgttgtagtgctgaccctcgtgctgatccccatgcttggccttatggatcctagagataagccttgttattcctttcagcatcatccttgcacgtgagtcgaggactagttctccagactaggcgaccgacacacgctgcctggggccggctccaaagcgcccgtcctgagactgcaaaaaacccacgcgtccgcggacgcgtgggtcgacgatatcccgggaattccggaccggtccag

SEQ ID NO: 128305 - DNA, 752 bp, Homo Sapiens
aaagagagacccagtctggctcaaagccgacacaatggcgcctccatgccaatcatttttcatcattttcctcaagttgtgaacaagtgctaattcctcgggggcaatcgggcttttatcttctcttttcagagtgttcttccccaaagagcattgattccatccacggccactaggaggtgaaacatacccaaagaactttgcctctttagctctttcagcacaattccaactgcatctgtggcgttcctcacccgtgttatgccctgttcaaccacttctcccagaggactccctttctcagtgctttctctcttattccagacatacttctcttgaacttttatctggttcaggaagcgctcatttgtagttttgaaattcttcagccaggttgaagcctctaaaggttgatcaaagcgctgtttgttgtagctggactgcagaagatcccgacaatttttcacccaaagatgagcatctggaatatgtagtatcagccagtcctgttttgcacagaaatgaataacatggcaaagacttagggtttttcctgttcccttctctccatacagaagatatcgtatagctggataagcaaaactggtgtttttcaggtaatgcagaagttctagggctggtttccttaccatcaggcaagcttcactgaatgtcttcaccgggtcattctcattggtgcgggaaatagctctcggactctcaactggaacctggttatctaggtgagcagc

SEQ ID NO: 128306 - DNA, 939 bp, Homo Sapiens
ccactaggagtgaaacatacccaagaacttttgcctctttagctctttcagcacaattccaactgcatctgtggcgttcctcacccgtgttatggcctgttcaaccaccttctcccagaggactccctttctcagtgctttctctcttattccagacatacttctcttgaacttttatctggttcaggaagcgctcatttgtagttttgaaattcttcagccaggttgaagcctctaaaggttgatcaaagcgctgtttgttgtagctggactgcagaagatcccgacaatttttcacccaaagatgagcatctggaatatgtagtatcagccagtcctgttttgcacagaaatgaataacatggcaaagacttagggtttttcctgttcccttctctccatacagaagatatcgtatagctggataagcaaaactggtgtttttcaggtaatgcagaagttctagggctggtttccttaccatcaggcaagcttcactgaatgtcttcacctgcatcacaaagcgaggaggaaggccatggggaaatacagtctccaaatcctggggggagatgttgtagtgctgaccctcgtgctgatccccatgcttggccgggtcattctcattggtgcgggaaatagctctcggactctcaactggaacctggttatctaggtgagcagcaatgctttggcgagcctgggtccccatgtgtaaaaaacgcccagggtccaacttatggatcctagagataagccttgttattcctttcagcatcatccttgcacgtgagtcgaggactagttctccagactaggcgaccgacacacgctgcctggggccggctccaaagcgcccgtcctgagactgcaaaaaagggtcgggtcccccggccgtaatggccgaattcccgggcatatgtccggtaccgtcgactg

SEQ ID NO: 128307 - DNA, 789 bp, Homo Sapiens
attcccaagacatacgttcttttggaactttttattttgggttcagggaagcgcttcatttggaggtttgaaaattcttcagccaaggttgaaaccctctaaaggttgatcaaaggggtggtttgttgtagctggatggcagaagatcccgacaatttttccacccaaagatgagcatctggaatatgtagtatcagccagtcctgttttgcacagaaatgaataacatggcaaagacttagggtttttcctgttcccttctctccatacagaagatatcgtatagctggataagcaaaactggtgtttttcaggtaatgcagaagttctagggctggtttccttaccatcaggcaagcttcactgaatgtcttcacctgcatcacaaagcgaggaggaaggccatggggaaatacagtctccaaatcctggggggagatgttgtagtgctgaccctcgtgctgatccccatgcttggccgggtcattctcattggtgcgggaaatagctctcggactctcaactggaacctggttatctaggtgagcagcaatgctttggcgagcctgggtccccatgtgtaaaaaacgcccagggtccaacttatggatcctagagataagccttgttattcctttcagcatcatccttgcacgtgagtcgaggactagttctccagactaggcgaccgacacacgctgcctggggccggctccaaagcgcccgtcctgagactgcccccggccgtaatggccgaattcccgggcatatgtccggtaccgtcgactg

SEQ ID NO: 128308 - DNA, 794 bp, Homo Sapiens
  misc_feature (519)..(617): n is a, c, g, or t
  misc_feature (668)..(699): n is a, c, g, or t
tcatctttgggtgaaaaattgtcgggatcttctgcagtccagctacaacaaacagcgctttgatcaacctttagaggcttcaacctggctgaagaatttcaaaactacaaatgagcgcttcctgaaccaggtgactagactcccagaagttgagtgctaggtagtccttacatggattctttgtgccctgagtaccaatagactatggagaactgatactggagttggaataactgtatcatttttaatttttttcatacgttttgctcacagtggactcataacttgaaactcatttatccatgtgaaataaataggcaacagtaagttgttgccattttgtgggtagcaaagtgaaatccagttgattcattgacttttcaaggtacagcctccaatccctcgcaagcacatttccaactacatgattttctccagacaatatctttttagggaaccagaaatgtattggaaaaattcttctttaccctggtgattcttagataccctgtctagacnnnnnnnnnnnnnnnnnnnnnnnnnnnnnnnnnnnnnnnnnnnnnnnnnnnnnnnnnnnnnnnnnnnnnnnnnnnnnnnnnnnnnnnnnnnnnnnnnnntatgtatgtttattcaaggctccaagcagaaatggattagaaagcattcannnnnnnnnnnnnnnnnnnnnnnnnnnnnnnnatgagccattgcacccggcctcagctttactttcctaacagggatctgatagctaaaggaaaagcctttgccagtcacgatggctcaaacctata

SEQ ID NO: 128309 - DNA, 611 bp, Homo Sapiens
  misc_feature (18)..(18): n is a, c, g, or t
ccaacttggttccattcnccctgtttttttcaggtacaccaattaaatgtagatttggcactgttcatgacttcaggtaaagatggctcatatttgacagcttacagaataacatgagagtgttataaccacacattcccccctccccacctttatccttcctgaattgctttacaagccgtttaagaacaatttaatattcctgtgtgcagcagttcagttttcttgttttgctttctctcatttttctctttaaggctcaattgtctgtttattttcatttgtatttattattgttgttaagtgacaaatggtcattgaaacataataccttacagtaagtaacctcttttttgttcagtacaattctatagtttttgtgagataaggaactgattctgcttactatttctgtcacattggtagaaaatgtatagcccctatttgcaacaacacgtgaatcatattgagaggaggccagtctgaattatattttttatggaaaaatactttgaaataacttaggcacgaattttaagtacatttcttctgcagttgttttagtgaatgtaatgtatttaaattttaaataaaggacatttattaacctg

SEQ ID NO: 128310 - DNA, 1240 bp, Homo Sapiens
  misc_feature (1219)..(1219): n is a, c, g, or t
ttttgtttaaagagaatttattctatagagtgcattcttgcactctataggtgacagaaaaacagactgtgctttaaataccaaacaagtaaatcagaaagcttattttctatttaaaatatatctaagacacacttatataaaaagaaaacagaccctcctaacatgtaacattaccgttcgtggcaattgttctcaaccttatcactctccttttgaccttagcattaagctcctttgctcacttctgagctctcagttacagttcttgaggtggcatcctaaccaatttgcactatctttcaggtgaagcgctggatatttcccagataattgacctccccaaaggctccttggaaaaacgaagcccagcctggaccatagcactgcctgagggctctgtatttgctcccgtggagcttcatcggggtgggtgcaggctcccaaactcaggctttcagctgtgcttttgcaaaagggcttgcctaaggccagccatttttcagtagcaggacctgccaagaagattccttctaactgaaggtgcagttgaattcagtgggttcagaaccaagatgccaacatcggtgtggactacaggacaaggggcattgttgcttgttgggtaaaaatgaagcagaagccccaaagttcacattaactcaggcatttcatttattttttccttttcttcttggctggttctttgttctgtcccccatgctctgatgcagtgccctcttcattttcatcttcaccatcctctcgaagaaccatgtctaggatgtttcctttgatcttgaagtctcgtgaggtgctgagcttcatgtgctgcatcaggttcaccttggacttcttagaaaggtggatgagaaatttttcatactgttctatggcaaagatgaggttagggattggcttggtttcccgaagaactctggccatggctgtggcaacggcagcaggtttctcctttttctctcccgtatagttcaggctcttactcttattctgtacgtaagaaatgaaagaataacacaggggggtcagatgagaaccagacagcttcaccagcttttccatattttttggaattcctccggagctctgacacacctggagataatatctgacaagggctgtaagtgtggtgtacattttgcacaagtcctttaacaaggtgtccacacagctgcctgatggcagagctgctgaccangctcgtgaaaatgtaagcgag

SEQ ID NO: 128311 - DNA, 813 bp, Homo Sapiens
  misc_feature (33)..(33): n is a, c, g, or t
  misc_feature (35)..(35): n is a, c, g, or t
acagggttgtttggtttgtttgttttttggggngnggcttctttttatttccactgccttggagcaggtttatcacgttagagcattaattctttccccttctagggcactgcatcagagcatgggggacagaacaaagaaccagccaagaagaaaaggaaaaaataaatgaaatgcctgagttaatgtgaactttggggcttctgcttcatttttacccaacaagcaacaatgccccttgtcctgtagtccacaccgatgttggcatcttggttctgaacccactgaattcaactgcaccttcagttagaaggaatcttcttggcaggtcctgctactgaaaaatggctggccttaggcaagcccttttgcaaaaagcacagctgaaagcctgagtttgggagcctgcaccaccccgatgaagctccacgggagcaaatacagagcctccaggcagtgctatggtccaggctggcttcgtttttccaaggagcctttggtgagttcaattatctggtaaatatccagcgcttcaccctggggaatcccgtatctcctttccatcccagttgggttggaaggggttttacaatccatggtcacttccttcctgaggcaccggtcaatatcgactgcactgaaaaaggcgactgactggggcaagtcattcagacccagcttgtaggcaaacatgcacctggtcaagaggttggtgatctgcaaggccagggcagcgcggtagcggtcctcctcccgcaccaggtagcgaacctcgtcatggatgctgatgcagaagcgcccatctatggcacc

SEQ ID NO: 128312 - DNA, 1026 bp, Homo Sapiens
ttttttcttaaaaagaaatggtttaatttcatttttatctgggaaaaaaaccacaaatacgagtttaaaatgaaatgacaaatacattgacatgtcaagtgtcattttttatggtattatgcttattcaaggtgtgaagatacagaacctctttataaatttctggcatcaaagattcccaccgtagataaaaacaggttggttataaaatgtcaattcattaaatattcaatttttgttctttgtttttataaggaatattttgtagaaacagtataaaatagagtagacttttggaaattgaattataaaattttagaaaaaagtgttaagtcctaacttttctttgcgaaccaacaagagagtctagttttaccttggggagttacctgtgaagtgcattaggcggctagagctgtttcagagccctgggttctatacagtagaagcagccttctttagcacttagaatacgaccccagctttttccagttagcctcaatcagaaaagtttaacatacatgaatatttctatagtgcagtaaaagtgtcattttattaatttgcattatgaaaataagtctgtataccaagtaatgcataatgaatatgaatcatgtaaatttggtcacggtatttgaagttggctttggctctgaagtatttttgaattcatagaaaatattgagcttttaataaaataaataaaacattttaattgatattaataatcaagttcaaattttaatttttcatctgctactcaattttaaaagagaagtcactctcagtagtgttcccaagtgagcgattgcaccttctatgatgtgaaaaagttgctaaagatcctattgccattagccgttcttaagtgctgaacgtaactgagagaattgtttgcatagacatgctctgtcactggcaggaagtccatcaataccctttgcaggggcactccagaccttgtgttttaccagaaactgaggcaaaccgtggtcctcatgtgcctttctgaagatccctaac

SEQ ID NO: 128313 - DNA, 1187 bp, Homo Sapiens
  misc_feature (1056)..(1056): n is a, c, g, or t
  misc_feature (1147)..(1147): n is a, c, g, or t
  misc_feature (1167)..(1167): n is a, c, g, or t
ggcttctgtgattatctcggaacttaaagtatgagggtatgagagccatcagatctacccctgtggagctttttaagatgcggtccataacagaagcgggccccaaggagtagagtagccacatggaaggtgccatgtttcagggatgagtctcgattcttctctccctgtatttcatccatgcctgtaagaagttctcacgtctctccacatgccacgtcatctgaaccgccaggcgataggttattcgtattttattccaaagtccataggacacgatgtggacttgtttttccacgtgcccttgtagatggtgccatccagtgtctgtgatgttccacctcctctgttgggttgtcacctcccccagagaccttctggtctcactgcttttctgtttgtatccagcaaaacactcaacaattctgtataagaacacctatctcattattcaaaaaaaatgcatgtataaacaaaaagaaatatttcaaatatttactttacaattgttttattcaaaggaaattaaatacaaatgtatatttttcattaaaaatggggatttaaaaatagttttataattagtgttatgttgctttatcttatctttgcataaattatgtattattaaaggtttctgatatccatatacattctagtcttttttaggcagctatgagaagatttcatattcaaaagccaatgccacttttctaaagaaacgatctttgtgccaaattagtagacaattgctccaaatctctggtcttgacttccggttgtgtgaagagcagtgttttgtttttttcagagaagggaaagagccttcattctttaggtttgtttttgcctcaaagacatttctatatgggtatctaaagttttagtttataagtctcataatgatttgacccatgcagtccaacttttagatagtatttccataccccccaaaagctggcaggtggtagtcgcactagattcagaccaagactctccgcattgtcatcctaggtccttctaatgaagaagacaatactctagtttatttaacanataaaggagtctaagtacatggaagttaagggagtaagggtgggggtaatgagattattacattaaaataaagacttcacacacgtgtgtnccatgtctaaaattgttganaatctgattggagaagatag

SEQ ID NO: 128314 - DNA, 418 bp, Homo Sapiens
  misc_feature (114)..(122): n is a, c, g, or t
gctgggagaaagaactcattccctgagttcattcatttttgttgatgtcatcggtaatcttcaagacttattgaagtagagttgtatttggggaagatacattttatattcacnnnnnnnnnctttctgtagtctacctcttttactcaaactgtataaggaaatagtgactgattgttcaggtttggcattttcattgctacctgcctgcagaattaatgccctcttccttgtctaagatattactgtgttaagtgtcctgttaattataaatagttcaaaatggacagactgtcaacttgaaatttacttatgtaaaaagcttaggtgattcttagggtttccatgttcataactttacaaagctttataaaaataaaattgcaacttaatagagctaattaacttgtatttgtat

SEQ ID NO: 128315 - DNA, 921 bp, Homo Sapiens
  misc_feature (35)..(35): n is a, c, g, or t
  misc_feature (37)..(37): n is a, c, g, or t
  misc_feature (54)..(54): n is a, c, g, or t
  misc_feature (100)..(100): n is a, c, g, or t
  misc_feature (140)..(140): n is a, c, g, or t
  misc_feature (194)..(194): n is a, c, g, or t
  misc_feature (235)..(235): n is a, c, g, or t
cacagaacagttgacatgatagaattatcgactcntntagggattgcctcgagnccagatcggcacgaggcaaaaccacctcgtccgtgatgagatagcngtagataggagattgctcatcgtcttaaatgataactgtntacctatttgtattcatagacttgcatgatatgtacactcctaatatgcatctntgttccaaatctaatctagatacttgtaactgactgtagcntagaaaagagattttcttcctgttttctctctccccattttttggggtaagttttgcaaagatcagtgctgcttctcatgactctaaagtaaagctcttttggatagcacagcctaactttacagctagacagaatggccattaagaatatttccaaaatccaagtttatcaaaattattttgtgggaaatcatcaatctattttattaatgttatgtgtttaattttggacttattttgggaaaaactgttcaaattgggtccttttaagcttattttaagcagcctagaaggaagaagctacttagctaatgaaagctgagacactttaataaaagcaggatcttaagagcattgtttttccttaaaaactttatactctcagataatctgcaacaacaaaaattaagaaatccctgacttttgtagaattcccactgtcaaattctcactgacttatgagtgtgagagaagttatcttttgtttgaattctgatagaacagtttaactcctttctaaggatataaaaaattcattggaaagtgtgtatatttcaaagactctcaattatctggactgaaggcactgttctcactatggccagatgaatgggagtattctgtacatgaatcatgctgtattttaaatcaggacatcacttaagtattaatgttgtgtgtacaga

SEQ ID NO: 128316 - DNA, 660 bp, Homo Sapiens
gatattgtgatttttaagttttattgattaaattcaaacttttttatcatttacacaaagaaactgtgacagactctgagaggactaaaaggcatcaacttaaattttaacatgcatttattaaatttatatgcagatgactacactactgcaattacagaaatgagtaagaacatactctcaagatcttacagtcattggttggggtgaaagtatttcttctgtcttcatgaaaaattaaaaagatagaaaatcttgaagtattttgctaccttaaaacaactacccaccctacatttgtactaaaataggcttttgcttgttttaaaagcaattctagatgaggttatatttttacaatactgtatctcatctcaaataaatttatacattctttaccctgtctaaacttgcatgcaaaataagaaccagcaagccttcaaacttcaatcacagtattccataggctatattttaagtctattgcattagttgaaatttattttgcagagtatgttaacaaacatattctaacacttaaaaaatcattacaattttttctgtttttgtcttctaaattactctgagcagtgaattactggagggaagatacccatgtctaaaatttgtgtctggtggcagtctcagatttctgccaaa

SEQ ID NO: 128317 - DNA, 2833 bp, Homo Sapiens
  misc_feature (44)..(61): n is a, c, g, or t
ggcctgggtggcgattccggcacgagggagaactagtctcgagnnnnnnnnnnnnnnnnnncagagctgtcaagagaactttattcattggaaactgggccagagacccctcacgaagctgcaagcccctgggccctgggcccttctgtatttggaccctagtgaaatgtgcacagtctgccctctccatgccagggagagacagagaggaatgccatttttctgtgtgatgtgggagtgacaggggaaagagcagaaatccggttatccctcctgagactcccagtgagctggggtgccacagggcacgtggccccaaagtcaggtgcagatgcatcccccatcccaggggtaaactcctgagactggcttttggatcaggttgggagggagcctcatcagacgatcacaggcagaggtggctctgagggcacccgagagatactaaccccaacgcctaccagggcacaggggctctggctgaacacaaaggtttaagatcatccgaaggcccctgagttgccaaaacacccaaatgacactgatgtgttgtggccgcaaaagctggggaggaaatgtgaaggaggcaggaaaaggacctatagatctccaacagaaaaaccagaagcagacaggggtaaccccagaggcatctgggtgggccctgggcaggctggaggagagcccacagcaaatagtctcagggcccttgcatagtgacatactcaccaccctcagcatcgaagggacccactgggtaaagagaagccatgttatcctgcccccacccagatcatagtcttccaactcaatgtcctggatgtatggcaggatggccacaggggtaggaggggattcagaccaggacccggagatgaggtgttaatgctgtcctagcgtgagtgcctgcgtggagcatggaggggtgggcaggcagggaaggaggcttcagaggtagacattgagggtctgcaggatgccccggcggcagagcgggcaattgcggtggtagacggggtggcgcatcaggatttcagtgcaggcctggcacaggcacagatgccggcagggcaggagcaacactgtcttgctctggtcctggcagatgacacacttcttccgctcctcttgctccttcagcaatttccaagggtcttgcccacctggaggctcctcctcattgagcctctctcggcccctgacaggtgtcactctgatggtcctggcctcctcctcttctgcctctgatctgcgccccgcttcaggaagagtgtcctgtctccgggtcctaactgagaataccctcatagggtcaccctggggagctccaggtgcccctccccggtttggccaactcgccagctgcagactgcggctccagactcggcgccaggcctctgagcccagtgctaggcgagagagccgcatgacatcctctcgaagacggtggtaggatggccgggcatggagctggctgagtgcctgggtagccagcctcagggtgaagtccggatgcaacacagtcaccgtcactgccagcacacaagctagcaacaccaagccagtgagattgacaagcacaaagctggccaggaggcgggcagctgaggccagcagctccagggctagttggcagggtgtccaaaggaggatggccatggccacagcactgctggaaatgtgggctaggaaggcagccactacgtctgtcatcctccacagaggcccggtcactgcatcccacagggccagcaccagggaaaagaggttctgagtgccgatgaggcagatgttgaccaggctgttgatcacataagccaccaggctcatggcaatggcacagatgtcacaggcctggcgcagcaaagcatggccactggagaccacattgaggacgccccggtgcagtatctccctgctccgcagtgccccatgagaggccaggtgccccaggagctttaggctctctaggccagagcagcagctatacagcagagtacacaaggcctgcaagcccccacatgtgaaccggaccacggcttcgatcaaggccagcaatgaaagcaagactccgcggcccaagtgcagaagactagtcagtaccgtgtgcggcaggttgtagacgaaggccaggagccaggccagggaagccaggagggaggacaccagcaggaagttgaggtccaacaccaaggtcagcacgtccagcaccaggcccacccattcactaccaggtacactgcctccatgatagggctatggaagttagtccgaaacgaagtctggctcctcggttggggggttgtcaaggttgtcaatattttagggggtctgggattaatttggaaggtaaatgagcagtctccaacccagggggtaccaagaatctgaggaagaagtgggtaagacggaagtggagtcttggtagagggaaaggtggccaggtgccagtccaagagtccaggttttgaagatgggctgtttgggagggaagaggccaaacatctctaaagcgaaggcgagcccaggccgtaggagcgacctcagctttggatgcctggtgtggcgaaccacggccgggcaacgggtcagacgggaggagacgaggaacggatggaatgggatcggactcggatcgggtcgcgtcgggtcgggccgggtccgggtgggcgtcgatgtaagctgggcgcaggctctcagtccagctacgcaggtgcccctgtccccgcccggcccccgtcttcccgcctagacggcgcatttgcaccacaaaagtgggagctgggagaggcagccagcttcagcaaaccccaagcgcagcccctactccgct

SEQ ID NO: 128318 - DNA, 1036 bp, Homo Sapiens
gttgcaacatctcatccttagcaactttgtttggttagtactgcataactcacagcagattccaaggcacctgccttgaacattgctacatgctctaggcattatcaggaacgcagccagggtgcctgcaaagttgtctccagtttctgggtaagaggaccatcatccatattgtctgtggctttgtgtctgagttgggctactgagcctgtgacttcagaccccttgtctgcctgatggatacattctgtataatacgttaccatcacaatttcatgaatgtaactaatgaagatctagcccttccatgcctcctgctgaactatgtcacctgtgataataaaacctctacacatagcattttatacaaagcaagtcaaacagcaatgatagtggcaagtgatgtatttggcttaaagaagcttgtgttactgaagttaacgcagaagtctggcctccgtttgtgggattattaaatatatatcctacgggatcagagtcatctattagaaacagtgatagccctgggtataaataaacatttctttagagtttggcgtcagtttttcaatgtccatcctcaaatcagacagtctgtttgaggggtcagttttcagggtgcatctgcaccgagaggcttgaggcagcaatgacccctgggctgcagttcggttgcaggcgctggtggcgggcagtccaggttggagggtggagatgggccaaggtcacagatgctgcagggcttcctgtccttgctctgtgtaaccgtcatcgcggtgggtgtttgcccactgtccaaaggactcctggatgtgcacgtttctctgtgtgttggccaggcgcttcttatctcgggagaagaagctaaacagtcgcttgatgcccgactccggctggggggacgtcctcgggtgggcgatgggtgggggttggggtattcggttttcgtcttccatttcttcactcttatagtaagccagctcctcctgcagcaagaacaccttggacttgagctcgttcctctcgtgcagcacgt

SEQ ID NO: 128319 - DNA, 760 bp, Homo Sapiens
ttttttggcatttcaacacagcatttttattgcttttgaaggtttccctagagcagacatcattctattgcacagatgtgtcattttggcattatagaaagttgcagttaaaaacgctttctccaaaataaaaagacaaatgaaatacccagcatatacagttgaaggcaaaggagggcaggctttagagggatggggtccattgcttttgctgtgcatcacccttgattagcagttacattttggtagtacttcttacccccaatttctagaaatccttttcaaatccagatcagtggggccccatctatcaggagaatcaacccttcaggagcctgagcaagaagactgaaccttactggctgaattaggatagctgcagagagctggaagctgacacaaaactagttggagcagccctgtttgtcttaaagcaaggcgggtggaattccaaatgctggagaggggcatacagtgggttcccccattctacaagcttagtaaacccaggagacaggcacccactgtggagaactgcacgcttggtcgaaggcttcttgtaatttcttaagggtttcatcaacaccattattgaccagtgagaggtcaaagtagtgagcgtactggctgcggatggcctcagagtccttctgcagctgctgcagggcttctgtctgagtgccctggtcagtaggtgcaatggacaccaatgaaaggcgaaagttctgctgtccgaacaattttcagggtctggggctca

SEQ ID NO: 128320 - DNA, 1020 bp, Homo Sapiens
ccagtggcaataggtccagaaggaggtttaataagcagcaaatcaaatacaaactccaggcccccagacagaccctgctggagagcattcacacctctgaggtcaagccaaggtccgtgccattgcatcctctgcccagaggcccgcccaacccctgccccacacagaacagagtcgctcagggaaactgacatttggttttattgtgccaaggacattacagatggcggatcttgtcaacacctgcagggcacgggtgccccatctgccaaggctgctcccacactccctacactcaaatcccgggtggcagccataatccccaaagatgacccccaccccaagattccaaagaagctagtggtggtggaagcaaaaggaatgcagcaaggtcagggtttcattgtccaagccggcctgacacctgccgccctgcccttgcccagtgcacaccctagaccctgggccggcctccatgcagctggaggccagaagacagcaacccatatctttgcaccctcctccatgccccatggcctgcctgcccagaaagatgccaccttcacagagccagtgctgtcgtctatatcatttttgattagttgattttataagataaaagtaattttaataaagaaaaaattcaacattgaaggctcagacgttcttgggggtactgggaagggaaatttcccacttcttcctcccacctccctggcatcagtgtcggggggtggcggcaagtttttctcatcttggaaggaatgaggggcagggagactttcctctgtctgaatgtctctctcctctggggctgcctggctgccagttggtctgtctctgtgtgcctcttgtctatcttcggcacccttgcccgagtcccctgtggaatgcagggatggttctgtgcgggatggggtggggggcaacagggcacatcagctggcagagagacaggtgatagtggcagcggcaatgagagagagtgcaggggtgggctagccagagggaagtgaggcc

SEQ ID NO: 128321 - DNA, 985 bp, Homo Sapiens
gccatttaacatatatttattgaaatctacttgatgcaaggcactgtgctagatttggtaggggatcagacatgaaaggccacccctgtcttctaagagctcacaatttaatgggtgggggagggctgaggaggagggggtgaagccaagtccacaaacagctctagtgcaaggctgattatagtgagtgccagaaaacagacaaggtaatgagatgggggaatgagaaaaaagtgccaacaaaccaacggaaatacaaactgggttgggacatagctattgttctcagagatacgcaaatgacattgagggccaagtttaaagagacagtttctgcttttcaaagtaaacatccaaagtgatgcaatgagaactacagaatgtaagtacatgagtaagagagaagttagcaatccccccatctgatggacatgctggaaatcgtgaaacacttcaaaaataatagaacagggtgcactgtgatttcactcattttatggcccgcatgtggtgggttcagtaaaggaacaatatacgtagacataaaatcaccaggttaaattcactgagactagaaggcatcgactttcacccatcttagagaacagagaacacacgtttgaacaggtgttcaatgcagtcaggtgcgacttggccaggaagcagccaagtgccaaaacacaatagaaaagagtagagacccactcaagctggctcaagtcaaggagtctgtagtggggacgcacgtggaccaatgagggctgctgccagaaatccaagaacataccatggccagcccttcctcccagcaggcgccacgctcctcactcctctgagtactgtgctgctccccacaccttctgatgcctagaagcttctgtttccttgtttgcatttcagatctggaaggcctggtggtgtccgtggtccatcatgttctgtcagccctcgtgccgattaaacacccaggctcgtactagctata

SEQ ID NO: 128322 - DNA, 629 bp, Homo Sapiens
tttgccatttaacatatatttattgaaatctacttgatgcaaggcactgtgctagatttggtaggggatcagacatgaaaggccacccctgtcttctaagagctcacaatttaatgggtgggggagggctgaggaggagggggtgaagccaagtccacaaacagctctagtgcaaggctgattatagtgagtgccagaaaacagacaaggtaatgagatggacatgctggaaatcgtgaaacacttcaaaaataagagaacagggtgcactgtgatttcactcattttatggcccgcatgtggtgggttcagtaaaggaacaatatacgtagacataaaatcacaggttaaattcactgagactagaaggcatcgactttcacccatcttagagaacagagaacacacgtttgaacaggtgttcatgcagtcaggtgcgacttggccaggaagcatccaagtggcaacacgtcaatagcaaagagtagagccgctctcctgctggctctagtcaaggagtctgtagtggggccgcacgtggaccaatgagggctgctgccagaaatccaagaacataccatggccaggccttcctcccagcaggcgccacgatcctaaatctgggtaga

SEQ ID NO: 128323 - DNA, 2480 bp, Homo Sapiens
  misc_feature (259)..(281): n is a, c, g, or t
  misc_feature (285)..(285): n is a, c, g, or t
ccctaagaggctttaaaatttcgtgaagggaagttgttcccaattaaggtccaccccccaagaagtaagggttcctttcccaaagatttcccaaggtagccagttttccccagtccagggcgtttaaaaaagaccggcccagtgccttagcttataattcgggctcccctataggggcccactttgtacaaagaaagctgggtaccgcgtaagcttggggcccctcgaggggatactctagagcggcccgccctttttnnnnnnnnnnnnnnnnnnnnnnngggnttttgacacaaacccactttattcagcattgagccagcccacacgctgggcaggtcaaactcacagacatcgcaccaagggccggggactcagaagggctgaaaggcttcatctggaaatgggcaccgctcacaagcccggctatccccaaatctcaacaactgtctgcatctatgtccccgactttgcaatcctgtccccagtgctgagtttctgtcgactaatttatctacacacaaggatgctgcaggcaactgagctactgctacaagctttgcaaaattcaactactaaaggaaatgggaggagggaaagagctagagataacagcaagatgagacaccatggcagggcctggagatgctaaatggggttagccacctgccagccccctcacccagggaaacagagaaagaggcttccttctgcggaggcaggtggagcacagggagggctcctgggaggcacaggagtggggtgggggccaggaagggggaggtggacagagcgacttggataaggctgggccgggcccacgcccacctcaagaggggggccgcctcctcaggaggcatcaaggtgcaatccagtcttcctttctctccctgaagacctgagttccagccttcacagagcgtcatgcgcattcttctttctggatgctaaccccaaatccgacactcaatggtgcacctcaggtacctgccaaggatctgtgggcccacatggaaggtgcagggtctgggtccctggatgacaaggtgaggggcagatggttgaccatggaagggcatgacccagagctgccgggactcatggaggatgggctgtggctaggacttcaggaatggacgggcacaggtgggaagggtcctcaggtccagcctctaccgggaggtgtttgcagcccccaaaacacgcctcggggtgaaggataaatggacattgttgaaacacgcaactatgtagatggaccctaggccaggcgcctgccacgcttccctggcagccacacgctgacacttcccatggagatgaggatccatcctcctgcctccagctctgtgactgccacgggttggcgccatcactgcagcagcatgctgaggcccaggttgcgatgcttcttctccagctccgagaccgcctgcagcagtgacctgaaccgctcagtgggggtcagccagctcgtcctcagggagcccctcctccttctcagcctcctgcaggaaatgctcctcctcctccacaaagaaggcccgcagcttcttgtagtcggtcagtgccttcttcctacggtccatcacgtgtcccttccacactgcagctgctgactctgcctggccatgcaggtcccgggcgtcattcaagtcctttctcatgatttccacagaccccttgttctccttgccgcgcagcgccttcctccagcgcggttcccactcgggcggctcggggcccgcagccatacggcaggcggcgcagagcgggccggcgtcggcgcggcacagcagctgcagcgcggcctcgctggccgggccgtcgcgcgcgggcgccgcggccgcctcctcgagcgccagaaggcggcggctgagcgggggcctgccgggctccacggcgcgctgccagcagtcgtcggcgcactcggggcacgggaagggcccgtcctcctcggcccagaagcgcaccacgcacgcccgacagaagcggtggccgcagtcggcgcgcaccggttcccggggcgcgcgctggcacagggcgcaggcggcctcggcggggcccgcagggagcgccagggctgcgggcggcggggccggcaagggcgcaggagcggctggggagggccggagacctagacggccggcgaccggacggagaccagcaacaggacgaagacgccaacgccggggacgcgcacggggcggggtcggggacgcgcacggggcggggtccggaccgcggagcgctctgccgataagatcctggcagcggtgtgctgcagccggaggtcctggcccgcgctgcgctccacagacaagatcctggcagcagtgtactgcatccttaggtcctggccgcggtgggcttctccgcctggatcctagcggcggtgcgctcctccgccttgatttgggcaactatgctctccacctgcaaggtcctggcagcggcgcacgtcaccgtgcaagttcctg

SEQ ID NO: 128324 - DNA, 986 bp, Homo Sapiens
  misc_feature (170)..(170): n is a, c, g, or t
  misc_feature (437)..(441): n is a, c, g, or t
  misc_feature (458)..(476): n is a, c, g, or t
  misc_feature (478)..(482): n is a, c, g, or t
  misc_feature (484)..(503): n is a, c, g, or t
tctcgttttttgtggattgacgaaaaatcccagaaagttgcctgttggattatcgctccttgggaatgcctgaggccagatgagcagaggtattgggtctgcctgtctgtccgccatgtgacctgacttgtattcctggagcttgattggcaagcagagatacatttttntgcctcagtgaggaaaatgtcttttggccatgtctcaaggacaggaccaacttcagattcccaaagaagccagctacagagcctttggaacactatggtcttccaagcagtactaaaatcaaccctcagctttttcaatgccaaaggtatccctattggttgagaaccaacatggtaatttttaatgggacttttatcagcaaatggagttaccaggatttctctgtaatgagtgattctgaaagaggtacttttcttggaataaannnnnaccttgaggaaaaaaannnnnnnnnnnnnnnnnnntnnnnntnnnnnnnnnnnnnnnnnnnnacacaccacccttacctggaagattgtcagcatgtaaatcaggaacaactttctccttattgacaatcccataataaaactcaggaaccaaggcaaaatgaattggcttctaggggtctgaaccttactgcccatacaagtgttgattcattttaatgctgtttatgatttctgcattggcagaaattttcatactttctatgtttttttaattactcagttttttattactaaaaatagcacatttgagtacatttgaaaagtagaaaaattagaaattattaactttattgaataagcaagaagtgcatcctaatcctttgattattaatgaggttgaatatttgtgtgctatcggtagctgtgtttctttgatcagatgttcctgtccttttgcccttctgttatctgttggagttgctttgtttttcgtatcaagttataggatctctttatataataaatgtaatttaacttgcaaaa

SEQ ID NO: 128325 - DNA, 1555 bp, Homo Sapiens
  misc_feature (300)..(312): n is a, c, g, or t
  misc_feature (537)..(586): n is a, c, g, or t
ggttatatacaaccatagcctccctctgttgttaataaaaagatgtgtctccatcataaagactcatgattccttgtcggtctgattccccaaatacctttttctcaagacctccggcgcccgcagctcaaataatttctccgcactacttgatgtttttttcacccaccccacgtaatataccaaccccttgtaaaaaacttgtttatataattgttctccccctatcggaggcgcgccttttaaaatctctctctagctaagagtgtaagttttgtctcccccacatatattgttgtnnnnnnnnnnnnngcgcaattataaggtgtcctcttcccccacaaggttctccccgacgtcttagcaccggttttggtcccacgtcagcacaacgctgtttataacgcgcgcggcccctggcctctggcgttattaataaacgcgcctctcccctcatagggggcccccctttgtacacacaaaaagtcgggtgatcggccttataagcttggggcccttccgcaggggaaattttgnnnnnnnnnnnnnnnnnnnnnnnnnnnnnnnnnnnnnnnnnnnnnnnnnnctagaaaataattttaatgcaaagtagaaagtatcaatccacctcatcactttccttgctctctctctgtcacctcctctttcctgtggctctgaggaggtgggagaagcaggcagtatttccacagcagctgtccatacaggaaagagtctcccctgttggtagcttgctcccagatctggggcaatgctagtgtcctttagatctagaagcagacatgaaacaataaaataatttacatgtggttcattgcctctactaattccatctcttcctccttgtagtcacagggcagctgcatcatccttggactcatggggacccaaagttgcttttaaagaaccttctctgctgagagactttgtttgccattattcatgttgatgttcttcatggagataagggtgatgctgtctttctctccattggctgtggagcagctttcagacagccctgaactcccaggtttctggggatcttcagactccttgctcttccgacacttgaacctcaggctgaccacaccaactaggatgatcaccacaaccaccaggatgacaatgaagctgataacaccaaatgcagccacagtgagcacagtctctgacgtggggctgggcaggatggtcgcatcttccctcatgctcaggctcatggtggttgaattggggggaacagtttgaaatgtgtctctgcttgtgcctccgtctcttcccactgctggggacacctgcgcctggggtaccagtgctggacagatggcttggcctgttagcctctgaggaagggatgtatcctgggttggaagaaactggctctgtggtcagacttagaccgccaaggcctccctgagagctagaggtctgggtcattgtgggctgggagttgtggcctcggaacaggaggaagcccaggatcacccagcacagctgcatggctcctgcggtgcccatgtcagctgggtatgtg

SEQ ID NO: 128326 - DNA, 1094 bp, Homo Sapiens
  misc_feature (418)..(418): n is a, c, g, or t
acttgatgttcaattttaatagcatcttgataaaggtatgcttcctttcatttgaatacatttctgcacatgtatgttataaaatccaggaaacagccaaaccacaagttaactcttaacaatgaatatacatagttaaccctatagtaagcagcccctttgaaaagcactgatgcacccaacagttatatggatcatttcataaagagcaacacaaagtttaccatcactaatacccagtacctacagtcacttaatgttctggaacacaataatgtaaaaggcaagtttcttttgaaaatggcttaaactcaagcagttctcttgctgaacatcaaactttattattccaggaaactaagatttagataagaaaaaaatgaaataccaaccctaatttaaattacttaagtattcnaagtctataaaagtagggaggttagaggtctgtggtcaattttgcaattaggttttagatagttggtatgaaactgtaaacttcgtatccagaccactgaaaaatggtttagaatggtggtcattttaataaggtaacacttcttaataattaagaaaaacatttatggaacacaattctgtgaaagatatttgggtctctagttatgatataaattcttagaaatttaaagcaaatactcattaaggcacagctgacatttctcaagaataatgaaaattggatcagtattttgttaaaatgaaatctgttataaaattgcttctggaaagcttgtcagtgagtccagcatccagattctttaatagtagggtcagcagaattgtagctaattttagcattattgaaaaatatatttctgattggctcaggaaattaatgggtcctggacttgggagggaaaagctagtttgagaaatcaatcataagaatcacattatctttgatccaaagtttaataaatgtcagctgtcagaaatggaactttacatcaattccattttatttcctatgtagataacacttgaggacagatggcatatatgtgaatttacggtcttatcccttgatgctgggcatgtcacaggtccttattaaggagtcacaggtccctacc

SEQ ID NO: 128327 - DNA, 719 bp, Homo Sapiens
ttgcgtgaaacttggtgaatctttattaaactagggtccaccccaggaggacggctggggcggggacagggtctcccgctgcaggctgcgcggaggcaggaggcacggggtggcgtggggtcgcatggctgcaggcttcggcgttcagtgattgtcgctgggcacaggggcggcgctggtgcccacggcagcctgcaccttctccaccagcccggcccactggcgctgcatgtcttccaccaggggctcgaaccagctcttgaggcgggcctggaaggcctcggcctgcaggcgtatctgctgggcctgctcctccagcttggcgcgcacctccgccacctgctccttcacctcgtccaggcggtcgcgggtccggctgcccatctcctccatccgcgcgcgcagccgctcgccccaggcctgggcccgctcctgtagcggctggccggccagggagcccacagtggcggcccgcacgcggccctgttccaccaggggccccaggcgctcgcggatggcgctgaggccgcgctcggcgccctcgcgggccccggcctggtacactgccaggcgcttctgcaggtcatcggcatcgcggaggagccgcttacgcagcttgcgcaggtgggaggcgaggcgcacccgcagctcctcggtgctctggccgagcatggcctgcacctcgccgcggtactgcaccaggcggccgctctagagta

SEQ ID NO: 128328 - DNA, 1088 bp, Homo Sapiens
tttttttctgaggaaggagagtttaatgttgtgggaaggcagcaggatgcttagggtgcgggctccagcaggggagcaccttggccctggtcttgggccagcagacgcagaagcagggagtgcagagcccggcaaacaggtgtgtagcccaggcggctcagatgcaggtaatcatacatgtcatgatggctgatggtgccatctgagtgcacaaagccagggtcggcatctaggaagtgggcccgagggtggccagccagtgccgcccgtaccagctcgttcacctgtcggttcttctcccgaagtgggttgggatgttggcctcgcggaagcaggcccagcaccacaacccgggcctggggctgtcgctcattcaccagttgcacaatggccttgatgccaccagtcacctgctctgctgtgtgtccgtggttgttggtgcccacccagaccaccacaatcttgggccggatgtgttccagctccccattctccagccgccacagtacatgctgtgtgccgtcaccaccaatgccaaagttaagtgcatgcagaggagagaagagctcgcgccagatctcgcactggtgcatgagctggaccaaggagtccccgatgaagacgacttcgggttccttatctttgctgtcagccacgaaccgatggtgcagggacatccagcgcccgtcgccctgtacgtcctgcaccggcgtgggcttgctggctgggttctcctctccactcatcttggcgccgcagctcctgcaggatgagcgagtcgggtcggcccgggagtgttccgaacggagctggctccgccacgcccactcctacccctcgcggcaacaaaggaccgtcccaacgctagcacacccgcggaggacgaaggccgatacagggcgccgcctcctctccagggacggaagccttcacttaggaggtaggtggaatcaggaaccttcgcttcccccacgacggccgcacagtgggctcgcccggcgcttcccgctcgggccgctgactcccaggccgcgcacccggcacggggtggggggagggagaggcgagaccatccagctcccgaggcg

SEQ ID NO: 128329 - DNA, 859 bp, Homo Sapiens
  misc_feature (839)..(839): n is a, c, g, or t
tgtggaagcacaggatgcttaggtccggctccaccaggggaccacttggcatggtcttgggccaccagacgcagaaccagggagtcagagcccggcaaacaggtgtgtagcccagcggctcagatgcaggtaatcatacatgtcatgatggctgatggtgccatctgagtgcacaaagccaggtcggcatctaggaagtgggcccgagggtggccagccagtgccgcccgtaccagctcgttcacctgtcggttcttctcccgaagtgggttgggatgttggcctcgcggaagcaggcccagttgcacaatggccttgatgccaccagtcacctgctctgctgtgtgtccgtggttgttggtgcccacccagaccaccacaatcttgggccggatgtgttccagctccccattctccagccgccacagtacatgctgtgtgccgtcaccaccaatgccaaagttaagtgcatgcagaggagagaagagctcgcgccagatctcgcactggtgcatgagctggaccaaggagtccccgatgaagacgacttcgggttccttatctttgctgtcagccacgaaccgatggtgcagggacatccagcgcccgtcgccctgtacgtcctgcaccggcgtgggcttgctggctgggttctcctctccactcatcttggcgccgcagctcccgcggaggacgaaggccgatacagggcgccgcctcctctccagggacggaagccttcacttaggaggtaggtggaatcaggaaccttcgcttcccccacgacggccgcacagtgggctcgcacggcgcttcccgccctcgtgccgaattcaacncccagcctcgtacctagccg

SEQ ID NO: 128330 - DNA, 674 bp, Homo Sapiens
ggcaggagttgctgatatttattcaaacgtcatccatacaataaagaactctgcttttaaaattccatttacatcagcagttaaaaaaaagtgacagtggatgaaacatgaagctgtaaagtgcctttatggggagggtcacacaagggcgcgcagctgtgcgacgagacggaggcaccgcgcctgcacagtacatcagggacatcgcgggacacagcacgcgttccaaataacttacacatcagaggaaaagctgccgagtctctgcatgcttcctatttgattccgcaccctggaggtctggccagtgacggctacaagccgctgggagggtagcgtgaggggaatgcagccacgcctgcctccactgtgctggggctgggaaccgtgaggctgtgaggcggccctcccagcagcacggggacagcgaatatgtcctttccagcaagacacatatgtacacacatggtcagaggtgcacacatacaaaaacatctgcagactagacaccgaaagggcttcaaaagttttgaacagaatatgtttctgaaacacaagaagttggtaaaacagaagagtttttttccagttctgctgtgacttgaataaaatactctcgccactttcacttctgtactcaaggtggtcaccaggtggcaggtggacctgggtgg

SEQ ID NO: 128331 - DNA, 648 bp, Homo Sapiens
cacagtttccttgggcaagtgactgagccattctgtgcctctatttcctcattgataaagtaggcgttgtcgtagcacacacctcatcgagtggtgtggagggttaaagaatatgacacagttaaagtgagtccccaataaatgctgttatttctaagagcatccaaatgtagaggaagtgtgcccctgaggactgagcacaccctgcttttagcctgtcctgcccccagctgaaggtgaaaccttggccgcctgccctcctgaagtcccgccactgctgctgggggttggccaactccgctaccgactgtctctgctctctaagaataggtttccctcacagatggcatctctctggatgctgctagagcatctggtgcttccaactgcacactccagggaggaaggcagtgtggtctgtgccggggagcagggctctgccttccagcagatctgagaggagtcccatttggctccttcctagctgccctccattctctaagacctgtaaaacagggatggccagagggctcttgttgcacagtaagtgctatgcttcctaaatgctagttcctgaaatagaatggtttaacctctacttactaaacacctgctacaatcctgttaattcttttgacatgtaagact

SEQ ID NO: 128332 - DNA, 1125 bp, Homo Sapiens
tttttgacaagcaaacggatgattttaatgaggggtgagaagcactccgcaggtgcgggcagcggcgggctgcggtcggggcccagcaccggtgggagcggggccttctctggcctcgcgcgcgggggacgcggccctttcccctccggggggacgcgcaggaggcaccgcggccccgggttggaacaaacgcgtttactgcaggcaaggcggcgggcgcggggcggctcaccaggcgaagaggggcttgccgtcctccttggagagctcgcacaggcagttgagcagcagcagcgagtcgcccaggaacttggggggcaccacgtcgatgaccagcttgcgcagcgcggccgggctgctgtgcagggggttggcgcgcaggtcgggccgctgcttcaggattccgtaggtgttgatgaggaactcgctgaacgccgggtgcacgtcgcggctgtagcccagcttctccaggcgcgcgctcagggccaggtagcgctgcgtcagctcgcgcagcttcctctcgtccacggagccgtccagagacttggtggaggtctgctcgatcttctcggggatgttggccaccgtgaagccgtagagccgcgtcacgcccgggaacacgtaggccaggatgcggcggtccagctggaaggcgatctcgcccaccacgcgcgtgtccttctcggcgcccgcgaagctctggatctcattgaggtagtagctcctcctggtcctgtccccggtgggcaggctgctctccgagaaacacaccttcttaggccggaccatctccctgggctccagcagggtcttgtccaccagtgagtcttgcaaggggctcaggagcggggacagcttcctgtcggtgcctcggtggctatgtggctctgggggactgaggaaggccttgaagggtgcctgggagggggctgcacagcccggggaggtgtcgtcctcgctggacaggggggcatgtgagcacagcaggtcctccagggaggatgtctgcagttgggagggcgtgtcggcaacactcgtgaaccttccgaaatctggaactcagtgttgtttcttggctccgagggtcttttttatcagcagccgggatgcaacagatgggtcatc

SEQ ID NO: 128333 - DNA, 895 bp, Homo Sapiens
cactaaccaaaaataacccaaatttaaggaccagaagcataagccatgaatttactatctcaggtagactgagcatttggataattctcattctccagaaatcccacaggaaggaaaaaataaataaatttatatatattcatataaagacttttatctattgtgcaaagagagggtcatctggctccccagaaggttctcaaccccatcaagactgtccattttacatctctagctccagttcttctcagagagtaaaagtgctccaaaggcctgtgatcatgggtactgattaagggctgcagactcttcagatccagttaaatccctggtgtttgagctgtgtgggagctgtggttgcttgcttcctggctttgcctgaggtcctgccgcaaaccctgcagcagctggtttaggagtgtaaggtggctgtctctgcgaggcagaggcaggggtgggaggcaattccctttatactcgatcactgccatcttggcccgatccaaactccgatttgggatctgcagcattcttgtgtagcccccagtttgatctttgtaccgaggggccagtacttgaaacagctttgggatcaaatccttctctgtgagccagaagtcagccatgcgcatggctcgttcgttagtgtctcccagcttcccatagtcgatgagcttctccgcgtagcccctcatttcgtccacacgcgcccatggtgcctcgatgcgttcgtgccgcaccagccctgtgagcaagttccgcaacagatggatgcgggactcgggaccgaggcccatacggcgaaatacgcggccatgggagatcgctgcagcgaccgacagccgcatgtttccaacttctgcccgcccttgatcctacgattccggccgtacca

SEQ ID NO: 128334 - DNA, 1455 bp, Homo Sapiens
  misc_feature (452)..(491): n is a, c, g, or t
  misc_feature (502)..(511): n is a, c, g, or t
  misc_feature (539)..(551): n is a, c, g, or t
  misc_feature (582)..(590): n is a, c, g, or t
  misc_feature (630)..(641): n is a, c, g, or t
  misc_feature (754)..(809): n is a, c, g, or t
ggcaagaaaggcgggtatattggttcgcagaaaacaaacgggcgggcgggagggtgtggccggcgcacttcggggttgatatattaatgcggcgggaaaagtggagggggaatgttatcggtgagggggcgccgtgttttttacccaccggcggtggaggaaaatttaattaacgcggggtggcctccccacaatatggaaaaaccgcgcgttcccgcggccctggtgcggttctctgcgcccccgcgcgtataggaaggggcgcgccatacccggggccgcgtggggggcatttggatgggggacgcgccacacctctcttcccctgcgggcgcaagcggggaaaggccgggcgggggcgcggaaatgagaaggggtaagcggcccggcggaaacgggccccccgcgtgaagaggggggcgacaaagaggaacgggtccgggaacccctcnnnnnnnnnnnnnnnnnnnnnnnnnnnnnnnnnnnnnnnnaggtttttgtnnnnnnnnnnaaactaaggaccttgttctcgtggtacnnnnnnnnnnnnnaaggaaaggtatccccatttgtctggttctnnnnnnnnnccgggcgcccaaaaaagaaggttcggggaaattttcttannnnnnnnnnnnccccacacaaaaacgcggcgcccagatcgggggggttggaaaaggggtctttcggggtccgtatattatcggtgtttgggcgttggcgtttgtgggattttttgtgcgggtcnnnnnnnnnnnnnnnnnnnnnnnnnnnnnnnnnnnnnnnnnnnnnnnnnnnnnnnnatgaggggaaaggcattttattaagaaagctttggccaagcccccgccgggaggagcccatcctggggcaccggccgaggggggagcagccctgctgggggcctataaatacatctcctcaggccactagagtcgcccctggaggtcccgcggcgtgtggggcagtgggaggccatcaaaaccagctgacagctgaggggcctgggcccggggcgccagggaagggaaggggtgggacggactaagcccctgaggagcggagaccagccctcctccccaggctggggtcaaccagatgcccgggagcctggccagtggaagtagccccgggctctattgggacggccaagggagggagcctccagccagaggcaccaggccctagcgggggagaggcagcccgggcagaagtgcctctggctgcaaccaatgagaaggtagccctaaccaagtccactcctggccagtaagaggcggtctttaagcggaaccctcccatctttggtcaatgatacgctgtctggtcggagcgctccataactcggccaatggggagggagtcgcccgctaagcgcctgtcaggcctcgaccaacgggatgggcccttcccgccagatcacactgctccaatccatgagcggctgca

SEQ ID NO: 128335 - DNA, 667 bp, Homo Sapiens
  misc_feature (483)..(499): n is a, c, g, or t
tttcaaatttaatattttatttaacccaatctgtccaaaatagtattatttcaatgcgtaatcaatataaaaccattactaatgagattttacattatttttctgtgccaagtcttcaatagccagtacgcattttacttacatcatatcgcaatttgtggtggcatttttactgttcaataaccacacatgcttagtgcaggtctaatatctgtttccaggtctctctgcccactacccttacctccctgactgcaagctacctgagggcaggtgctttgccttattcaacattgtatctgtggtgccttgaatactgcaagcactcaatgaatgcttgctgactgcttgcagacagggtggctcaaacagcagacatctatgttctcacagttttgaagggtggagtcggctggttcttcctgagtcctctcatcttggcttgtacgtggccattttctccctgtgtcctcacctggctcnnnnnnnnnnnnnnnnnctgggtcctaatctcctcctctgattaggacacccatcctttggattagggctcaccctaatgaccttattttaactttattccctctgtaaagaccatatcttcaaacacagtctctttctgaagtattaggcattaaaggttcaacatatgaattggggggaagaa

SEQ ID NO: 128336 - DNA, 1031 bp, Homo Sapiens
  misc_feature (918)..(918): n is a, c, g, or t
ttacagtggtaaagcagcagtttttatttattacaaattctaaaaaagaatccaactttataagtaaaaaggaacactgatgatcacttaaaacatttaaatttaaaattactactaaaaaaaccctgtacattcacacaagtccaatgcctttgttggtttttacagacatagaatttctgtagggttttgggccctatcaacaatttttattaagtactgcaataacaaaatacagcaataaaacaactggacactcctaggggacaccaaagataaagggcccattaatcaggtgtaggccagagaaacccaacctgttggcaatatgacgctctttcccaactgggtcttggtgagacacgtggcacagcaaggctgtcagtgcatgtgcataaattgtagaccaggtcccactatgctacttcaggattcagccagcccttctatgagtcacagaggtcccttggtccttattcatcttgatatactcatgggatgtttggaattaaggagcccaaactaccttacttgcatttgaagtctttcacttcatatcctaccccatcagtctaagagcccacccaacaagggtagctacacatagatgctcacactctataggctgcctgatcctggaaccagcctggggccctgattatgatctccacggggctgtcagtggctagggaaagctctttaagacccagcgatcatggcagtggcatcaaccatggtgaatcaaagttacgtataatgctcccagcacacagtgttaccagttgggttgagcacttacaaaatgcatttgacatcagtagactaacgtgtaatacaacaatatgatatacaacacaacaacaccacatacagataggctctcaaatccagaaccggaggtatttaagtgttatatancatgtaggaaaaaatctcccaaacataaatcagcatttcaactaatgactatttcaatctaatgacaaaatgaatgacttgcgcatatgcacgcatacaacttcctcggcgat

SEQ ID NO: 128337 - DNA, 2337 bp, Homo Sapiens
  misc_feature (408)..(505): n is a, c, g, or t
ccccccccgttttccacccaggggcaaattttattcgcaaagggggccaaggggcggattcccctggggattccaaggttcatcaaaccggtttgggaggcttcccaagttgggcggaatgtttaaaggaatttcaaccattcttcgaagagtggcagggcggggggtaaattatatttggactcccctggaatccccttgatagatcccgtaaaggcctccggactccctctgggtttttttagaacgcttggtttcccccgggcggtttttatttgtgggaattccaaccctagtcctggcccgggtttccttgggaacaagtttggccaagttccctttcctaatggggccccgggcccaaagaaaggtttaaaaaactttttgaggggcgagggggccgacaannnnnnnnnnnnnnnnnnnnnnnnnnnnnnnnnnnnnnnnnnnnnnnnnnnnnnnnnnnnnnnnnnnnnnnnnnnnnnnnnnnnnnnnnnnnnnnnnncaggtgacgctttttaattggctggtgtctttggagaatatcaagagtcacatgtgggccagagcagaaagcagaagcccagtgctcagggtgaggccttgggggaaacaacggtctgcgcgggagatcagcgatggctgaagaatccctgaggatggttgtatttaaatggcttcatcctgctaggacccctgaagagccgcagacacatcttctcctggggaaattccttgggcccctccacactgtcgtcatggctctcggtctccaggtaaacatccagcagcacacacagccgctgcagctggttggtcaacagctggtggctgggccaagggccacacagctccttgtagcacacattgacttcgccctccatggcccgaatgttgtcatcgttgctgttggttttctcccctttccagttcaaacagagctggaaaacaggtgggatggaggagtagccagggttcaacaccacagcggcctgcagtttggctgtgcccctttcgatgagcgccatgtagtagagattggtgtccccagccagtcccgcatccacaatgtctttggtgaagtgcagctccatgtaatcctcatgggcaactgtcacccatttcaccaggcgagagacaaccttggcagggaagaggtactggcaatcactggtaactggcacaatgccatgttctagggatgcaaactgtttgtggagggccaggcgggactgcaccctggtcttcagaagtttcatggtggtctccatgtggctggcgctcagcgagtggtcagcaatcactgtttgctggggctgctctttggggaagtggaggccacccagcttctgcacccacaaataggggtgacctagctcaagtacatagtcgctcaaagtcaggatgccaactttatcaaactgatactgattggctggattcggagttttctttccatgatccccaggatacaagcaactcaggagtgaagtcaggagccagccagtcccctgcactgatgggggtgatcagctccatggcagttgtcactttggcttttactgtcatgatgttgaggttcatgaggtagtagaaagtcaggtgaagcacactgtcatctttgcacttcaggtcgagcatgacagacagtgggtgcctcttcagcatctccttgcgtttgtcgtccaactgaacccccagtgtgggtctccggcgcttcgtagtctgctcctcctcggcatctgagtcactctcgtcatcttgggagtcctctggaggtttgaacagagccttggcttcatccacactgccttcgattgccacagataacgtcttatcctgtctagggggctgggaggatttcatatgagcacaggcctgcccatacgcagtggcctgaacaaagaggacatagaggggaggcggcaggtgtctggctgtctcatactgcttgtgagcctggtcgaatggcataaacaggtactcctgcaccggaagggaagcctgcatgatgctgttgaggcggggctggaggctgctcaggtactccttcttcacctcaatctccttgagaatcttctccttgttagataggcactctcggtactttctttgccagccttttccgctgctccagctcccagtccagacgtgccagtgtttgctggtgagggtctcccatggtgacttcggccttgctgatatctggtggagcctccttataaaactcctctaaactgaccagatcaatttcttcatgctttgacttaaactccaaacatttggtgatctccttcccctcgtgcggaatttcgccaccccaggcctcgctacctt

SEQ ID NO: 128338 - DNA, 1537 bp, Homo Sapiens
agatacaacactcagactgagtcaggagacagcaagtcacctgcactgatggggtgatcagctccatggcacgttgtcactgtggcttttactgtcatgatgttgaggttcatgaggtagtagaaagtcaggtgaagcacactgtcatctttgcacttcaggtcgagcatgacagacagtgggtgcctcttcagcatctccttgcgtttgtcgtccaactgaacccccagtgtgggtctccggcgcttcgtagtctgctcctcctcggcatctgagtcactctcgtcatcttgggagtcctctggaggtttgaacagagccttggcttcatccacactgccttcgattgccacagataatgtcttatcacaggcctgcccatacgcagtggcctgaacaaagaggacatagaggggaggcggcaggtgtctggctgtctcatactgcttgtgagcctggtcgaatggcataaacaggtactcctgcaccggaagggaagcctgcatgatgctgttgaggcggggctggaggctgctcaggtactccttcttcacctcaatctccttgagaatcttctccttgttagataggcactctcggtacttctctgccagccttttccgctgctccagctcccagtccagacgtgccagtgtttgctggtgagggtctcccatggtgacttcggccttgctgatatctggtggagcctccttataaaactcctctaaactgaccagatcaatttcttcatgctttgacttaaactccaaacatttggtgatctccttctgtaggtgcatcacctcatacaacaggttctggagctgcagatgataggcatctactttctgcttagcctcgtgggtctgatctcttcctttcttcaacctgatgtgggctaatcggttaagcttctttagagtcatgaaatgcacacagctctggatcctccgttcttctatttctattgccacatccttgccacccctgctcttcaggtcttggatctcagccatcagcctctgtagctcctggcaggtgtacttgtataactcatagtctctgccagggtcccgcagatccacctcggcctcctcactgtagtatttaccttcctgctcggtgtcagatcgattccgctttccttcagctggggctccatcgcttcggatcactttgggcttccgttttttgctcgattctgatgacatggttgttcctccacaggggttgttgtgggctttaacacaggaggcattccactggggaaggtgatgaagatgacctgggactgtggcttcagatgatgcataggtgatcttaaataatgctgaacaccacaatcaagaggctccaacgtgaagcctgaggatgctgcagcgaacacttttcggatgaggtaacagcgcagcgccgagaggccggggaccgcgggtagtgagggaggagaagccgggtcagaccccagcccaggggcgccctttgggcgatcagcacctcagtcccggagcgcccagccccgccccatctccca

SEQ ID NO: 128339 - DNA, 885 bp, Homo Sapiens
ccagttttatagtatattttaaatctaagatatagtcatgcctacatttcatatagtttgttattaacctgaatcatgcacttttgaaagaatagtataatggcctttctgtacaagttaacctagaatctgtgaaataaatagacacagattctgtgtccactcactaaagtgaagaaataagacaattttctggaacattccatgaaacattcttctctgatttaatctggcctgcctcatcagagcaatacaaaaagttacttgaaaatactgttttaacaggacaaaagtcagttttctatgaggaatgatgtataattctcaacttttccaagggtacatattgtaagagaaaaggtatgcaatggtttttcaaaatggtagaatgaaagtcactatataaaaaaataagtacattatagagatagtaaaatggaaataattcattgtaatgaaaataaaaaatcaagcttctgccataattagtatcctaaaacatgttatgtaattcaactagctacagaataaccgttgacatgctaagttccatacatacttgactttccacttgaaataatttcttctttgggacctgtgtctcatccaaattaatgtgataatgtgatatacttccagtggagactctaacatagttaatttttttaggctgtcagctgcttcttgctgaagttgtctcacaaccactactctttctgctttctctctctcatattgaaagagactttcttttacatgatcacattcattcattagcttcttatttttctcttctagcatgtggtctttctttccactctcaatacagctctttggatattagttattatctctttatgatcctctttctgatgaacatcatct

SEQ ID NO: 128340 - DNA, 1251 bp, Homo Sapiens
  misc_feature (799)..(1199): n is a, c, g, or t
  misc_feature (1211)..(1211): n is a, c, g, or t
  misc_feature (1225)..(1225): n is a, c, g, or t
agtaaacacatttttcctttttttattaaaacaggtttgttgaaatataatttacatactatagaatgtatctgttttaagttaaaagatttttagtacatttactgagttgtgcagccatctctacaatccaactttagagcatttccatcactgtaagattcctcatgcccattagcagtcactaccagcttccagccccagccccttgcaaacatgaatctactttttgtccctatatatttctcttttctggatgcttcatgtaaatggaattgtacagtatggtaaacacagtttttatctactgatttttatattcaactaggttcaacatgtatccagaaccaaatgtttaaattttctttctagaagtttgaaaatatttatcttccttgattcttactactgtttctgttttctgtctctcatattgaaagagactttcttttaaatgatcatattcattcattagcttcttatttttctcttctagtatgaggtctttctttctactctcaataaaggctctttggatattaattactgtctctttatgatcctctttctgatgaacatcaattagttgctgttcaagccatggattttcacgttggagttgacatatcctctcttccacacagttccactttccagtagatttactgactttagcttctgcactttgatacatctctttcatttcctttatttgctgctgtgtttggcttaggtcgttttgtacagtttctaaagctaatgacttttttctgagagtatccctcgtgccgaattcttnnnnnnnnnnnnnnnnnnnnnnnnnnnnnnnnnnnnnnnnnnnnnnnnnnnnnnnnnnnnnnnnnnnnnnnnnnnnnnnnnnnnnnnnnnnnnnnnnnnnnnnnnnnnnnnnnnnnnnnnnnnnnnnnnnnnnnnnnnnnnnnnnnnnnnnnnnnnnnnnnnnnnnnnnnnnnnnnnnnnnnnnnnnnnnnnnnnnnnnnnnnnnnnnnnnnnnnnnnnnnnnnnnnnnnnnnnnnnnnnnnnnnnnnnnnnnnnnnnnnnnnnnnnnnnnnnnnnnnnnnnnnnnnnnnnnnnnnnnnnnnnnnnnnnnnnnnnnnnnnnnnnnnnnnnnnnnnnnnnnnnnnnnnnnnnnnnnnnnnnnnnnnnnnnnnnnnnnnnnnnnnnnnnnnnnnnnnnnnnnntatggcaccaanaggcatgtacgtanaaagcggcgtgcggcgtttttcatag

SEQ ID NO: 128341 - DNA, 821 bp, Homo Sapiens
caaatgttaaagcaatggaatcaataaatttattaatgttacattaacacgaactacaaagagacctttcgtatgtctgataccaaagacataactgaaaagtcatttttccaaaccttgagcttgcattcacctacctgtctaaccctcacatgtgctaattaactgcaaatgccatttctgggcttcacacacattccgtggctttcccttttctgatgtgacttccctcccttaccccacacctccctgcactgtcccctgctgtgcccttggctggaatgccctgcagcctgcttcagcccagcaaagtattcatcttaccagtccatgccctgactcctgatgtcacccttccctgcatcacccttccctgtgtatttggtggataaggcttgattgaggctcaggtactgagtccctgctggcacattgagaaccagctgccaccccgatgataaggaagacagacccgggacttccatatgaattggatatgatcatctgacatgcaccctactaactgatggatcctgctgttaccccaaagctccagaaccacactggccagacacaggcatttcctgtcccctgaagaccactgaacccagcacaaaagagatctagagctctccaaacctatggaatggcaaccaaaaccatgcccaggttttgagttaagcctcattagtctcccttttcccttgacagtgtagaactgtgcagcgtagcactaaatgaatgagagcagaagctcaggacagactgaaccacaggttgagtgacacactgccagggtctatcacagatggatatcgctt

SEQ ID NO: 128342 - DNA, 2460 bp, Homo Sapiens
tttttatgtggataatatttatttgtatcttatctatagaacaaatatttacagatacaaacggaatcacagcaaagttgctataaaaccatccagacctctcgatggccacttctgaaaacatccacggtgaagggcagggccaggcctggctgtggagtgggccagctgagtacctgggcgtcagccaagggaaatggttggggattatggcttcagcactctgccggagcacattcctgagcgctgacaacgtggagccctcaccgcccccacctaccccaacctcaatggggaaggaaaggggcctgagctgggcagggctgcccgggctcactatgtgcctgctccaggagtccctggcccctgtgctggcaggagcatccctgagctggaccgggaggcctctctggcctggggctgctccctgcccggcaggctgctgtttggcagctggaggtggcaagagctgctggtgctgccagggcgtgttggccaggaatgagctcccagggcagccctgaggaaagggtcttaggaagcgcctcccagctcactactaggagctggggactgtcagtgctgagtggggctggggtacaggagcacctgcctctcctttctttggcttagaagtggggaaggaagggccaggaaaagggaccaaagccgccccagccttggcccctaggccgcctggggactgtgtgtgtgctgagggggcagtgggaggtgggcagctctggagttccctgcaccctgggatccttgggctgctctcactcccggggtcccagcagggcaaggcctctgcttgggaccagtgctgctcttcctcgctgcttactccaggaggtgaaggtgacagggcggcaaggagaggtaaccacagcatggctggggacaggcgctacactgggccccggacccagcacagggatcacagtgtcggtctcgcgcacacacctctggccacatgtgcacaccacatacatccacacgcacctccctcctgtctggcgggaggctcattctctctcgcagccactcgccctctctgcctctcacatatgcggtcacagagtgaatccgagcatcttattgctgcagggggcaggggcgtcggcatcagggaaagttaatccacgaagagcgagaacagcaccattaccacgatgcccgcacagagcagaagcagctgctgcagggagcgcctgtggggagggaacggctcacggtggaggcatgggcagggggagcaggcagcggccaggagcccttccctcctgagcccctaagggccctgtgagtggcagtcctcttgctgctgcaggtcactcgccacgggtcctcttcttccaagaggtcagggagcacgttcaccaaggcgatgtagagaaagccgccagagttgaagggcaggacccaggctgccgtctcctctactcccttgggggactgggtacagatggcgaagccagcgcccagtaggccccccagcgctgttgagagttgcagcttggctgcgctccatcggtcaaagccggcccggagcaggatggcaaagtcgcccacctcatgggggatctcatgcaggaggatggccatggttgtcaggagcccgatcttcttgctcacaaggaagctggcagccacagccagcccgtgggtgaagttattcgatggtgttggccagcaggttgaggtagccgctgactttgatgctccggaccacggcaccgaggccgggctctgcagccggctgggccagacagtggcctccattgagtgcggcggcagcagcagtggggtctttgttgggggcctggctggtcccctcctccttgctgtccaggaacatcttctccaacgccaggaaggtcaggatgccagcaatgacccacagccccagctgttgctgctgctgcaggctctgcccctcaccaccagggctggcgctgcacgtgtaggcccaggcttcgggcagcagatgcagaaacacattgcccaagagtccccccagggcgaagctgagcagctgcttcaggcgccaggccccagcttctgagcgcagcatggtccccatctctaggggaatgacaagcaacgggaagaccccactgagccccaccatgagggaacccaggagggagcagatccaggtgtccagccgctctccgctcagcagagccccccaggactcgctttccttgttgtccaggcgacaggccgtcgcagtcccccggctccggagggccggctgggaacccccagcccttcccaagagctccagggcaagggcagtgaggaagaggagccttgggcccgccatgccacagccagggcagggacatccaggcatgccacgtacgtgcggcggcggcggcggcgatccgggcggccccagccatccagctgcggtgccgcgccccgcccaggctctgccccgcccggccgccc

SEQ ID NO: 128343 - DNA, 836 bp, Homo Sapiens
ttggggtactgggtaccagatgggcgaagccagcggcccagtaggccccccagcgctgttgagagtttcagcttggctgcgcgtccatcgggtcaaagccggcccgggagcaggatggcaaagtcgcccacctcatgggggatctcatgcaggaggatggccatggttgtcaggagcccgatcttcttgctcacaaggaagctggcagccacagccagcccgtgggtgaagttatcgatggtgttggccagcaggttgaggtagccgctgacctggctggtcccctcctccttgctgtccaggaacatcttctccaacgccaggaaggtcaggatgccagcaatgacccacagccccagctgttgctgctgctgcaggctctgcccctcaccaccagggctggcgctgcacgtgtaggcccaggcttcgggcagcagatgcagaaacacattgcccaagagtccccccagggcgaagctgagcagctgcttcaggcgccaggccccagcttctgagcgcagcatggtccccatctctaggggaatgacaagcaacgggaagaccccactgagccccaccatgagggaacccaggagggagcagatccaggtgtccagccgctctccgctcagcagagccccccaggactcgctttccttgttgtccaggcgacaggccgtcgcagtcccccggctccggagggccggctgggaacccccagcccttcccaagagctccagggcaagggcagtgaggaagaggagccttgggcccgccatgccacagccagggcagggacatccaggcatgccacgtacgtgcggcgcggcggcggc

SEQ ID NO: 128344 - DNA, 1042 bp, Homo Sapiens
  misc_feature (57)..(67): n is a, c, g, or t
  misc_feature (820)..(820): n is a, c, g, or t
  misc_feature (834)..(834): n is a, c, g, or t
  misc_feature (874)..(874): n is a, c, g, or t
  misc_feature (898)..(898): n is a, c, g, or t
  misc_feature (988)..(988): n is a, c, g, or t
  misc_feature (1028)..(1028): n is a, c, g, or t
aaataagctgcttctctttccactgtttattattaatgtacaaaatatacaaaaccnnnnnnnnnnntactcatcctcaaatccattttggctctaacccaagaccctgcacaaaacccaaccaatccactgttttcatagaaaacaactgatgccaaagtgaaggagagaactgggaaagggcaaaatcatcttgttgaatccacccaggaaggcgcctggtggggattcagaggtggttgacagggtgaagtacctggaagcctccttcacgctggcaaggttccaggtgggagcagggagtgagctgactcccaaaggcagtgcatgtagtgtgactttcaggcccagcacgccgggcccaagttgatgagaagctggtctcactgaagtattttatcaagtctccagactggctatagttggcaaaggcagaccagcaccaccggtctcacctctgccagctaaaacttgcaccggatgcagatacgagttcgccatcatcgaacctagcagacccaggacgcagactgggtgttcacagaaagttgaaggtcccacttgagaaaggactaagaatggtgagcccacgctgggggaggggtggggatgatgtgtgttccagaactcaaatccagctgattgagccctctcagtgcagtgggatatacaatacccctttcagcatctccccaccccatgaggaataatgaacttagctgggatgatttcttaagtgcagctgatcctgtgtcagagttctgtgtgcatgtggggaccgcaatagaaggtaggggtgttcgccaggatacagctttangtctcaagcattanggtatactggaaggggtttgggtacaggcgatctctcaanaagtgaagcactggtctctctcancagtcagaacgttccatcctctctcccagctggggaatattaatcatggcacattatcagaaaccccagaccagcatgggatgaggggcngtccataccctgcgatctggctccagcaatctaagatcgntaatcgacagtcac

SEQ ID NO: 128345 - DNA, 1048 bp, Homo Sapiens
aacgggtgatgcggttgcatcagtggtggcagtggccatcgtccccatgaaggccctgtcggaggaatgggtgccggtggtggacatcgcccccacgaaggccctggcggaagcatgggtggaagtggtggacatcgtccccatgaaggccctggacacggggggccccatggccaccggcctcatgatgtccctggtcaccgaggccatgaccatcgagggccgccacctcatgagcaccgtggccatgatggtcctggccacgggggagggggccaccgagggcacgatggaggccacagccatggaggagacatgtcaaaccgccctgtctgccgacatttcatgatgaagggcaactgccgctatgagaacaactgtgccttctaccacccgggtgtcaatgggccccccctgccctagggaccatttgcctgccctgttcacacaacccctgtggactgcagcctcgctctttccaccctgttatggcttctgtgaggcccattttcccttttccccagctgatgaggagccggccccctcagttcccacttgcttgggttcctgggggttttctgatcactggtgcgcattgatgtacatattttcctccagtctggggaggagagagactggaaacgttcctggactgctgaagaggagacccagttggcttcactttttgagaagattcgccctgtaccccaaacccctttccagtattacccttaatgcttgagaacctaaagctggttatcctggcgaacacccctacccttctattgcgggtccccacatgcacacagaactctgacacaggatcagctgcacttaagaaatcatcccagctaagttcattattcctcatggggtggggagatgctgaaaggggtattgtatatcccactgcactgagagggctcaatcagctggatttgagttctggaacacacatcatccccacccctcccccagcgtgggctcaccattctttagtcctttctcaagtggggaccttcagcttttctgtgaaacacccagtctc

SEQ ID NO: 128346 - DNA, 1169 bp, Homo Sapiens
  misc_feature (68)..(80): n is a, c, g, or t
tatggatcactttctacatttaataaagacattttctcatttgaggctctggaagtcttgagtcacannnnnnnnnnnnngataaccccctccccgctaaaatgccttggaacacatggcttaacagtggctgcacagaaaatatacaccctcaaagtctcactttcatttaaatacaaatatacaaaatgtaaactgagacagtagagaaatttacaaaacttttctttaaaaatcataaagacaaaattcagttctagttatgacgctattaaaatacgtgcaagttgtcgtatccaattggatttctattgcaatgttcaccaaagacaaatccaatccaccccggccggggccgcctcggaaaacagacctgagtggaaatttctttgagaaacctcgaggttctacgtcgacgggatggacggcctccttccccggctcccggggtctcccctggcagccccaccagagcaggggctccactacttccacttctaaggagaagggtctgggctggttccactgtggacttggaggccagagccgaaactagctgcttccggtggagttcgagctgacatggtttgagtttatgtggtggttaaaactggtcttggagctgggcgaactcttggaattgttctgatgctgccgcttgaagagtctctggagcagccctttcttgggcggttccggagggtggtttctgttcagatctggcgggagggtaccattaggtccaaacacgttcagctccttaaagcattctgtttctatcatctcgttttgccatgggatggacacagagcccgtggagaacttggagtagaagtcgtcgtctgtgtggtccagattgacgcccttcacagtggagaactgctcgatgtccagcacgtccttacagtacacagcgcgggggtctggaacgaagggagggtccaacatcccggcttctaagcgcttgaagttcatgttcctgaagaaggggtgtctcttgacctctgcagccccctcctcctggcagcccagcctctgcttcgcatctttcgtgagcagcatcttgcagatggacttggcctcctcggagaacttgtgggagtacacctcctccgtctccaggacccggcggtccacctcctcccgcttcaccttctccttgcggtcgc

SEQ ID NO: 128347 - DNA, 992 bp, Homo Sapiens
  misc_feature (151)..(160): n is a, c, g, or t
ttggggcgccgcctccccccccttggcgcccccgggcccgccctaacggtcgcacgggggccccggctcccgcggtcccccttctcggcgggggccccttccgtaacagggccaagcccctgttccccctggttttccagggccaattggnnnnnnnnnntggcccttttcccctgggggttccaaggaaggcgctggaaccaatgctggggccaacctcccccagggccctccaaggcagggcctggggttggccctccctccccctccccagctgatggcctgtggaacccagcgcccctgccctttcctctgggtacccagagtggagggctgggttgggctggccctttgcccccttccctgcctttgcagggcctgtggacagctggagaggccacagatggggtggaatcccatctgctgctgaatcctcacctgggcctgagggactgtgcctgctgtgcactcacagctgggtcttcccaaggatgctgttctcaggagtggtgggtccccagcccctcttcacactgggtatgatggaggtgtgggcgggctcgtccaggccgatcaaggcacagcagtgagcagcggaggcctgtggtggggaatggactctcgtgggatcctcttgcagaggatgccccaggcctgaaccctctagtggatccacagtttgtggagactggcactttcccagccctgtccttgaccgagagtccagcattttttcagttggcccctggttggctgcctcaccccagcaggggaggaggcatccgaatccacagggacggcacgtgccatggctatgcacattgcctgcccgtggcatcaactggggccgctggcacttgtttaggatggaagcccccaagaagggcaggggtttctgtctgctctgttcagtgaatcatgtgaagtgcttgcaaaggcagctttacacagtaggtgcttcatatgtgtctgtcgaatgaatgcgctcccgc

SEQ ID NO: 128348 - DNA, 1233 bp, Homo Sapiens
tttgagagatttgagggggttttattcttaaaacggcacatttgtagagaatgccctttatatatgttctaaagaaaagtgtacaaatactcaatgattaaagtgtctctgagaaagtggcttcggaccacaccagcatctggtccttttgctgtgacccaccccatcccggagctggtcgggtctggctggatgtgctgcccagtgagtgcctcgctcggtaactgcttggtcctgaacattctctcgtttcaggaactgatgaggttctcttcttttgactgatggagattacaaaactcttggattctctgaattatacttctgtaggctaacgtggctggggaatctggggcgtcaatgaaaaaagactggcctttgtcacaattcttacctatgagcggatccaggggcactctgccgaggagagggacctccaagtcctggcacatgagctccgcgcccccggttgtgggagggaatatctgagattctttcttgcacttaggacagatgaagccactcatgttctccaccaccccgatgatgggcagcttcaccttgcggcagaagttgatttctttccggacatcctggagtgacacctcctggggagtggtgatgatcactgctccatcgatgtgtgctgtggccaggtaccggacgaccgagaggtgttcatccgacgtcccaggtggggtgtccacaatgaggtagtcgacctctccccagtccacatctcggaggaactgcttgatcatgccgtttttcttgggtcccctccagataacagcatcatcaggactgctgagcaggaagcccactgacatcacccccaggttgtcttccacgtacactggagaccagcctgagccactctggtgaacctgctctccttccaatcccattatcttgggaatcgatggcccacatatatcgatgtctagaagagcaatctgtgtgttttcatcctctgatagaccatgggcaaggtgggcgctgaatgtgcttttcccaacaccgcctttcccagacaataccaagattttgtgttttacagtcttcattttctctttgatttcctctatagccgtgtccggagtggcccccgctccagaagcgcacagccgctggttggggcatccctgacatgaagcccctctgcccgcatgggcgctgtcggcccctggacagtcgtgaggcacctcctccattccgtctctcgggctaaca

SEQ ID NO: 128349 - DNA, 568 bp, Homo Sapiens
aaaaatgaattactttatccctttattgggatgtatttcctaagccataaatttcaccctcaccatgttttttaaactatgaattaattcacaatactcacacattgagagatttctcatggactcctggcttcctcggctatgggggccactctgtggtcatcacagaccccaccacccacctgtccttccacacccctggctcctttatgttgcttcctgccccacaggcatctgcatttagtactcatggaaatacttactctgaattatacttctgtaggctaacgtggctggggaatctggggcgtcaatgaaaaaagactggcctttgtcacaattcttaccttaaaaaagaaacaaacggaagacaattcagtccaagaggaaaacagaatggccacaagatcttggggctctttccgtgctggtgacaatgggaagatcttgagcccgcttcactcgtaatgaagaacaaagtagaaaagaccagtggggtctcagggaccttccttccagcagggtccccagccagcatttcagcgtggctaaataatcagaatggtaa

SEQ ID NO: 128350 - DNA, 1336 bp, Homo Sapiens
acacccaagagtgtctataaacaacaacaaaaactgcaaaccaaaaactagtttacaatactgaagttataggaaacaagcacaaaaggccattgggtggggctggatggagcatgatctggtccttaaagtatgcagatcgcctgggaggcccagcctatggagattgggaggagagggagatgctggtgactggagatggtgaaagcctgggctggggtagtttttagtcatgggcttatggaccctcccctcttctccagctagctcaggcctttaagaggcaggcccaagaagggaaccccaggaagccctagaagctccccagcgcctccatcccatggacccggatcccctgcaggagggggaagttgagcagtggcccaaagacacagtcgtcctcctggcttggggctggggttaccagggtccccaaggggctggcctggaaccagaggttctcataggacttggggctgggggtgaggcccgccaagaggggctgagtggagtcacagcggagatagtgccctggccctgggcttgtggggctgcccagcagctgcccataaaggacctgatcgctggtgccagactgggattggggctgggtggaaactgctcttgggtccccctggagcacataggtctggaccagagtggggaggccacaggtctctgagctgttatgggactcccagggcaccggcttcttgtcatcctcctccagcactgtgagcttggtgatgggtggcgtgccaaggccgggcagctggaaggcatcctcctccatgattgtgggcacccaggagcccaggctgctgtgagctgggtctgggacacttggccagaggggattcttcctgttggggctgcaacagagccaggcagttccacagaggcaggtgagcaacagcaggaggccgaacaggcccaggatgatgtgtagctccgacccctctggggtcaaggtcatcagggtgaggactgtactgttggtggccccagcctggctggcagccatgaggtggatgtgatacagactggcgggctccaggccatggaggacaaagccacgggaggaggcattcaggatggcggagaaggactggttctgagcgttggtccagaagatggtgtagtgggtaagggggctcttccccagctcagggggctcaggcacccactccagctgtgcccaggtcttgccaatgtgcttttagaccagctctggggcatggaagggagccatatcttgagagtgggcatagtcttgctaagagggtctcatgttgtgccggtgatctgtgctacggagaatcctctagagtctacc

SEQ ID NO: 128351 - DNA, 1246 bp, Homo Sapiens
  misc_feature (493)..(575): n is a, c, g, or t
  misc_feature (1198)..(1198): n is a, c, g, or t
gtgtactgatttctttcttcgctttcggcagctatgtacttttctctttctttctcgtccgtccttctttcgattgacgtctcgtcgtgtgtgtgtttgttgtcgtctcccagttgttcactcttcttctgctctttgtgttgttagtttttgttcccccctcgtgtgggtgcggtattttatgcttcttttttgtctgctgttgtgtgtttctccctcctgtattttgtgtgtgctttctcctccctcccctgtgttgttgtttcgtccctccttcgctttatttctccttttggtgtcacgtgttgttttctctctctgatggctttttgttttctcttcgccgccctgctcgcgcttgctcttgttatatgtatctctcctccttcttttgtcgtcgccctccttgtggtatctaataacgacggtgtggcggcttcctatcttctggtgctccccctcccctcgtgggaggtctttgtcgtctcgccgnnnnnnnnnnnnnnnnnnnnnnnnnnnnnnnnnnnnnnnnnnnnnnnnnnnnnnnnnnnnnnnnnnnnnnnnnnnnnnnnnnncaatcaacttttatttttaattacccaagtgtgtactgtcctttgtatgaagatacaatggaggatacaaaaggaagaagagataaaatttctaccatcaaaaaagttaaaatcagctggagacacaccgcacaaaacagtaagacttaaggctatatactgagtagcatttgagaagtgtaagacaacttagcacagagtaaacccacacaacgggacaccatcggtaactatgacagggagtgaaggaggataattggggaaaacatccaaagaggtgggaaaagcgttggatttgtgttctagtcccccagataccagtggcttattgtggctcttaggtaattaagttccacctctgtgggcttcagtttgctcaactctaaaacagaaggtgaggactaaatggtctttactgtctttcagctgtaacaatacagtattctaaggacgaatgcaaagaactagggaaggtgaggctattacaggtaagaggaagaacaagcacaaagccataatggtaggaaaaaattcattccttgtgcatgggcaaggtgtgttgtggggcagcaagaaccttaaacaagccaatttaactattctaaagattttgagggcaatanacttggaaactggtgaaacagaacgctaagccaggtaagggacactaa

SEQ ID NO: 128352 - DNA, 1563 bp, Homo Sapiens
tttttttctggtcaaactccctttttattaagggttatcaagctgtacacggtccctaccctgctccgctccgagttcgggcagcgcaattcaccactctcccaaagccggaccacagctgggtgaggggtgggacagagagtaggagcagtcccagcatgcagtgcagcagcccaaagcctcgggcgaggcatcgcccttcatcccccttcagggcacagcgagatgcgggccagagctcttttgctgggacgtacacagccaaggtcaccctccagcccggtctgtcccatgtgcaggtgatggggggtacgataagcagcaatgagggcccaggaagacctcagtctcctgggggcccatcctaaaagatggcaagggcagcaaagtatttccatcctgctcctacaatttagaaaccttcttttttagtgtcaaaatatagcgttgaggggagctggacgctagggtcttcaccctaacgcaaagcaaaagccgaacggaacgggagcaagcgaacagaacaggagcaagcagcacacacaggccagtgatgtgcaagaagcggagagaggtgagccggctgcagcactgggcgagaactgcgggtgaggtaagggccacagcctgacctgctcatctattgagggggctagggaaggttgcaggggttgagggtccaggcccaacctccccactccacagttggcacaggttctccctgcttggcagcttctatcgtgggcagccctctggggacttgcaggggtaggtgtaaaggtggcagtactggggctgggctggggaccagtttctagcaccacactctgagccaaggggttcctggggatgaggctagagtcccgtgtgccctcggttcctaggccccaaattcctctcctggggctgtggcaagcccagtgttggcacctcccttggccaggcacagacacacaaacaccacacacgtggggccagggaacactcagaggagccgtcccatggcaggcagacgggatggcagggcagcggtggcctccatcctgggccacaggaaccctgctcagccttgtctataccttgtgcacctgagggggtagctcatcctccgagccctcttcgggcacgggctcagggtgccttgatgccgactgcccatcttctgcccaccctccaagaggcagccgagagaaatgagagggaaccctgggcactgtgccaggatctgtgatgccaccgtagcgcctctggaagcccccatgcagggcggtggtctcaggagctccaggccggggtgctccacagggatagctagcagagcgagggatagactggggggcccgggcgccctctcccccttcatcaggggcgctttctccactctcatcactctcccggcggtgccatacatgccgctcaggttcagcctgggcctgctgctcgcggagctggtgcatatagagggcatgcaggctcatctctgtggatgcatattctgacagcaccaggctctgcagctgtccctcgtgccgaattaacacaccaggcctcgtacctaccgta

SEQ ID NO: 128353 - DNA, 1741 bp, Homo Sapiens
aatcaatgaccaacttatccagctttggaaatctggacaaagagaaggctgagaggaggcctggtccagtgtctaagggtctctgagtgagtctgtgtcagcatgtgggccccagctgggcctgtccatgggttgggcacagcagtttcctgagtaagagccagccccaccctcagggcagcattccagcccaaaaagaaatccaggccctccaggttcggcctgttttcaaggccctcaggacagtcaataaataggttagattctgagccaggcgagtagggggaagccgggacccccaccaccaggaagtggttcttcttccgaaacaatctccacaggccccgatggttgccacgcacatccaggtcccagatatggaggcacttggcaagctgggtccaggtggtgaagtcatcatctttctccattcgaataaaggccacgtaggtgtggccctctgtgtctggcaggaaagagtcttcacaagggttctttctgtggtccagaacctcagcctcactgagcagcctgtgaacttccacttcataagcttctttcttcagactgtccacattcctgagctggacacctggaaccgtgttgaacttgtgcttcttgaagtaggcctcgtgaaagtagccattcatgttgaggccgacgatgccaaagtggtaggatcgggaaacgtcagggatgatgcactctcggccccggcgttgttcaggcatccgcatccacatgtcccaatcccagagcttttccggtgtaggccacttgggctcaagctcctccttgtacaaggacctcctgagcacccagcccagcccaggcatggtctccacacggtacagtagtgctgggtcctcagccgtgtgttcatacccctggtcattccaggcagagatgcagtacaggctgtcatcctcctccagtaggtggatggattggctcaggaaactgaaaaaatccacagcaatgtccaggtcctcttccagaaccacagcaaacttggcctccggaaacaggttgaaagtggcagtgaggctggccttgtagtgctgagacacgcgggcattcttgatgctgatgggagtatgctggatgcccctcagaccaaacagtgccaccacatccatgggttcctcatagtagccgtcaatgaaaactgttatcatctgaggagacaccccctgggctgaaagcagagagcgcagcatcctgtacaggtaattgggtcggttccctgcaatgacagccacaggcacattgaggaccttgttgtctgggagtgggtcagggctgaactcgatgggtgtggggtccttgcagctgcatacacttccatagccctcaactttgctgcagaagcgccggcggcgacggttcagctctgtgtctgcccagtggcactctgcctcttctgctgagctcaatggcacatctgtcttcagcaggactgggtccccccaggaagagagggcaggtgatttagaatgtttctccccgaagacaggacctccttttcgtcccacgaaggcccatgtgtccctccagcccagggcagggccagcctggctgtccaggctcctcagcagagccttggctgtgtccttgaggtggaaggagccctcatccttgacagtgcagatgagcactcggccgggcgctaccatgttgaggaatagcaccatggcctcatcctcatgaggtgagtacgtgtcaaacacacattttgcca

SEQ ID NO: 128354 - DNA, 1358 bp, Homo Sapiens
  misc_feature (99)..(99): n is a, c, g, or t
  misc_feature (1343)..(1343): n is a, c, g, or t
cccaagggccgcccaaggggtgttggattacccccggggcggatttcagggtttccatcccaagcccggtgtttgggaagaggcgttccacattctcgngcccgagaaaggcgcttaaatggaatttctgccggccgggtgatctgggggaaagaactggcccaagggtccgggcgggcgtaaaattttggataatttggaagcctcccggccgtgggggcccttccccgggtggggattgagagttcccccggtgtaaaggggggcgcttcgagggagaacttccccaatttgtggggaattttttgttttgcaaagagaaccccccttcgcgggtgtgtgcccccgccccgcgcgggcgcgggtgtttttgtattattgtggggtgggaggaaagttcccaaaaagcgccttatgttccattggaccccaggggaattttcccttaggggaaaagcagcttaatgggtcccagggttccacctttaacctgtcggggggccccggcggcggccaaaaccgaaagggtctaagaaagtttgcttcgagggcccgaaggcggccggacatgttttttatctctgtgtctctgggttctgggggtttttgttttcccagagggcttctccttttttaatcaatgaccaacttatccagctttggaaatctggacaaagagaaggctgagaggaggcctggtccagtgtctaagggtctctgagtgagtctgtgtcagcatgtgggccccagctgggcctgtccatgggttgggcacagcagtttcctgagtaagagccagccccaccctcagggcagcattccagcccaaaaagaaatccaggccctccaggttcggcctgttttcaaggccctcaggacagtcaataaataggttagattctgagccaggcctggaaagtgagggtattcaaagggcaggatgagctgctagggatcgtaatgattcccaggtactctcctgcccttctccaacaaggaagtaaataaatagacttttaactcaggaacggggtgttggagcaggggaaccctccccttggagttagtaattaagtctcatgttaaaaacaaggtagccccagcccctaccagcatctacaaaatcctacaggatggagggaagggctagccagcctgggggtacacagtacccagccccgcagggtcctggaggaggtctcatgtctgttctggggctcctggggctcctcctcctttgggggtggctccaggaaaattggggtgactgagggtggcttcttcactgagtagggggaagcgggaccccaccaccagaagtggtcttcttccgaacatcctcngtgcgaattctggct

SEQ ID NO: 128355 - DNA, 677 bp, Homo Sapiens
  misc_feature (104)..(104): n is a, c, g, or t
tctgtgtcagcatgtgggccccagctgggcctgtccatgggttggggcacagcagtttcctgagtaagagccagccccaccctcagggcagcattccagcccanaaagaaatccaggccctccaggttcggcctgttttcaaggccctcaggacagtcaataaataggttagattctgagccaggcctggaaagtgagggtattcaaagggcaggatgagctgctagggatcgtaatgattcccaggtactctcctgcccttctccaacaaggaagtaaataaatagacttttaactcaggaacggggtgttggagcaggggaaccctccccttggagttagtaattaagtctcatgttaaaaacaaggtagccccagcccctaccagcatctacaaaatcctacaggatggagggaagggctagccagcctgggggtacacagtacccagccccgcagggtcctggaggaggtctcatgtctgttctggggctcctggggctccctcctcctttgggggtggctccaggaaaattggggtgactgagggtggcttcttcactgagtagggggaagccgggacccccaccaccaggaagtggttcttcttccgaaacaatctccacaggccccgatggttgccacgcacatccaggtcccagatatggaggcactag

SEQ ID NO: 128356 - DNA, 1858 bp, Homo Sapiens
tatcctctccagtaggtgattgcttggctcaggaacttgccgtaaatccacaaccaatgtccagtcctcttccaggaccacaccaacttggcctccggaaacagggttgaaagtggcagttgaggctggccttgtagtgctgatgacacgccggtcaattcttggatgcttgatgggatgtatgctggatgcccctcagaccaacagccaccacatcccatgggttcctggggggacatggccactgctcaccattgtgaggtcacttttccctcgtgcccaacctctgcaatccaaggccttcacatttcacagcccttgcctgggcggtctccctttgccccgtccctggcaatcactgctgctccatgttgtactccacaccgaggcacaccccccacagtctctgcgtctaccacttactatgattacccgtccatggtgaaaccggtaacaatctggaagaagaacacccccctggggctggaaagcagagagcgccagcatcctggggagccccagggataggttagggtcatttcatcaccccctcaactcaggttcccctgtgtttacagctgggcccagagtccctatgcttacccacagaggtgaatgcgtctagaatctattgcctttctgcccacctcaagagttcctcctggaggtagatgacctaagcaccctcctgttcacgtgctgggtatagcccattcccaggcttacctgtacaggtaattgggtcggttccctgcaatgacagccacaggcacattgaggaccttgttgtctgggagtgggtcagggctgaactcgatgggtgtggggtccttgcagctgcatacacttccatagccctcaactttgctgcagaagcgccggcggcgacggttcagctctgtgtctgcccagtggcactctgcctcttctgctgagctcaatggcacatctgtcttcagcaggactgggtccccccaggaaagagagggcaggtgatttagaatgtttttccccggaggacaggacctccttttcgtcccacgaaggcccatgtgtccctccagccccagggcagggccagcctggctgcccaggctcctcagcagagccttggctgtgtccttgaggtggaaggagccctcatccttgacagtgcagatgagcactcggccgggcgctaccatgttgaggaatagcaccatggcctcatcctcatgaggtgagtacgtgtcaaacacacgttttgccatcacgtggcccgtggcctggttgaggacaatgacatggatgccccggccctgctcccgggcctcatcctccagcaccgtggtgccatccactgccacatatactttgctgcgacttgaatacacctctacgtccaggacccgccggggaccactgcctctgcgccgtgggggctccaggcggcctagggcctcatcatagtcttgctctggctctgggtcttcattggcttcactgatggctcgccgagtgtccaggatcaacttgatattgacaatgacagtcaccagcaggaaaagcacggcccctgtctgacagaatctccgcagggcccgctggtttgtcagtttatacttccaggtaaggtaccagctccgcttcttccgagccccaaagggcttgatgagggggctgggcttccagtcgtccataccggattggcgggtcaccaatgtcctggccagcccatgacttcaggaatggcttaggggccccgggccccgctcgggccccgctagggccctcactgctcggcccggctcgccgcggcctccgcctcctccatgccgcctcgtgccgaattcggcgcgccgtcgacttcatactctct

SEQ ID NO: 128357 - DNA, 700 bp, Homo Sapiens
  misc_feature (132)..(143): n is a, c, g, or t
gttcaaaaattttttattaataattcattttcatagctcagaaaaggatataatcagtagaacaactaaaaacaaaacctcacctctacagagatagccagtgtgtagactttattacataggcacatattnnnnnnnnnnnncataaactggttttacataaaattaaccacaatagtgcaagaggttacactgaatgagaatggatgatgaatgatggaaaatgtaaggcttggaacagctgaatcattcactggatcttgggttcatccatcctgacgcactgaaatttattacagacattacaagaatggagggtgaggaatggtgcttctctgtcatcgcctggctaaaacactgattttgattaatctcttgaatacggtagttttctccaggttctcttgttaagtagacataaaagttaaatgaatgctggcttaaggtcagaggagttcatatccttctcttccctcacccctatactttagaactctcacacccaacaatttgctgttgggacctgactatacatctgctttcccacaatgctctggtagaataccactggggttgctgatccaaagcacatggaggcgcaacagtgcttaaggcttcagtcatggtgtggggctagacagcatccccaactagaattgagggtttgatctgtggggtacacgagcagcaggaagaggat

SEQ ID NO: 128358 - DNA, 1023 bp, Homo Sapiens
  misc_feature (591)..(646): n is a, c, g, or t
  misc_feature (777)..(777): n is a, c, g, or t
  misc_feature (804)..(804): n is a, c, g, or t
  misc_feature (818)..(818): n is a, c, g, or t
  misc_feature (828)..(828): n is a, c, g, or t
  misc_feature (831)..(831): n is a, c, g, or t
  misc_feature (838)..(838): n is a, c, g, or t
  misc_feature (909)..(909): n is a, c, g, or t
caagaacagacggggaaagcgttttatttgcaaagaataaaccattaatttacacaaacttacatcccagtttatatacattatatatagtttatatacacagtatctcacactggatgctgacccccaaaagcagcattgggcctgctccaggccattctcacaacaaagcccaccccccaatcccagctggaggaatatagaaatgacacaccccgagccctcctggagagagtcctgaaatggattaaaagacaaaaatcagctttcttctttgtgctcacagggcctagaggagcctccaggcagggatgggtcctgaggcagcattacagtagcctaaggacttgctggcactgggccagtcttgtgctttccagtccagaggctagagctgggagaatgccttgggaggaggaagagttctgatgaaggctgcagctactctctccctgcctggccaggctcctgaagggggccaagtacttccagcctggagtttgtgggtggaagaaagaagatggccatgtgggacaggaactgctttaccccctcactctgctgagtctggaggttggtgcttgctcaccnnnnnnnnnnnnnnnnnnnnnnnnnnnnnnnnnnnnnnnnnnnnnnnnnnnnnnnntggaatgtaggttgggctagattccctctaaggggctttttagctctaaattctctgaatctatttgcatccaaggaagttacataaacacatacactcatacatggatcaaagtctttgtttacctccanggttcctagctctttcctgttcagcanaagaattggctcangatggatganggnggaatangcaatactactctccaggtaccagtaccgagcagctccgcagctgtctttgtgcagcttgctgttgagccnagtactggcaaactctgcatgcatctcctcaactctgtcacgctgccaaatgctcgtccatcccagcagcatgtctcggcatcaacacatattcaatgaatcattcaatctcca

SEQ ID NO: 128359 - DNA, 1803 bp, Homo Sapiens
  misc_feature (1586)..(1629): n is a, c, g, or t
gcgtcgactttttgactaagcaaaatttgtacttgtttaataagaaaatcacttctttaaaaaaatagttctttacatgctgaggttcatctatgcaatgcaagagctgaaaacagattcgagaaaggctgttcctacaagggaaggtcctgaggttacaacgccggcatggccgggaaaacatggctgcagcgatcccagcttcttgctgcccacaggggtggcacatctgggcacacactgtgagctgctcagaggcactctggtgggcagctcccatcgcctcagtcagtgtctccgtccccttcactgccttccaggggactgggcaccttggcgcccgtgccacctgccgtgagagcggtggcactgaagttgtggatgggcaaggtgctcagccactgggccatggagcgttcgtcccgctcggtgccgatgatggtggggtagatgtgctcctccttgaaggctgcgacctttccttcctcctgcgcccagtccagcggctcatgcagcccatcgttgccaaagcgctggttgtacttctcgaagtgcaccctctccaggaccaggccgagtccgggcgccttgggcacgtccaccttctctgtgccccagctgcgctccagcacgctctcaggggcataacccttcacaatggccaccaccaggccgaccatcttccggatctgatgcatcatgaagctctggcccttcaccctgatcaccgcaaactccaggccctcccgcacaaagggttcctcgcagtacatctccaggatgtagcggcaggcactgggatcctgcggccccttctgcgaggtgaaattgtggaagttgtgcgtgcccttgtagcaggccaggagcctgttgacctgctgcagcgtctcggcgctcaggcggtaggtctcatcctgaacgtcccggtccttgtgcgcaaaggcaaacgtgggcagcaggtagcaataggtcctggcatcacatctgttcttggagttaaacccgcccgtgacccgcttcagtcccagaatccgaatgtgagagggaaggtgctgttgatcttttctagaatgtcgtcaatcagccacaccttcagggataccacctggccggctgcggacacacccttgtctgtccgggcgcagcgctggaaggacattttcctcatgtcctcaccatgattttcaggaatacagcctgaccggacgagggcggacaccaagtcatcttcaattgttttgaattgtgaggacccgacattcctctgcatgccgtggtagcccttgcccgaataggccatgagcagcacgatcttccgcttgggcggcttctcgcgccgctcctcgtcgccaccgctcttgagcttcttcgccggatgttctccgtcctcccagacgcggtcgcccccggcccggccgctgcaggacctccggtcctgggggcatgcggctccggcgggcggcggctccgcgttcccggccatgcgcggcgagcaggacggacgcggtcccaggcgcagggtccaccgtccgaaggctcccaacagcgcgcgaagctggaggcccatgcagcaggctaccagtgcnnnnnnnnnnnnnnnnnnnnnnnnnnnnnnnnnnnnnnnnnnnnagctccgcctctgccgacccctaacctctcggaccctgacgctgcagccctgttccttctgacccctgacctccgggaaaccggcgccccagcccctctccagctgacccctgacctctcggacctggacgccccagcctcactcctgctgacccctgacctctccctcgtgcc

SEQ ID NO: 128360 - DNA, 985 bp, Homo Sapiens
tttacttttttactttttggtgagtatatttttgagatttggtggttatcatttacatcattgactcttcagtggaatattcatagtagtgtaaatagattctttgaaaataaggcacaagtatatgttgttctctgattgtctcccacgagagtgcaccaaacgagcgatcccaagaaatggacttgaggcacattttgcagaggtgtctttttcagtttgctggtttcccacagatggctaaagcaggggtatggaacatgctgtcatatttcattcataacacacatgtactatagctctaggcaacagatggacaatcgcttgtttgaactacaaatgtgaaatactaaggtagaatagcaatatttctagaaatgtatatgaaaaaataaagcctttccaagccaagaggaatggtgagaggctttgaggttacatcagtgtttccctgatctccctagcagctgccataatttccccaacacccttcaaaacttgataatggaaggatcagggggcagccgacacagatttgacaagagaagcccaaaccatatccaatagaaataacactgttattcctggctggttcacattaataggatttttactaactaaaaaaatggctggaagttgtgttttcagagtcctgtctatattccactaactctctactatagccccatggaaaaagccctctctttcttcctctgtacccaaatataaaatacttgtttaaatgtagagtttcatatcctttaaacctcaccataaacatctctgtggaatctttcatagggaacaattatagtgttgataagtccacccccttaatcagcacatacccagaaaagtaattttgatcagagaagttgctcctacagaaataacaatgtgttaatgacaagaaaaagaacccacatctttgagctgcagagatgccagcatctaacaacctgatgccttatgctgggacacatga

SEQ ID NO: 128361 - DNA, 898 bp, Homo Sapiens
  misc_feature (73)..(85): n is a, c, g, or t
  misc_feature (221)..(230): n is a, c, g, or t
  misc_feature (745)..(745): n is a, c, g, or t
  misc_feature (854)..(854): n is a, c, g, or t
  misc_feature (864)..(864): n is a, c, g, or t
  misc_feature (874)..(874): n is a, c, g, or t
aaagatcatggaaatattatgcaaattcccagatttgaagacaaaaatactctaattctaaccagagcaagcnnnnnnnnnnnnnatacaggggaatattttattcaaggtaaaattctaaataaaatataattgttttttatcttttctacagcaaatttataattttaagattccttttcttgtttatcagcagttgttattacatccttgtggcacannnnnnnnnnaattttgtaaaggtgaaaaaagcttttatgagctcatgtagcaatcagattttcctgtggattgataataaatgaatatgatatatagttaaatttttaaggggcatcactcctggctttgtctgtgtctgctttaaaagagcataatcacggaataggactgacaaaggattgtttctttttggggaccaaaatgttttcccttgttgaccacaagaaaccgtggaggttcttactgtgaggcttcagttgacttcttctcttgagtgctcgcctgagcaggggcccgtgctgagcgttttgcatgacttcccgtcttcattcatcacacttgtgctgtagaataggcattcatctccatttcatgtggaggaaatgaagactgaatgtgaagatgcctttacttggctcatagtggcactaagaggcaagggcacaagttgggcacaagttgagcccaattctctgtgctatgaagggggtcttttttcttgtaagcatatccgttatctcanacgtctgtcttcctctgtgttgggagcattccctgtggagggggagtattttagccacgccactggtttccttctctgctgtgacgcaggttcacccccactctggggncttttctggntttcatcctnaggcttacacgtacgaacaaacgc

SEQ ID NO: 128362 - DNA, 2400 bp, Homo Sapiens
  misc_feature (2147)..(2157): n is a, c, g, or t
tatgcctaatctctctgctaagtaactaaataagaatgatttttatactactactaagtgtagtaaagggctgctacctcattagacgctaatctcatttgactgaggaacacagaattgtatgtttttccacagttcagccagtacaccctaatctcgatctacaactctgggtcttccctgctaaccaactattttccaataagagcacattacaataaaagagaggctaaattcccatgccctttaaagaatattaagcccagggaccatctcccccattccccatctggggtatagaattagtatataaacccacagtgttaacagtgtattgctttatttggggtcttgggggagacaccagggagagggaagaaatcaaaggactataaatgcagggtccaataatgttaaaatagcaaatatgcaaaatgagtaactggaatcattttcttaaggactcaactcatggaagaaaaactttaattgctgtttccaaaaacatcagtatgaagtagaaattggtttcaataacattagtaaagaatatgttctagaaagtggaggtaactggatgtaaaattctggcagcaatttaatagaacagtcctagagggttaggctgaggccaacacctaatgaggacgaaagccttgtctgtggggaattttggatgatacttggagaaatattacactgtgcataaaccaaattgagttgctttcacaagtgttgtaaagtttcatatagtaaaaggttttttctacatgcacttcaatttcacagcaagagtggcagagaatacctaaacacagaagagagcattcatgcaagatatctaactccttgatataataatgcatacaattcaaaatgattacactatcattacatctagggctttctgcaactacacagtggtggttatggaaagcactgcccccagcatcgacatctagaaagcatccaccaccttctacatgtgttctctttttgcgttttttcttcatttttcttaatcaactctgctgttgttgctgcttcttagcaaaactggtaaaaacaaaattgtaatcattgaacatagcactctggcaatcaagacgcttaaaaccttcaatcttctggggcgaagcaagcactgtgcgacatttagaactctgattaacaaacaaggtggtcacaaattttcctggcttgaagacttctacaactttcctgatcaggtcatcataggaggtctgacttaagtttgtttcaaagctaacataagaaaattctggttctggagtgatgtgaatagtccaataagttccatccgatttcattccattcatcgaatacccacaaggattgaacattgtggcatcaatgacagaacctggtatcaggtcacgaattccactctcacgagtgacatcctttgcagtaacaccatctttcatgtagaactggtccataactgctgggtcaagctcactcatcagaatttccaaggtttgatctggctgactgattacccgactctctgggaaatccagagtatataagtaccaacagtcagaattcatacgtcccatacaatatgctgctccatttgggaaaattgcattaagaaactctatttcttcctggaaattccggtgtgggtacccttggtgagaaggcttcatgaaattcttacgagaataaaagaagctttgaattgagtcaaacccactgtaatccctagcaagcttcaacaggggaaccagtgctttcagcaagagggtggtaccacatgtcttcaaaatgaaacgtctcttggagacaaacatgctactctcactgagtacataagcttcctgcttgtcagtttttgtcacacttatgattgaacattgcacatccttcaaaagtatgtcccactcagatcttgggatagtgcgaagatccccagatccttggtttgcgtcgggctgctgccgggagaaccaaacctccagcagcttctcggtcccttcgaaaaaatgtgcagcttccatcaccgtgagactagcgaacaaccaacaaccacagaaaatcaactaaattaaacctcttctcccgccgctgccgccgccgctgcggattgttccagctgtgttactaaagttcaggttccnnnnnnnnnnngctataattttatattaactttttttaaaaaaaggactaataaaattttcccggctttgtgtgagcgaaagttgaacgtgagtcttttggaaatagaggcagatacagttcagtctcttgtattccgctgctttcccgttagagagagtagagcgagcgctagctaatgtcgccggccatactgtgtaagcgccccggccgtaatggccgaattcccgggcatatgtccggtaccgtcgactg

SEQ ID NO: 128363 - DNA, 1927 bp, Homo Sapiens
attggggggggaattccaacgcccttagttccttgacccaggattttccttaggaaaccaggttaggggccatggttccacttaccttattggggccggcgcgccaaacggaatggtttagaaagcttttttggagggccggaggcggccgcacaagatttgggggtggtgtgttccctggggggggtccaatgaaagtctatttatttgctcgtaatgagacagaacgctacaatctgttcaacactgggctggacactgcagtgattaggggcaggtgtggggcagggtggggcctctgagcccgaggacaaatgtccatggcagagccttccagaagactcgtcccttaccctgtggggcagaaatagaaatcacatgatcgccactgattcgcagtggagagggcgctgagctgggcccggcaggcaggcagcctcagcagagattcaggcagtcagcatggtgcggccctcccgccagcactgtcaggtcagcagaggttcaagcagtcagcatggcgcggccctcctgccagcaccgtcaaggagggggatgctgctcctgcctggtgcctgccttcattctgagggcccctggccccagctgagttcaagaggggacctggggctgccccagcaccctgagagcccgtggctgggcagctctggaggcggaaggacacaggtccctgaggccccgtctgcccagggttgttcctccctctccctcctcctcaggctggggcagggtggcgccgctaggaccctctgccatggctttgtgacactgcagctatgctgggcgggactccgccccccaccccacccctgcatcggagggcagggcaggcagcaagcagcatttggaatgcagggtggagaggatgctagaagtatgtgatgcacctgcggcactgacagcatctctgccctcagaggctgagggcccacaaggcacaggactgccccctgcccacaaggccaggccctacaagacagatggcagccttgaggcctaatgtcgagctcagcttcctcctgtctgcatgtggccaggccttggagcagcagcttgtggcagcatgagggagggcggggaggacccaaggagtctcggcgatgcctgtcctcagcaggtcaagctgaatggagcatgccaaggtccgacgggcagtgtgacctcccagggcactggtaactgcacggaaggtgctgaggagtaggaaccgtcctgatgcgtgaccgcctgtgccagggggctgagcctcagagctctgtgcttgcgaggaaagcctcccccaggctgcccagccgacatcacatggtccggctgtactcgatgccactcttggaagagatgcccgaccatggcaggaagctgcagagcaggctgtgggcctggcggtagactctgtgcggaatggagcaggggctcaggctggctagtgcagagcccaggtgctggatgtagtccgtggggctctgttaaggaagattccgacttgccctgaccacgctcgccagggcacagtcatcaggagcccgcgcagtggcctgtgggactgtgtgcagatggcaagccaggcttcggaggctgagagcccgctaagcctctgcagagctggaaaggctcatgagacgaagtggcctctgctgtgcaaaacaacagagggtggggtctggggacagaagggccttctgagtgaggcagcaggcatgtgaacaccacacccagggatgcacggggggtggggaaggggcctggcagaagggcaggtgcttctggttctccctagattctcaacctttgtggcagcaagagggacagagccctgtccatatgacaaggagggggtcaacagtgctgaccccctggatgcctgtcttcacataagctagacggcctgtggagtgtggggtcaccc

SEQ ID NO: 128364 - DNA, 1116 bp, Homo Sapiens
tgaaataacatgatatataaagagatttatccccgcctccgttacttttttacataagcctacgtttggatgggcacaagtccttccttggttatgggatactgcacgatggcagctttggctgccacgatttctgtccgagcccggtacaccgggctgcagctgggcaggccgagagcccagtagatggctggcagctcttgcagaaacagaagggtcagatgacaggaaggcgggctctgcgggcggctgaagggtggggcctggtggcggctgcccagccgacatcacatggtccggctgtactcgatgccactcttggaagagatgcccgaccatggcaggaagctgcagagcaggctgtgggcctggcggtagactctgtgcggaatggagcaggggctcaggctggctagtgcagagcccaggtgctggatgtagtccaaaatcgtccagggagggtgcccgccgttgatgtagaggacataggtgaagccatctttgaggacccctcgaatggagtagtaataggggagatagtggtgctgcttgaagtctctgttttcatagaagtttattgctgtgttgttggtggtgaggacatgcaggtaaatggctttgcagtggtcctgggcggtggttgatatgtgatcctttaaactttcaagtaagagggaacctatgccgtgcttcctgaactctttcacgacgcccagacttaggatgtacgcgacttgtgtgtcaacagagaagttggatgctagaatatctccatcctctttatgtattttggtcctgttcttaatttcagctactatcattcccacaatggcacctctgtaggttgcagcaagggaaaagaacttcttgttggatgtgatatcacgataccatgagtctgggtactcgatggggaaccagtcgccacacaggtgcttcacagtgtctatgtcatcgtggcagaggaggcgcaggctgacctcgctgagcgcgctggatggcaccacctctgtcattcacacctcgtgggggagccggcggcagctgggggtgttgtagggctcagcgcatcctggaggcgaagggagccctcgtgccgaattcgccacccaggcc

SEQ ID NO: 128365 - DNA, 1329 bp, Homo Sapiens
  misc_feature (123)..(153): n is a, c, g, or t
  misc_feature (386)..(425): n is a, c, g, or t
  misc_feature (1110)..(1110): n is a, c, g, or t
  misc_feature (1190)..(1191): n is a, c, g, or t
  misc_feature (1206)..(1206): n is a, c, g, or t
cagatttaaaatcatttttatctctcgacagcctgcaacacaaaattacatatggcaaaaaataatttttaacttgagaaagaaaaaaacttctgcacatataaactttcaccgatgtgccannnnnnnnnnnnnnnnnnnnnnnnnnnnnnngtgtcatgttttattattctaaaactacattatttataatggctgatcccaatttagtgggtgtgcagtaattatattggctcaaagacatgctgaattaaacttttataattgagatcacaattatacatgaaatacacaaacattaaaataagtttattaaatagagtttgggagaaaaaaagtaagaaattccatatatatgcaaatgttgactattatcgagagcagcnnnnnnnnnnnnnnnnnnnnnnnnnnnnnnnnnnnnnnnngtaaataacagaagatttgtttccaaaaagtaaggtgccattcagaagtatataattgaattaacataaaggaaaatactgaataaaaaacagaacatgagatattaaaggttaaaactttctgttcagttatttgtatctgaagttaagacaatgacataaactgagctttcaaatactgctaatttttccacttaaatgtagatcaagtaccatatagactattttgttctagaataaagtttctttgaaaaaggaacatatttataatcaaatttctgtagataaatggcaaaattttcagagaactagcttgaaatggatttagtagaaagaatgactgcttcctttaaaaaaacaaatatagaaatcttgcttccacgtaactttttaaaaactaatgtccattgtttttcccaatctgaatatgtttccatacatgtatgtatttgcaatttctattttccaatatgtaaaaagttggtagacaatgaagtagtgtgcaaatttttaggagagaaaacaatccctactggtttactaccaaactctcacagttatatagaatctattagcactataaactaactcaaaatgcaggcttcagaaaaactgcttcaatagcctccctatcaatctgtcgccttctatgaagtcttcacctgctattattccacaggctgangattactttctgaagaaatggtcattttttcaccagcttggcatgttgacagcttacaccggtacttgatcactctttannaaacacacacactanaacaactatcatcatgctggtaatccacacacatataggatgtccatggtcaatcaacgcatccaaaaagaatgagatctcgcaacacatgcagagaaacatggcaatctctaggatacactc

SEQ ID NO: 128366 - DNA, 719 bp, Homo Sapiens
  misc_feature (675)..(675): n is a, c, g, or t
ttttgacaactgagaattttttccccccacggctgttcgttctttctgactttacttctcccaagtcagtaaataggggcagctgtagggctcttcacaaggaaaagtcccttctcttcccccagcatgccataactgttgctcccatcagtagactactttctaaaaatatggcttgtctgagtgactccttctcgaggccccagcctgtttctcctcagaccccaaatggtctaggaaacatcctacctcctacctgcccacgcactgttaccactgttatatctatggttccgcgcctcggggtatatcccgaacctcagctaagagtccttaccagtgctgtcttgcacctgcagccttgagcactctcactctgaaatctcctgcaccagtgcttcatttcctctgcctgtggcagccctctcattagggttgcagctgtctcctaattttgtcagatacagagattacacttctgctttttctcccgtagcttttgggttatgactgagatgaaaagaagaaaggctgaatttactcccatatttaaaccacaagtcaaaatatacttttaaaatgtgagtaaaattgacacaactttctttcagtgtccataatagatactgctgattagctctctaatgtgccatgaactttgacttccgagtgtgngctcttccatgggctttctttcctgcatgggttcgctgatgtac

SEQ ID NO: 128367 - DNA, 670 bp, Homo Sapiens
tgcacaaacagttttatttgatgaaccacagtgactaacaggatcagaagacagtgcagatattctgaagaaggcactgggggaggtaagggggtatcacagcaggcagcctcctctgcttctgtcccagttcacagatgagttccaggcaggaagtctctgcaggtcacccacggcggcctcagagggacaatttcttcccttctagaagcctcttccagtgttcactggatgctttgaggacagctctgggcagaggaggtgactctgtgaaagatgctatcttaagatggggagactaggctgtgaggagccccttcccctctcctcctccctctgcccccagagctggcgtcattccagggagggtcaagatgtccattcacatcaagctgggcttttcttatctccatcgctcatgtcttgtccttcactttcatagtcctccaagaacaaaacccggaatagacactcccagcctctagctcacaaaggccccactattaatttcatcctcacggtctctctggcagtgtagacatcatgctatctgcacacttgctccagtccctattcccagatccccaatccagcagaagccaagaggtccaatcctgagggtagggagagaaaaaaccaccccgtgccttttggcccatggcaagcagga

SEQ ID NO: 128368 - DNA, 645 bp, Homo Sapiens
  misc_feature (237)..(237): n is a, c, g, or t
  misc_feature (574)..(574): n is a, c, g, or t
  misc_feature (581)..(581): n is a, c, g, or t
ttttgggattttaaaatcattttattaatccaacagtacaaaagacccccaccaccaccgcattctgccatcactttgttccaaaaagtagtggagtgagagagcgagagggagcagatccagcaaaaacactcccccaggggccattttacaaaatgcggagcaggggaagacaacacaaaaacagcaacagataaatggggcaaacagaacaacaaacacaagagttgagcagcnggggtgggggtgggggttgccatctacgccgttttagtgtgagggacactgggaacgatgcccagaggctgctctcctcccagcctcaaaggttgtcagctccaccagagcagggtcttctctcctcatgccaggaactgagagaagtgggggtaggggaccactaggtctttgccactgtatcttgagctgggggactcctaacttctccgagggccacaccccatgcctgccttccccaccccatggaggaatgtgtgcatgaacagaaaaggagaacgagcagcgctaaggtcctcatcaggccccaggcccatctctggcaggcagtgcttanaaaatanaaaaagacaaataaagcccagtgcaggcctttggctgagaggaatgagaattgctaattaatca

SEQ ID NO: 128369 - DNA, 4330 bp, Homo Sapiens
  misc_feature (4216)..(4250): n is a, c, g, or t
ggtttgtgttgtgtgtgtgttttactgaagcagaagttgctttaatcaaggggtgaagtcctcaatcaaggggacctcacttaacctttggtggtggggtctcagcctaccccccacaagccctgaggcccctcaggaaggagggagcagttgaacaacaaattatggcagaggccagggaatgggagtgggggaacccgggtcaaggtgaaggggcaggacgctgaaagggtgggagtgaagctgaacggggcaggaagagcttaacccacgtttctacctgggggctggctgaggtggctgtgcatcgggcagagcggcaccagagggctgagggtcgaaggggacagcaggggaaaggagtgcttaggagatgaggcgactgtgaagctggtgcagctgctcctgggtcagcaccagccggtgtcgctgtccaaaaccagccgcacatgagaaggtcactttgcccatgtagactgtgtcatcctgctgctcctccttggccctgaggaaggctgatgaagggaaggtggcaaagtcagtgggtactgtggctccagggcgctgagatactgtctccttgaggacctcatccttgagcttctcgacggtgtcactcagggacttaagctgagccacttgctccataagttgggccgacgggctcttggcagcagggctggtgcgagtgatgtctactacgtgcgtgtgtgtgctcaattgattcaatgtctccagcagctggctggtcttacgatacagcgctccagctggtaactcactgccagggccctcatgggatagctttgcaacatgcagagggggcagggatgccaaggatgccttcatctgggctcccttgaggatgctgttctcatgctggagctgggagatgtgcagcctcatggcagagatctgctgaagcagcagtggtgagtccttcaccagccttgggcctggcacagaccctggagcctgcccagggatggctcctcgctgctgttcttcaccagcaatgccagagaccagagtagcaatgcctgaaggaggagggccccggagtccctcaatcgtgcgtttggactggctgttcagacgctgctttagttctgccttctctgcctccagctggtcgatgtcagcctggagtgcatccattgtctcctcaaactctttctccttctttcgcagcagtgcctgggtctcctccagccgagtctggactttctcgatgcgctcatctgcatccttggcagcactgtccaacttcttctccaggaggctcagccgcacattggcctcacttagctcctctcccttaatcttgagtgacttcttcaactccttaataactgtctctcgatcttcgagcttcaaacccaggccttcagcatctgtgatctctgcacgaagggcagcagcccgcagttcaaccggtggaggcttgctggggggccgctctgcatcatactccccctcctgcatggctgtggccagcttgttcatggtactgatgaggatgttgcatgactggcgcagacactcataggggctgctggagggggtcccatagatctgctcgcttgctttgaaagccagttcctccagagcagccacaagtagcccctcattctctgccagtggggcaatgagctgggcagcagcagctgccacctcctgcagcacagccacgacccacgtcaagtgtttcctgcagtctaggagcgtgtcagatacctgtggtccaaaggccagtgcagctgggatcccaggagcatctgtccctggcattcgccttcggatcttcttgcagaactggcggatgtcactgcatgaagtttccagatcccggagcaggagggcaatatctgtagcctcctgcccaccctgcaagaaggcacgcagccgtcctacctccacactcatgcagtccagagcactctgcgtgaacttaatgtggtcagccagctgcatagtacagtcctcaggctgttcggcaaggtggatgctgtacagatgctgatagtacttgatggccttggtgagaggctccacattgacagtctcatccagctgatccttgtgcagcagttcaatgaggaaatccaaggagcgctcatgggcactcatctcagggtacaggctgcccactttcttatacacatccacactgcactgagagagggcatgctcatagcggtgtagcgtggcctgcagcaggctcagcgagtacaccagtccagcagcaaagctgagttgctccccagcagctcctcgcagcccaggccgctctgaacagttctcacttagttcaaacttctcctgggcctgcttccggatcagctctgccttgcaaatgagacgaggcatgagcaacagcaccagaacgcagtcatggtccccacctggccgaaggaagctgtcaggcatgaaggctgtcagcagggacatgtgtcgattggcctgggccacctccatctgcctcaattccatctcaattgccttggcatgggccttagtctcagcaaacttgattttgaagtcaaaggtctctggaggtggctgctgttgcctctccacagatgcttcctgctggtttgtcagttcccgattcacatcctgtagatgggcggtcagctggcggtacttcttgatggtctgctggtagtctgcaaccgtctcctgggctgcctccacacgcttctgggcctcacgaacccgcgcgcctgccatgtccagctgctcccgcagctccagttctgtctcacgtgcattctcctgcagctcatcgttcatctcattcatcgcttccaagtctcccacagtctccctcaactcgcgcactttctcttccagattcaggttccgatctgtcagcatctccaccatctcctcagcacccagagcagcatccacctgctccttgagctcatcaatggtgctctctgcctggcttagctcctcctgcagacgctcccgctgttgcctcacaacttccagctcttggttcttcttttccatgagcttctggagcttcacatgctcctgcttctctgaggaagaaagatcccgcatcctcaccagggcatccttcaggcgggcattctgctcctcaagctgcttgagctgataactggatgcagcgccatctgagcccttctcttcaatctcagccttgaggatctctaagtcagtagtgagctcgtccacccgctccttcagtgcctccacctcctgctgcagggactcagcccgctcttcagccatctccttgtccaaagtggccatctcaatggcatcagcagtatcagccatctcctccatatagcgttcctttgcctccagcgcctccttggcttcctttctcgcctccttgaggcgccgctgcaggtcggcctgctgctcctgcattttgctcttccattcctgcacctgctccagctggattttgtgtttctccagctcttttagctttgctttgtcttctgcccgtttcagtctcagggtctctagtttctcctccaggtcccgcacctgagcccttagtccctcctcctccttggatggggaaggaagcggggggactgctccaggagaggtgaggaccggcgtggggatgatgggtgctgccagcggagtctgagccggggtgctgggctcactgctgctcagctcacctgctgacgctgagccagaggggcccagggagctactggccccagccaccccagtactggctgggcgcgtgggcagtttgctagtctttgcagttgtatcagttccctctcttttgaggacttttgaagcagaagaatcaggtgtctctggggaagtagtatctgctccatcttcaaatacctggatctgggactggcgcacaaagatgccatgcccttcatcacaagtgaagtacttcctgccttgaacagttccatcatttttgccctttgcttcatccagaatcacgcctacccatttgccagtggcaaacagtgtggctccaacataggccacagtgcctcggtggccttttccaatcacctctacacgggagcccacccgcagaggccgggcgcttgcctccgcactcatcctgctgccgctgggcgtctgcactgtgaggggctccgcgcccagctccgaccccaccgacgaccgacgcccccccggccgtaatggccgaattcccgggcatatgtccggtaccgtcgactgnnnnnnnnnnnnnnnnnnnnnnnnnnnnnnnnnnncggccgcttcctcgctcaatgactcgctgcgctcgtcgttcgctatgaagaggggcgccctatagtatctatacagtttt

SEQ ID NO: 128370 - DNA, 1208 bp, Homo Sapiens
cggctagtacgaggctgggtttgaatcggcccgagggagaaagtccagactcggctggaggagacccaggcactgctgcgaaagaaggagaaagagtttgaggagacaatggatgcactccaggctgacatcgaccagctggaggcagagaaggcagaactaaagcagcgtctgaacagccagtccaaacgcacgattgagggactccggggccctcctccttcaggcattgctactctggtctctggcattgctggtggagccatccctgggcaggctccagggtctgtgccaggcccagggctggtgaaggactcaccactgctgcttcagcagatctctgccatgaggctgcacatctcccagctccagcatgagaacagcatcctcaagggagcccagatgaaggcatccttggcatccctgccccctctgcatgttgcaaagctatcccatgagggccctggcagtgagttaccagctggagcgctgtatcgtaagaccagccagctgctggagacattgaatcaattgagcacacacacgcacgtagtagacatcactcgcaccagccctgctgccaagagcccgtcggcccaacttatggagcaagtggctcagcttaagtccctgagtgacaccgtcgagaagctcaaggatgaggtcctcaaggagacagtatctcagcgccctggagccacagtacccactgactttgccaccttcccttcatcagccttcctcaggccaaggaggagcagcaggatgacacagtctacatggggcaaagtgaccttctcatgtgcggtggtttggacagcgacaccggtggtgcttgaccaggagcagctgcaccagttcaacagtcgctcatctctaagcaatcctttccctggtgtcccctttgaaccttagcctctggtgccggtctggccgatgcaagagcaccttagcaggccccaggtagaaacgggggttaacccacatgggcccgaaaagtaacacccacacgtatagggatcggcccgatacattaacacgggccccacacatcccgcgccgcacaagtgtacagcaccactagggcacgagcggggggcggaacccacagcattgagcctgatgaaccacaagcactaaaaacaacgtgcgcgaggtatccagcgcgtcaacagctaatacgacgaacaccgacgacagcagcgaca

SEQ ID NO: 128371 - DNA, 935 bp, Homo Sapiens
aaacttagctagtacgaggcctgggtgtggaattcggcacgagggtatgccaggcccaggctggtgaaggactcaccactgctgcttcagcagatctctgccatgaggctgcacatctcccagctccagcatgagaacagcatcctcaagggagcccagatgaaggcatccttggcatccctgccccctctgcatgttgcaaagctatcccatgagggccctggcagtgagttaccagctggagcgctgtatcgtaagaccagccagctgctggagacattgaatcaattgagcacacacacgcacgtagtagacatcactcgcaccagccctgctgccaagagcccgtcggcccaacttatggagcaagtggctcagcttaagtccctgagtgacaccgtcgagaagctcaaggatgaggtcctcaaggagacagtatctcagcgccctggagccacagtacccactgactttgccaccttcccttcatcagccttcctcagggccaaggaggagcagcaggatgacacagtctacatgggcaaagtgaccttctcatgtgcggctggttttggacagcgacaccggctggtgctgacccaggagcagctgcaccagcttcacagtcgcctcatctcctaagcactcctttcccctgctgtccccttcgaccctcagccctctggtgccgctctgcccgatgcacagccacctcagccagcccccaggtagaaacgtgggttaagctctttcctgcccgttcagcttcactcccacctttcagcgtctgcccttcacttgaccgggttccccactccattcctggctctgcataattgtgttcaatgctcctcttctgaagggctcaggtgtggggttagctagaccacaccaagttagtgggcctggttgggattacttataagattgtcctg

SEQ ID NO: 128372 - DNA, 637 bp, Homo Sapiens
ttttttggctattcaaaaagactttgattttattttgtgatctgtgtcaaactgcctcattctcagtgcaggtgatccctcctccccagaaacaagaactgacaggtagggtctttgtgaagtcatggcttccacaaggccccagggaaaccccacacagttctgagagttgatgggaatcccagcaaagatggggtgggtgggagacagtgacaagaaggggtggtggtcaccagtcaagaggctgggggttggaaaaccctgtctttggccttgctcagctttggggctgccatgttcatgatggagatgggggactgaaatttcccctgacctggaagtaccccttcggccaggcatggctttgattctctgctaagggctcagctgatagaggagcaggaaaatgtcatgggctggcttcttcacaaggcattgctgctgatgctccggagtccaacaccacgggcaaattgctccagcaggcccccgatggcaccggaaggactgggggctactgcccgaagccccactgtgctgctgtacgcagccaagaaggctgagcgcacctcctgcagccgagtctctcgatcactcagggctgcaagcagacaactgttagggagctcatccggga

SEQ ID NO: 128373 - DNA, 665 bp, Homo Sapiens
tcttactgtagaagaaaaagtttattaccaaacaagagtatttttatgaaagaaaaggacaaacctataaattaactcaacctatatctcccttgaaaatactttcaggctccaccaaaacgtagaactgaaagcatgtattttggaagaaagagatacattttgtatgctttcttttccttttgtagattcccagtttattttctaagactgcaaagatcactttgtcaccagccctgggacctgagaccaagggggtgtcttgtgggcagtgagggggtgaggagaggctggcatgaggttcagtcattccagtgagctccaaagaggggccacctgttctcaaaagcatgttggggaccaggaggtaaaactggccatttatggtgaacctgtgtcttggagctgacttactaagtggaatgagccgaggatttgaatatcagttctaaccttgatagaagaaccttgggttacatgtggttcacattaagaggatagaatcctttggaatcttatggcaaccaaatgtggcttgacgaagtcgtggtttcatctcttaaacacagtgtgtaaatttattcaactaacgatgggaaatgtattacttctgtacacagtggactgaagtgcaatttgttgaaagggaacaagtcattgaagag

SEQ ID NO: 128374 - DNA, 807 bp, Homo Sapiens
  misc_feature (257)..(274): n is a, c, g, or t
ggaacatggaggagatgtgtgtggtcctcttccaccactctgtagcctgacaagaggagacatgatcaccaacccaagctagtccaggataaatagtagggtccaaagaagcaaggagtcctgaactgcaacacggagcccccaggaacttctggaaaggagtatcgtgtgtatatgtatttatagaatacgatcatattatcacatacaatatatattatatacacacgtacatatggacccatacacataagtgnnnnnnnnnnnnnnnnnngaatgacagaaaggactggaatacacgccctacttataaacgtgcttggcactcaggacgatctctagaatatgtaacttggtcaagctctctggggagaaaggcaaatgctcatcaaacctccccataaaatcctaggaaagggaaggagtgggagacaggagacctcagaaaaagaagtcaatgagggaagctgctgaggaagggacaccatagtctggccagctcaagaactggaagtgggtcacctggcgtttctgccgttcctctgtgttgtgaatttctagcgttgttttcttataatgattcatgttctccacgcctagattggtcactgtgaggaagccaaatcggatccgagagtctttttctaaaggccagtactggccacactttctcctgccgccttcctcaaagcgggtggtcatgacaatcaccaagactttttgctcccataccatgagccagaaatcacgataggtattctccaaaaggaccttgtgtgccaatgtaagcattcttctgcttgtagc

SEQ ID NO: 128375 - DNA, 1549 bp, Homo Sapiens
  misc_feature (413)..(479): n is a, c, g, or t
ggcatgtgaatatagaacaagttgtgcaaaaagcaggctggtacggtcggaatccgggatatcgtcgacccacgcgtcggtgaaattgccactagaaagggccagtagcaatgtgttcttaattcctagcatctgctatcaaactgtgccttattaaaaccaaatgtggctatgattttgctagggtccccgaggtaagtggggaaggaacctccctcctcctttctcccgccattctttttctgaggtctcctgtctcccactccttccctttcctaggattttatggggaggttgatgagcatttgcctttctccccagagagcttgaccaagttacatattctagagatcgtcctgagtgccaagcacgtttataagtagggcgtgtattccagtcctttctgtcattcnnnnnnnnnnnnnnnnnnnnnnnnnnnnnnnnnnnnnnnnnnnnnnnnnnnnnnnnnnnnnnnnnnnatgtgataatatgatcgtattctataaatacatatacacacgatactcctttccagaagttcctggggctccgtgttgcagttcaggactccttgcttcttggaccctactatttatcctggactagcttgggttggtgatcatgtctcctcttgtcaggctacagagtggtggaagaggacacacacacatctcctccatgttcctgccacagggccccttccttaagtaatgacttatctccttccagttgccacctgttggagccaagaatgtattagttgtggtgacactgggttagctcagcatggatttcccttatccgatgatttttctacatttacttggccaatttggggaacagacctccactgtgattccatactctctctttgctttcactatcccagggatgggaggcggagggtagagatgaactcactgagcagccagagccaaatgcaatcggtacgaatcttagaaggaaggagggggagcccaggtatgagaaagaaaaaaccactaagaaaatacctccctgggaggatgagctggggccctttttcttttgctggatggttcctttatgcagcttggccctgtctaccgagatgcccatctcttcctgcctgctagcctgctagaccctcaaactgggtgggttctgtgtcaataaaaagcttcaccccctggctgagtgaggtggtcccctgcaatcactgtttgtcccctacccacccaacctgtccctgcctgctcccagcccactcatccttatgtgctagggataaatcaagagtcctcagcactccacattcccaaaaaatcccaggaactcctaaaccttcccctgtgacagaagatgaggttggcagctgatcagacctcaataattttatactgtaataagctctttgaatgtgtatattattattttttacaatcatttcattttgtatttaatatcaatggactgagtctgattcagaaaataattgtaatgttcatattcaatatcttacagtgatacagttttgtatttacatataaatataccgacatgatcaaaa

SEQ ID NO: 128376 - DNA, 711 bp, Homo Sapiens
ggtgggggagagaaaccttatttgtctccagacattctagaggagaagcactgtgaattcaaacaacttgctctggaccattttaagaagaccaagaagatgggtgggaaggatttcagctttcgttaccagcaggagctggaggaggaaatcaaggaattatatgagaacttctgcaagcacaatggtagcaagaacgtcttcagcaccttccgaacccctgcagtgctgttcacgggcattgtagctttgtacatagcctcaggcctcactggcttcataggtcttgaggttgtagcccagttgttcaactgtatggttggactactgttaatagcactcctcacctggggctacatcaggtattctggtcaatatcgtgagctgggcggagctattgattttggtgccgcatatgtgttggagcaggcttcttctcatatcggtaattccactcaggccactgtgagggatgcagttgttggaagaccatccatggataaaaaagctcaatagcatcttaacgtgaagatcaaacaagaacacaacaagcccctactgatttctgggtttctgccacggccacaggttcatatccagaggaatggcagatctgagacgatccaggaagagctaaaacatggccctgtaataaatgagcagacctctcctgtggtttcaaattattaaacacacttccatttcaaaaaa

SEQ ID NO: 128377 - DNA, 686 bp, Homo Sapiens
tttatcactcaatttatttattagaaagcaagattcattaaatcatttctcttttagaaaaatatctttaactgttatattttcaaatgttcttttttaaagaacatataaaattaagatatttgtgaaaataaacatttcagatatacttgtttctcttcatttttcccctttcaatggaattcttcttatcaagcacaaatgtgctaatctttaaagcaagacaaactcttccgtgctaaatctttttaattgtttcttttcatcctctgaaaaaaggtcttcttcattggttgtagtagatgtaaaatcatagtctctggaatgaccatttacaaaagtaaataagggatatttctccttagaagaaaatttcagcatcttggtgatttcttcagaagctcgtttgaagtcctgaacatttcgacagtaaaatcctattgtacagctgggatccatttttcgaaaagacatctttttgggagaagggcagtggaatgtctcaagagggaaatcctttatgctgacatctacaaaagattggcagtaatgaggatccatgtaaatcaaactgtcatcttgaaatccagcaaagtaatatgactgtttaggtttgccaccccataatacccacacaatattccaggcttaaaatacccttcacaaattctaagtagtcggtgttg

SEQ ID NO: 128378 - DNA, 466 bp, Homo Sapiens
ctatttatgttgcacaagattgtacagtttacaattctgatgtaattgataaacagagtgcttccatgacttctgataatgcagatgacaaagctgttattattctagttcctgttagacttggtggagaaagaaccaacaccgactacttagaatttgtgaagggtattttaagcctggaatattgtgtgggtattattggtggcaaacctaaacagtcatattactttgctggatttcaagatgacagtttgatttacatggatcctcattactgccaatcttttgtagatgtcagcataaaggatttccctcttgaggtcattttgtgatccagtattttaattcagaaaaatttgagaatacataaatgaaacatgtaattattacatggttttgattgttttcccagttggtgcttttacagactaaagtaattttacagaataaaataacttaaatcaaa

SEQ ID NO: 128379 - DNA, 880 bp, Homo Sapiens
  misc_feature (761)..(795): n is a, c, g, or t
  misc_feature (799)..(840): n is a, c, g, or t
gtatttgagcaatgctatacttcttgtagttcatggcagtctatgtaagagtcctagtcttgtcagaaaacaggtattttaccgagatggggcctgagcctccggtctgggagcttcgggaggcgcgtggcgggatggaaaacattcctgagaccgttggattggatttccgaatttgggaggctaggactccggctacggtggctctgctcttgggatgagaggactgggcccagcttgcgaggaatcatgaagtggacacagggtgggaacgtgaattttaatgagggggcagaccgaggaggtggtggctgcccggagatcagggccaggctgtgctagatggcgcctggaaggggggtcacccaagtctccctgctgtcatttcaggaggccgacccaagtctccctgctgtcatttcaggaggccgaattttttcccaatcccagagaaggtgtcagaggcctggttagcagtcttgtcgatggtttcctgggtggtcttggccagctggtccatggctttctgccccgcctctgtggcctggtccaccacttgctgagctgccgctccggccgctgacacggcttcctgggcggtcccctccacctgttgcttcaggtcctgcaagcccttgcttgccatggcttcggggtatctgtggagtcgtcaagagcagctggagcgacgttggatcctgcccagagtccccggccgtaatggccgaattcccgggcatatgtccggtaccgtcgactgnnnnnnnnnnnnnnnnnnnnnnnnnnnnnnnnnnncggnnnnnnnnnnnnnnnnnnnnnnnnnnnnnnnnnnnnnnnnnnacgacgagctaagcgccctatagtgatctattccaagggg

SEQ ID NO: 128380 - DNA, 430 bp, Homo Sapiens
gggaacgtgaattttaatgagggggcagaccgaggaggtggtggctgcccggagatcagggccagtctgtgctagatggcgcctggaaggggggtcacccaagtctccctgctgtcatttcaggagtccgacccaagtctccctgctgtcatttcaggaggccgaattttttcccgatcccagagaaggtgtcagaggcctggttagcagtcttgtcgatggtttcctgggtggtcttggccagctggtccatggcggcttcctgggcggtcccctccacctgttgcttcaggtcctgcaagcccttgcttgccatggcttcggggtatctgtggagtcgtcaagagcagctggagcgacgttggatcctgcccagagtccccggccgtaatggccgaattcccgggcatatgtccggtaccgtcgactg

SEQ ID NO: 128381 - DNA, 1916 bp, Homo Sapiens
tttgaccttatttacactttattgacagacacaacacgtatgtatgtgcgtcgcagcacaggccctgtgggcaagaccggacgctcatgatcccagggataaaaaatctgtccgcgagcgggcagggggcccgggcagggggagtgcgcttcccagggcaccattcgcttaaagtgtgttaatgacttgtccagcaagtttctttaccttcccacacccctcttctcaacgtccccccagagtcctcaggggggccttcgacctgcaaaagcctcacaggagtgcgaggggccccagctcccagggcggccgatggagcctcacacggtcaccttctccatcacgctttcagccacgtggacttcgtctgcctggacggtgacagctgctgactggccgcatatgtgctggtgatccttccagtccttgcgttggcagaaggtggagcagtagttgaccttgtggcagccggtgcactcgctcatagcctcccggccgcagttaacgcaggactgctccttccgctctgcgtcagcgtggatcttggcctggtttgtggcagcttctcggtaggtgctggcatgcttggcttgctcaaacagcgtcttcagctgctgcgctgtgttgagcaaggagttgaccatctcttctaggtacagccagctccgcggctctgacagctccagcccattgaccaacgcgggaggtgccgctttggtgggagtcgggggtgggaccgccagcgcaggcagggatgtcaacactattttgggatgtgacgttggcaacgcagcttctggaaacggtgcgatctggcagctgtcctgatagccggggtagtgaggctcagggtggctggccctgcatgggggctgcacgctggcctcttggactgtggcccctgcgaagacgtcgccctgggccggactctctgatatgacagcagtggcctctaccgtggacgctcggtcaaaggtcagtgcccccgaggtcgtgatctgtcccgagggggtcacggtgaaggtggtagccgcggtggctggaagcaatgtgatgttcttgggggagtccttcttcacgggagttgtgggcagttcattctccttcttgcgccttttgtaaggcacaaaaagcctgactgggccacttaaggtcatgtcgtcgcagcaggcagcacaggtgcaagaggcagcgtgagggtttaagatcccatcctggatgaggcactgcaagggtcggcccgcgtagcgaatgcttcttttccagtccttactgctggctcttcctgccatggcctcaaactcggtgggactgtaccagttctccccctgcttgatgcaccgtccccggccgcctgagccgagcctgttcttgtacagagtgccgctgatgttccggcaccgtacgggcagctcactgtcgtacacagaagggtcccagttgtatttagttccacctttttcttggccgggagccagaggggttggaggagactgaggacctggggtgaggggagctgccgggcctttcagcccggtggtctccacgatgctcccatctgtgtggacgacaatcagtgtcgctttttcggtgttcaggctgtccccgatctgaagggccgtcctaccagacagaacatgtcctgagatggatgccgcgttcgccacagacgtggtgaagacattgtctgcagcagcccccacgttggccactgtcactgtggtcacctctgcgaaggctgcggcagcggcggcctcgtcggggccgggcagggcctcggcgcccatgtccatgtgcccgggctccgccgccatcaccgccactgccgtgacccgcggcgtctcccgctccgcctccgagtctgcgtcctcctccgagtcctcgtccctgctcagcaccggctcctccgcctcgcc

SEQ ID NO: 128382 - DNA, 1015 bp, Homo Sapiens
tctaacggtctgctagtttttgagaggttttctcccaaactttgcgtaaaagaattaaggcccatgttccgcgtaccggggagggccaaaggggagggaaataatcccctaggaaaaggggggggtattcaccaccgggccggaaggggcccccaaaatggtttcccctttcgtgaaaacaaaagcacccttattttccaaaaaccaaaacccgcctttaacaccaataagctgtcatttttctttaggaaaaggcttcatttgtaaatgactttcccacagctcccttttgcagaaaggtggggcaggggccttgtgagccaaggtgggtcttgcgcagctgggcacaggcaccagggtggcctggggttactcgggcacagggtcgtgtcttcccatttgttccaaggttacctccttccgctctgcgtcagcgttggatcttggcctggtttgtggcagcttctcggtaggtgctggcatgcttggcttgctcaaacagcgtcttcagctgctgcgctgtgttgagcaaggagttgaccatctcttctagggtacagccagctccgcggctctgacagctccagccctttgaccaacgcgggaggtgccgctttggtgggagtcgggggtgggaccgccagcgcaggcagggatgtcaacactattttgggatgtgacgttggcaacgcagcttctggaaacggtgcgatctggcagctgtcctgatagccggggtagtgaggctcagggtggctggccctgcatgggggctgcacgctggcctcttggactgtggcccctgcgaagacgtcgccctgggccggactctctgatatgacagcagtggcctctaccgtggacgctcggtcaaaggtcagtgcccccgaggtcgtgatctgtcccgagggggtcacggtgaaggtggtagccgcggtggctggaagcaatgtgatgttcttgggggagtccttcttcacgggagttgtgggcagttcattctcccctcgtccga

SEQ ID NO: 128383 - DNA, 1807 bp, Homo Sapiens
ttttttagccgttgtacttttattcacatcgtgtattttggcattttccagagaaggacaaggaagagacagggtgggggaaagactgaggcaggagggcaagtcggggggtccctatttccctcacatccctccttgaccaaccacacaggggcaaacaaagggggaggggaggcacaggtgatcgctccactgggagaggatgcacaaagctacacccacgcgcacaaacgagacccctccctccacaccagggggctgggcggggcgacacagagaagcagagcactgtggattccgggggcaggggaagcaacaaagtctccttacagacaggtggccggcccctcccgtccccgtcctgctccatccccagagtctatcgctgcccctctgctctgcccagccattctcccacggcctccagcttcttccctgctgccggggacaaaaggaaaaagggtacagagcagaggggctgaagtccatccctcagcccctctccctcatgccaggtggtcttcccctgccctcattggtaaggggtgaggcaggctcttagctggccactctctggtagaagtagatgtagcccaggtccttgggcggcttctcggaggcaacactttctggtcattgtagatcacccatctgccttctttcttgatgtggcagacgtagtgaccacacatggtagaggtgcccatgtgactaatgaaggcaaagagctgatactttccaggacccatcccgggacttttaggtcccactggcacagactcagagatggagtcggcagctgagcggccctctgagatgtccatggcagcttcagcatccaggtcgtcaatgtgactgaagatccagtccacagcccgttctaaactattgttcgtggcccgcagcgctttcaaggcctggtcccgggagaagcccatggagacaatggtggtcacacagtcctcaggaggggggtcggctgctgcgcttgtggagcccggcccactagagccaggcaggatgagggggtttgcaaaatctggatcatccatgtgtgacatgacccagttcatggcggcctcagccccgctgttgcccgtgtagtagacagctttgcggcaggcgtccatagggaatcccatctccaccagctggatgatgactgattcatccagcatgggcgctttgggctcatccggagtgaccaggggtggggcaatgtctggcagctcctcctctccgggctgcagccctgtgcccctcaactgggagatgtcgagctcctctggcatctcgatggacacatccagtttcttgggcacccagtctaagccgaaggtgaacttcttgatctggatgaccaggtagtcagggaatgaggcaaatcgtgtggtcttgacagctactgacttggcctgcagggccgtgctccagaagtcatcgacctgctcaggggccccgtaggcctccaggcaagagctgaagggcacctgggcccgaaccagttctggcagtgccatcttctcctcttcggcttgccgcttcttctcctcgtactccagaagctcctctttgttaagggctgcatccatgggcacaggcagctgcatgatgtagtcaactcgctgggtgtacttcaccttctctgtggccaggcacttgatcttttcctccaccaagaagcggaacacttcattaggattttcagagctccggcaattcctctccaccatgttgataaggtgaaggaagaactcctgggcatcctgccctcgtgccgaattcgccacccaggcctcgctacctt

SEQ ID NO: 128384 - DNA, 855 bp, Homo Sapiens
  misc_feature (213)..(228): n is a, c, g, or t
tttaggcaaatatcacagcggaatttattgttttaagaaagactacaaaaaggtagaaaacagctcggcacactagactaccacacgtgtggacactttcaccaccgggagagggagccccgtgggcacggggactgggcagggccgccccaaaagctatagcacgcggagcacacaaaatagtgatttttatacaataggtcagatttccannnnnnnnnnnnnnnncttgccataaacatctatctcacaggctgaaaacactgagaaaactggaacagataaggccatgatggttggaaaaaaacccaacaagttaccaactccgctcgggcggcgctcacgaatcgcacaatagtcatggggtgggggtcgcacggcacggaggagaagcgtggtctccgggaagataggggcacagaaaaggttccattacaaaccaccggcggagggcgggggcgcgggggctggggtctgtgggcactccccggctccgcggctcgctgctctttggaagctggaggccgtgccccctgccgccctcctcacagccgggccgggcagtgcccccttcttgagcttgggggcaagggagggcccaccgctggaaaaaatgcgacacccacggctttaattgcacttaataccaagaaggggaaccactggggttgctgggggtagggtgtcccggggctgctgctgacagtggggagtccccaggtgacgcccacctgcgccggcccggggctcagggctgggcccaggacaggctgtgcaaagccagcgagctgaataagttaacagtttcgcacgggagggggcctgcctgcctgccccctggggtggtgggaggac

SEQ ID NO: 128385 - DNA, 985 bp, Homo Sapiens
  misc_feature (799)..(799): n is a, c, g, or t
ttttaaataaattttttattacaatgacaggaagactctggatacaaacacatttgctaatataatcactccactggttacctaggcctagacgtacaaaaggacacccatatctcatcaggagaaagacaattttgagtttctgggtgtagtaccaagtggttatgatcaccacgtacgtggtctatccagttaactgtgtggcaatttgctatttcaagtcctctcataacagaaattactgaaatatgtggaacaccagtcaatataaagaattcatttttaaacagactagtgaatttgtgtcataaacacacttgcgtatggatattaggagagcattgcttgaatatctctaaaactatttttaggaattaaaagctttcatagttaatggtatgatattggccttcagaattcatattgataaaagcaaaccttagtcatttaacaggaatgtttaaattttagagattctaacatgcgatgccgaaaaatcctaacatttccacttagtaatgtcagggttgtgccagttctaatttcccatagctagtaacatcagaaaatatttatcagagattcaatattggtttcattagacctgatacatgctaagtatggcaactattaaaacttattgttattcttgtttctaaaagggaataataggatgtagctattagaatactgaagcttatttttcataaacatatcataacctgagcgtccagatagatgtagcaattaaaatgcctcatttgagaggacatacactatttgatattgcattcttcanatgcttttggagtcttatatgtcctgacactggatacacagcagatatatatcatcgctacttgcacttctttatttgaactgttgagtggcttgatgttcttcgtgcgatctgcccgaggcactcccaatgatcgataatcgacagcaactgtccggtaatgtacgccaatcaacaaagacggga

SEQ ID NO: 128386 - DNA, 980 bp, Homo Sapiens
  misc_feature (730)..(730): n is a, c, g, or t
  misc_feature (766)..(766): n is a, c, g, or t
  misc_feature (783)..(783): n is a, c, g, or t
  misc_feature (798)..(798): n is a, c, g, or t
  misc_feature (844)..(844): n is a, c, g, or t
  misc_feature (846)..(846): n is a, c, g, or t
  misc_feature (848)..(848): n is a, c, g, or t
  misc_feature (921)..(921): n is a, c, g, or t
  misc_feature (929)..(929): n is a, c, g, or t
  misc_feature (955)..(955): n is a, c, g, or t
gagatttgaatggtttaataactctgtcttcgtgagctggatggcaagctctcacactttacccgcaggctgtgctgtgcacctcccacacagtggtctgagcagaggcggcgtgggaccagaccctctcccacagccagcctggccaaggtggcacagaccagagctctgtgcagacaagcacccaggggtctaggaatgctcccccttctctccaggggccagaggggagaaccaagctgctcagccttccttgctctggccagcaggaggcccttctcctggagcagccctcgtttctgcctgtcatgcccgagggacacaaggccatccactgtgctcctgctacatgggcactgctgggatgtgctcccactctgagtgtcccccacccagggcctctcccttcactgcacaggacagcaagggcagcttgtgctgggaagcacccgaagaccctcggccaatgccaccacagcccttggctaagaccgtctgccaagcccctccgcagtctctgaaatctgaggactggctggtggctccttcccccgtgacagtgaacttggctgcaggccgacaccctcccaagcgcccaagcgcggcccctgcccacttgtacagtgagaccctggcccagtgtggtgggccctccgtgagccggctgtgcctggctgcccccaccccccagacaccagtagggggcagttagagccctgtcaggtccacnaatggcttgatgaagatggcatcgtcccgcacgtangaattctttgctccatnctggagacggggcanaagagggggcagcgcttgcgatgttatgtcgttgactggctctgananangatgaatcacgtcgggctgaggcgtcatcacgtgtccggttatctggtcagcagcataggtcactctggtganggcacgcncagggtcatccggcctcacacacaanagagacagttgtctcgccgtgcgtc

SEQ ID NO: 128387 - DNA, 815 bp, Homo Sapiens
tttttgatattgggtatattttttattgtctccctttgtaccttatctttattcccaatgcctagcttaggtatacagtaggttccaaataaatatatggttgaatatgccaatcagggaatttaggaggattgagccctgtctaggatcagagataaaggtaggtctttcatgggaaagggtccttgagagggaataagtatcaaagacatgctaactgtattccttctcttccttccaggcagtagaacgagtcctgtacccacacctgtccacctactggacaaacttgcaggctgtgctggatgattattcagtatctaatgcccaggtcaaagcagatggacacaaagtctatggagccattctggtgagtaccgtccccttccagcctcccttccctgcatgagcttagcagccaagcaggcttactttggaatatttgatgggcccaggttcctcgaattttttgcctatcttagtccttggctcttacaggtggcggtagagcgactgctgaagatgaaggcccaggcagcagagcccaacaggggtggcccaggtggcagggggtgccggcgcctggacgacctgccatgggacagccttctctttcaagagtcgtcctccgggggcggtgcagaacccagctttgggtccggcctcccgctgccgccagggggcgcggggccggaggacccttctctttcggtgaccctggccgacatctaccgggagctctacgccttcttcggtgacagcttggccacacgctttggcaccggccagcctgcacccacgcgtccgcggttcgc

SEQ ID NO: 128388 - DNA, 1108 bp, Homo Sapiens
  misc_feature (182)..(182): n is a, c, g, or t
gggggcaggacactgggggacatacgcgttcaccactccagcttgcccaaggagattgttctgatttcacagtttcagtcaccacccctgttgcccaagcaagaaggtcacctagacagcgagagccaaccaatatcccactgacaaagcaaggaggttccagggatgttcagggcccagancctgtctgcagtcaacccatccagcctttgtcttggcatggaagcagcctggatccccagggcccaggcgacaccctaccacccttgccatgtcacctcccagaccttcagattccaggtacctcacctttgcctgcacatggaagccacctggaccatcggatcccagccaaggccccactgtctttgtcccaggagctcccagacactcaggttccagctaccacacctttgcccctgccacaagtcctctgggtgacagtgtgttcaccatggttttctctttttctgggctcttccatgctgccctctgtgctgtgtggggcaccttgtcctgctcctccggcggtgcctggttggcctcctttcctctgtctccggtggtgtgggccttgggctgggtttgtgtgttgagggcattgttctctggcactggctctgcatagatggttgtcctccttgcccttgtgggtgcctgggacttaggctttgccagggactgtagagacctttctttaatgttctctgtgcgttgatgcacataagccaggtggacctgaaagagccaaggggcaggaacaatggctgtttcagcagctactcaatagcgaagggtcagcgtcccactcccatgccttggcaccgcatcagatgtcctggagcccttgataccatcctggaaggctttgtttgaggctccttaataaaagagggcaaggcgaagagaaagaagaccaggacagccagaagcaaggaccactggacgccttggctcaggtgcctgcatctccacaggcaggacctcatggtggtgggtcgggttctagaggaaggttctgcatgtcctggggccttgatgtaggcagctgggagtctcaccgctcaggtttcctggccaggaagtgcaccccctttgtcttaacaat

SEQ ID NO: 128389 - DNA, 622 bp, Homo Sapiens
tgggagctgggctcctgacatcactgtgtcctccccgcagagccggtgaaggacccttatgtcatgttcccacagaacgctaagcctggattcaagcacgctggcagcgaaggggaactctaccctccagaatctcagccaccagtttcaggctctgcaccccctgaggaacctggaggatgctggacccccaccactggacccctctgggacctcaatcactgaagaaatcctggaactgctgaatcagcgaggccttcgagatccagggccgtccacccatgacattcccaagttccccggagactcccaggtgcctggcgacagcgaaaccctcacattccaagccctgcccagccgggactcttcagaagaggaggaggaggaagaggaagggctggagatggatgaacgggggccttccccactccacgtcctggaagggctcgaaagttcccttgcagctgaaatgcccagcattgcctgccttaccaaaattcctgacgtgcccaaccttcctgaaattcccagccgctgtgaaattcccgaaggttctcgccttcctagtctctctgacatttccgatgtttttgagatgccctgccttccagccatactagtg

SEQ ID NO: 128390 - DNA, 1317 bp, Homo Sapiens
  misc_feature (384)..(384): n is a, c, g, or t
  misc_feature (436)..(436): n is a, c, g, or t
acaggaccaaaaactcacaccttcgttggagcagaagagcctcatagatgcccatgttccagctgccacacctttacctgagagaggaggctctctagacattcagggcctctcacccaccccaggtcagaccaccatggttttgtccaaaccaggaggctccttagcctctcacgttgccaggttggagtcttcagacttgacgccaccttatagacccccaccttccagccgtgagcttctggagcccaatgcagctgccctctccagatacctggcagcctcatatatcagccaaagcctggctcggtggcaggggcctgggggagggtcccccgcagccttccggggctcctggtcctctgctcccacgtcacgggcatnttcgccgcccccccagccccagccaccacctcccgcagccaggcggctcagntatgccacgacggttaacatccacgtgggcgggggtgggcggttgcggccagccaaggcccaggtccggttgaaccaccctgctttcttggcctccacacaggaatctatgggccttcacagggcccagggggctcctgatgcccccttccacatgtgagccaggacatgaggcttccctgaagcaaggatttcagccagatgccatagaccctcagaacttgacctggaagtccagacactgaacgcaggcctcaaaactgctgcggccttccaactcctggtatctgcatcggcgaatggcccttcttgccttgatccacagggatggggaagggaatgtcattaatgttttgttaatactgattctttcatgcaatgatgtgtattttcccattctggaggctgtgggagatgacaagacaatgaatgggaaggtctgacacagaacaaatcagcggttctgaaagcttggggaatctcagactcctttgagaattattggaaaatggacccactataacttggcgtgtgtgtgaactgcttgatgcccatccaggaaagccaagttaagaagctttgcttcaagtagacactagaaatccattcccttggcaatttatacagttcacgtctcccaccatccgttcatctcacccaccctgccatctctccacctatccatctggctattgctccatctagctttcccgctccatctacccatcttccaatccatcatctcacgtatctgccttgcttatccaactgtctgccttattcacccacccatccctttatcattctaaccccatctggcattccatccctccatttatccatcttcccacttacccgtcttctccaaccgcatcacccgtt

SEQ ID NO: 128391 - DNA, 396 bp, Homo Sapiens
aacgtgcgagcagataccaggagttggaaggccgcagcagttttgaggcctgcgttcagtgtctggacttccaggtcaagttctgagggtctatggcatctggctgaaatccttgcttcagggaagcctcatgtcctggctcacatgtggaagggggcatcaggagccccctgggccctgtgaaggcccatagattcctggcaacgtgagaggctaaggagcctcctggtttggacaaaaccatggtggtctgaactggggtgggtgagaggccctgaatgtctagagagcctcctctctcaggtaaaggtgtggcagctggaacatgggcatctatgaggctcttctgctccaacgaaggtgtgagtttttgacctgtgtatctgctcggcggcc

SEQ ID NO: 128392 - DNA, 665 bp, Homo Sapiens
  misc_feature (70)..(70): n is a, c, g, or t
tcggcacgaggtggatatatccagtcataagccacccaagaggaccagatctgggtgttgtgcctgactntcgagggcctcctggactcagactgtgcatgttgggaaggggtctgaccaggcaagctgtgatctgaaaggagcaaggaacagcaaggaattattttccagaatgacacccgcagcagaatgttggagtggaaatgatggctggctatgaagaggaggtcaacgtgtgtggtctcctcagtctctgtcagaggggtggggaggtgggaaacaggaatcctctgcaaagcccaatttgcagagtcgagacccctggtgctctctgccccgctgcctggcactggtcctttgcagccagccaccaacggcccccttgcccttgcagaggcagaagcctgcgtctgcacctgcacctctgaccgtttcagcaccctgggttgttaccacgtcctacaactctgacatttcttgttctcaagcgtttctcttcactgtgagttgtctttggtcctcccacttggtacttgtatcttgatgctttataatcctgactctcgacgtgttcatttatacaaaatcaggaataactttgtttttatactgattgcagcaatgttggctacatgtattattaaagaggatttttggaacaactt

SEQ ID NO: 128393 - DNA, 1006 bp, Homo Sapiens
  misc_feature (596)..(596): n is a, c, g, or t
  misc_feature (634)..(837): n is a, c, g, or t
  misc_feature (839)..(839): n is a, c, g, or t
  misc_feature (847)..(847): n is a, c, g, or t
  misc_feature (956)..(956): n is a, c, g, or t
ttttttggcatattattattagtttattatttataccgtgctctgttccaaaaaggatgtaaggaggcagcatggcttgagtaccaccttacttgatgagttaaggagttcacatccatctagagacacttgtctgagagactgtattagaagactacgggatggtttaggggagggaagagtgctaagaaaagcagtggcatcttgtccaacctcatcttctctctcctcatttgcaaatcatatctcaggagtaagccaaaaactggtgggagggttgcagcaggaaaaaattagcagtaaagcaggagagggttaattcttagaaaggtacacaatcccaccatccttcccacctctggtgcctactgcaagtaaagagtctggtcttctcccgacaggctctggctgggcctgtggtctcatgtggagaatagccagcgtggtcagtctgtaggcaggggcccactgctagctgcaggctccaggctctgcccctccatcacccctttcctcctcttcatccgactgtgccaagggcgtatctgctccatcatcacttggatttgggctatgcaggttggtggagggtccgnggaaggaggaggaaggaggctcgtgccgaatcttgggnnnnnnnnnnnnnnnnnnnnnnnnnnnnnnnnnnnnnnnnnnnnnnnnnnnnnnnnnnnnnnnnnnnnnnnnnnnnnnnnnnnnnnnnnnnnnnnnnnnnnnnnnnnnnnnnnnnnnnnnnnnnnnnnnnnnnnnnnnnnnnnnnnnnnnnnnnnnnnnnnnnnnnnnnnnnnnnnnnnnnnnnnnnnnnnnnnnnnnnnnnnnanctgcattnatgatcggcacgcgcgggaaggcggtttggtattggcgtctccgctcctcgctatgatcgctcgccgtcgttcgtgcggacggacaccatcaaggggtatacgttcaanatcaggatagcagagaattggaaagcacaagcagacgtaaagcctgtggt

SEQ ID NO: 128394 - DNA, 925 bp, Homo Sapiens
  misc_feature (108)..(117): n is a, c, g, or t
  misc_feature (436)..(464): n is a, c, g, or t
tgggggccattgttcgtttcgcgccccctgcattttttgcttctcctcgcgccccttgggcgcagaggccattttcttcagggaggtgagccccaaacaacggtggtnnnnnnnnnnttgccgccgggaaacaaacttagcagtaagagcaggagaggggttattttttagaaagggtaccaccattccccccatcctttcccgcctctggtgcctactgcaagtaaagagtctggtcttctcccgacaggcctctggctgggcctgtggtctcatgtggagaatagccagcgtggtcagtctgtaggcaggggcccactgctagctgcaggctccaggctctgcccctccatcacccctttcctcctcttcatccgactgtgccaagggcgtatctgctccatcatcacttggatttgggctatgcaggttggtnnnnnnnnnnnnnnnnnnnnnnnnnnnnntcctagatgtggtcctgtctgatgtaggcaccggcaggctcagctcctccaaatggttgtccaccccagacgactggggggttggtggaggatcttcgcaaggcaagaacacatctgctgcatccgggtccccaaggtcaataagttctacttgctccagtgtgtccacattcacttccatggatgagatactacctatggggggtctctgcgactcgagatgcagatgggacagaggaaagacaaactctgtctctggctgtaaaatgtcctcgaagaatttttgccgctcccgaaggcggagctgctggcgctccagggcggcccgaggatttgggtccatgtcagctcctgcagcgctggcgccccctctgactcagtccgtccgctccagcgaggccgcggcgggggcgtgggagcgagccgcgccggccggggtggggctgcgcctccagggctcc

SEQ ID NO: 128395 - DNA, 1009 bp, Homo Sapiens
  misc_feature (137)..(137): n is a, c, g, or t
  misc_feature (241)..(241): n is a, c, g, or t
  misc_feature (488)..(514): n is a, c, g, or t
ggaaacgttttaccggggatggttttttaggggaaggggaaagaagtggtttaaggaaaaaagccagttggctttccttgtgcccaaccctcaattctggtccttatcctcgagtgggcacatccatatgttccagnagtaagccccaaaaactggttgggaaggcttgcagccatggaataaattacgcagtaaagccagcagaggggttaaattttagaaagggtaccacaattcccanccatctgttccctctttctggtgcgtactgcaagtaaagagtctggtctcatcccgacagcctatggttggacctgtggtctcatgtggagaatagccagcgtggtcagtctgtaggcaggggctcactgctagctgcaggctccaggctttgcccctccatcacgcctttcctcctcttcatccgactgtgccaagggcgtatctgctccatcatcacttggatttgggctatgcaggttggtgcnnnnnnnnnnnnnnnnnnnnnnnnnnntcctagatgtggtcctgtctgatgtaggcaccggcaggctcagctcctccaaatggttgtccaccccagacgactggggggttggtggaggatcttcgcaaggcaagaacacatgtgctgcatccgggtccccaaggtcaataagttgtacttgctccagtgtgtccacattcacttccatggatgagatactacctatggggggtctctgcgactcgagatgcagatgggacagaggaaagacaaactctgtctctggctgtaaaatgtcctcgaagaatttttgccgctcccgaaggcggagctgctggcgctccagggcggcccgaggatttgggtccatgtcagctcctgcgggtagaggagcaaaacaagtacagctgcaaagtcgaaagagaagacagaggggacctgggcttggggcgccccactgcagccagcatcccaacagtggggcccctggctccggcctggacacctctgcccttggtgacc

SEQ ID NO: 128396 - DNA, 946 bp, Homo Sapiens
ttttgcttattgtgtacttagctatagataatttttgaatacaaagcctacggtacatataaatgcaatagttaactgatcctgtttgctgatgtcctttttatgttccacaggtgacatcttttaatccagcatcttctcctgtttcttgccttcctttttcttcttcttagattctgcttgaggtttgggcttggtcagtttgccacagggcttggagatggtgacagtcttctggcattcggcattgtgcagggctcgcttcagacttccagttctggtcttcagggctgtgttcaggtcacattctccccaggcctggaactggtatttgcactccgcgccaaattgcttcttccagttgcaggggatcttacatctctgggtcttcatggtttgcttgcactcagctccagtccgagtgccctcccgtgtgcccagcccacagtctccactggtgggcacacacacactccactgccattctccacagtcagacttcttcacttttttttctggtttctctttcttccctgcttcagcagtatccacagctgccagtatgaaaatgaatgccaagaaggcagctgcaaattttcgacgctgctgctggtactgttgagcctgcatttttgagttggaaacgtcctctctggcgctcagtctgcctttgttgcaaggggcgaggttgctaccgctgagtccaggtacccggctcgcttgcagctcctgcttgggccgctgctgctctccccggcttctggacggatgactcactggtctctttcttcccctctctccactttggattttcctctgctctggggctctcttggcgggatttttggactggaaggcggggaacctgatcctgcctttgactcaattacgccctgcccggccgtaatggccgaattcccgggcatatgtccggtaccgtcgactg

SEQ ID NO: 128397 - DNA, 863 bp, Homo Sapiens
  misc_feature (101)..(111): n is a, c, g, or t
  misc_feature (684)..(684): n is a, c, g, or t
  misc_feature (689)..(689): n is a, c, g, or t
tgcaacaggaatgctggtatttagttttagtgacactactctgatagcaaatgttcattgattctatcatgtatagggcaatgaccaaggcaatgtctggnnnnnnnnnnnccaaaacactttaatttttaagacaactgcaagcacctcaaacaatggattattgttacaacacttgttagcttttcacaatctagttattgcaaaggcatatggataaatgttaatggacaaagtcaaaaacgaggcaccttaatgaatgtaaaatttaaaataaaaagacattcaatccactgacttctaaaagaggctaaatatacctctatatattacattctaaaattgtattgcctactatggtttgtatcctggagtctacaattaattttaaggaaatgcataaacaaaactgtgtgcaacctgcaaagggaaaatcattttctcaacttcgtttcatggaaagacaatgaaaaagctagtaaaatttgttgtagccacacgtaaagctacctatggaatgaatgtgatcactgttatctttgagctgtgagaagtattctgcccactgcactgcaaattgtatataccataccttgtgttctagacaagcatgatcatgcttttccaaaaatatatgtattttttcattccacacaattaacacgtttctccaatttaatctangtcgngcttaacttacagcgcccagaggaggcaacatgacatggtactgagccatcacatttttaaagggaaattgctcttctttaaaagtacttttaaaaatatgcaaaatcacaaatgggactgctaaattataatgcatattttagaatgagaaacatatcttttcttcctttaaa

SEQ ID NO: 128398 - DNA, 578 bp, Homo Sapiens
  misc_feature (317)..(336): n is a, c, g, or t
  misc_feature (435)..(482): n is a, c, g, or t
gacataaatttatttttatttcacaatccacaaaacatttcaaattaaagaaatacattaaaagtctccagtttttgctttaatttcacatttcatacactcacaatatttaggaaatagtcattttgactgtcttataactgggataagggtgcagcaacaattctgccagatggttaaatgccccagaggatttctgctcttctcttcctaatttgggagctataaagcagtttttactcccaacacaaattcttgataaaaaccatactctttgctgatttttcatgttagacattaaggatgacatgcaagtnnnnnnnnnnnnnnnnnnnngtagccctgataccaagttaatattcccttgaaaccttacttggctgctaaatttctttgttgaaaaccaacttataacaaattggttatccggttagnnnnnnnnnnnnnnnnnnnnnnnnnnnnnnnnnnnnnnnnnnnnnnnnctttttccttttggcatgtttaattagagaacattttctataagcattattaagaataattgtccttaaggaatgatggataatataagggaaatg

SEQ ID NO: 128399 - DNA, 648 bp, Homo Sapiens
  misc_feature (547)..(555): n is a, c, g, or t
ttattttcaaataattagaaaaacagttttcaactcctcctttccattcattgctctcagagttgtggtcactgacttttcttttgaaaaccgcctccaccaacacccccgtttgcctacaccaccccccttttacttagtatgtttattttttgtgtgtctcttgccttcctcccacgttttatttcccctcagagctgtgaatgggcaggtctgtctctggtttggcatcactgagtttttcccatgcattggccccagggctgctaggatgtgagacaaatctccctacaatgggcttgctcccattgtctgtacagtttaatagatgctggcatgtcggaggttacccatgagtcaaaatccgctctccatgcttactcttgacaccccattgaagccactcattgtgtgtgcgtctgggtgtgaagtccagctccgtgtggtcctgtgcttgtactgccctgctttgcagttcctttgcacttactcatcgagtgctgttttgaaatgctgacattatataaacgtaaaagaaaatgtaacnnnnnnnnncccacacacaaacaaacccatacgatctgtatttgtatatacacgtgtccgtacaagtataactaaataaaaattaaagattttcatcatttt

SEQ ID NO: 128400 - DNA, 875 bp, Homo Sapiens
agaaataaatcattttaatgtctattttttcacttctattaattgattattgatttctacacaagtgtatgcatctagtttgacttgcttcatatttattttccaacatggtgcaatcttcagcatgaggtgcacgaagtaccttgtcctcaaagagctttatcaactcgaacattttcgaagagctctataaggcagctcagcatggcagttttttactgaaatctcttatctggaagatggcagaagagacccggaccttcccgagcccactggttgcttgtattcatatcacagctcgcttgagtaagtggtaacgacagaataataagcagattgctcctccaaacccagctgggtgagatagcttcatttttggaaaatcaactgaatcatgaaaaccttcctaatggtataatttgttccagagttcttttgatacttaagaagggaaatattaatccttgtgcacagtcttttattacaagcactcttatttatggtattacagagttttcttctccagccgtcattctctggtgaggtgactggctgtaccccatgcagaatcgaaagcatgaagaaatctcctttcttaatcagagctgatgacagccctctcatttcctgccaaatggatcagaccacacttttaaccctggtggctgcacatcctcttggacaattccagcccgatttatagcttgttccttcttgtactcctccaatctcattaggggccggaagtagatgggatagaaggcggcgccgatcagggagatgaagccgccgaaaatgagcgcggtgcgcaggttccgggacatggcgtcaggccccgggctgccctgacccgccgaccgcccggcactctcccc

SEQ ID NO: 128401 - DNA, 1155 bp, Homo Sapiens
gtcccaggaaaggttttaattccagtccttggaatctgagaagcagacaccaagaactgccctgagaacacctggggggcctggcatcttgcctccagatccagccagggtggacagacccccagataatcacgtctgactcagagttcccgcacagtggaaactggctccctggccctgaggccggacagcctgcatccaacatcagcaagaggatgtggctttgacttcggctgtcttctctgtcaggggagccccaagagatggatcttcaggagtgggaggtggcaggcggctcagggatggagacagcagccttgcctggtcaggtcagctccacggccacagctgtgcaggcctcgaggagggcagaggaggagtccagaccagtgccagatggagtgggagggcccagcagcaccacaggagcctggctgggcagaccctgaggggcctgtgggtccgcctgtctgcaggaggaagacgagaatcctgggtgcagtgccagctgctctgagggtccccctggctgtgaacagcagggtcaaggtccatccgattttctcttctgaggggacacagctgccctagcctttttgatggctgtccagtcctccaggatgtcgatctcttgaagcatgtacacgatgtatgggccagaaaccagaggtgccttcttcctcttgctgggcggcagggagtcccaagacctggagctgcctctggcgtgcagtttgtcgtcccaccattcagagctgaggtccaggctctggcggtcctcctccagcctctggatccgctcctgcagctccccctgcagcgtgtcatagagcagcagcttctcactctccaggtgctgtttggctccctgcagctcacattcgtacttattcctgatcacatccagacagaagcccttgtagatccctgccacctgaatgcgaatcttgaggctccgcggcgtcgctcatagtcctcatcatccatctcggagctctcctcttctgactctgtctggctgccgctccgctcctcctcactctcttcctcctccccattcatctcagcagcagaatcaccctctgcttccatctcttctgtgtctttgcttggaggctggacaggcatctggactcgcggggactggagcctctc

SEQ ID NO: 128402 - DNA, 992 bp, Homo Sapiens
  misc_feature (65)..(65): n is a, c, g, or t
caatagctagtagcaggctggtgttaatcggccgaggcggtacaggcaacacgggcagctctcangggaatctccgtcgtgaggccagaggctccagtccccgcgagtccagatgcctgtccagcctccaagcaaagacacagaagagatggaagcagagggtgattctgctgctgagatgaatggggaggaggaagagagtgaggaggagcggagcggcagccagacagagtcagaagaggagagctccgagatggatgatgaggactatgagcgacgccgcagcgagtgtgtcagtgagatgctggacctggagaagcagttctcggagctaaaggagaagttgttcagggaacgactgagtcagctgcggttgcggctggaggaagtgggggctgagagagcccctgaatacacggagccccttggggggctgcagcggagcctcaagattcgcattcaggtggcagggatctacaagggcttctgtctggatgtgatcaggaataagtacgaatgtgagctgcagggagccaaacagcacctggagagtgagaagctgctgctctatgacacgctgcagggggagctgcaggagcggatccagaggctggaggaggaccgccagagcctggacctcagctctgaatggtgggacgacaaactgcacgccagaggcagctccaggtcttgggactccctggcgcccagcaagaggaagaaggcacctctggtttctggcccatacatcgtgtacatgcttccagagatcgacatccttggaggactggacagccctcacaaaggctaggggcaagctgtgtccccctccggaagaggaaaatcgggatgacaggcgggacccaccaggcccctctggggtcgtgcccagccagggcttcctgtgggggctgctggggcccctcccactccattttgggacctggccctggaactcctccttctgcccctccttcagggcctggccagct

SEQ ID NO: 128403 - DNA, 942 bp, Homo Sapiens
tgctcggagggtcccccctggccggtgaacagcagggttcagggtccatccgatttttttcttcgaaggggacccagctgcccttagcttttttgatggctgtccagtcctccagggatgtcgatctcttgaagccatgtacacgatgtatgggccagaaaccagagggtgccttcttcctcttgctgggcggcagggagtcccaagacctggagctgcctctggcgtgcagtttgtcgtcccaccattcagagctgaggtccaggctctggcggtcctcctccagcctctggatccgctcctgcagctccccctgcagcgtgtcatagagcagcagcttctcactctccaggtgctgtttggctccctgcagctcacattcgtacttattcctgatcacatccagacagaagcccttgtagatccctgccacctgaatgcgaatcttgaggctccgctgcagccccccaaggggctccgtgtattcaggggctctctcagcccccacttcctccagccgcaaccgcagctgactcagtcgttccctgaacaacttctcctttagctccgagaactgcttctctaggtccagcatctcactgacacactcgctgcggcgtcgctcatagtcctcatcatccatctcggagctctcctcttctgactctgtctggctgccgctccgctcctcctcactctcttcctcctccccattcatctcagcagcagaatcaccctctgcttccatctcttctgtgtctttgcttggaggctggacaggcatctggactcgcggggactggagcctctggcctcacgacggagattccctgagagctgcccgtggttgccggtaccggctgctgccgccggactcccgtaggcgctgcgcggctcccttttctcgtgccgaattcaacccccagcctcgctacctagcca

SEQ ID NO: 128404 - DNA, 977 bp, Homo Sapiens
  misc_feature (47)..(47): n is a, c, g, or t
  misc_feature (356)..(356): n is a, c, g, or t
gaggggacaccagctgccttaacctttttgagggctgtccagtcctnccaggaatgtcgatctctgaagccatgtacacgatgtatgggccagaaaccagaggtgctttcttcctcttgctgggcggcagggagtcccaagacctgaagctgcctctggcgtgcagtttgtcgtcccaccatttcagagctgaggtccaggctctggcggtcctcctccagccttctggatccgctcctgcagctccccctgcagcgtgtcatagagcagcagcttctcactctggaagagggggcaatagctcagcaggacggatggggtgaggccacttcaggctttgtgccctgcctcacccncccagtgtgccaatcaggcccacctccaggtgctgtttggctccctgcagctcacattcgtacttattcctgatcacatccagacagaagcccttgtagatccctgccacctgaatgcgaatcttgaggctccgctgcagccccccaaggggctccgtgtattcaggggctctctcagcccccacttcctccagccgcaaccgcagctgactcagtcgttccctgaacaacttctcctttagctccgagaactgcttctctaggtccagcatctcactgacacactcgctgcggcgtcgctcatagtcctcatcatccatctcggagctctcctcttctgactctgtctggctgccgctccgctcctcctcactctcttcctcctccccattcatctcagcagcagaatcaccctctgcttccatctcttctgtgtctttgcttggaggctggacaggcatctggactcgcggggactggagcctctggcctcacgacggagattccctgagagctgcccgtggttgccggtaccggctgctgccgccggactcccgtaggcgctgcgcggctccctttcctcgtgccgaattcaccacccaggcctcgctacctagcctt

SEQ ID NO: 128405 - DNA, 1033 bp, Homo Sapiens
ggcttttcaaccccggacccccgaatctcacgcccccctgaccgtccgcccaggggcaccacacacaaaacaggatggcttatcgctttttctctcagggaccccaggatgatttcagggatgaagtgcagcgctcagggatgaacacacctgcctgttcagtcactccacgccacactgttcagctcgagaggcagaggagatccagccagtccagatggagtgggaggcccacagcaccacaggagcctgctggcagaaccctgagggcctgtggtccgcctgtctgcaggaggaagacgagaatcctgggtccagtccagctgctctgagggtccccctggctgtgaacagcaggtcaaggtccatccgattttctcttctgaggggacacagctgccctagcctttttgatggctgtccagtcctccaggatgtcgatctcttgaagcatgtacacgatgtatgggccagaaaccagaggtgccttcttcctcttgctgggcggcagggagtcccaagacctggagctgcctctggcgtgcagtttgtcgtcccaccattcagagctgaggtccaggctctggcggtcctcctccagcctctggatccgctcctgcagctccccctgcagcgtgtcatagagcagcagcttctcactctccaggtgctgtttggctccctgcagctcacattcgtacttattcctgatcacatccagacagaagcccttgtagatccctgccacctgaatgcgaatcttgaggctccgctgcagccccccaaggggctccgtgtattcaggggctctctcagcccccacttcctccagccgcaaccgcagctgactcagtcgttccctgaacaacttctcctttagctccgagaactgcttctctaggtccagcatctcactgacacactccgctgcggcgtcgctcatagtcctcatcatccatctcggagctctcctcttcctcgtgccgaattcaccacccaggcctcgctacctagaccgtatagttttgctctt

SEQ ID NO: 128406 - DNA, 1122 bp, Homo Sapiens
  misc_feature (55)..(76): n is a, c, g, or t
  misc_feature (417)..(437): n is a, c, g, or t
  misc_feature (1067)..(1067): n is a, c, g, or t
agctaaaattaaccctcaactaaagggaataagcttgcggccgcggctgtaggcnnnnnnnnnnnnnnnnnnnnnnaaaaattgacccgttttaattatttaaaaacaaaaaacacatcaaatttcctttaccatctacaattcagttatatccaaacactctaagaccaaacagaagcagggatgacaatgagacactgaagacacacgaaggtgaatgctgaagaccatcagagtcccagcaggaggtcacgtctttcattcagacgctccaatgcttttcatttcagtttgttaaagaacgtgttttacaggaagttctttacagtaatttcatgccagacaccaggtttcttcgatggtacacagctccatgaaatttgtgtttccatccagttgacaggaataaaaaggaannnnnnnnnnnnnnnnnnnnngggccgtagagacgtaaaatggtcagattcctttaggaataaatgaggaaaaggagaggaaagagaagatctgggctgtgctggtgctggtttctactcatctttcggagggtgtgacttcaagagttaaatcacacttaggccactacaatgattagtactagttatctttttttaagatgataaaaaggaaagtatccaatggacataaaaatggtcaaaggtttttttactgcaggtcaatttttcccccgaccaaaaaatatacaaaatgaacatataattgggagggtaactctgctggacattccaattcactcatctgcgtgtcccccacacgggtaaggggaacaggcgttcggttttattagtcatgttacagcagtaaccagatgtgttaatggcagcttatttacggtccatcgatcctttgaacaagtataaggaaagcatggctgtcagtctctgactgctcacatctgagcacattcagctaccatggaaactacaagggaaggaaaaatatatttattccaagatttactgggagttttaagtgccctttcttccacagagccccagagtggtgacaaggtgctaggggctgctgtgttttccagcatgagctcncatcctctgagggtcctgagaaggatagtggattggtcctggagccgcatgaagg

SEQ ID NO: 128407 - DNA, 883 bp, Homo Sapiens
gtggtcatagtgttctctggatagactgttgcataattgggtcatacccggtaagcggggacaatgggggtggcaatcatgacagactccagatggaagcggccatctccaagatacacaacggcctccacctctttggacagtcggggggatgtgcagcccaggatctctccaggggacaggggcttgcactgtgggacactcacacgatactcggctttcagctcctgggcggctgcctgcaaggtcgacacaaactgaatggtgctgaccagggcaagggcagtggctgggggaaaggtgaggcggagagagtccaggaggtgtgtagtgtctatccggatgtccacaaagacgtacagcacccggaagtcttgggccgaggtgtccatgggaatcaggcaactgtggccgtagtgcaccaagaagtcagctcccagggccctcgctgtgaagtcatccacacagcaagccccgtaggtcacgtcacccatcaccatcacttcggcctccgtgaacctttccaagatatccacaatggtacaggcaaagaggaggaggccttccggcatttgcaaggccaccttcttggcctgggcttgttggatcctccagatggtcttggggatctcaaagttgtagttggaaggcaggacccggattgctgcctgcagctgagggttcttcaggatctcaggggggatctgattggccacgcggccccgaggggcccgacctctgccagggccgtctcggccgccctgctccgctgccccggatacgaccagcgccgccatcacctgcctgcgcatgtggtactaaaaagacagcgctggaagaacgccttcgtgccgaattaacacccagcctcgtactgccatat

SEQ ID NO: 128408 - DNA, 1136 bp, Homo Sapiens
  misc_feature (62)..(62): n is a, c, g, or t
  misc_feature (64)..(90): n is a, c, g, or t
cggcgccaaaacggaattggtttaggaaaagcttcttcgaggggccgagggcggcccgacangnnnnnnnnnnnnnnnnnnnnnnnnnnnttccaaaatcaccactttattatgtggcagtcaccatggtgccagcctctgccttccccatgtcaccctcctaatccagggctctccaaccatattcatgtttgcgttttcacaagtcaatgtccattaaggccttgtgctccccttttcttcagtacagggcagggcccttataatttgggtctcaagaattgatagttgtctcttaactggttctggtgaggcgcactcacagcagtgagtggagggtcctgggagggcatggatgacggaggctgcccctagaggagctggatgtaggagcagagacatttcttgatctttcactctgcaaactggtccaagaacttgaggtaggcctgacgctggggtgcagctgctggaatgaagtggccaccagagtgggtgagggtgatggctccgggaaattggctggccagttgcacactctcctgagaggggatgactttgtcagtgtccccaaaaacatggagcgaaggcaatgacaagggcctttgcaggatggattccttgaacccaatgccccggggacagaaaccagacaccaagaggataaaccgtggcaaggggaagcggggatcgcctgcctggcccagggcacacacaagggctgctagcgcagccccttggctgaaaccaagaaggccgtcaaaaggccccagcctgttcagtgcctgtgccaccatccccagtgattcctccaggcccctgcagacggcgggctcttccaatgcggagaaaacgtcggcctcctgctctgaaaaccaccagcctcgaggctgctcctccggagggcaggacccgaagtctgatctggcgccctcggggcccggggggtcggggaccgggtgcgggccgctgaggcacacgagctcggcgcgaccccgcagcgccttcctcagcgccccggtcttctcacggaagccccgctcgctctgccggaagcccgccaggcacaggacccgcaggggtcgctgcgcggccattatgcccggcaaggagcgacggaagcaccggaagcgccc

SEQ ID NO: 128409 - DNA, 1600 bp, Homo Sapiens
aggagggggagggggtgggacccaaaacggcgcctagggcggggaaagcacgggccgtcaaggaggcgggaatccggggcaaaataaaacagggggattccccttaccgggaccgaagggcgcccacaaaggggggtgtggacgcagccccctgggtgaaggccaagaaggcgtcgaaaaggcccccagcctgttcagggcctggtgccgccttcccccagggattcttccaggcccctgcagacggcgggctcttccaatgcggagaaaacgtcggcctcctgctctgaaaaccaccagcctcgaggctgctcctccggagggcaggaccctgaggcccgggagcgcgtcaaggagccagcggcgccaccttctcgtccctgcagctgcagtcctcgcaagccacggccgaagggggacgcgcggacccctcctgcaccttcccccgcgcgggccggcccggggcgtggggacggcggtcctggccgtggttcaccgtccagggccccaaggagctgccagcgtagaagtccatcgggtagggctgctgccaggaaatgtccctcagagccacggccgcctcatagggtgtcagcagcggcttggggaaggctgtgccccagtcaatggagagacgtggacatgccacctgcacccacacatccacctcgggaagtacgctaagcttgctggggaagatctcagagagcagcagcctcacaaaggaaaggcccaaggctcggagtcgagattccaggtgtgagcgggcagtggctatggcttcttggcgagcagcttgcatgcgctggtggtcatagtgttctctggataggactttgctatatgggtcataccggtaagcggggacattggggttggcaatcatgacagactccagatggaagcggccatctccaagatacacaacggcctccacctctttggacagtcggggggatgtgcagcccaggatctctccaggggacaggggcttgcactgtgggacactcacacgatactcggctttcagctcctgggcggctgccagggcaagggcagtggctgggggaaaggtgaggcggagagagtccaggaggtgtgtagtgtctatccggatgtccacaaagacgtacagcacccggaagtcttgggccgaggtgtccatgggaatcaggcaactgtggccgtagtgcaccaagaagtcagctcccagggccctcgctgtgaagtcatccacacagcaagccccgtaggtcacgtcacccatcaccatcacttcggcctccgtgaacctttccaagatatccacaatggtacaggcaaagaggaggaggccttccggcatttgcaaggccaccttcttggcctgggcttgttggatcctccagatggtcttggggatctcaaagttgtagttggaaggcaggacccggattgctgcctgcagctgagggttcttcaggatctcaggggggatctgattggccacgcggccccgaggggcccgacctctgccagggccgtctcggccgccctgctccgctgcggcggatacgaccagcgccgccatctcatgcaaggaattccggaccggtccagc

SEQ ID NO: 128410 - DNA, 540 bp, Homo Sapiens
  misc_feature (369)..(419): n is a, c, g, or t
cagtattccaaacagcagggggtcactgtctttactttaggattcataaagcctgttaatgaatgggtgtgctgggggcactgtcatgttcttcagcatgctgcctgggcgacgaggaggcccttcctagggtctgacctggcttcccttcccaggtgggtgcaggtggcatgtccacgtctctccattgactggggcacagccttccccaagccgctgctgacaccctatgaggtaacaccaagctctgggagagagtgggctttggacgtggttctcaaaggtgaggtctggagtggagtggggtgggtgggcagcacttcgttatgttcgtagattccggagtctgtctcgatttctccagcggannnnnnnnnnnnnnnnnnnnnnnnnnnnnnnnnnnnnnnnnnnnnnnnnnncttctgtggcaggggacagtgtgcccttcacaggccgtcgtgaggactgaattcagtaatccaggggcagaaaaacactggcagatgttattgtccctccctcccctcccctaggcggccg

SEQ ID NO: 128411 - DNA, 1000 bp, Homo Sapiens
  misc_feature (738)..(738): n is a, c, g, or t
  misc_feature (813)..(813): n is a, c, g, or t
  misc_feature (820)..(820): n is a, c, g, or t
  misc_feature (822)..(822): n is a, c, g, or t
  misc_feature (842)..(842): n is a, c, g, or t
  misc_feature (873)..(873): n is a, c, g, or t
  misc_feature (955)..(955): n is a, c, g, or t
cagatcattattattaaattaactcaaaaagggttaaagaaagacttcaatgccatttattttgagtagaaataagtcatttctttaatacatcaaactgtgggatttcttgaccttgcttctctcctggtcctggcttccccagaggatccaccgggctgggctggagccctggggctggcagtgtcccacagaaggacatggtgctgcctcccttggtcctgagccccagtggcagactctggttctgctcagtagcagtcggcctcgtccccctgcaggaagcctcccgtggccagcatgtcctgcaggagggactggggactcttttccacgtggtcgctgctctcggccagcgtgctccgcaggccctccaggtctagggacctgagcatggccagcacagcctcaggctcctggtcccctgggggctgggcctgctcacccgcccgccacctcggcagggtggcctctgcggaggcagtgttggggctgcccctggcctcccgcaggctgctgtaggaagcaatcttgtccctcaggaagagaaggaggtcacaagacttctgcgccacagggcggtcgcagtcaaacaaggcacaaaaggcgaagtcaaagagccccacgtggcaaagagccctcagtgcctcggtgagtggctgggctggggccacctcgggtagggcacggcatcgggcagtgggtacgcggcggcccaaagtctggccaggacacganggcaactcaagcctggcgcggactccaatcaagtctcggtcgccgctgcacaagtggcacgactgtcgtgtctgngcgctcngntggcgtccgaacatcatganactgcatacgccgctgggagctcgatcacgnaagattgaagatcagacagctgcggcctcactcagtgtgggggtagcctgtggatccacgggacgatctcgaatctagctgngattagcatagacctacaaggacatacgcccagcgacggagacag

SEQ ID NO: 128412 - DNA, 362 bp, Homo Sapiens
aagtcatttctttaatacatcaaactgtgggatttcttgaccttgcttctctcctggtcctggcttccccagaggatccaccgggctgggctggagccctggggctggcagtgtcccacagaaggacatggtgctgcctcccttggtcctgagccccagtggcagactctggttctgctcagtagcagtcggcctcgtccccctgcaggaagcctcccgtggccagcatgtcctgcaggagggactggggactcttctccacgaacgagtgtgcggctgagtccccgcgtggcctgtctgctggagagagaccccatccccgccgcacactcgttcgtggacctgcttctctgtgcggccgc

SEQ ID NO: 128413 - DNA, 2531 bp, Homo Sapiens
gggccctcgaggcttccagagcggcctccaggggtgcagtctcagttccccacgccagccgtctccgtcctccgcctcctccgggcctggcaggtggcactgtccggaggcggagccttgggcgaggggtggttgcggcggaggacgcaaccgagcgggcctgcggtctcaccatggacccagaatgcgcccagctgctcccggctctctgtgctgttctggtagatcccaggcagccggtggcagatgacacctgtttggagaagctcctggactggtttaaaacggtctctgaaggagagtccagtgtcgtgctgctgcaggagcacccctgcctggtggagctgctgtcccatgtgctgaaagtccaggacctgagttctggggtcctctccttctcactgcgcctggcaggaaccttcgcagcccaggaaaactgcttccagtatcttcagcagggggagttactaccagggctctttggggagccaggacccctcggccgagcaacctgggccgtccccaccgtgcgcagcggctggatccagtggcctgcgctccctggcacagcaccccagcgccctgcgcttcctggccgaccatggtgcggtcgacaccatcttctccctgcacgggagactccagcctgtttgtggcctcggcggccagtcagctcctggtgcacgtcctggctttgtccatgcgaggtggagccgaggggcagccctgcctgccggggggtgactggcccgcgtgtgcccagaagatcatggatcacgttgaagagtccttgtgctccgcggccacccccaaggtcactcaggccctgaacgtcctgaccacgaccttcgggcgctgccagagcccctggacggaagccctgtgggtgcggctgagtccccgcgtggcctgtctgctggagagagaccccatccccgccgcacactcgttcgtggacctgcttctctgtgtggctcgttctcccgtgttcagttcttccgacggcagcctgtgggagacagtggcgcgggctctgagctgcctgggtcccacccacatgggacccctggctttggggatcctgaagctcgagcactgtccacaggcactgaggacccaggccttccaggtccttctccagcccctggcctgtgtcctgaaggccacggttcaggcccccggacccccaggcttgctggacgggacggcagacgatgccacgacggtggacacactcctggcctccaagtcgtcctgcgccggcctcctgtgccgcaccctggctcacctggaggagctgcagccgctgccccagcgcccttcaccgtggccccaggcgtctctactgggggctacagtgactgtcctgcggctctgtgacggctcggctgcccctgcctccagtgtggggggccacctctgtggggaccctggcgggctgcgtccgggtccagcgagcagccctcgacttccttggggacgctgtcccaggggacagggcccccaggagctggtgacgcaggcgcttgctgtcctcctggagtgcctcgagagccccggctccagccccacggttctgaagaaggccttccaggccacgctcaggtggctcctgagctcacccaagacccccggctgctctgatctcggccccctcatcccgcagttcctcagagagctgttccctgtgctgcagaaacgcctgtgccacccctgctgggaggtgagggactccgccctcgagttcctgacccagctgagcaggcactggggaggacaggctgacttcagatgcgcactcttggcttcagaggtgcctcagctggccctgcagctcctccaggaccctgagagttatgtccgagcgagtgcagtgaccgccatggggcagctgtccagccagggcctgcaacgcccccaccagccctgagcatgcagaggcccggcagagcctgttcctggagctcctgcacatcctctccgtagactcggagggcttcccacggcgggcggtcatgcaagtcttcactgagtggctgcgggacggccacgccgacgcgtgccaggaccacggagcagttcgtggcccactgtgctgcaggcggcgagccgagaccttggactggggaggtcccgcgcccagggcctggagctggccctcgtgttccttggccaagactttggggccgccgcgtaccaactggccctattgccgtggccctacgcgaggtggcccccagcccagcatcaccagaggcactgagggctctcttgccacgttggggttctttgacttcgccttttgtggccttgtttgacttggaccggccctttgtggcggctgaaagtccttgtgaccctccttcgttcttcctgaggaccacgattggttcctacagaaagcttggggatcggcaggggaggcccaagatagcctccgcgaaggcacccttccatgttagcgcctggttacacggccacaccccagggaccagacgctaaggtcgtgctgcgaggtcaggtccctaact

SEQ ID NO: 128414 - DNA, 740 bp, Homo Sapiens
ttttaacagcttgtactttattacatatgcaaccttgccatgcctgccagttaactcccctcccgccaatgttatcctcatgatatcagctccctcttggggccactgagctgcccccctttccttctgggctggagtagtggtgcccctcaagcaggcaatgggcagggggagatccacaattaatcgtcgcagttctcttaaaagtattaacacttaaataagcactcttggggagttgcaaaggatattcaggatgggatgcagtgggaggctacccctcatccaaggtacaggctggaatgagctacagctggtctatcgtgggcctcagaaggtgaagagggaccgtattctggggcttagtgtgggtggggcatatcctccccaaacttgttctggtgggcgatgttcttcacatctaggagagcctggtggtggacataggcctgacagtagtaacaccaggctgacaggtcgatgtagctgaggaccagcgggtgtccagaatttccatggtgttggagcatgtggccattgatgtaacgaccacagtagacctgatagcaagagagacacacccaattctcttggattgttccacagtccccacaaggttgggtcacgtctaggcctgctgcaggtatggggcatactgccaccaaatggggacaccagggcagtggtgtcacagcataaaatatggcctgatcagtgaggcccctagatccctgcatcag

SEQ ID NO: 128415 - DNA, 1703 bp, Homo Sapiens
ttttttttagatacagctataattttattacaaaaccgttcttttggcattagttggttacagtgatagcaagataatgtgagtgtgcagaccagctctgatggaacgactgtattccctgcttactgaaccaaacttcggctacctcacatccattacatacaagtgacctgcagttattactgctacaaatcttgacgcatgtaccactgagggaggagctgatgctaagggattagattatatgttgataagactacaaaagttcctttatgggactttttcttcctcctcccatccaatgactttgctttagaagaatcacattacttagagctagtctgagtagcagcagcacccaaggagcatcagttcttgttaaaaagcaatacctgtgtgatgcacttttacaccacaggcaaagggaaggaccactctcgtgtgaaactcctgcagggtcccttaataaaaaataaaagcattccatcaagttcttctggatggtgttattgctgtacatttgttggtgagtcattttctgtgctgtgtttgctttgaagggatcttccaatgtatctccaatattcctttcttatagtgtccttttctttagctaggatttcacataactctaatgctttattaagaatgtcttccttattgtcacactgattttctagcatgtcttcatagatatccacaagaaaggcaattaggtagggggaactatgacttggttgtaaatcaagtaattgatttaacagattaggatatttggaaagaccacgatcctgcaaaatccctttcaaatagttccatgcactttcattatgtggtactagtttaatcatttccagagtgtattggacttctctctccaatacagcacgatcattgtagccagtggtgttagaaataacgaagtatctttggttccagacagagttatttctcacatcctctttcagaagttggtccacatactgcagctcattatcccaaagtttaaattcctgaataacccattgtcgatgctgccaggcatgataattctttgcatcctgattaagaatatcagcaataaattcaagctcctgagatggatctcttagccattccactaatactcgcctatgatgccaaacttgatagtttttgggctgctcctcaattattgcagtgatgtagttcatttcctcatgtagatccttctgaagtgacttcaaaagaactctccggaaatgccacactgtataattggctgcatttaactcaatagcatcccgggttagcttaaaagctcgttcacttctttcatcacgctgcaggacagctcggaagtaatcataaacatctctaaatttgtcactataaatgatctggaccacgggattggggccatcattctgcggcaccggatctatatcagcccattctgctctgtccctgtacaggacataggagggcgagtccaggctcacaaacccgtcgtccatgggggacgccacggcttccccagcctcggccgccatctcttccttgtgctgctgctggggcggcggtgggtgcggctggggcgggggttgcgccggctgcccgggctcgcccccttgcgcagcctccccgaccccctcggtggccgccatctcgcctcggtccgccctcgtgccgaattcgccacccagggcctcgtacctagccgg

SEQ ID NO: 128416 - DNA, 658 bp, Homo Sapiens
  misc_feature (227)..(235): n is a, c, g, or t
tgataagggaatcaatgtctgtttattaaggcagatgctcataaaagtgactttcagtaacattttcagtataaaaatggatttacatttcatttctggaaaaccgttttgtacagtctgaccatggctaggagtcccagggacagcagcctctgctcagggcagactctgtgattcactgtctgtcctgctgctaccccacgtgggggagaacacgtgggctgagnnnnnnnnncagcatgtgcaaacctgacagatgtcaagggtcccaacacagttccttcagcgaaaataaagcccagttttaagatgtgcagggaagtgttgacactgaacaggcagctgaccaagccctgcagggctctgagcaggcaggcgagtcccaaggagagtcagtgacagcacatggggcaagggagctggacagaagagcccagagggtgcggcacctgggtgagagccctggaccgcacaccaaggcagaggggtgcccctgaaggactctgggcaggcaatgacaggatctgagggtgtccagacgcagatctccactgcctgagggagagtgatcagccaggggggagaggccagggactgctacctgcccagaagggggcagggaggggaagagcagatgaggaggtatagggtgtgccct

SEQ ID NO: 128417 - DNA, 772 bp, Homo Sapiens
gtaaagacttttgtatagttttcctgatgccctaatttgttccatttaatttctataaatattcaaaggacatggaataggatctgttaaatcaactttattaatcccattttaaatatctttcatatgcttatttttctgcttgatcagcaaataatgaactaatcactttcaaactgctagtttctatacattcaattatctgagatttctattggcttttacattgtttgatattatacgttttcaaataaatattcatataaatgtctataggtcttatagttctgttgtaggctacacatgaacagcaaccaaaaagaggaaaaatcttctttgtccccatgctttttccttgaattctgcacttttcatattaacattagcccttgctttgtgatttgcctttgctttattttaccctgtcttaatcttaaccttcccaaatatttccatacagggtgcacctctcctagacaacacacagcggagagtgtgcttcccatgtattcaatcttcgtctcttgaaaggagaggtgccctcattacatttcactgtgacacaggatacccttggttttctgtcacaatgtgtcttgctgctgtctcctctgataagcaccacactttctttcccttctctgcccttagacagcagaaaggtatacatacccatttatagttctgaagctgttcacgtttttacgcttaactttgctattcatttcaggaataaaacttgacatttttacactgagagaaaattcttgtt

SEQ ID NO: 128418 - DNA, 1187 bp, Homo Sapiens
atgggaaatttcccatccctggccctggcttaggcctcatctcatgccctcccctcagacggtgtcagatgcctcctgggtctcagaactgctgtggtcacttttcgtccctttcacggtgtatcaagtaaggtattaactgtcctcacattttggtcgctggggagaggctcacctcaaggtcaaggaattagtggcctctgccctgtccatttgtagatctttatatcaaggttctaccacagaggcaacacaaagtatttacagtatttactattttcccacccaccatgcaaagaggtaccaaagtggggaatggtgacagcctctaccctgggtgcccacaacatagccctggattgtttctttgcaggtggcttcgtcctgttcatcgccaactaggggaagcgaatgaggagtttgcactccgtgtacaacaggtggtcgggtgcacagacagggtggaggcggggtccctgcttaggaggagagggaggaaagcttgagatcttgacacttccagtcttccaattctccctagctggtggccaaggaattgggccagacagggacacggctcactccagctgacaaagcagagcacatgaagcgacaaagacaccccagattgcgcccccagtcagcccagtcttctttccctccctcccctggtccttctcctgatgtgcaactggcaactctggctcagagagtcaaggaagttttgccccatgtgccattgggtgtcatccagagagacctggccaagactggctgtgtagacttgactatcactaatctgcttgagggggccgtagctttcatgcctgaagacatcaccaagggaactcagtccctacccacagcctctgcctccaagtttcccagctctggcccggtgacccctcagccaacagccctaacatttgccaagtcttcctgggcccggcaggagagcctgcaggagcgcaagcaagcactatatgaatacgcaagaaggagattcacagagagacgagcccaggaggctgactgagctcaaaggaacaggatggcacccagagccgcaggacggagactgggggcagccctcacccaactcacaacaggctggatgggtgggtggtaaaaagggaaggatgaggctccccccaatgtcacattaaattcatggttttcattcaagg

SEQ ID NO: 128419 - DNA, 742 bp, Homo Sapiens
agcgaatgaggagtttgcactccgtgtacaacagctgtggccaaaggaattgggccagacagggacacggctcactccagctgacaaagcagagcacatgaagcgacaaagacaccccagattgcgcccccagtcagcccagtcttctttccctccctcccctggtccttctcctgatgtgcaactggcaactctggctcagagagtcaaggaagttttgccccatgtgccattgggtgtcatccagagagacctggccaagactggctgtgtagacttgactatcactaatctgcttgagggggccgtagctttcatgcctgaagacatcaccaagggaactcagtccctacccacagcctctgcctccaaggcattcgatgcgtgtttaatgatgatgactccgcaagccctctgacattgtgatcacctcagtttcccagctctggcccggtgacccctcagccaacagccctaacatttgccaagtcttcctgggcccggcaggagagcctgcaggagcgcaagcaagcactatatgaatacgcaagaaggagattcacagagagacgagcccaggaggctgactgagctcaaaggaacaggatggcacccagagccgcaggacggagactgggggcagccctcacccaactcacaacaggctggatgggtgggtggtaaaaagggaaggatgaggctcccccaatgtcacattaaattcatggttttcattcaaggc

SEQ ID NO: 128420 - DNA, 1091 bp, Homo Sapiens
gcccaggagaaaaactagctggtacggtccggaattcctgcgatgatgtggtacaacctcttaccctgccagttcagagacccctggtctctgtgacggtgtcagatgcctcctgggtctcagaactgctgtggtcacttttcgtccctttcacggtgtatcaagtaaggtggcttcgtcctgttcatcgccaactaggggaagcgaatgaggagtttgcactccgtgtacaacagtcttccaattctccctagctggtggccaaggaattgggccagacagggacacggctcactccagctgacaaagcagagcacatgaagcgacaaagacaccccagattgcgcccccagtcagcccagtcttctttccctccctcccctggtccttctcctgatgtgcaactggcaactctggctcacagagtcaaggaagttttgccccatgtgccattgggtgtcatccagagagacctggccaagactggctgtgtagacttgactatcactaatctgcttgagggggccgtatcttttatgcctgaagacatcaccaagggaactcagtccctacccacagcctctgcctccaaggtgagacccaggaaatggtcagatccaagtgttggggtgagttgggggcaggctatgtactcccttatccctgacctttcttttttgatcctgagacccttagcatagtgcctctcttgcaaagtaggcattcgatgcgtgtttaatgatgaatgactccgcaagcccctcctgacattgtgattcaccctcagtttcccaagttcctggcccggtgacccctcagccaacagccctaacatttgccaagtcttcctgggcccggcaggagagcctgcaggagcgcaagcaagcactatatgaatacgcaagaaggagattcacagagagacgagcccaggaggctgactgagctcaaaggaacaggatggcacccagagccgcaggacggagactgggggcagccctcacccaactcacaacaggctggatgggtgggtggtaaaaagggaaggatgaggctcccccaatgtcacattaaattcatggttttcattc

SEQ ID NO: 128421 - DNA, 1273 bp, Homo Sapiens
  misc_feature (461)..(469): n is a, c, g, or t
cctgatgagtagtttgcatatagtcgtcgtccgtgatgcagaatagctgtaatgacggacagagtaggcatattacagcttgaggtggcaccaccttagtatcagccagcgtagctgtttataattatgcggttacggacgcggcttaaatagtatctgcgtagggggttatagggtggcccgcacctgattgtccccccaccccacaagagtaatggggtgctcgcttgtcgcccagggggtcgcccgtcgagtgacgcaagtgtgtccacccgtgcgcagcacgcgtggttattaacacatcggctacgttagctatatctgattattgcggtcttcctcttggggccccctcgttgggcacaaagctggggcgcccgctttaagtcgggggccgcccccgagggggtgatcttctttatggccccgcgccccttttgtggtgttgtggtattgggtgnnnnnnnnngaatgaaaaccatgaatttaatgtgacattgggggagcctcatccttccctttttaccacccacccatccagcctgttgtgagttgggtgagggctgcccccagtctccgtcctgcggctctgggtgccatcctgttcctttgagctcagtcagcctcctgggctcgtctctctgtgaatctccttcttgcgtattcatatagtgcttgcttgcgctcctgcaggctctcctgccgggcccaggaagacttggcaaatgttagggctgttggctgaggggtcaccgggccagagctgggaaacttggaggcagaggctgtgggtagggactgagttcccttggtgatgtcttcaggcatgaaagctacggccccctcaagcagattagtgatagtcaagtctacacagccagtcttggccaggtctctctggatgacacccaatggcacatggggcaaaacttccttgactctctgagccagagttgccagttgcacatcaggagaaggaccaggggagggagggaaagaagactgggctgactgggggcgcaatctggggtgtctttgtcgcttcatgtgctctgctttgtcagctggagtgagccgtgtccctgtctggcccaattccttggccaccagctgttgtacacggagtgcaaactcctcattcgcttcccctagttggcgatgaacaggacgaagccaccttacttgatacaccgtgaaagggacgaaaagtgaccacagtagttctgagacccaggaggcatctgacaccgtcacagagaccaggggtctctga

SEQ ID NO: 128422 - DNA, 902 bp, Homo Sapiens
gtgggagattccccaggcctcctgttttatggggccccggttcttcctttgggagaacacggctttgggccccagtgttgcactttacccttacgggggcgccccgggcccccaaaggggaatggttgttgaaaagcttttttggagggcccgagggcggcccgcacaaggcagtttttgtcgcgctgtcctttcttttcctgtggaaggaaaaccccatgaatctaaatggtgccattggggggaccctccaccttcccttttttgcccgccccccccatccaacccttttgtggagttgggggaggggctgccccccattttccggtcttgcggctctgggtgccatcctgttcctttggagttcagtcagcctcctggggctcgtctctctgtgaatctccttcttgggtattcatataggtgcttgcttgcgctcctgcaggctctcctgccgggcccaggaagacttggcaaatgttagggctgttggctgaggggtcaccgggccagagctgggaaacttggaggcagaggctgtgggtagggactgagttcccttggtgatgtcttcaggcatgaaagctacggccccctcaagcagattagtgatagtcaagtctacacagccagtcttggccaggtctctctggatgacacccaatggcacatggggcaaaacttccttgactctctgagccagagttgccagttgcacatcaggagaaggaccaggggagggagggaaagaagactgggctgactgggggcgcaatctggggtgtctttgtcgcttcatgtgctctgctttgtcagctggagtgagccgtgtccctgtctggcccaattccttggccaccagctgttgtacacggagtgcaaactcctcattcgcttccccc

SEQ ID NO: 128423 - DNA, 1574 bp, Homo Sapiens
  misc_feature (77)..(77): n is a, c, g, or t
tttgaggttcagtcaagcctcctggggctcgtctctcctgtgaattctctttcctggcgtatttcatatagtgcttngctttgcgcttcctgccaggctctccctgccggggccccaggaagaacttggccaaatgttagggcctgttggctgaggggtcacccgggccagagctggggaaacttggaggcagaggctgtgggtagggactgagttccccttggtgatgtcttcaggcatgaaagctacggccccctcaagcagattagtgatagtcaagtctacacagccagtcttggccaggtctctctggatgacacccaatggcacatggggcaaaacttccttgactctctgagccagagttgccagttgcacatcaggagaaggaccaggggagggagggaaagaagactgggctgactgggggcgcaatctggggtgtctttgtcgcttcatgtgctctgctttgtcagctggagtgagccgtgtccctgtctggcccaattccttggccaccagctgttgtacacggagtgcaaactcctcattcgcttcccctagttggcgatgaacaggacgaagccaccttacttgatacaccgtgaaagggacgaaaagtgaccacagcagttctgagacccaggaggcatctgacaccgtcacagagaccaggggtctctgaacttgcagggtaagaggttgtaccacatcttggatagaaaatggccaggaactgaagcgcaggagcccctcccggccattggtggcctcttcctcagggaatagcagcagaggagtggggggaagcctcgtggaagcacagaatctcttgagtgactccaccaactccccccgcccattcatctccatgaagccccgagaccagcacacaaagctggggggactattgagtagaggggtgctacaggtggtaagcaaattgactatgttgtggtcgaaaggtgtcacatggttggaaatgaggaccctgacactgtgatcccggagtccggagtcctcctgccgggccacgagccctagcaccgcacacatggtccgcactacgaatctgcgaaggacgctgtctggcagcgcgcagctgaccaggaagacgtggatcccgagaaagaggcgcaggacgaggaggcagaacccgactggcgcgtagagcagcagcacgagcagtaggaagcagtcacccggaagccggtgcgagtcaaagagccgctccggccccggccctgagggaagctccataactgctgcttcaggagcgcccggccgtcgccgccgccgccattttcgcgcccggccgcaggggctcttgggaaggcggagtctttgggcatccgcccggggtgaggggacccgaagtcctgaggcgcgccggaagggctagcggtcccagcataccccgcggccccttgggccgtctcacaactcgcgtccggcggagaccacaattcccggcattcgtggggcagggaggagtcggcctcccggaatcctggtcccggcgtgcacttctgaaggacttcaggtaccggcgtgatcccggaaattccggaccg

SEQ ID NO: 128424 - DNA, 1074 bp, Homo Sapiens
caattccccttgggccacccaagttgtttgtcccccggaggtgcaaaactcccctccatttgggttttccccctagttgggcgatgaaccagggcggaaagcccacctttactttgattaccccgtgaaaaggggacgaaaaagtgcccccagcagtttttgagaccccgggaggcatctgacaccgtcaccaggagaccaggggtctctgaacttgcagggtaagaggttgtaccacatcttggatagaaaatggccaggaactgaagcgcaggagcccctcccggcccattggtggcctcttcctcagggaatagcagcagaggattggggggaagcctcgtggaagcacagaatctcttgagtgactccaccaactccccccgcccattcatctccatgaagccccgagaccagcacacaaagctggggggactattgagtagaggctgggaaccaggagaagagaaagcaagaagaaaaatattgaggaaaatgaacaaaaaaaactgacatgttgggtagaggatcggggttaggggtaaggctcagtatcctccatgcggaacgcgagtggggacaggggggccttcagctgggccccagggaaccgccccgtggcgctctcggcctcgctctcactcacggtgctacaggtggtaagcaaattgactatgttgtggtcgaaaggtgtcacatggttggaaatgaggaccctgacactgtgatcccggagtccggagtcctcctgccgggccacgagccctagcaccgcacacatggtccgcactacgaatctgcgaaggacgctgtctggcagcgcgcagctgaccaggaagacgtggatcccgagaaagaggcgcaggacgaggaggcagaacccgactggcgcgtagagcagcagcacgagcagtaggaagcagtcacccggaagccggtgcgagtcaaagagccgctccggccccggccctgagggaagctccataactgctgcttcaggagcgcccggccgtcgccgccgccgccattttcgcgcccggccgcagatcccgggaattccggaccggtaccagc

SEQ ID NO: 128425 - DNA, 687 bp, Homo Sapiens
acgcctcagcccaagaatcatgtgctgtttcaaatagagaactgtgcgatgatgagaaagagttcatacattttccagtatgtgagggacctctcaacctgaaccctcgtgttcagctgtcagaataacagccaataaaaactacaggagcaaaacctctcaggaaggtgctttaaaaaagatgcatgaggaagaacaccatcaacaaatgtccatcttacaactgcaactgatacaaatgaatgaggtgcatgtggccaaaatccagcagatagagcgagagtgtgagatggcagaggaggaacacaggataaaaatggaagttctcaataaaaagaagatgtattgggaaagaaaactacaaacttttaccaaggaatggcctgtttcctcatttaaccggccctttcccaattcgccctaagactttgggggtggctctcttgtaattaatctgtgttggcaaagaatgtctggaacatggacttggcggtcagtaacctgtaacagagctacaactaggaaaattagagtggtagtagtcacttatttaagaattcattcaggtaaacagctgcaccctctgtaccccttaagtggcaaagaagctgttatagtcttctgaaaattatcactatgagtgctataattctgaatataatgtctcttaattagaattcatacaag

SEQ ID NO: 128426 - DNA, 1712 bp, Homo Sapiens
  misc_feature (50)..(50): n is a, c, g, or t
  misc_feature (58)..(58): n is a, c, g, or t
  misc_feature (119)..(119): n is a, c, g, or t
  misc_feature (122)..(122): n is a, c, g, or t
  misc_feature (137)..(137): n is a, c, g, or t
  misc_feature (199)..(199): n is a, c, g, or t
  misc_feature (224)..(224): n is a, c, g, or t
  misc_feature (237)..(651): n is a, c, g, or t
  misc_feature (1048)..(1058): n is a, c, g, or t
  misc_feature (1097)..(1122): n is a, c, g, or t
  misc_feature (1503)..(1553): n is a, c, g, or t
ggttgtcaccaccagctgacgacgccacccgatgggatctaagcgtagtntggaagcncacctcccgaagagaaagcgacagttccgtagcgcaggtcgaacagagacgacgaggactncanggggacgcttgtatntatgtctgtcggttcgcacctctgacttagctcgatttgtgatctcgtcagggggcggagcnatggaaaacgccagcacgcgccttntacgttcttgccnnnnnnnnnnnnnnnnnnnnnnnnnnnnnnnnnnnnnnnnnnnnnnnnnnnnnnnnnnnnnnnnnnnnnnnnnnnnnnnnnnnnnnnnnnnnnnnnnnnnnnnnnnnnnnnnnnnnnnnnnnnnnnnnnnnnnnnnnnnnnnnnnnnnnnnnnnnnnnnnnnnnnnnnnnnnnnnnnnnnnnnnnnnnnnnnnnnnnnnnnnnnnnnnnnnnnnnnnnnnnnnnnnnnnnnnnnnnnnnnnnnnnnnnnnnnnnnnnnnnnnnnnnnnnnnnnnnnnnnnnnnnnnnnnnnnnnnnnnnnnnnnnnnnnnnnnnnnnnnnnnnnnnnnnnnnnnnnnnnnnnnnnnnnnnnnnnnnnnnnnnnnnnnnnnnnnnnnnnnnnnnnnnnnnnnnnnnnnnnnnnnnnnnnnnnnnnnaagaattcggcacgaggagaagatgtattgggaaagaaaactacaaacttttaccaaggaatggcctgtttcctcatttaaccggccctttcccaattcgccctaagactttgggggtggctctcttgtaattaatctgtgttggcaaagaatgtctggaacatggacttggcggtcagtaacctgtaacagagctacaactaggaaaattagagtggtagtagtcacttatttaagaattcattcaggtaaacagctgcaccctctgtaccccttaagtggcaaagaagctgttatagtcttctgaaaattatcactatgagtgctataattctgaatataatgtctcttaattagaattcatacaagaaccacgtgtgagtgttgttgttgttgnnnnnnnnnnnaatcaaatgcaagtgtgactataaaggagtgtggctgannnnnnnnnnnnnnnnnnnnnnnnnnaaacagacagcagaacttttctatccaaatgaatgccgtcccatggaaagtggctgtcctgggaggctacacgtttctccaatggtgatgctgttgctcagaacttgctagaggtctttagggaacctccgtgagagctgcagcacctttttaattttctcggtgtcatcctctgagtatggattttctgtttttaaacagcccaaagtttagaagggtattttctaatgtggctcataaaccaccttttaaggcctttcctcaaacaggagttctaaataagtctccaacaatagtagttttgttggagctaaggatgtaactactttgagggagaaatgttcgtttagatttctacattctgttatgttggttttattnnnnnnnnnnnnnnnnnnnnnnnnnnnnnnnnnnnnnnnnnnnnnnnnnnnccttgtcggccggcctcggcccctcggagaagctttctaagacccactcgtttcggcggcccggggccccatgtaggaaaacggaacattggcccatagctggttttccttaggaaaatcctgggtcatgaactaggggctggggattcctcaccaaat

SEQ ID NO: 128427 - DNA, 1068 bp, Homo Sapiens
  misc_feature (499)..(932): n is a, c, g, or t
  misc_feature (977)..(977): n is a, c, g, or t
  misc_feature (992)..(992): n is a, c, g, or t
  misc_feature (1014)..(1014): n is a, c, g, or t
  misc_feature (1031)..(1031): n is a, c, g, or t
  misc_feature (1042)..(1042): n is a, c, g, or t
tttggaaattggcatgtattctgcaaagacttgttttaggccagttttaccccatctgctaaacgcaatgcatagtctgtatcaaccagaagaacccatctctaaaaacatcaatgttgatagtcaaagaccactgtgttagaaccaaaatcaggtcttgtatgattacatacatcagacagagcaatggtggcacaggctgagcatgacaatggctcatatgtttgacgcaaaagtaaacaaattcatggatgcattcaggaggaatgccttgcatggacaagggtaaagttcaatttaaaataaaagctccctaatattctcatagggcaccagctctaaaccggtctgtagaagagcttttgggctgaaacatctgccaggaacattgccaatcccatcactaccttcatttcctagtgcaaatggaaggtgcagctgtttgaaggtgctttttaaaagatcaaaagatgacttgaagcctcgtgccgaattcttnnnnnnnnnnnnnnnnnnnnnnnnnnnnnnnnnnnnnnnnnnnnnnnnnnnnnnnnnnnnnnnnnnnnnnnnnnnnnnnnnnnnnnnnnnnnnnnnnnnnnnnnnnnnnnnnnnnnnnnnnnnnnnnnnnnnnnnnnnnnnnnnnnnnnnnnnnnnnnnnnnnnnnnnnnnnnnnnnnnnnnnnnnnnnnnnnnnnnnnnnnnnnnnnnnnnnnnnnnnnnnnnnnnnnnnnnnnnnnnnnnnnnnnnnnnnnnnnnnnnnnnnnnnnnnnnnnnnnnnnnnnnnnnnnnnnnnnnnnnnnnnnnnnnnnnnnnnnnnnnnnnnnnnnnnnnnnnnnnnnnnnnnnnnnnnnnnnnnnnnnnnnnnnnnnnnnnnnnnnnnnnnnnnnnnnnnnnnnnnnnnnnnnnnnnnnnnnnnnnnnnnnnnnnnnnnnngcgtgctggcgttttccataggtccgccccctgacgagatcacanatcgagctaagtcanaggtgcgaaccgacagacatangaacaggcgtcccttgnactcctctggnctcctgtcgactgcgctacggtactg

SEQ ID NO: 128428 - DNA, 782 bp, Homo Sapiens
  misc_feature (186)..(200): n is a, c, g, or t
ttttggtaaaatagctttatcctctgtcagaacacaaacaaacaaactttgagaggggaggaaggaaaccgtctagctcagggctcacttaggagagggatgagattagaaagttcaacacactgcttgtgcagcggagataaagtcaagaccctagcacccacttataaatatctcgttatattnnnnnnnnnnnnnnntgtccagggcccacctggctctgctcctgcacagaaagggttcatcttcactttgtgatctcacaggtcatggagtgagggtggtagagaggggcagaaatttcagggggaggggtggctgggaaaaagtaaaggggacaagccaatgtgtaactagcgctctccaagacatgcagaggagtgggggtggcctgtcaggggctgaaaagaaaagccagtgctgtacctggggggttgtctcactcctgtccccacaatccctgatactccggagtgatctgtcctttcagacacccactgtgaggtcccaatatcggggtttatcctttcctcagtcccagcctgttcagctctccaaccaagttttgggggcccctctaatgggggggatggccccagttgcttaggcctctgaggtcaacccctttacatcacagccctctccccaaataagaagcatgaggtgagctggaggaccctccctgggaggagggtgttctggggggtgagccagttttggggtcccccttcagtccctgaccaggcggtaaatgtgatgctgggcccacgctcgctggtgga

SEQ ID NO: 128429 - DNA, 1938 bp, Homo Sapiens
  misc_feature (1143)..(1143): n is a, c, g, or t
  misc_feature (1154)..(1154): n is a, c, g, or t
  misc_feature (1654)..(1654): n is a, c, g, or t
cctcccttacctgcgccctcgttgttgaaagaaagaggatggtaccggtccggaattttggttatcgtcgaccacgcgtccgccttcgcgtccgccgacttggacggagccgagctgaggctcggcttcctgctgatggtcagggttttggcaactccccggtgtgagaggggtagggagtgctcccggcggcgacggggccgagttcaccagccgccggggcagtagtcgaaggcccggcgcggcatgtcctgggtgccgcggtgcgggcagtgaacgcgcgccgggcgggatgggccggcgccgggcgccagagctgtaccgggctccgttcccgttgtacgcgcttcaggtcgaccccagcactgggctgctcatcgctgcgggcggaggaggcgccgccaagacaggcataaagaatggcgtgcactttctgcagctagagctgattaatgggcgcttgagtgcctccttgctgcactcccatgacacagagacacgggccaccatgaacttggcactggctggtgacatccttgctgcagggcaggatgcccactgtcagctcctgcgcttccaggcacatcaacagcagggcaacaaggcagagaaggccggttccaaggagcaggggcctcgacaaaggaagggagcagccccagcagagaagaaatgtggagcggaaacccagcacgaggggctagaactcagggtagagaatttgcaggcggtgcagacagactttagctccgatccactgcagaaagttgtgtgcttcaaccacgataataccctgcttgccactggaggaacagatggctacgtccgtgtctggaaggtgcccagcctggagaaggttctggagttcaaagcccacgaaggggagattgaagacctggctttaggggctgatgggcagtttggtaaccgtggggcccgggaccttaaggcctctgtgtggcagaaggatcagctggtgacacagctgcactggcaagaaaatggacccaccttttccagcacaccttaccgctaccaggccctgcaggttttgggcaggttccagaccagcctgctggcctgcgactcttcacagtgcaaattccccacaagcgcctgcgccagccccctccctgctacctncacagcctggngatggctccaacttcttgccccttcggaccaagtcctgttgggccatgaagtcgtcttcctggccctcgatgtcaagtgaatccggcaccttcctaggcctgggcacagtcactggctctgttgccatctacatagctttctctctccagggagtgttcctgtgtggctcctgctcctgctgtgtgtcgggcttattattgtgaccatcctgctgctccagagtgcctttccaggtttcctttagcttccctgcttcctgggaatcaggagcctggacactgccatctctagagcagagtggaggcctggactccctttgctcactccatccagaacagcggtatctgaagcccaggccatactccctgcctcctttcttctgcctaccagaggctccagagttgagcttgtcctttatctagaaacatgtgaagatgcccaagagcctggaggcactgctgtccttcctgcagaaacaagttctcctcctcccctcagncttgtggccagttcctcttcacatgaagcccctggcatttgctggggaaagggactggcctggaacttgctgttagggcaaggaaggggcaaaaggaaaaactggggtagtaaacctggggggtccagaatgggaaaccactaggccagctgggcccaaaagaagccaataagtttcctaaggaaggcctaacccctaacctttgaagaaatggggaaaaatgaaccctccggccccctttaaggcagggaaaaaggttgaaaattttaaataaaaaacaaggg

SEQ ID NO: 128430 - DNA, 1077 bp, Homo Sapiens
tttttggggtctcagttcactctttccttgtttattaaatatcaacttttcctgcctaatgggctgaggttcattttcccattcctcaaggtaagggtagactacctaggaacttattgcatctttaggccagctggcttagtgctacccatctgaacccccagattactacccaagtcttccttttgccccttcctgccctaacagcaagtaccaggccagtcccttccccagcaaatgccaggggcttcatgtgaagaggaactggccacaaggctgaggggaggaggagaaactgtttctgcaggaaggacagcagtgcctccaggctcttgggcatcttcacatgtttctagataaggacaagctcaactctggagcctctggtaggcagaagaaaggaggcagggagtatggcctgggcttcagataccgctgttctggatggatccacagatgacgaaggcaaggttcctgggacctggagtcacacagggccatagccaagccttttcactagaagggcaggcagtgcccattcatcttgtcagaggcaacctcagctgtggacccgaatggagtgagcaaagggagtccaggcctccactctgctctagagatggcagtgtccaggctcctgattcccaggaagcagggaagctaaaggaaacctggaaaggcactctggagcagcaggatggtcacaataataagcccgacacacagcaggagcaggagccacacaggaacactccgccgtgagggcaacagatgcagctggcaacgactgtccacagccacagagaacagggcagtttcatgggacccaaggagctctggaccacgacccttctcaggtagaaaggccacatccgtcaccacaatgccatgggcctccctcacgtagtagaggcactggagagagaaagctatgtagatggcaacagagccagtgactgtgcccaggcctaggaaggtgccggattcactgacatcgaggcaggagacgaccctcgtgccgaattcgccacccaggcctcgctaccttagagaccgttatagttactgccggtttcc

SEQ ID NO: 128431 - DNA, 688 bp, Homo Sapiens
  misc_feature (612)..(612): n is a, c, g, or t
  misc_feature (628)..(628): n is a, c, g, or t
  misc_feature (675)..(675): n is a, c, g, or t
gcgtgagccaccgcgcccagccccatcatcaaggtttgcagggactagctgcaaagcgcgggcaggggcggcatctatttgaagccgctgtgtctgtttcgcgtgcacttccctccaccgtgtgtctggccacaggcagctctggcggagggaagggaggcgaaggggcacccgcgtatgcacggcctcaggatggggcacgggcacccggccccgccgtggcagccacctcctgtgaagcccacccctctgtggttaaatcctccagaaagccccagcttctgccttttctgtcacctttgaccccagggggacgttagggggccccaaaccccgccccgtgtcagccaatagacacagcggtgcggcccccgtgggactttattaaggggagtatttcctaaatgtgcggggcccgcaaaggcaggggtgggaggggtccgcggccaggctccgtgaggtgtggtctccccatggactcaggatgagggttgctcgtcctcgggcccaggcctctcccccttcagccagcgcatcatctgctggtgctgctggacaaagtcttgcacgcaggcgtccatcatgggctcggtcaggaccccgtccttggancatacgccgtggcctnccaggacacggccagctgtgcgatcttccggcattacatgccctctntcagccgagcgat

SEQ ID NO: 128432 - DNA, 1319 bp, Homo Sapiens
  misc_feature (1095)..(1109): n is a, c, g, or t
  misc_feature (1139)..(1179): n is a, c, g, or t
atccttctctcgttctgcttcagaacattcttctagtgcagagtctgagagaagttataaaaagtcaaaaaagcataagaagaaaagtaagaagaggagacataaatctgactctccagaatccgatgctgagcgagagaaggataaaagagaaaaagatcgggaaagtgaaaaagacagaactagacaaagatcagaatcagaacacaaatcgcctaagaaaaagactggaaaggattctggtaattgggatacttctggcagcgaactgagtgaaggggaattggaaaagcgcagaagaacccttttggagcaactggatgatgatcaataaattataccaaatatatgtttacagtatgatttaaagtctgattcagaccagggactctattttaagttcaactgaaataacactgggttttaattatatcacaggaaaaaaaacgtgcatttaagtatggttatcgtggactttataaaagcaaaggaaattgaaagtaacttttgattctgtatcaagaatcatattttcatacagtcataactgtctttctgtgaccctttcacagggcactgtaggatggattaaaggtggcaatttactgataactgcagatgtctctactttgttctaaaatctaagtcatgaggtgatttgatttactttatagaagctggattttgaagatctaatgaaaaattttttgataatatagtagtacaaaaaaagcaccagcaactgataaaaattgcttttttgtgcgctacccaactggttaaagccaatgtgatcttttatggtgaaactcctaagaaacaggtggttttgctggaaacttggtagacccttaattatagtggtgctaatgagcactactgtaatataaagccaccattattttttatcaaacatctgaatacattttacaaaggctattgtgagggcattattttgagcatctattttgaggtgatgtttaaaaaaactttaacatcaaatcaaattgtaaattaatttaaatatattgccttaaggacctactaaagaatgtgccaccagactttaagtgatagttgcaatatccttgtctnnnnnnnnnnnnnnngttgacttaaacattttctttaacagttgnnnnnnnnnnnnnnnnnnnnnnnnnnnnnnnnnnnnnnnnncctgctattgaggaagtattttgccttccctactcactgagaagtattgacttcgtggtacacattctaaagcatttctgatttgaatatttttgtacatttttatcaattattaaaccttctcttctagtgaaaaaaaa

SEQ ID NO: 128433 - DNA, 530 bp, Homo Sapiens
  misc_feature (227)..(287): n is a, c, g, or t
cctgtgatataattaaaacccagtgttatttcagttgaacttaaaatagagtcctggtctgaatcagactttaaatcatactgtaaacatatatttggtataatttattgatcatcatccagttgctccacaaagggttcttctgcgcttttccgattccccttcactcagttcgctccagaagtatcccaattaccagaatcctttcagtcttttttcttagcgannnnnnnnnnnnnnnnnnnnnnnnnnnnnnnnnnnnnnnnnnnnnnnnnnnnnnnnnnnnntttatccttctctcgctcagcatcggattctggagagtcagatttatgtctcctcttcttacttttcttcttatgcttttttgactttttataacttctctcagactctgcactagaagaatgttctgaagcagaacgagactctgatcgctgtctttttttctttgaatggctatcatcatcatctgaatctgaccccgatcgagagcgggaacgtttcctatgatgttttttacctcgtgc

SEQ ID NO: 128434 - DNA, 979 bp, Homo Sapiens
ttttttatgagataattgaaaagttttattataaacaacataagcaaaaaattcaatgcagtgggggcagaagtgtgtggatgacctgccaaacaataagtattcaaagtgttgagtgagggaggtgaggttgcaactatctttctctagaaaagaagagaactgggtattcatcaaattggttaaattgaggttcgtcaaagagtttctacagatacagctgaatatactaaacattgctctattatctgttgaattgctgtatttcactttttcagcatttggggatcattatttaattgaatttgtagagatcgattttccagacaggtctctgttcttcaatgaacaaatgataagaaacaatttgactccttatatgacaatggaattaaataaattgacactcatctaggaataattctacaatcatctccatctctaagattacctactgcaaacaaagaattgatctttctttctcaaaaaccacatgggtaagatgatcattgtgactctgaatgcaagaataagtgagtggaagctacaaggggagattatctgccaacatagaaagaatctagaagaaaagattttattacaggtaacatgacatagcttggagccatctttttggtctcttgcatacattttctctgcatgtctaaggaagaattcacacggtagcaagcaccaatactttctgctttggagtttcacaaattgaaaatttgtccctctcttgttaagtcaatcaaacatctaccaatggccaatggtggtccttagttacgagtgcctgagagacagaaactagagcactcgactatgctaaataagtaagtatggggcaaggttgccagagaatatgcagagaatacgaacagattttcattaagtttaatcttccgcgaacagacgtaacaaaataaaggaagcaatctgtaacgctgtcatgattaattcaagtatcccatcc

SEQ ID NO: 128435 - DNA, 918 bp, Homo Sapiens
ttttttcttttctgccaatcaaagcacacaactttattgatgatacacacagatgcggacttgggtggaagaggttaagtcggtacaatagacagaagagcagtgcacttttttgatgaataggttcactatccatcaggcgcgtgtagaagaaagagcaaacgaaaaataattcaacctaagctgcaacaaatgcattttcagctcaagccgcgatatgcctctggtctctgcaaagcggtcccgcttggacagggagaccaccacaggcaacaatagcactcgtgatgctgtaatttgatgttctttgtccacagcaggcagctgaagtgatcccctcaccacatgaaggaggctgcaagggaggaatttacaatgccaacattgcctgcagactgcacaaccaagaagttactcaaagctctgtgggagcccctgcctggccaataagagtgtggtcctggattgagccctggaactttcacccaatgaggtggtgattggctaaggctggatcttcagtagcaccctctgcagattctttgacatctgcaaaccaagcgcgttgtgggtggattccgtcccattgtgttcgagagggccgtttatggggcaggggtttccaggagaatctctctgtttccatttctgattgaagaggtctctcaggtccagggtgagtaaggatggagggtagcagtcttcagcttcttccaggctcttgtagctctcttgtgatgaatctgcaaggttccaaccaaggcagttttctccttctctcgctgaaacttgtgccgaaacctacaggccaacagacctacaaacctgcacggtccgagctagtttccttctttcttcacacgcctgcagagtaatagggggctggtacccagacggaggcgactagcaggacttgtg

SEQ ID NO: 128436 - DNA, 880 bp, Homo Sapiens
tcatattcgcattaagtatccgggcacacaagcctctttaacagtggtctggatgggctcgtgtttctagccattgagaggctgccaaatggctattgatatcctggctaaatgaaagcccgcatccttggcttcgccaacaacagttttccctgaatgaaaagacacttggagaggtccagaacaccactgccatttttacaattttgagcactccaagtatttttatgttcataggggaatgccgctgttttattgggtgtgctcggttggccttgcctccccctgagggcctgtcctcagtgccacctggggccccaggttcagtccaatccccatcctcagtccagggccgagccatagtttcaaaatcaaaccaaatatcaggctcctcctcatccagctcctggtcatcgtcccactcctcttccccctcctcctccagcttctcactgtcatctcttcctatggtcagtttgtaaacgcagtagcaggcaccagcccccatcatcagtcctgccgccatccaacccacttcccgagcccggcccatgctcaagtctgtgccagccttggggcaggacaggagagggccttgctccacctgattgaagaggtctctcaggtccagggtgagtaaggatggagggtagcagtcttcagcttcttccaggctcttgtagctctcttgtgatgaatctgcaaggttccaaccaaggcagttttctccttctctcgctgaaacttgtgccgaaacctacaggccaacagacctacaaacctgcacggtccgagctagtttccttctttcttcacacgcctgcagagtaatagggggctggtacccagacggaggcgactagcaggacttgtgctctag

SEQ ID NO: 128437 - DNA, 717 bp, Homo Sapiens
  misc_feature (620)..(620): n is a, c, g, or t
  misc_feature (682)..(682): n is a, c, g, or t
ttttggcagtcacatcagtcagtgcaaaatctgcattttattaaagacatttgggaagatccattcaaaaatacattgtgctcagtaaaaattaaccatttcatgctgataatgaaggttatcacggaatagatatttgtgtaatatttacagcaacaatagaaattttacataagtttagaatggaattacatgccagaaaaaacttgataagatgtaccaacacatgatacaaagagttatagaaacactttacaaatggttcataattcacttgtgaggatttaagtattcaacactttaaattcagtttggattcaaaaattaaaaagattaacaatcacatcacacccttgccacagtaaaaagtatggaattacactttatataatggattataaagtctgtgcaattaagaatttccactgattcttcatctaccacatactagatgtcacatcattctggcttatccctatttttaagaatgaacagagtctaaatgtcaccctgccctgtgtcttcccagacaccaccttcaagcttactagagattgaagaagctctgaatagttagctaagtatatacagaataactacctgaattcaaaatggcacanagcaattcttgggagatagaaattttggggcaatgattttgtttggtttaattgtttctgtntatcaatccaagtttacagtgagaatttacttctt

SEQ ID NO: 128438 - DNA, 556 bp, Homo Sapiens
  misc_feature (286)..(302): n is a, c, g, or t
cataatgattggactcacaattatcgcctgctttgctgtgatagtgtcagccaaaagggctgtagaacgacatgaatccttaacaagttggaacttggcaaagaaagctaagtggcgtgaagaagctgcattggctgcacaggctaaagctaaatgatattctaagtgacaaagtgttcacctgaataccatccctgtcatcagcaacagtagaagatgggaaaaatagaatatttaccaaaatatctgccatggttttattttggtaacaagaagcacaatgtcnnnnnnnnnnnnnnnnnagtaaacttttactgaagtataccatgcattcaaaaagtggacaaaactgtatacagtctgatagatatttatgtcgtgaacacctgtgtaaccactgccaaagtgaagatgtagaatattggcaacacttcacagcctcattcctgccttttctcagccattacctcccaaacatagcagtttttttgagtttcatcccctttgatccatttggccggttttggcccttatataaatggatttatccattaaa

SEQ ID NO: 128439 - DNA, 1000 bp, Homo Sapiens
  misc_feature (798)..(816): n is a, c, g, or t
  misc_feature (897)..(949): n is a, c, g, or t
gctggaccggtccggattcccgggatatcgtcgaccacgcgtccggagcgccaggggttccagctgcacgtcccaggctctccagcgcgcggcaggccggggcgggacgaggagagctgcggggacaacgcctgtggctgggtccggaggtgcgggtgcggcgcgggacaagcgggcagcatgctcagggcggtcgggagcctactgcgccttggccgcgggctaacagtccgctgcggccccggggcgcctctcgaggccacgcgacggcccgcaccggctcttccgccccggggtctcccctgctactccagcggcggggcccccagcaattctgggccccaaggtcacggggagattcaccgagtccccacgcagcgcaggccttcgcagttcgacaagaaaatcctgctgtggacagggcgtttcaaatcgatggaggagatcccgcctcggatcccgccagaaatgatagacaccgcaagaaacaaagctcgagtgaaagcttgttacataatgattggactcacaattatcgcctgctttgctgtgatagtgtcagccaaaagggctgtagaacgacatgaatccttaacaagttggaacttggcaaagaaagctaagtggcgtgaagaagctgcattggctgcacaggctaaagctaaatgatattctaagtgacaaagtgttcacctgaataccatccctgtcatcagcaacagtagaagatgggaaaaatagaatatttaccaaaatatctgccatggttttattttggtaacaagaagcacaatgtcnnnnnnnnnnnnnnnnnnnagtaaacttttactgaagtataccatgcattcaaaaagtggacaaaactgtatacagtctgatagatatttatgtcgtgannnnnnnnnnnnnnnnnnnnnnnnnnnnnnnnnnnnnnnnnnnnnnnnnnnnncagcctcattcctgccttttctcagccattacctcccaaacatagcagttt

SEQ ID NO: 128440 - DNA, 977 bp, Homo Sapiens
  misc_feature (19)..(19): n is a, c, g, or t
  misc_feature (105)..(105): n is a, c, g, or t
  misc_feature (126)..(126): n is a, c, g, or t
  misc_feature (167)..(167): n is a, c, g, or t
accacacttgttacttggnggaaaggccaaattggtatttgttcccaacgtaagtgcttaacccggaacatggacatggacggagacatgaacttgtccttgggnagcaaacagagacacctgggnagaggaatagacacagccagtgcgtgaactgcttcctcaanacaacgcctgacaaacaaatatacacacattttttaattgaggaaccaaaggagaagaggaaaggagagaaaatcttaaaactcagccctgggctgaggaggcgccacacagcactgagtctgccacagagggcgatggggtgactggccaggaactcctagagcagcttctggtaacagtgggtgcaaagcaatgaaagacatactggccactggaaacatgtttcttcttactttgggggtggggcagaggcaggaaatacaaaagcccctgcctcgtgggcacagcgccaccaacactacactctgagtatctccaggcagttgttgtagcagatggcgatccagtcgggctgagttgatgcccactgcacattgttgatctctccttcagctgtgtaggccaggatagggtcctcaatggctcggggcatttgctggatgtcccagatgagagcctggtggtcatccgctgcagtgcagatgtggcaggatgaatgtggggcccaagcaatgccattgacacatgctcgatggttgtttaacctggcgacaggtgtgcagggaacccggacatctagaatcaccacctccattccatccatggccatggtggccaggtagttagggtcctgcttgttccagcagaggcgaagcagtgggtgatgctgtgggtcttccgtaaatgatggtgctgtgttctagatggcggaggtcaacatccgcaccgagcatcagcaccacagaggcaacatgtccctgcaccccggccggctaatgcatatcaagactcttgtcatgggcatcagt

SEQ ID NO: 128441 - DNA, 1361 bp, Homo Sapiens
tttttacatgttcaagttttattacaaagtatgatgggcagaaaatacggtacttcttatacaggaggtttgggggtggggcagaggcaggaaatacaaaagcccctgcctcgtgggcacagcgccaccaacactacactctgagtatctccaggcagttgttgtagcagatggcgatccagtcgggctgagttgatgcccactgcacattgttgatctctccttcagctgtgtaggccaggatagggtcctcaatggctcggggcatttgctggatgtcccagatgagagcctggtggtcatccgctgcagtgcagatgtggcaggatgaatgtggggcccaagcaatgccattgacacatgctcgatggttgtttaacctggcgacaggtgtgcagggaacccggacatctagaatcaccacctccattccatccatggccatggtggccaggtagttagggtcctgcttgttccagcagaggcgaagcagtgggtgatgctgtgggtcttcgtaaatgatggtgctgtgttctagatggcggaggtcaaacatccgcaccgagccatcagcacccacagaggcaaacatgtccctgccacccccggcccggctaaatgcaatatcatagacctctttgtcatgggcgatcagctgggtcttcacgtggccagacacgagattcactcgccctaacacctgccctgtctccagcccccagatggtgcatgtcgtatcaatgcttgaggtacctaaaagataaggatccacctcattccagtcaaaggaggtcaggggagcacagaaatcagagttcttattattgtttagcaaacactccagcctggtctctgtttcaccaaccctccacacacggagatagtcaccgcttgttgccagtaggtctggatagacgccttttgtgtcagggatccacatgagctttgtggtggggtatgggtggtcaaaggtgtttctgcaaataaactctgaactctcctcatctaaaccaacaagctgaaccttgttgttgtactcctccacgaagctgcccagcgccaagcgaaagcgcttatcgggccgcacactccagttcatcgcgtagactgtccagggcgcttcatacttgtagatctccttccgtttgccgtgcagggacatggtggccacggggccgcagtacgggccgggtcaacagtgggctgcggcgggcggggagccgagcctgagatctatgggtccgaagggaggagaggagggggcgggcaggaacggcctaacccggaagcggggatgcggcgacaaacaacgacgacggccgagcccgacccctagtttcaaaccagcttgggaacggacg

SEQ ID NO: 128442 - DNA, 2564 bp, Homo Sapiens
  misc_feature (491)..(569): n is a, c, g, or t
  misc_feature (590)..(657): n is a, c, g, or t
tgcgccccgccgcttttctcccaccctggggggagaaaataatttttcgcgacaagcgggcgaaaaaaagggggtatattacggggcggtgggatgtacacggggtttctccaaccgcgcagtttggggagagagcgttttccaacgtcgccgcgcgcaaatttttttataatagaagtttccacaacactttttttgcgcaaagtaatgttcccgggggggcgagggcgtaatatatttatttaaatgaggcctcgcgtttggggccccctctcttgtgaaaggaccccggtagagggcccctccggaaaccccccctttggggagtttttttcagaagaaccgctggggtttgcccccgcgggggggtttttatttattgggggggaaatcccacccccttttttcttgggccccgggtttttctttgggaaaaacccgatataggccccgtttcctcttttccccttgggggggccccggcgcccccnnnnnnnnnnnnnnnnnnnnnnnnnnnnnnnnnnnnnnnnnnnnnnnnnnnnnnnnnnnnnnnnnnnnnnnnnnnnnnntgatagagaagttggtggggnnnnnnnnnnnnnnnnnnnnnnnnnnnnnnnnnnnnnnnnnnnnnnnnnnnnnnnnnnnnnnnnnnnngttacatgttcaagttttattacaaagtatgatgggcagaaaatacggtacttcttatacaggaggctgaaacagaatgaaagggtgaaaattaggtttaatttacttaggaaacaagaaatagaaagtcatagctataacactccactttcaggtgcccatgaagtagccttcaatggagattccccatagttgtttcacagcacagtgttaaaattttattacaagccctgtgtacaatcagtcctgtgaaaatatttataaaagaaaaatattacagtacagttctgcaaggggcagcttcctctacacctgaccgtggatgccacaaaacctataatatagagggaaagtttaaatatataacaagaatggaagttcagacatactaggctaaaggacacagaaatggatcagttagagcttaacatttcagagcaagaaatctccattttctacatagaggtttatacaatcatgctacaaattcactctgggtggggtggggaaggaaggtcactgacaagaggggtagtaaaatacacaggaaccaaagcaagtgagtcagactcaactaaatcgattcaaagcttcagctcaacaattttcataacacatggtataccacaatcaacccaaggtgagaacatttcttttaaatagtagatatcacatgttcataatcactgggttgtcccaaaggtgggtgcctataaactttccagctgttacatagactgtcaacatctttcttcttgagtttaaactttctttagcttatttgtttctcgttggatataccagtccaagcctctttgggaaggcacctgcatgtttccatattttaaaaatgacatccagaaagtagcctgagaggacctggcccatcccatgtggccacacatttgactttgaccattagcagcagtgacactgtgagagggggagaaggtgcaggtgggtgaagtgggcaagggtctgcaacacgagacgctctcaggagctggcccagccagggcctggcccagggttcacagtgactttgctctgctccgccctcttccctgggaaaaccaatctaagtatcaagcatgatcttccttcttcgtcctggagtacacacagtaaagggaaaagtctgctgttgaggcttctacttcaatggtctcccctaccccaagccaggaatgaaaggggctgccatattctcaaagtggggaaggcagagggacagtactgggctgccctcccacgtgtggtaaaccctgcagctgctacatgtcttcacagcccaggaattcaaggcccacggtggcagcaggaagaaacagtggaaaagcacaggggaagagaaaagagaaaaaggagggggaaagtctgcataactgtcataacctctgcttctcctgctctgtaacaaacccacaaccaggaagagtcatggtctggaacaatcatgggaccccaaacgcctgtaggttttttaccaccaaacatcacccatggctgctctaagctgtcattttgttcccacagttacctagcatcacggatgcccaatttatggcccaggaaggctgacccaggctaagggcagtctcactccacagccatgcatggacagtctgaatgtttccctaccccagaccttcactgacctctactatttcctcctctgatataaagaaaacactttaattttctcctgcatcctacatctcctcctaaaattttggccctaattgtcatcagaatcctacaggttttgatgacaattagggccaaaatttcgtaaggattctgaattttttgtttcttcctgaatcttagccagttctctcagagccaatcctggatttataaggatttcaccctcgtgccgattcaacccccgccctacctagcct

SEQ ID NO: 128443 - DNA, 1574 bp, Homo Sapiens
  misc_feature (548)..(563): n is a, c, g, or t
  misc_feature (1180)..(1180): n is a, c, g, or t
  misc_feature (1191)..(1412): n is a, c, g, or t
cccatcccctctacctgcagacagggtcggaggtgttagcgagcctttggtgctagaagcctgcggggtcatgtgctaagaggacagtctttctccgggagcccgctcactcattctgagttaggaaaagacacaagaccttccccacatcctgtctgcctgggttagggaggcctttgccttgttacctagaggcggagggactgaagccattgcgttccttccctgctagaaacacaggaagaagttgaggactgtctgccttccctcgtccctttacctggccagataactccagccgctgaatacagtgttaggactgggggctcctgagatgagagtttgagattcagggaatgagaccacctctcatttcttccagcatgatcgcgccctgctcccgtgccaccgtagtccctggcagacaggcagggctctgcccagggcagcctgccacttgcatagctttcggttggtttggtgttctgtttatttaataagtgggcaggttgcaagcgttgcacagaaattctgagattttactgccnnnnnnnnnnnnnnnnaagaaagttgtttgttggactccataagtgaatttcaagcagtgaggattttgtggtgcctgagatggccgagggcacagggagtgagctgtatgtgtgaggaatttggtgagcgagataaaagtccacggtgtcaacccctaaaacatgggtgaccgtacatttttatacatctccactctacggccttttacaggctttccgattttacaggcctttccaagtttccattctccttagagagagaactgtgcttccaaacagaaatcaggagtgaccacaaagcctgaaaacactttgccacccagcaaagaactggcacaattggtttgggtctgcattgccatagtgcccgagttaaaactgcaggccactctgccttgcaaacctcacgtggcctctgatttcattgtgggtgcatccacaggtggcccgagctgttctttcagctgctccaaggattgagacccaagtcatcatgaaaaaggccccagtacagtcttaatgcgataattccactagctaagacgtcgagtgccaagaccagccttccagccgaggtttggacaaagtctcaggttcccgtgactcagggtaaggtgctggggctcctcgtngcgaattcctnnnnnnnnnnnnnnnnnnnnnnnnnnnnnnnnnnnnnnnnnnnnnnnnnnnnnnnnnnnnnnnnnnnnnnnnnnnnnnnnnnnnnnnnnnnnnnnnnnnnnnnnnnnnnnnnnnnnnnnnnnnnnnnnnnnnnnnnnnnnnnnnnnnnnnnnnnnnnnnnnnnnnnnnnnnnnnnnnnnnnnnnnnnnnnnnnnnnnnnnnnnnnnnnnnnnnnnnnnnnnntgatcggcacgcgcgggaaggcgttgcgtttgggcgtctccgctctcgtcatgaccgctcgccggtcgtcggtgcgggacgtacaccaccaagcggatcggttcacgatcaggaaccagaaacatgggcaagcataatgcagactgtaagcgcggtggtttc

SEQ ID NO: 128444 - DNA, 1001 bp, Homo Sapiens
  misc_feature (178)..(194): n is a, c, g, or t
ttttttcttggggctctttgagtatctttttaatgacttaaacaccagcacggagactcgccatgtaaacggcctcatttctgtgctctgtgctttgggagggacagggacaccatttcccacctcggctgagttaaaacctgtcttgtaaattaataaataatttcctaacacggcnnnnnnnnnnnnnnnnntccaaacgagacctagtttccatccagggacaggatatttctggacacccccggtcactgctcctcctaagggcctggccgtggctactgcagggaggatgcagtgagaatggcttccctgctgctgtttgctgctgtctacgctggccaagaacctgctcccgtctgcctgggctgatggagtctcgctcttgacaaaaatcttgctggggcaggtcctctggcagccccagcaccttaccctgagtcacgggaacctgagactttgtccaaacctcggctggaaggctggtcttggcactcgacgtcttagctagtggatttatcgcattaagactgtacttgggcctttttcatgatgacttgggtctcaatccttggagcagctgaaagaacagctcgggccacctgtggatgcacccacaatgaaatcagaggccacgtgaggtttgcaaggcagagtggcctgcagttttaactcgggcactatggcaatgcagacccaaaccaattgtgccagttctttgctgggtggcaaagtgttttcaggctttgtggtcactctggatttctgtttggaagcacagttctctctcttaggagaatggaaccttggaatgcctgtaaatcggaaagctgtaaaaggcgtaaagtggagatttaaaaaatgtacggtcaccatgttttaggggttgccacgtggactttatctccttacaaattctcacacataagtacccttgtgcctcggcatctaggacacaaatctcacgctgaaatcattttggttccacaacactttctaat

SEQ ID NO: 128445 - DNA, 1063 bp, Homo Sapiens
  misc_feature (177)..(191): n is a, c, g, or t
aggtaccggtccaccccctggttttagggggttgacccccgtgggcttttatttcgcttcccccaatttcttcaccacatacagttcaactcccctgtgccctcggccatctcaggcaccacaaaatccttccctgctgaaaattcacttagggagtccaaccaaacaacttttttnnnnnnnnnnnnnnnggcagtaaaatctcagaatttctgtgcaacgcttgcaacctgcccacttattaaataaacagaacaccaaaccaaccgaaagctatgcaagtggcaggctgccctgggcagagccctgcctgtcagccagggactacggtggcacgggagcagggcgcgatcatgctggaagaaatgagaggtggtctcattgcctgaatctcagactctcatctcaggatgcccccaggtcctatacactgtatgtcagcggtctggaggttatctggtccaggtaaagggacgagggaaggcagaccggtcctcaacttcttcctgtgtttctagcagggaaggaacgcaatggtcttcagtccctccgcctctaggtaacaaggcaaaggcctccctaacccaggcagacaggatgtggggaaggtcttgtgtcttttcctaactcagaatgagtgagcgggctcccggagaaagactgtcctcttagcacatgaccccgcaggcttctagcaccaaaggctcgctaacacctccgaccctgtctgcaggtagaggggatgggaggcagaacccttctcctgattggtgcctgaaggaggcaagaacgagcatctgctatgccgcagccggatttcccccatctcagcaggagaggggagaggtgagggtgcaggcgttctgggcaggtcagtgcagttcgatgaacgcctccagatcttccgggatgaagcccttgtaagggatcttgttcttatccagggcccggtccgcaaggcactgcagggtcacgtagttgaagggctgcatggtacccatggcctcgtgccgaattcgccacccaggcctcgctaccttagaaccgttagagttactgccga

SEQ ID NO: 128446 - DNA, 997 bp, Homo Sapiens
  misc_feature (952)..(952): n is a, c, g, or t
tttttaaggtttctgtaaacttttattttacacttatgggccactgccaactcagggccttggcttctggctcatttctacaaagttacttgttgaaaagatgtagtaaaggtagaaattggaaatattcctgctagtaaaccacagttacttaccagtccataaataaaatgcacgttgacgccttcagaaatctatgactttctgaatttataaaatgcatttttttcatatgaaagaaacaaagcatcttgaaaaaaagacaattgtctaaacaaaatggtgtgaacctatggcttatattataggcatatatcactgcatatgatgcgccagtggaataatagatttgactgctaacacacaaaagggcagtacttcttagccttgcaattcaagcaactggaacctgatgttattttacctgtcctaaaatatggcccaacaaattatcttacctaatttattatcagcaatctgtctggcgaagtctgaaagaaatatcagacaacctggcaatttcatcaccacattgaattgaggataagaacaatataatacttcaaagtgtaatgacttttgctccagcacaggaaacaatatgaccccaaatactgctttatcaaaccaaccaaccaaacaaaaccctatattgctagtccacagctcatctgctttcacgctgcctcttatatcccatttgtaatgggaacatgattacaagattatgaatgcagaaggttgctacaggttaaaatggactgaggcaggttgtcatgatgaacaatcacctagattttactcagactatgcactttggcacaactgcggggcacaattattagattagattaaatccatacataccatcacacacatgcatatatcacacacacaaatatattccacagagacagtctagaaaaatgggctaaaagaaatttacaattgnttatatatatacacacacacactagtaaaagattttctgctgtac

SEQ ID NO: 128447 - DNA, 570 bp, Homo Sapiens
tttgcaaaaaaccatccatttatacagtttgtggttcagaagcaacaatatgcacaacggtggaacagtctgtgctgtccccaccccacctgaactcgccagttcctgtctcccaaggggcacagaacacaggccccctgcctggcaggacccgacttagttacaggcccctgggaggggcgaagcccttaggggtcgaggccaggagggaggaggaccagcacctgatgcccctgggggcccgctgggtcatggaactgtgtgtgtggagggtggggggtcagcccaccacgggccatttctccccaaggctaagggcgggggagcaagtaaagctgaggagagggcttcatgggacagggttcccatcccctgctgggagggtgttcctggataccccacaaggcactacagatgcagactgtaggcgagcacccccatctttggcccccgattgcctggctctccccctgccccagctcccactgtggtttggcgggggagaacagaaggggctgggccccccactccctcagcagacaccagccaggaacccacccggcgggccga

SEQ ID NO: 128448 - DNA, 2039 bp, Homo Sapiens
cggcgcccccgtggaaggatcaggtttaatggtcactatgagggtatcgtacatcgttccaagcccggcccccgccccagccctccctcagctgggaacacagccaggtgccctcagacccctggctctgcacaaggggggcctgccccctcgccccagctatatacacgacagcccatcctgctggccgtggacaaaagctgggagctcctgtgcccagtcaggagcccctacagtccaccagctgcgcggccgggtccaggggcccactgtggtgccagcgagtttctcaaaacccagggcccagccccagctgggcccctgccaagccccaggcctgtgtgctgggatggagcctccacactgaggctggtaaaagctgaactcaacagcagcaatgagagtgctgggtgggcttggggggatggggagcaggccccacccagagcctcctctgaaggaggggacgctgcgcccttccttcctgctgcccagactgcccctaccgggtccggcgccggctgaggtctaagtaagcagggatggggggtggcaagaggagtgtaagtgaaagcacagacagtcggagactcggccagtgtagacagacccagagactcggccagtgtagacagagccaggctgggcagcccggcgacgctggccccacgcacacgggccaccctggtgctggtgatcgatacggcagggagggggtgggcagggagggtcctgaacacatgtgggctgctgggctgctgggccggggtgcctacactgtaactagcagcatagtgcttaactagttaacaagaaatgctgcttccctttgaattgtttcgggggtgtagaaattgcacttatttctatgaaccccatggagggatgcccacagctgagcctccaggcgaggcatggcaggtcagtgcctggccgctgagcatccacgggccacagggcgggatcctcccggcccccagggactgcagcctctgcggccacgggtgcagcgaggaccggaacccacagggggaacctgagcaacgtctgaggtgccctgaagtggctccaggcgagaccggagccacacagtcccggggagcacgaggcggcccagccccaggtcccggtgcagagggagtggcctgatggtgactgggcggaggcctctgcccctcacaggacgtcgtcaaagtccagcagcttcgagtgctggcggctcttccacaggcgatacaaccggaagtcaaagtacgtctcgatcatctgcttcccttgggctgagagctccaggggtgactcgaaggtgaccctataaggagtcatgagggtcctgaggttctggaacagcttctctccattggggttccccagaatgtagcagcccatgatgtggatgacgttcggctctgggttcactttgctcatcaggcggctcagccgcttccagaagtgaatcatgtcctcttccttctccactttggcaaaggtggccaccttgttcttgaggagatagaggtgtccaggacctccctggcagaaaatcagcattttccagatcttggctcccttgtggtagacgttcagcttcctctctatctcctcaaggatgtcctcgaaggttgcgtgctcatggtcgtagaggatggggatgatggaggggtcatcccggcggatgatagtggggatgtactcagccttgggcaccttggaggaaatgagcatgacctttggtggcacgaagccttcggtgtcgcaggccacagcctccaggcccttctcagtgtcccagtccaggtcctcgaaggcctcgtccagcgtgcagtgggagctctgcaggtcactgctgtctcgggagtcgtgggaagtgtcggctttcatgggggtggggtcgctccaggaccggctgaagctccgctcgcgccgctcagcgaacgtctgggccttcaccctccggctgccgaccatgcgcaggtgtttgcggaagttcctctggattacagcctcgtgccgaaatcgccacccaggcctcgcttcct

SEQ ID NO: 128449 - DNA, 1538 bp, Homo Sapiens
tgggtgttagacatcaactctacatttattgcagtcctttaagtctatgacggcggggcagccgctgacagcatgcagagcaagttaggaaaaaccgaggccctgtgggaacagcaacgcgggctccagccaggctctcgtcctcgcagcctcccacaagacctggggctcagggcagccgcttccccacccagcacagcagcagaggggccctagagcccccacagaaaggactgtcccagcctcgggagcaagagatggctccctccggacgggcctcatccaactccgccctggagtgtggctggaaggaagggacagagaaagaagggacagaggaaaggggctgtcccagcccaagaaggcagttccactgggaagtcagtcaggtccggcggcagcgcttcctctggcagggccgaggctcgcgactgctggggtgggcggaggtcgctgcctggggatcggacactggagccttgcggcggctgcaactcatgctcaggacccagcccagcttgttgtgtagcacctgcttgaggcccggcggcagcggcagaccctccagcgtgtctcccgagtctggccgcagctggcgcaggcggtggcagcacaggtactggagggaagtggcgctggcacaggagcgggtgaccttcatgctgctccgggccgccgtggagcacaccatcgggtagaatctcttgttctgcagcttggtggctgccacacctatacacttcctgttcttgaaaaaggtgagtgtgccgtgccaggtgtccaggtgcacgccaatgatggagccctggccgaaccgcgacgagaagctggtcttgtcgcccttgtggtggaggaggcccgtgtaggagaggccccagctgtcctcatccctgcccagcaggctgcagaacgtgtggcggtatttgtccaggtccacatccgacgtcccgatgcccaccatcatgtcggtgccgtagacgggagaggtcatcttgatctcccagaagtgctggccctcccccagctccttggtgccccggatggccgctgtgccgcagctgtactccatgtggaagctgaccttacggttgtcacagctcagcagggtggctgatgacttatttaagtcatcccagacccagtcgaaatactcgtcttcctctccgcagcggcagtccctgccccggtgggccgagtgcaggctgctacagaaggaggcctcgctctgcccagcacagtcacagaaggactcgccggtcacgggcaccgcactggggatggatggcggcagcgtggagtactcggggtcggagtccgagtcgctgtgctgcccatcagagtcgtagccccagttagtggagcctgctagagccacggcccgggcatctgcgtctcggcgggctgcactcaggacgaagtgccaggccctgctgttccgggggcgtctggccatggtggaaagaatctgcagcccccgctgcgcgctccgccggcccggccctgacccactttccgccccggagcgagacgtaacatcc

SEQ ID NO: 128450 - DNA, 524 bp, Homo Sapiens
gtctgggtggcgtttcacaggatctacctgggttttattgagctgctcagatcctggggtgaggtacgggctcctgaagcgttctggagccctggctgggcaccggtgcggcccctgcagtccccactttgagtgggtccgtggcccagcctggaagctcagggctgggagtgctgtgagtcttcctttgcccagagcctgtgttttcttctagattctttccaccatggccagacgcccccggaacagcagggcctggcacttcgtcctgagtgcagcccgccgagacgcagatgcccgggccgtggctctagcaggctccactaactggggctacgactctgatgggcaggtaggttccagcgggcgaggcggacgtggctggcctaaggtgtggagatgccctaggcaggcaggcagacattacctgaacacggaatcagtcggagaaaaagatgcttctgaggctagaggaccagtccaaacctgggcctgtctcctggatcaccgcattcagtaagact

SEQ ID NO: 128451 - DNA, 921 bp, Homo Sapiens
cgtggggcaaccaagggtcccagtgagcccgggagctcccaggctcggcccgcccccaccctgggctcaggcaacccgtgtaggagaggccccaacggtcctcatccctgcccagcagcctgcagaacgtgttgcggtattttgtccaggtccacatccgacgtcccgatgcccacccatctaggaacaggggccaggcagagggcgcggggctgggctgccggagccaggttcccccagaagcaccctgggccgaagcaacttaccatgtcggtgccgtagacgggagaggtcatcttgatctcccagaagtgctggccctcccccagctccttggtgccccggatggccgctgtgccgcagctgtactccatgtggaagctgaccttacggttgtcacagctcagcagggtggctgatgacttatttaagtcatcccagacccagtcgaaatctgcaagagaggcccaggctggggcagccctgagagctccatggggctctgccctgcccacccccaggcccgcccgcagtgcagtcccagcaggggctgggccccacgctcacactcgtcttcctctccgcagcggcagtccctgccccggtgggccgagtgcaggctgctacagaaggaggcctcgctctgcccagcacagtcacagaaggactcgccggtcacgggcaccgcactggggatggatggcggcagcgtggagtactcggggtcggagtccgagtcgctgtgctgcccatcagagtcgtagccccagttagtggagcctgctagagccacggcccgggcatctgcgtctcggcgggctgcactcaggacgaagtgccaggccctgctgttccgggggcgtctggccatggtggaaagaatctgcagcccccgctgcgcgctccgccggcccggcctga

SEQ ID NO: 128452 - DNA, 919 bp, Homo Sapiens
ggaccggtccggaattcccgggatgctccggggcggaaagtgggtcagggccgggccggcggagcgcgcagcgggggctgcagattctttccaccatggccagacgcccccggaacagcagggcctggcacttcgtcctgagtgcagcccgccgagacgcagatgcccgggccgtggctctagcaggctccactaactggggctacgactctgatgggcagcacagcgactcggactccgaccccgagtactccacgctgccgccatccatccccagtgcggtgcccgtgaccggcgagtccttctgtgactgtgctgggcagagcgaggcctccttctgtagcagcctgcactcggcccaccggggcagggactgccgctgcggagaggaagacgagtgtgagcgtggggcccagcccctgctgggactgcactgcgggcgggcctgggggtgggcagggcagagccccatggagctctcagggctgccccagcctgggcctctcttgcagatttcgactgggtctgggatgacttaaataagtcatcagccaccctgctgagctgtgacaaccgtaaggtcagcttccacatggagtacagctgcggcacagcggccatccggggcaccaaggagctgggggagggccagcacttctgggagatcaagatgacctctcccgtctacggcaccgacatgatggtgggcatcgggacgtcggatgtggacctggacaaataccgccacacgttctgcagcctgctgggcagggatgaggacagctgggggcctctcctacacgggcctcctccaccacaagggcgacaagaccagcttctcgtcgcggttcggccagggctccatcattggccgtgcacctggacccctggcacggcacactcacctttttcatgaaca

SEQ ID NO: 128453 - DNA, 958 bp, Homo Sapiens
tttttttgcacttccgtgtttaataagccacatcctcagttgagcctggggtgaaatgtgagatcctgactctgtgcagtagtattagtgggtgggccaggggctgtgaataacatcatcctcagtacagctgcaattccagggcccctctaccacaaagatggcttaagcaaaggcagccagatggaagtatgatatccaacaggaaggaagtaggcaggggtcactaaagtggctggtggcccagcagatggaaacagaagtatggccccgagggaaggaggcaggtccagggctacagtgctttcaggtactggtgtttctataggggcatttgccacccacatctttggaaactcccctggcctattgtgacatggcagggctgcctggttcttgaaggtagagaagatgctagtggggaggagctgagcctgtgacgtgcatttgtaccaggtccagatgggaaatgatgaggctgcaggctatgatggggccactgtgcactaaatgcttggtaccatcctatgaggggacaaggtgcagacccacattcccataggcacttaagcagtggtggataggaggctaccccaggggttcagctgtccttcaggtaatcagcttacccccaagaaggactgagaggaatatgagtaggacagttggcagatgacaatttcctttgcctggctcacgggagaagtctggttgggccaggtatgtgggtgtttggtgcctccatctggatagtgccagcaggtacaccaccctgccttatacctgaatggccagctaaataaccatagagcttaaggtctggctcaggtcaggattccctggctccttgccaacaaagcaaaaccagagattcagaaaactcagggcctaggagaaaacagacctgccttacaaaccccagagctggtcaacctcaggcttcctctcaggaaaaaaa

SEQ ID NO: 128454 - DNA, 846 bp, Homo Sapiens
caaggaggaagctttatttgggaagagtgcggttctgctcggccctgatcagctctgccctgcccaccccatctcagccaggcggctttacttcttcctgatcttcaggtctttcttcttcctgatttccttggccagctccccaatcaatctccagtactcattgaacttgagctccgagtcctgattcacatccaagctcttcatcttctcatcaagagagcccacatccttgagcagatggggcaactgctgggtaaccagctctttgaactcgttgacgctgaggctatccttccggccctcctgccttgcaaaggtgaagaaggtggtgaccacggtctcaatggactcctctagctctgtcagtggttctgctgccattaggaccctgaggccaaagctgatgtcctcaaggggctagctgacctttgtcagggctgacctgattgaagtcagatggctttcctgaagaggtggcacttgaaccatggatttccattggaagattatctgggtaaatgcaagacatttttggaggaggtaacagcccctccgatgtctgtctcctctgggatttggaagtgggtggagacgtgaagactgttcactcttcactccccttattggggaagtgtcttatttagaaagaggtcaaggtgcattacatcttcctacttgaggaatgctcaaggtccagaaatgtgggggttcaaggttccagttggaagtcgaggagacatcagcttctcaactctgcgcaggcgtagctcaaatctttcccgccctctagtcgtgcgcggatctgacgcctgacgtaattgcgtagacgccattttagccggt

SEQ ID NO: 128455 - DNA, 619 bp, Homo Sapiens
  misc_feature (270)..(304): n is a, c, g, or t
  misc_feature (343)..(343): n is a, c, g, or t
  misc_feature (360)..(360): n is a, c, g, or t
  misc_feature (388)..(388): n is a, c, g, or t
accggctaaaatggcgtctacgcaattacgtcaggcgtcagatccgcgcacgactagagggcgggaaagatttgagctacgcctgcgcagagttgagaagctgatgtctcctcgacttccaactggaaccttgaacccccacatttctggaccttgagcattcctcaagtaggaagatatcccagaggagacagacatcggatggctggtgagagagaagcctttaatgaaagatgagttgcaggcttggaccgctactcttgcgccctnnnnnnnnnnnnnnnnnnnnnnnnnnnnnnnnnnnttatggagagggataagtggggtgaggtggaagcagggngaagaggcaggtcttgngagggtggagaggaagggcgctgcaatngtggctgtctgctcaactgttctcccagaagaaattgttacaggccactgtgagagcagccacaagcaccacatactcctggaagtccacctccccgtctccattctcgtctagctccttcatcaccttgtccacagcatccacatccttctgggcatccaggaagccagagagctccgtcttgcagcagctctttcagctccttcttgctcagcttgtacttgtccccct

SEQ ID NO: 128456 - DNA, 901 bp, Homo Sapiens
ggcagcttcgtgtctgcaccgggctgggcaactcttttttccgcccccaaaggacatatagctggtttccaatggttgccgatgatgtggtgaatgttcttggggatggtggtggggctggtcatttctggcgtggtccacgtcctgttttcaggattcaggacttgtagacaatttcgatttcctgattggttggcacctccaaatacccagatacggtcaggtgtgcaggagggaatgaagctagcatgttcataccggggcaagaggcccttgcaggtatctaagtcccactggtattttcccagatccatggtgtgcacgtctgagaagcttctgtttggatttgctcccccaacaatgaagaccttccctctcttggcattaccaactgggggtaaatatgaacagctgtggccaactcgagcacaggggctgtctccagggacagtcaaggtgtaccatgttgctttcctgggcttgtctccaggttccaagactggcagttgcttcatggtgtcctgcggcctaggccactgacagctgtccccaaagtccagagctcagttaggctggcttcacgtgggcgggacctcccgcagcagccgccgctaccagcccagcaaatctcatccccacgtggcagttctaggggataggagacggggtcgggaaagaacaggctgattcggtcaaagtggccgggacggagccagggaaggcccttccccgttttttgcacccggcttgggcccactcccctaaaagattcagactccctgcccgagactgtgatagacccggtatccggggaccctcgcccctaccctccagccccggactgccctcgtgccgaattcgccacccaggcctcgctaccttaggaccgttatagtactgg

SEQ ID NO: 128457 - DNA, 2108 bp, Homo Sapiens
  misc_feature (1366)..(1394): n is a, c, g, or t
  misc_feature (1401)..(1419): n is a, c, g, or t
ggggagtcacggctcgcgactggcctaagtcccgcagaactgccacgtggggatgagatttgctgggctggtagcggcggctgctgcgggaggtcccgcccacgtgaagccagcctaactgagctctggactttggggacagctgtcagtggcctaggccgcaggacaccatgaagcaactgccagtcttggaacctggagacaagcccaggaaagcaacatggtacaccttgactgtccctggagacagcccctgtgctcgagttggccacagctgttcatatttacccccagttggtaatgccaagagagggaaggtcttcattgttgggggagcaaatccaaacagaagcttctcagacgtgcacaccatggatctgggaaaacaccagtgggacttagatacctgcaagggcctcttgccccggtatgaacatgctagcttcattccctcctgcacacctgaccgtatctgggtatttggaggtgccaaccaatcaggaaatcgaaattgtctacaagtcctgaatcctgaaaccaggacgtggaccacgccagaagtgaccagccccccaccatccccaagaacattccacacatcatcggcagccattggaaaccagctatatgtctttgggggcggagagagaggtgcccagcccgtgcaggacacgaagctgcatgtgtttgacgcaaacactctgacctggtcacagccagagacacttggaaatcctccatctccccggcatggtcatgtgatggtggcagcagggacaaagctcttcatccacggaggcttggcgggggacagattctatgatgacctccactgcattgatataagtgacatgaaatggcagaagctaaatcccactggggctgctccagcaggctgtgctgcccactcagctgtggccatgggaaaacatgtgtacatctttggtggaatgactcctgcaggagcactggacacaatgtaccagtatcacacagaagagcagcattggaccttgcttaaatttgatactcttctaccccctggacgattggaccattccatgtgtatcattccatggccagtgacgtgtgcttctgagaaagaagattccaactctctcactctgaaccatgaagctgagaaagaggattcagctgacaaagtaatgagccacagtggtgactcacatgaggaaagccagactgctacactgctctgtttggtgtttggtgggatgaatacagaaggggaaatctatgacgattgtattgtgactgtagtggactaataaaacccacatttttattacctgtcagttactttcagaatagttaagtaaaccattagctgttttatccctccaannnnnnnnnnnnnnnnnnnnnnnnnnnnnctcgagnnnnnnnnnnnnnnnnnnngtgtttcaaggaggaagctttatttgggaagagtgcggttctgctcggccctgatcagctctgccctgcccaccccatctcagccaggcggctttacttcttcctgatcttcaggtctttcttcttcctgatttccttggccagctccccaatcaatctccagtactcattgaacttgagctccgagtcctgattcacatccaagctcttcatcttctcatcaagagagcccacatccttgagcagatggggcaactgctgggtaaccagctctttgaactcgttgacgctgaggctatccttccggccctcctgccttgcaaaggtgaagaaggtggtgaccacggtctcaatggactcctctagctctgtcagtggttctgctgccattaggaccctgaggccaaagctgatgtcctcaaggggctagctgacctttgtcagggctgacccggcaaggagatggggtagagtgagctggagcctcagggctgaggtttataagcagcggggaaggaggagagagctgcttccaagcccggaggtgtcaaatttccgtggtcgattcgggctcaaccagcacagccagccacaggtactgcaaggcccagcttggggtaagacatccagtgtccctcccaggacctccttcccacctctttcccctgcaccatccactgctgcctccc

SEQ ID NO: 128458 - DNA, 628 bp, Homo Sapiens
ctggcccctgcccgcactgtccgcttggttcacgttcgccccgttctggatgagatactcacaggccagaagagaagtagcagctgtggcctggatcactcggtgtggcattatcttgtccccctttgacccagtcgacatcagctccatgtgcaagggcatcagccatggtgttaagaagaggaataatgcagtcagttggaagcagggggaagaggcaggtctgggagggtggagaggaagggcgctgcccaatgtggctgtctgctcaactgttctcccagaagaaattgttacaggccactgtgagagcagccacaagcaccacatactcctggaagtccacctccccgtctccattctcgtctagctccttcatcaccttgtccacagcatccacatccttctgggcatccaggaagccagagagctccgtctgcagcagctctttcagctccttcttgctcagcttgtacttgtccccctctttgcccgagtgggcgtggaacacgttgatgagggtctccatcgccgtctccagctcagagcccattgcagcagtgcacggttggcctgggcctgaggtgggagcaggttctggacagatggccaaggttgcaaatgtccc

SEQ ID NO: 128459 - DNA, 1224 bp, Homo Sapiens
  misc_feature (1032)..(1075): n is a, c, g, or t
ccagaacctgctcccacctcaggcccaggccaaccgtgcactgctgcaatgggctctgagctggagacggcgatggagaccctcatcaacgtgttccacgcccactcgggcaaagagggggacaagtacaagctgagcaagaaggagctgaaagagctgctgcagacggagctctctggcttcctggatgtgaaagagcttatgctgtaggcaacagaagccctcaagacctttgaggaggcctagaagagtcccataattcaatgcagttcctctcgctcatctttgcctcctgctcctcaaccacccccttgcctctgactcagtgctgtacccttccctatacacctccctcttcctctcctcccaccacaggcccagaaggatgtggatgctgtggacaaggtgatgaaggagctagacgagaatggagacggggaggtggacttccaggagtatgtggtgcttgtggctgctctcacagtggcctgtaacaatttcttcagccatccgatgtctgtctcctctgggatctggaagtgggtggagacgtgaagactgttcactctcacctccccttatttggggaagtgtcttatttagaaagaggtcaaggtgcattacatcttcctacttgaggaatgctcaaggtccagaaatgtggggggttcaagggttcccagttggaaagtccagggagaacatccagctttctccaacttctggcgccagggcataaccctcaaaattcttttccccgcccccttcttaggtccgtggcgccggggaatcctggaaccgcccttggaacggttaaaatttggcgctaaaagacccgcgccaatttttttaaggccccggggttccagaaaccaaagccacacctgtggaaaccgttgggcccgcggccccaattttttttgggtgtttttggggaaccccccccgaacccaagggaaacctttggggcgggccccggcccgaaaagtcctcccttctcaaacacggttaaaaaaattccaaggggttctnnnnnnnnnnnnnnnnnnnnnnnnnnnnnnnnnnnnnnnnnnnnagaaacccggtgggggtggggccacaccccccccggggaagagaaacccccttgggcccgctcctgggtattccccttttcgcgggggagagtgtttccgggagaagtcccctctcggggcgccgaaatttccgggtcaccaggggggg

SEQ ID NO: 128460 - DNA, 1030 bp, Homo Sapiens
  misc_feature (1000)..(1000): n is a, c, g, or t
ctgggccggcttcagcctccctcatcttttgcagtcgtagcagggtgacgatgtcagcggttggctgtttccatggcgatggtcagagggtcctgccttcaggagtctcgagcccccagatcagctccccgtttcaggaacaggcaggcgagccccgtgtgggccaagaatggttgcgtggtgcagcgggccccggcccgcactgtccgcttggttcacgttcgccccgttctggaggagaaactcacaggccagaagagaattagcagctgtggcctggatcagcggtgtggcattatcttggcccccattgacccagttgacatcagctccatgggcaagggcatcagccatggtgggaagagatggaggatgcccagacgctcgaaacagtagggccccagggtgcaggcttcccaggtcctcagaggggggctctggcttggatctcaagctccctggccggggcctgatggaaggctttgggggcacaggaggctgcccccttgggcgcccccggccacctcttcgccctcgaatctcaggcagcttggtcaggaacttcttctccacgtatttagcgtgaatccaggcctccttctcctgccgggagcagctgggcctggtttcttcactgccatggcctccacgcgggcctcatagatctggttgatgatgacatttcccagctcacacatgagcttcactagttctggctcccatgagtcaagggtcagagactggactttggagaagtgaacaccaaggctcctgtggatgccggaacactgaatgcagagggtgacaccaaggttgatgctggcccactccggggctggctcccggcagtcgcagcactgggcattgccatccacactctggacctgggccaccacgtgcccgactcccccaggctcccttcccctggccattccaccagagcccagggtggcagcagagcctatggccaggtgtcctgagccctggcctggaccccggnggctgtcatcaaggcgagcctgactgaggc

SEQ ID NO: 128461 - DNA, 780 bp, Homo Sapiens
  misc_feature (228)..(228): n is a, c, g, or t
atgcgggggggaattcccaagaccccttgtgtccagggcccaggggtttccccttgtggaaacccggttatggaccaggtgtccccttacctcactggggggcccccgcggcccaaaagaaaagggtctaagaaaaagtttttccgggggcaaagggaagggccaagaaagatttttgaggggccgaggcggccggccaagttttttgcacgggatgctctttttttnttcgaggaggaagctttattggggaagagtgcggttctgctcggccctgatcagctctgccctgcccaccccatctcagccaggcggctttacttcttcctgatcttcaggtctttcttcttcctgatttccttggccagctccccaatcaatctccagtactcattgaacttgaagctccgagtcctgattcacatccaagctcttcatcttctcatcaagagagcccacatccttgagcagatggggcaactgctgggtaaccagctctttgaactcgttgacgctgaggctatccttccggccctcctgccttgcaaaggtgaagaaggtggtgaccacggtctcaatggactcctctagctctgtcagtggttctgctgccattaggaccctgaggccaaagctgatgtcctcaaggggctagctgacctttgtcagggctgacctctcctcagcggcagcagggcagagtgctgaacccaggaccccacagatcctccccgctcctgtctcccggtgacaagggtcctggaacggggcgtctctccc

SEQ ID NO: 128462 - DNA, 536 bp, Homo Sapiens
gtctcggctctacctggttctctcggctctacctgtctctcggctctaccttgtctccctctgagctggagacggcgatggagaccgctcatcaacgtgttccacgcccactcgggcaaagagggggacaagtacaagctgagcaagaaggagctgaaagagctgctgcagacggagctctctggcttcctggatgtgaaagagcttatgctgtaggcaacagaagccctcaagacctttgaggaggcctagaagagtcccataattcaatgcagttcctctcgctcatctttgcctcctgctcctcaaccacccccttgcctctgactcagtgctgtacccttccctatacacctccctcttcctctcctcccaccacaggcccagaaggatgtggatgctgtggacaaggtgatgaaggagctagacgagaatggagacggggaggtggacttccaggagtatgtggtgcttgtggctgctctcacagtggcctgtaacaattttctgggagaacagttgagcagacaagtaga

SEQ ID NO: 128463 - DNA, 492 bp, Homo Sapiens
cctacagaggagggggtttctggagctgaatctcctgcccccaccaaaactgagatgccgttgcctggtctgctgccccaagctcaacccctgtcctctccctctttccccatatgccccctccaggctgagactgatgtgataacaccaaggcagggaccttctgaaccattcctgcatcttggggctccctgactctccctctctgctccttctctcttccacaggtcagccctgacaaaggtcagctagccccttgaggacatcagctttggcctcagggtcctaatggcagcagaaccactgacagagctagaggagtccattgagaccgtggtcaccaccttcttcacctttgcaaggcaggagggccggaaggatagcctcagcgtcaacgagttcaaagagctggttacccagcagttgccccatctgctcaaggatgtgggctctcttgatgagaagatgaagagcttggatgtgaatcaggac

SEQ ID NO: 128464 - DNA, 790 bp, Homo Sapiens
tcagtgcagtgtgttatcctttaatgaaaagctgggtcaatggagtcaccactctccccaagacccccctgcagcagatagccctcaccatggctacctatgaggcagggcagccctgtggcagccagccctgctgaggggtcagtttgtagtggcctaggagaggcgttcaactcttagacctaggatgtggcagcagcaacaaggccagaggcagctcaactgaggtcagggatggtggaggaggcagacaggaagcatggggctctcctccttcctctccgaatcccagtgtggccaaggccagtgttcaggaacagtacagtctccccaggggcctggagtctcttccagccactctctggaagcccttagtccccaactccctgcagaccggtgtcacagggtcgctggactcggggagcaggctgggtactaccccatgagccttgaggccccgggtctaggaggtggatccagcagggccgaggccagagccaccaggagactgggagtcaccttccactaactctgcttgtcagtcactacaggcacctaagaaggtggcctctcctccgagcttccagggctgcccaggccaggctgaagcaacagcaggccgtggctcctgggttcctatagatctgtgaccttgttttccacagcagctgcaatctgctggagccgatagcccagctgcatcttctgggcccgtgcatcctcctccagggcagtgatgatctggtcatagtacttgttgatgtacttgtagagttcatgcagggccact

SEQ ID NO: 128465 - DNA, 505 bp, Homo Sapiens
  misc_feature (225)..(256): n is a, c, g, or t
gttttccaaatatccatttaatcttgcgtttatcctatgtataaaatcgtaacgtgaggtaggctttcttatccccactgtgcagacggggaaaatgaggctcagaatatgcggtggtggtctgaaggtggaagagctgggttcgaagccaggacggtctggggctgcgctccttccccgggggcagcggcggggcggcgtctagcgctgcagcagcttgccgannnnnnnnnnnnnnnnnnnnnnnnnnnnnnnntggtcgggcagcatggcggcgctgtgctctgcccgcagggccaggcgcgggcacgcggcgcgcaggcggcgcaggccggccgcgctcacgttgcggcagaagtccacgtgcaatgtctgcagcgcgcgcccgtccgccgccacggcagccaacgtgcggttggtgacgcgcgcgcagttctccaggcgcattgcgcgcaggcgtgggcagcagcgcatcaggcgcgccaggcactcgtcggtaacgtgg

SEQ ID NO: 128466 - DNA, 721 bp, Homo Sapiens
  misc_feature (126)..(138): n is a, c, g, or t
  misc_feature (676)..(676): n is a, c, g, or t
caggatccacaaatggtttattgattccaagtcgccacacagggtacattcagcagtcactgcgcctgcagtcggcgacagtttaatgtgaggcaattaccgctacagacatcttgcttcatcttnnnnnnnnnnnnnttttcaaagcatctcacaggccaaagagctaagcaggaccctcactcagacattcaagagtgtttccgaggaaaactcgaggaggaggcagcgtggaacatcttcccatggccacggccccggcacagagctcagatgcctgcgggaagcggcccctccacctgcggaagggaagacgatgcctgttggagccgcacggaagcatccagaactctgaggcctgggggccggctgcggtcagtgcaaggctgctgacatggtgtgacctcttgcaacggggtgggggcagagcgtgcggtgacaagggtcagactggcggctcccactgcagccagaagtgagggagccagcacacgggggtgggcagtggacaggacaggatgcggcaggccccagtaccccccactcaggaatttgcttcaggccaaaagcccagggcagcagggtaaggcgccatcggccaggacctgcacggcaggggcagccccctccactccctggacccgagaccgtctctctcctggaagatggacatcanaactgcatccggaggtgcagtctgcacccagaaggaaggggatct

SEQ ID NO: 128467 - DNA, 1019 bp, Homo Sapiens
  misc_feature (49)..(87): n is a, c, g, or t
  misc_feature (91)..(125): n is a, c, g, or t
  misc_feature (588)..(612): n is a, c, g, or t
tggaaacatagacgtccacttaattaggggcggctaagttgtctagagnnnnnnnnnnnnnnnnnnnnnnnnnnnnnnnnnnnnnnnccgnnnnnnnnnnnnnnnnnnnnnnnnnnnnnnnnnnncagtcgacggtaccggacatatgcccgggaattcggccattacggccggggacctttctatgagctgtgacaaaatttccgaacaattagctaaggattgggaagagggggtggcaaacggggctttctgttttcctgcctcagcatgaaaacatctgatttatgctttatggaagccttacctccaatccccaactgttaagtcccatgaaaccacagttgctctgggctgatggaaacaaaaggaaacagtatgaagagttccttaatcatttttgaaacaaaaatgttaagggattttaaacatatgattatttttaattttatgccttttcagtactaaacacccatttcattgctgattcctgtctaagaagccattcacgtcagcatggcgatagaaagaatgaaaaaaccctgctgaatcatacagtaattttctttaaagcacatagtagttacnnnnnnnnnnnnnnnnnnnnnnnnnttttgtttataactaacacaaggcaggatcttgtgactctaagagtgcgttttgtcatcaagacaaaacagatgcaagatgcatcactgcattacttccatagagttgtaacataatccttaatattagaatatttttctgtcacttagcaaaagtggttcagttcattgccgcgcccatcatgttcttgactatttgatccactttttcgtttatgtcaaccccttccctctctggctaaatacagtggatggcagaaaggctcctttaagtggcaacacacaacggcacaccaccaaaatcttgtggagcgccgggcccatgagaagttctaaacacacgtttaggcacgggaccaaggataacggcacaggaccagacgggcccaggacccggacacacatggc

SEQ ID NO: 128468 - DNA, 907 bp, Homo Sapiens
ttttttttccactttggaaacgtttattctgagcaccgggaaggggggcggcggcgggcgcctcactgggtgttgagcttcttagtgtactcctcgagagcgctcaggaagctgaccttgaagctctccagcacgggcagcaggccttggcggaggtcctcgagcgcgggcttggccttctcgctgagcgtgctcagatgctcggtggccttggcgtggtactcggccagtctggcgccgccgttctccttgagagcctcaaggcgcgcggccaagcgctggcgcagctcgtcgctgtagggggccagatgcgtgcgcagcgcgtccacatgggcgcgcgcgcggtcgcgcatctcctcgcccagtgggctcagcttctcttgcagctcgtgcagcttctggcgcgcgccctcttggagctctgcgcgcagcggctccaccttctggcggtagagctccatctcctcctgccacttcttctggaagtcgtccaggtagggctgcaccttggccttcacctcctccagatccttgctcatctcctgcctcaggccctctgtctccttttccaggttatcccagaactcctgggtcacagggccgagctgttcgcgcagcttgctgaaggtggaggtcacgctgtcccagttgtcaaggagctttaggtttagctgttttcccaaggcggagccttcaaactgggacacatagtctctgccgctgtctttgagcacatccacgtacacagtggccaggtccttcactcgatcccaggggctctgggggggttcatcttgctgccagaaatgccgagcctggctccccgtcaggaagagcacggccaaggtcagcaccgcagctttcatcctgaagggccgtgggggacctccttctcgcagtctctccc

SEQ ID NO: 128469 - DNA, 1527 bp, Homo Sapiens
  misc_feature (111)..(111): n is a, c, g, or t
  misc_feature (1385)..(1385): n is a, c, g, or t
  misc_feature (1403)..(1403): n is a, c, g, or t
  misc_feature (1461)..(1461): n is a, c, g, or t
attcggggggaagcccccttctttttcccagggagtttcccagttccacggggggaaaaccgtgtccaagtcctgtgaactttttggcccaaaggcacccgttccccctgnctgcaggagggcttcggcaggccccaaggcccagggcaccagtggggtctgcccgagccacccaggcaggagtggtgtggcaggcggtggctgggagggaggggacgcccacaggggtcctagaggtggatccacttgttccagttgacctcgtgggggaacacacggcccagccggagggtacagtccaaggtgggctcatagaaagccatggggctctcgtccaggctggagggcacttccacctcttccaccacgggtgtagagaagagcgagacaggccttggctttctcagccagcgcttccggatgcagccgagggactccaggccctggagcaactccagcacggcgacgggctgcaggaccccctggtagtggcgcagcagggagctctcggggatgccaggcctggtcatgatgtggtacagcatggcctccatcatacccttgcatacaggaaggttcaggtggccatccacgacacgccacggccggccgatgaagcagacactctcacagtccctttcccgtgctgcctgggagatgttggcagctccgaaactctctgtgaacccgacaccctcttggtcttcctgtgctgctcccgctgcagcggtgtcttcaagagctgggggtggagatggggcctgggcttctgccccatcttcagctccgggcccaaggctgggggccaaatttgagtcctggagcgctggcctcttggcaggggtcatctgggtgccctcggcgtcggtctccccattctcactggcccagctggcgcgcctcttggtgccccgggggctgtgagaaggaggtgcctgcccctcgggggggctgtcctcactggaagacccctccaggggtctggcctgggggtcttctctctggatgtcggcgtcttctctgtctttcagccgcacggagtgcaggagccaaggccaggcagagcccatggctaccaggcgcgcagtgttgccaccgacctccagcacctgatgctgctccaggagggcctggatgcaatctgcgaatgtcctggtgcgcccaccacctgccttctccaaggccgagaaccgtctgcgcagctcctccttgtcaatcccaaaacaacccgtggctataatggcttccaagatctccaaggcagcagtcaggtcttcgggactatacccagacagctccagctggaggacaaactcctccaagctgcaggtgttttcctgggggtttatcagcttggtgaacgtatcagggaggcaggaggttcncattgttagctcttccanaggagcggctgtggggacacagaggaagatcagaggcagcccgacagaggccccctcncctgaccaatgcacagggcacacccaggaaaggcatgctccagcaccaactcactgcttccccgac

SEQ ID NO: 128470 - DNA, 1270 bp, Homo Sapiens
  misc_feature (52)..(62): n is a, c, g, or t
  misc_feature (69)..(111): n is a, c, g, or t
gcattttacttccctttaatcaaaaaataaataagtacactccacagggacnnnnnnnnnnnaatgagnnnnnnnnnnnnnnnnnnnnnnnnnnnnnnnnnnnnnnnnnnnctacagggactcttcatttctggcctgcaaggaatcaccagccaggctgagggacacggacagccagcccagctggggcctgccaggtgactcacaaggctgaaaagggagccgctccgctctgggtggttcagtcccagccaggggttgggatgtcctgcctgcggaggggccacagcccccatggggggcccctcgcagcggggcacaccgatccctattctgcaaggtgtatcccacaaggcccttcctcttggtggcacctgggcactcaaggagccaggagatcctgccgagatggctagagtctggaatgtgaggtgtgcacaggcggggcaaactctggagacccagagacaagaagcaccaactcccagtgtgatgaggccagttcccaaggggaaggcccagaagagcctgggggatgggcaggtcggggagcccctctttccagagttccagtacagtgggaaacgtgtcagtctgtgactctggccaaagcacccgtcccctgctgcaggaggctcggcagacccaaggccagggcacagtggggtctgccgagcaccaggcaggagtggtgtggcaggcggtggctgggagggaggggacgcccacaggggtcctagaggtggatccacttgttccagttgacctcgtgggggaacacacggcccagccggagggtacagtccaaggtgggctcatagaaagccatggggctctcgtccaggctggagggcacttccacctcttccaccacgggtgtagagaagagcgagacaggccttggctttctcagccagcgcttccggatgcagccgagggactccaggccctggagcaactccagcacggcgacgggctgcaggaccccctggtagtggcgcagcagggagctctcggggatgccaggcctggtcatgatgtggtacagcatggcctccatcatacccttgcatacaggaaggttcaggtggccatccacgacacgccacggccggccgatgaagcagacactctcacagtccctttcccgtgctgcctgggagatgttggcagctccgaaactctctgtgaaccctctggggtcttcagagccctctggaggcgccctcgtccgaattcacaacccagcctcgtacctagcctttagttt

SEQ ID NO: 128471 - DNA, 1199 bp, Homo Sapiens
  misc_feature (49)..(91): n is a, c, g, or t
ccacaaagaggggcccgcgggagaaacccccttttgggggaacaaagtnnnnnnnnnnnnnnnnnnnnnnnnnnnnnnnnnnnnnnnnnnnggtggggtttaaaagggcgtttcccaagatttctcccaaggccacccattcaggtttttttggggacttattcccccagacaggttccaggtgggaggacaaactcctccaagctgcaggtgttttcctgggggtttatcagcttggtgaacgtatcagggaggcaggaggttcccattgttagctcttccagaggagcggcagcgggcctgagccgggcgggcacaggggtgcagcggagctggaacttcatctggcaggagttgaccacaatgctgtcgttggggttgaggttgcgggtgctgacgatgccgggggagtagtagcccctcatcagcaggtagttggtgtgggaggcttgcgcaggtttcacctccatgctccggcgcttgccccctacaccttcgtccaagtcatcctcttcatcctcgtcatcctccaggctgccgtccttccccaagcttttgatgacctcattcgtccaccattgagctgtctaccacgatgatctgctcctgggatcctgacatccacagaaatgaggcccagagagaagagggtcaggacggccacacaatttcctccagggccgtccagtgaaaaggccaccatgtcgtttgtgggctcgttattatcctggtctttgaaagagaaacgatcaggctggtccaacttgccggcagcccgcattctgtccaaaaactggaatgactccgtgcagatggtgcttggaaatcgccacgtaaaaatcctgtagtaggtctgggatagctggtaggacattggcacgaaggggagggcccggttcttcttggggcccagcgtgtggttgacccggcgccggttgaccaagctcctcttctggcactccatgaaggccttcacaagaacgtggtccttgtactcccgatagaggcggaaagtctggaatgactggtaggacttcatctgactgtctgagagggccagcgtgctctggatcaggttctgaagcaccagaaagtggatgtcatccacgctgttaagttcatcctctttcctggtttgatcttttacatccccaattgcccctcgtgccgaattcaccacccagcctcgctacctagcc

SEQ ID NO: 128472 - DNA, 1433 bp, Homo Sapiens
  misc_feature (204)..(204): n is a, c, g, or t
  misc_feature (1416)..(1416): n is a, c, g, or t
ttccccaagggggaaagggcccaggaaagagccttgggggaaatggccaggttcggggaaccccctttttcccagaagttcccagtacaagttgggaaacggggtcagtctgtggacttctggcccaaaagcacccttccccctggttgcaggaggcttcggcagaccccaaggcccaggggcccagggggttctcccgagcancccgggcaggagtggtgtggcaggcggtggctgggagggaggggacgcccacaggggtcctagaggtggatccacttgttccagttgacctcgtgggggaacacacggcccagccggagggtacagtccaaggtgggctcatagaaagccatggggctctcgtccaggctggagggcacttccacctcttccaccacgggtgtagagaagagcgagacaggccttggctttctcagccagcgcttccggatgcagccgagggactccaggccctggagcaactccagcacggcgacgggctgcaggaccccctggtagtggcgcagcagggagctctcggggatgccaggcctggtcatgatgtggtacagcatggcctccatcatacccttgcatacaggaaggttcaggtggccatccacgacacgccacggccggccgatgaagcagacactctcacagtccctttcccgtgctgcctgggagatgttggcagctccgaaactctctgtgaaccctctggggtcttcagagccctctggaggctgcgcctggccgctcagctgcttcttggcctggggaactgaactcaccgacaccctcttggtcttcctgtgctgctcccgctgcagcggtgtcttcaagagctgggggtggagatggggcctgggcttctgccccatcttcagctccgggcccaaggctgggggccaatttgagtcctggagcgctggcctcttggcaggggtcatctgggtgccctcggcgtcggtctccccattctcactggcccagctggcgcgcctcttggtgccccgtgggctgtgagaaggaggtgcctgcccctcgggggggctgtcctcactggaagacccctccaggggtctggcctgggggtcttctctctggatgtcggcgtcttctctgtctttcagccgcacggagtgcaggagccaaggccaggcagagcccatggctaccaggcgcgcagtgttgccaccgacctccagcacctgatgctgctccaggagggcctggggaggcaggagacacgcggggtctgtggggagcatcgggatccatccacgctggtgacgggggacgagtggagtggcctcccctgactggcgggttgagtgccctgagcagcccaggcccacgaggcaggcactggctcctagccccggggctgccccttgctagtcactgtgncactggagcagcatctc

SEQ ID NO: 128473 - DNA, 704 bp, Homo Sapiens
tgaggttcttttttgtctctttaaaatcatttttaaaaagttacaaaacaatatcattcatcatatattcttattttcctttttttaaaaaattaaagtaataaaaaagtcactttataaaataatataaaagggcttgatgggtggggccggtgggtgctgtctgagctggtggactgaggaatccagtgcttctcttctggctaccccctcgttgtcagggaaggacccccaggccacagatggggatgacagcaggtcccttgtctctggctgggctgtgggagaggggcagggaaagccggggcaggagggcagtgggcagacccagacaggggggacggctggggccctgtcccgaaaagacgggagggcctgctggtggggggtgaggtggcactggggcagcgggtgtctgggcccctcagtgccggctcctcctccagacagtctgcctagcttccgttgctcagcatccccagcagctcactgggctccagtccctgcggctgggccaccgtctgcatgtcgaagcccatgtgcatgaggaactgggccacgttcatctcttgccccgtgaactggtctcggacggtggggcatgaggggttgcagtggggccaggggcagctgtccaccaggtggacggggcagcccttgaggggggtcttgctggccttgtggctgtcatggaggctcctgtc

SEQ ID NO: 128474 - DNA, 546 bp, Homo Sapiens
gtacgctttggccttttcctcctcttctctgagctccttcatcctttcctcgggatcataatccttctgcttctcttccatcttgcttcttgttgacctcagtacgtttcttcacctgatccagggtggaacgttccacacgcagtagacatgcccaggtttctctgatgtttctttccattaatgtgatccagaaagttgatggagtccttcaccacacagtcacagacattgcagtaatatcctccccagtctcagattgaggggttgtcttggtaatgacaattgtcttcccaagcttggattccaagtccaccttgtagtccctatgccgtaaaagctctcgcttgacaggctgcactggttttccatctttcttttctctctcttccgtgagcctcttctcggcgagtttctcatattcatctttgtcccactttcggcgaaagtccaagttttttgtcccgctgcccgacgccatcttcacagcgaagtccccggccgtaatggccgaattcccgggcatatgtccggtaccgtcgactg

SEQ ID NO: 128475 - DNA, 777 bp, Homo Sapiens
  misc_feature (74)..(87): n is a, c, g, or t
cccaccctttattccctccccattgacactcttaagaactttcccattacccaaaaagaaatgaccccctactnnnnnnnnnnnnnngcaaagttaggtccagcataggccaaagtcaggccaagcacagaaagcctcagtaactcttcttggtggaaccaaagccagagaagcccatcacagctgccatctcatcgtcctcctcaaatgtcaagtcctcctcagccctccttttcttctccttctgtttctctttcttgtacgctttggccttttcctcctcttctctgagctccttcatcctttcctcaaaatcataatccttctgcttctcttccatcttcttcttgttgacctcaaaacgtttcttcacctgatccagggtggaacgttccacacgcatagacatgcccaggtttctctgatgtttctttccattaatgtgatccagaaagttgatggagtccttcaccacacagtcacagacattgcagtaatatcctcccatctcagattgaggggttgtcttggtaatgacaattgtcttcccaagcttggattccaagtccaccttgtagtccctatgccgtaaaagctctcgcttgacaggctgcactggttttccatctttcttttctctctcttccgtgagcctcttctcggcgagtttctcatattcatctttgtcccactttcggcgaaagtccaagttttttgtcccgctgcccgacgccatcttcctcgtgccgattcgcccccagcctcgctacctagcga

SEQ ID NO: 128476 - DNA, 1541 bp, Homo Sapiens
  misc_feature (74)..(113): n is a, c, g, or t
  misc_feature (844)..(857): n is a, c, g, or t
  misc_feature (998)..(1061): n is a, c, g, or t
taaaacaggcccagtcaatgccatttattatacatgtcaaacagcttctaagaccgaaggctcccataataagnnnnnnnnnnnnnnnnnnnnnnnnnnnnnnnnnnnnnnnngcatcaaacaggttcttccaaaagcctgctcacaaggtagacaaaaacataaatcttcaggaaaatgaaacatgagaagctgaaacaatctacacctgaatgttaaaaaactcatcagacacaaaccacaccaaacactcatcccatttaatttcctgttacatgctctgaggaagccaagaacatcaggccccagggcagcaatgctctaggattccagctcggaccccctctatatgacagattcatgcacacacatccacacaccatagaaccaggcagaaatacacatgcatgcacaggtggctagagaaccatagggcaggatgggaaaaagggctgatcaaggatatgcaatcaactggaaactgggacctagagaatgcttctgttgcaggatgaacatgagttaaaattaaaacaaaggcagaacacaggataaaggtgggatgttcagacaagaggtgggatagatgaagagataaagatgcagggggagttttgggaaagcagcctcagaaggggaggtttttctttattgggaactcaggtgggcagggtcctgtgactccagtgatacactgaggcagaagcaatatgccacagcattacctctgcaatctgtgccctctcccaaagtagagggaaaccatgagcccccaccctctatccctccccattgacactcttaagaactttcccattacccaaaaagaaatgaccccctactnnnnnnnnnnnnnngcaaagttaggtccagcataggccaaagtcaggccaagcacagaaagcctcagtaactcttcttggtggaaccaaagccagagaagcccatcacagctgccatctcatcgtcctcctcaaatgtcaagtcctcctcagccnnnnnnnnnnnnnnnnnnnnnnnnnnnnnnnnnnnnnnnnnnnnnnnnnnnnnnnnnnnnnnnngctccttcatcctttcctcaaaatcataatccttctgcttctcttccatcttcttcttgttgacctcaaaacgtttcttcacctgatccagggtggaacgttccacacgcatagacatgcccaggtttctctgatgtttctttccattaatgtgatccagaaagttgatggagtccttcaccacacagtcacagacattgcagtaatatcctcccatctcagattgaggggttgtcttggtaatgacaattgtcttcccaagcttggattccaagtccaccttgtagtccctatgccgtaaaagctctcgcttgacaggctgcactggttttccatctttcttttctctctcttccgtgagcctcttctcggcgagtttctcatattcatctttgtcccactttcggcgaaagtccaagttttttgtcccgctgcccgacgccatctcctcgtgccgattacacacccggcctcgtactt

SEQ ID NO: 128477 - DNA, 1044 bp, Homo Sapiens
tttttgagcaattttaactctttatttgaaacaaacaatttcagagacagaaggttagtcgtgacaacagcttctcactacaacacaagggtgggcatggctcactgaagggacaggccaggcgcctcagaacaatatatacaatttaaacagtggctaactggtgacagttataaaaacacaaaaaggagcctgggaaacagcaaagtcaacagggaaagaagtgggtaccccctttgccagaagctaattgttttctgggacctccaatgcaagatggggaagagagaagatgtaggcagtggcggcaggccctgcgcccacagctcctcgcctgtcctttgaccacagatcccatcctgcatgactcaaggtcccataggcttggcctagctcttatgataggggaacaatagaggggaacccagcctcaacccaagtcagaaggtagtttttgccttgggaggtctgtccattgaactaaagggaggcagttacagagggggctaagcatgttgacaccatggctcatggcaacctaagatggcagagagacaaacacagaaaccaaggggacaggagtctgcacaacaggagtctgctccccgtacttagtcattctctgcctctgaggaaaaaaaggcatttggaagattttaaaaacggcagcaccaaggattggtgcttgccgagggggtgagggatatgcggtggtgagatggtgccaacaaccaattatttcataggaggggaagagtgtctaagctctgtgttttatgtaaatggtcccctcatcgctttcattgtttatttcttacctttcagataagaccttttggcatggtgctggggaagagtagagaagggagtgggcacagggcagagaaggcagctgggtttttccctaggtcatgcctaggaacaagaggctctacctatgcgggatgggtcaggaaacccaaagccaacaggatcaccagagctattaacactccacccagagtctggacccagaagcctcgtgccgaattcgccacccaggcc

SEQ ID NO: 128478 - DNA, 699 bp, Homo Sapiens
  misc_feature (682)..(682): n is a, c, g, or t
ccaagtttctaaaatgtacattttatttataacaggaaaaatatatccctctatattttagtttaaaaaaatactgcttggaagcagcccatatcctgtgcgttttgtgaattttcaggtgagactccctcaacccgctttcccccctcactgccacaccactgctagtccatggggagggggctggggttcaggtgggacctcttggttgggagcctccattgctactttgcatttaaaggaccgagagtctcctcaagacaagaccactgttatgtgatggatggggggtgtctgttgctggatccagttccaaaaggtgcccaggaacctgggaaggtgactaccctatcatctcacagggactccccacactggaaccccagcctcctgggtcctggtccagggctcttttcccctggctgctccatggttgcgacacccacggtacccgggcattccacgctggtgctcgagggagggctgagagggctaagctgcaccttctgtttctctgggtggccagattcattccttgcctctgtgggatggcaggctggcagggaacacacggatgcatcctggggcacagccacccacagagcgccaggtccagtctccacagccgctgtgccttagtcgtccaggtgctgctcctcccaggtggatgtggggatggcgnctgtagggtccatgatg

SEQ ID NO: 128479 - DNA, 1508 bp, Homo Sapiens
  misc_feature (784)..(792): n is a, c, g, or t
  misc_feature (856)..(890): n is a, c, g, or t
  misc_feature (1343)..(1421): n is a, c, g, or t
  misc_feature (1433)..(1445): n is a, c, g, or t
gcacaccacagatatatatcttttatttgtcaattaaaggatcagcatagactccatgaaacttgagagacctgattaacatctgaaggcaacatctctgcaaaacaactaacttgagtactttaattatatatgtatctagcagaagagaaaaaaacaacacagttttaattttaaattttattaaagtacagagttaacaagttttgagttttttatataggaaaagcctagtcaattcagatgctttctagaaaaattaacattaaaaaacaaatagaaatccatgactaaagggggaaaataactttcaaaagttaccaaaattcgaatcatatcagagaccattataaatttcaaacagtagatttaccacacatattgcattttcaaattctaatgtagcaaaacgtaaccacataatttggctacagctaatcgtttcagaaaagtttaaaaaattagcaaagttatatctataaaacttttgtagttttctttttgcaaagtaaaaaggcttaaatctttaataaaggaaaacaaaacaatcctcttaaatttcttataaatagctctccagacatatattacaaatctgctgtaagctttctttacctgagagaacttcccaggatcctttatcccaaaggattaccttaaagagttcttccatcattttactcatgtgaatatgattaaactcctatagaagtggattgggacatatgcattcttaatctgcccttccccatttgtttctttctgaaaggattttgcttaaggnnnnnnnnngctctttggtaaaggccaaatatttcaacctttcaaaatgactgcctctgtgaaagagttgttnnnnnnnnnnnnnnnnnnnnnnnnnnnnnnnnnnngtctaaacatctgtgtgaacagctctccagtactgtgaagtcaaaggcccaacattacagagcgcacctctgcctgaaatacaaaactaagttaactagcaagttacaggaaatagccttcagtaaattccacaagccaagtggctactgcattgtccctgaagaaggagggcccagtgttctttctgggtgtgtaaggtcttacttagttcaaggtttgtcccttcttagttgtaggttgggccttctttcgtttccaagaggtataggacactagagtacaccaaatgagatactatttggaaaggcaataaagggagtgtaaaagcctaggtagcttaaatacaggctctggaatttccttcgcaggaaggtgaagcaccaatgatggcaaaaattaaataaatacatcatcttaaaaaggcagagggtaggctgcgtgcagtggtttannnnnnnnnnnnnnnnnnnnnnnnnnnnnnnnnnnnnnnnnnnnnnnnnnnnnnnnnnnnnnnnnnnnnnnnnnnnnnncccatctctacnnnnnnnnnnnnntcggccaggtgtgatggggcaaacctgtggtctcagctacttgggaggtggtccttgagccca

SEQ ID NO: 128480 - DNA, 1630 bp, Homo Sapiens
tttttttcaggttcccacacagtttattgagggagccaaagccagtgagaggacgaaggagtcctacttcaacctacttccttaaagctgtgtgcctccagcatgaagggaccttcccagagggcagggcctgccctataaggggccacatgaagccttgtggagactcctgcctctcataccacagcctgtcctaccctaaagacccagacatgacagcagacataatccccaccccaggagggtgctgaggaaacacccttacccatgcccctcccctagagacctcaggaagaaaggccaggacacctgtcctgtgattggccagttgaatcctcaacgtgaagacctggcaggcctggctgacaggtctgttcagatgtggcctcaggcatctactctaggatccaacccctaacattcaaacatgattaaaaacacccaggacacttctcttgctggcagaggccacaccccagataatggcagtcctgccaaactctggccagagatagggacccaagctgactgggtgtgagcacgtaaggagaccactctgccccatggggagaatcttccagggctcagctgaggctcagagcccaggcttatgttattccccatcaaatgccagtgattcctccaaacattccccacaagggagaaagggaggaggaggcagagagcttatcaagaggttcacccctatatggggctggaggttggatctactggggtgaggaaaagggtgtagaggattggggcactggggcaggggcgctggcacattcctcagattctggcatgtcatcctggaagtactcagcctggcggtactgccacagacgcaggttcccgtcccacgaactgctgacaatcttctcttcaaaggggtgccaactgacgtcacgcacacaggccttgtggttggtcagcttcttcacaatgtggccacttagaaggtcgtacacaaccactttgccagtggagcagccactgtagatgaactgctggccagtgctatgaatgggggagaaccggcagcggatgagggtgtgcagcactccgtggccccggtaggtcatcaaggagctgtcccctgggagcttcagcttccgccaggcttttttgggcacttgctgccaccgatagtcccagttttgctgtgtggcagcctggcgtgaagcttccatgccttcccggctggaaaagcgtcggatatcccagagtttgatggtctggtctttagagttggagatcagataccgggcatcacccttgctgtcaatgaaggtgatgccatcctggtgtccagccagtgcacccacaggcttggggtcatcctcccgcatggtgcgtcgatcccacactttgcagatggcatcatctcccccagagaacaggatttgggagcttatatcagcaaaggccactgcattcacatcatcctcatgggactcaatctgaagggtgcgccggttctgttctcggtcaaagacatacaggcagccatcattggcccctcctagtacttctcgtccatctgaggagacagcaatggagaagacagcaaagcgacgctcatctggcctgagatccagggcagtgtgtcgcatctccctcaccatag

SEQ ID NO: 128481 - DNA, 870 bp, Homo Sapiens
ggccgccgccgttgattggatataggggtgcgccaattaaagggagggctctttctggaggagttctcccctgctgggggagggtgggttacaaagagagccctgcgggtttgcgcccccccgggggcggtttgttataattgggggaagaaatcccaagacccttttggtccgggggcccatggtttttccctagggaaaggcaagctgagggcccaaggtgttccgatttaccctggggggggccccgcggcggccaaaagggaagggttttagaaaaaacttttttggagggtccgggggcggcccggccaggtgtatattttgttatatcggggtggtcgtgcgtggggtttccagggaattcaatttccaaaagccccaagtccattccttagttggccagaatgaatttgtgttggagggtgatggatgtgctcagggagttggctatttcctaagctgagccccgactcctgtttctcacatagggagccagggtccagggaggtgcggggctcacatttcggggccggatggggaccctctcgttctccgcactcatgccaggaatgatgacggtcatgcgccgggggccacggaagcccagcacgttggtttcatagatcacagctgccagctcctgccgaaggcttgccacattagtgctgtacccacgctgtgggttctgcccgttgtcaaagaccgtgaagcggttccccaggaggttggacctcagcttcccgatgaaattctcccctcctcgggacagattggtagggtcgatggagatgaggtaattggctgtcttgctccgttttcgtttcctgccagccaagaggaacaccttcttctccgtgtccaggtgca

SEQ ID NO: 128482 - DNA, 867 bp, Homo Sapiens
  misc_feature (813)..(826): n is a, c, g, or t
caggaaggagagaaatattgttcatgtaatgtgttacctttttttgtctgtgtgatctacaagagcatggctgaaatgttaccatttttaactagtgttttgactgaagattattatgaaaagttttacttttgttagattcctaattaaaaatgcctatactcttttataggagtttcaacttttgcaatttggtaataacagatttaggtaagtaaaaaatgagaatctcatacagttctgaagatctaagtttggttgagaatttaatgtttcatcaccagtaaattcaattaaagacttttgattcaattaaagactcagttctgcctacacctgcaagaactgagttgatctgtacatcaacatttctgatgtttctttggtagttgctgctggagtcagaagttaggaacaaatctaatggcctttgtaatgtcctctgtcatttcacggaggaatgacttagaggaacaaagctttcctgtgatttctttcttcaacagatggctaatggcacagcattgcagttagaatcctgtttaagatactaggagcacgtcctggactaaaaatttctacataagctttagcaacaaccttatagcttcctttgacttttttgtagagcttacagaatgtatggctgcctaagtaatagtctctgaattaatgggtaaaaaatatattatgagttttttatcctcacgtatggtgctaggctatactggatttgggctaacaaaagcttgttaacttttttttgtctcattgacagaagtattttatatctcatattttacattacatagnnnnnnnnnnnnnnatgaaataaaagtttgaaaataaagtgatatactctttttt

SEQ ID NO: 128483 - DNA, 862 bp, Homo Sapiens
gtgggggagattccaagcccctagtccatggcccgggattttccttgggaaaccggctatggcccatgttccctttccctagtggggccccccggccccaaacaaatgggtttggaaagctttttcaggggccgagggggcccgccaaagttccctccttttcgggccggctattctctttggagattctttctagaatttaataaacttagttattctaagttatccaactatttggattcccaggtttcatgattgcaaaaggcaggaatgggatgtgaatgggcagacagtaattcagttcttggtttcttttcctttgatttgtttacaatggaatatttgcatgttttctccaaggacgttgtaccttcttgctggccaagacatccaggtcacagcagattcgggcacgtgtggaagaaggttggatgatgtcatccacaaaccctcgcactgctgcagggaaagggttggcaaacttctcgatgtactctgcctgagcagcttccacattctcatgccctttgaagatgatctccacagcgccctttgctcccatgactgcaatctctgcggtgggccaggcatagttggtatcaccacaaaggtgcttagagctcatgacatcataggcacctccataggccttcctggtgatgactgtgactttgggtacagttgcctcagcaaatgcgtagagaagcttggcaccatgccggatgatgcccccgtattcctgtgctgtgccaggtagaaagccagggacatcaacaaaagtgatgagtggaatattgaatgcatcacagaatctgacaaaacgagcccctttcacagatgaattaatatccaagcatcctga

SEQ ID NO: 128484 - DNA, 1171 bp, Homo Sapiens
  misc_feature (642)..(690): n is a, c, g, or t
  misc_feature (1039)..(1039): n is a, c, g, or t
  misc_feature (1106)..(1106): n is a, c, g, or t
gatcttggagaatctgatgactatgtgtcttgagggttgatcttcttgtggagtatcttactggggttctctggatttcctgaatttgaatgttggcctgtcttgctaggttggggaagttcttctggatgatatcttgaagtgtgttttcccaacgtggctccattctccttgtctctttcaggtagtccaatcagtcataggtttggtcttttacatagttccacagttctttgaggttttgttcattccttttcattcttttttctctaatcttctctgcctgccttattttggcaagacagtcttcaagctctgatattcttttttctgcttgatcaattcagctgttgatacttgtgtttgcatcacaaagttccccttatgtgctttacagctggctctggtcatttatgttcctctctaaactggttattctagttagcatcttctgtaatcttttaacatggttcttagcttctttgctgacagaagtagggttcagaaggtgggtaataacaaatttcacagagctaaatgagcatgttctaacccaatgcattgatttctccacctccctttcagggatgccagtgatttgtagaattggcctctatatataaccccatacttattggaggnnnnnnnnnnnnnnnnnnnnnnnnnnnnnnnnnnnnnnnnnnnnnnnnngagaaccaatctttaagttctgggattcgttccaatatgttgggttagagcgtactccttcagctcagtgaagtttgctactacccaccttctgaagcctacttctgtcaattcatccatctcaacctccacccaggactgtgcccttgctgtagaggtgttgtgatcatttggagtaaacaagtcactctggccttttgagttgttaggggtttttcattcctttctcatcttcatgagtttgtctcattttgatctttgaggctgctgacctttagatgaggttttcgtgggggactttttggttgatgttgttgttgctttctgtttttctttcgacagtcagggnaccctcttctgtaggggctgctgtgggtttgctgggggattcacttcaagccctatttatctggggnccctcccacacctgaaggaggtcaccagagggtgctgggagaacagcaaagatggggaccccact

SEQ ID NO: 128485 - DNA, 706 bp, Homo Sapiens
ttttttacacttgaaataatcgaagtgacattttaatctaaaggtatacaaatctatcgcctacatggctgatttttccatgagagtctcatttacaagagaaacacaattatgaaatcagtaccctttacttttaaagggtaacggaagaagcataagtttctgttaggacagcacttacgctctcccctatgtttattctgtggttaaccaccatggtagatccgcagtgattcaggaagatgaattatctgcaacacgcagaagttcagtcctctggcatgtacgaatcctggtgtggtttttgcacaacattctgcctgggatgcgtagggagaagctgtgataacaggatcgggattcactcatgcttcattcatctgggaggcctgcgactgcccggcacagtgtgggctgagcctccaacgccgagcaccagacactccaccctcctgaggcacttgtgcggatgcaggtgagatgcccagaccagcacggtgtgcgtggggggtcgggcaccagagaacttgagatgagattcaactgtgtggatgggtctggtggaggtggtggctctcgggctggggaggcataaagatgaatcccggtgacccttgccctgaaaagctgctatgtacatttagtagaagactgtcgatgaaaacagactctcagaagcaaagaggggcctcgacggggcccccac

SEQ ID NO: 128486 - DNA, 1030 bp, Homo Sapiens
  misc_feature (692)..(692): n is a, c, g, or t
  misc_feature (698)..(698): n is a, c, g, or t
  misc_feature (776)..(776): n is a, c, g, or t
  misc_feature (811)..(811): n is a, c, g, or t
  misc_feature (821)..(821): n is a, c, g, or t
  misc_feature (836)..(837): n is a, c, g, or t
  misc_feature (843)..(843): n is a, c, g, or t
  misc_feature (861)..(861): n is a, c, g, or t
  misc_feature (882)..(883): n is a, c, g, or t
  misc_feature (942)..(942): n is a, c, g, or t
tttatgatcacaaagaggccacattttttttaattgacaactcaatctctacatacatacagtattgcacgaattataagtggatcaacaattatattattgatacaaactcatgagcatttacataaaactaccgctctaggttttggtgtgttttgtgtcagctactttagtgaataaacgaaacataaaggaactcagctacttgaattcatgagaatcagctttcaaaaaaagcatatatatcatctcatagaatacttatgtcaaacccaggaaaatcagtaactaagtgacaaaaggaacacttttaaagaaaagttggtgataaatatgttaggctaaaatactaagaactttagcaactggaccgaggaaccagaaaatgtatgcacactgggaattttaacaaaagattacacattctcctgtacagtgaggaccacattccaaaagcataattctgggttgctacaatgtcatctctgctacaaaccattgtttcaaaggtgaaagaaacaagatggtaattgacataaaaaggttttaaaattcttcccactcaaaataaaataaaaataatataatctctatcaaattataaagaaattctatcacaatgttgaccacataaagaagtcagaccatttgccttcgctgactgcctcagagggcagagcatgtgtcactancaaggngagaggggggttaaaagtcctactctcccccggcctgtggtgtcagggtggacaggagcctttggcttcctggggttntgctcctcacatagggattgatggaggtgggctanatggctttangagactctcaactannagatcnaatcagcttgagctcgtngcgaattctggctcgagggcnnaatcctatagtgagtcgtataaatccgtatcatgtctagctgttcctgtgtgaaatggntccgctcacatcaaacacatacagcggagcaaaatgtaagcgggtgctatgagtgactatcacataatgcgtgcgctcatgcgcttca

SEQ ID NO: 128487 - DNA, 1213 bp, Homo Sapiens
  misc_feature (766)..(774): n is a, c, g, or t
  misc_feature (1033)..(1042): n is a, c, g, or t
  misc_feature (1157)..(1168): n is a, c, g, or t
cggccgccgcaggaagggccggttcctgagggacgctccgaccgcggccgggtttctcctgggggcttcggctgacgctgacgtcggatgagtgatccggagggacgctccgaccgcggcgggaggctcctgggggccggggctccgagaagaagaagaaaacatgtcaggacacaaatgcagttatccctgggacttacaggatcgatatgctcaagataagtcagttgtaaataagatgcaacagaaatattgggagacgaagcaggcctttattaaagccacagggaagaaggaagatgaacatgttgttgcctctgacgcggacctggatgccaagctagagctgtttcattcaattcagagaacctgtctggacttatcgaaagcaattgtactctatcaaaagaggatatgtttcttgtctcaagaagaaaacgaactgggaaaatttcttcgatcccaaggtttccaagataaaaccagagcaggaaagatgatgcaagcgacaggaaaggccctctgcttttcttcccagcaaaggttggccttacgaaatcctttgtgtcgatttcaccaagaagtggagacttttcggcatcgggccatctcagatacttggctgacggtgaaccgcatggaacagtgcaggacggaatatagaggagcactattatggatgaaggacgtgtctcaggagcttgatccagacctctacaagcaaatggagaagttcaggaaggtacaaacacaagtgcgccttgcnnnnnnnnnctttgacaaattgaagatggatgtttgtcaaaaagtggatcttcttggagcgagcagatgcaatctcttgtctcacatgctagcaacataccagaccactctgcttcatttttgggagaaaaacttctcacactatggcagccctcccctgggaagtttcaaggggtttccccccctggattttcttccttttaaagagttttcaaaacccccttggaaaaatttttttgggggggagaaaaggcagggaaaaaatctnnnnnnnnnnggaaaataccaattcgcccccgggccgggacccgaccccctttattttctttagggggaaaaaaaccggccgcgggaaccccccccttttttaaactcggaaggggggaaaaaannnnnnnnnnnnctcggcccttaaaacaaagggcgcaagagggcttaacacaatccc

SEQ ID NO: 128488 - DNA, 658 bp, Homo Sapiens
tttgtgattcaaggttatagctttactgcaactcaggacagtgagcccaagccaggtgttgggctgggccccagaacaaggctcaaatgcggacttggacacacttcgaaggagggctgctctgcccctgctgttcgggcgtggggggtggggggcgggggccactgagctgggccttctgtcctcctccctggatgtgcagacatgggccatggcttctgccaggactcacatgtgagctgggccttctgtcctcctccctggatgtgcagacatgggccatggcttctgccaggactcacatgtgagctgggccttctgtcctcctccctggatgtgcagacatgggccatggcttctgccaggactcacatgtgagctgggccttctgtcctcctccctggatgtgcagacatgggccatggcttctgccaggactcacatgtcctcctcactgaacaccagagacacctgctaacttgggaagacgcagggtgaggatttctgtttctccagcccagcctgtcaccctgtgggaagcagcgagtgggaagggaaaggggaagtcacatgtttctcacgccgagttccttccagaatcccaaagaaggctcagaaggttgtgaaggaagaaccagtcagctcaggtgagacaccc

SEQ ID NO: 128489 - DNA, 1127 bp, Homo Sapiens
  misc_feature (85)..(104): n is a, c, g, or t
  misc_feature (111)..(124): n is a, c, g, or t
  misc_feature (136)..(260): n is a, c, g, or t
ggggggatcccacccctttttttgtcccgggtttccttgggaaaaacataggccctgtttcctttcctttgggggcccggccccnnnnnnnnnnnnnnnnnnnnttttttnnnnnnnnnnnnnncccccaaaattnnnnnnnnnnnnnnnnnnnnnnnnnnnnnnnnnnnnnnnnnnnnnnnnnnnnnnnnnnnnnnnnnnnnnnnnnnnnnnnnnnnnnnnnnnnnnnnnnnnnnnnnnnnnnnnnnnnnnnnnnnnnnttgtaaaaatgaatttattaaaatgctcataattataaaagaatattaaaatgcacagaaattaacattaataattataaaagaatattaaaatgcacagaaattaacattaattacaaactttacatcttatgccacaatgtgtgaaaagcatcatgaatagttctacttcagttaagctgctcatacatttttaccctctcaaacataatatgaacataaaatggtacaagaagtgtttcaacaagagtacattctgacccccattgtgaattaatgttttatgaaattcaaggcacacatgcaataaaaaagggaagactttggtgacagtttataagatggccttgtttagttttaaaataaaaatgatagctttccctttctaatgatatatagctaaattatctgagggatgtttaatgaaaaatcccctgagtatttgctctaatgtttcaatatgctaaaattcacaggcattaaaaaaggatataaagctcagtttctctagtggttaacactggacaggctgaaggctagattctccctcttcacaggtccactgccacacccatcaatttccccagggctgctgcctctgaagcacttacagatgcagccaccattgtctgcagacacagctccatgcttttctttatcactgcaagtcagccgtggactcactaacaacactgtggatggcatggggaaatgaccctgcatctccactacaactttgctcttttgggcatcttaacagtgtcagatattacatttggtgcccgacgcgtgggtcgacgatatcccgggataccggaccgtaccagcctgcttttttaacacactggtctatagtgtccactatgc

SEQ ID NO: 128490 - DNA, 2111 bp, Homo Sapiens
agtcgtcccattttatggatgtggaaactgaggctgacttaaacttcccgtgacttggagctctcacctcgagacacctcccagaccccacatcccctcagaacgctgcgcccagccacacccacgatcaagttacacagctttattggcccccagcagccacagttcccccaagggggctttgggacagggagggcccgggcgtccagtgcaaactacagtacgtgagtcaggccctgaggggggtgcccggggtcctccttccctaccctgccaggagggccccgctggtgggagacaggtgtatgggctctgtgggctctgtccctggctgaatggccccagactggttgcagctgggcttgaggggctgacaacaggaagtaccatcatcactgccagagctcaagatcccacacccgacatgacataaataaaaaaataaatagtgttgtatctttcccctcatcccctccctttataaaaacacaaagtcctcagagctggggcgtttggccctgaggagccgccctgtgcgagggagccggagtgtgggctgggcgagctgggagcagaggtcgtccaggctgtggtcctgagcatggccctcggccagggtgaacatggggtaccgctctgtggctgaggaggagctgaggaccctggtcagctctgagcagagtgtctcaaactccttcctgtctccagcatagaagcccacggtacagcttgggtccatcttggcaaaggccatcttgcggggcgaggtgcagtggaaggactccagggggaagtcggcctggctgacatccacagtgggctggcagtagtgagggtccaggtacagcaggaagtcatcttggtagccaatgaagtacagtgagtgtcgcggtttcccacccatgatgcccaggcacagctcgcaacgcaggagttccttcaacgcagggcacatacacggggttgagagtctcgccacccagtcgcacgggcaccaggatgaccacagacttccactcggctgtggggtctggcctggccaccaggcgtgccacatccgccttgtacactgtgcagtcctgagaaacgtacaccaccaggcgggtgacgtcggagcagctctccacggctttcctgaggatgtgtgccactagcgatggcccataccagtcacctgccttcttgcctgagctctgcccaagctccaccagccggtgtaggccaaagggggcccgggggtggtcggcgaaccaggacacaatctgccggtgccggcgttcctgctccagctcaggggcaccctgggcccagcgtgggggcatccagcgggcaggcccatggtaccggctgggagaggctgaccctgacagctcaggggggcccaggcccatgccctcggcccatgtccagtctctgggcaggaaatgcagcagaaggccctgtgccagcatcatctggccgctgcgtaacatgcacccccagccacagtccgaggtcaggcagcccccaggaaggggcgggaagtcccggcggtatgtgagccacaggcgggacacaaagtcccgctggaaacgctgtatgtcaccctcgccctcgaaacggtagcggcggccacagaggtggatgcatggagatcattgctaaagctggtccggcattttaaccaccccaaccgtacattgacagttgttccaggcatgtcaggaaccttggccattgaacttgtccacttcgtccggctcactcagggccagccccgggagagccaagagcggggccgcatggcatcacaggaaggacaccacagcgcacgattagggcgtcatggcgccatcatgggacacccagcaggccatgcagggccatcagggcacaggcaggcagcagcagtcactccagggctgctgctccaggtactgcgcaggcaggccaggcgacactgagttcatggacagcgccgggagggcaggaccgagggcccaggtggggggctgcggccgctgcaccaccaagggcgacccgcagccggttcacggggcccggggaaggcgctactcggcccccgtccccagcctcgtgccgaattcaacacccagcctcgtacctagcca

SEQ ID NO: 128491 - DNA, 830 bp, Homo Sapiens
cccagtcgcacgggcaccagggatgaccacagacttccactcgcctgtgggtctgcctggccaccaggcgtgccacatccgccttgtacactgtgcagtcctgagaaacgtacaccaccaggcgggtgacgtcggagcagctctccacggctttccagtcacctgccttcttgcctgagctctgcccaagctccaccagccggtgtaggccaaagggggcccgggggtggtcggcgaaccaggacacaatctgccggtgccggcgttcctgctccagctcaggggcacctgggcccagcgtgggggcatccagcgggcaggcccatggtaccggctgggagaggctgaccctgacagctcaggggggcccaggcccatgccctcggcccatgtccagtctctgggcaggaaatgcagcagaaggccctgtgccagcatcatctggccgctgcgtaacatgcacccccagccacagtccgaggtcaggcagcccccaggaaggggcgggaagtcccggcggtatgtgagccacaggcgggacacaaagtcccgctggaaacgctgtatgtcaccctcgccctcgaaacggtagcggcggccacagaggtggatgctggagatcttgctaaagctggtccggcttttaaccacccaaccgtacttgacgttgttccaggctgtcaggaacttggccttgaacttgtccacttcgtccggctcactcgggccagccccgggagagccaagagcggggccgctggctccggaaggccccaggccgttggggtctggcccctcgtgccgattcaacaccagcctcgtactagccg

SEQ ID NO: 128492 - DNA, 1154 bp, Homo Sapiens
gtgggaatctagaacttctccagtagaacagcatctgagataaggaacttagtgttttttaaaaagtatttacaacccactgcccaccagcaaggagccctctgtgacataagaacagttgaagaatgaacatacccaccggaaagagacctcagggccctcctctgagctccttgacccctgaggcctagagagtagtgtggctggccccagtctcacagaagtcagctgcacagctggaaccaagccgtagattcctcagcctgattcggccacttgtgccaccatacaaaggtacccactgggattttaaaatcagtgtttttacttcagcaaacggaaccctgggataacaccagttggagtctgaggcctatgatcttgagaaggcagtatcctttgggagggtctgcatggggccaaatcttgagccacagccagacacctcagggctgcattaattggagggacggctcttgttatagatgaggaagtctgagatgtcgtgccatacattgctgtcctcatagaggtaggtcatggaggactgcagcgagggctgcagggtggatcggtgatactcaaagagccacagcaccagcccccacaccaccgcagtgagcagcgggaacgggtcccacctgggttcagggatgtagcccttctctacagccaggcggctcagggcaaacaggacgcgtgacaacaggtacatgttgatctggctgttgatgttattgttttctccaaacaccaggatacccccgaggaaggccgccaggaatgcgtgtgctgggtaggtcttgccttgtatgtaggactgcagggcacggagacccttgtaggtgaacacaaaccgtgccaggttccaggagtggatatatgtggcctgcagtatggcccacagcttctcctggaggctgccattccggaagagaaaggtcatgaccagcgcgtgaggggcccggattttggctccatagacagccccgttccggaagcccttaagcacggccaacgcagcgtggtagcggcgcttgcgcagcagtgcgttgacgactacgagcagagcccttagctgcggcggggttgccatagtgcgggctgcgcgcaggtcgcctcgtgccgattttacaccaggcctctactagctt

SEQ ID NO: 128493 - DNA, 611 bp, Homo Sapiens
tttgcctttgtgtgcggtatttatttcaaatgttttttaaaacagcactgttatttctcaggacaagagcaaaaatcaccccctgcagaagcttgggaactatgtacagaactttacagaatagaggcaatactttagcttaagcctgtctgctgaccagagaatggaattctgcgtggactcaaggaacaaaaggaaactaggcagggaaggggaagaaaagtgcccatctgaatcaaacttcagctgccatcagggcacatcttgtggtggtcacagattgtaggctgttttttggaagattcgggttcagcacaggattccatttgtctgcaatcagatgataagacgacaggtggcattagaactacttggctacacccctggctgaggtgccatgaggtcaatgtcactcaagttcctggccagccaaactcccgcagcaaagagtcccaaatttagtatcaagttcctccggaagtcattcctatcagtggcaaagcggtagacgccccgaagccaatctcccacgttgtccggtatttcgggagtttcattagccgagccagcagcgctcaccgggacagtgctggaagccatagtggaaagcc

SEQ ID NO: 128494 - DNA, 944 bp, Homo Sapiens
  misc_feature (24)..(24): n is a, c, g, or t
  misc_feature (26)..(26): n is a, c, g, or t
  misc_feature (83)..(84): n is a, c, g, or t
  misc_feature (118)..(118): n is a, c, g, or t
  misc_feature (169)..(181): n is a, c, g, or t
  misc_feature (222)..(280): n is a, c, g, or t
  misc_feature (417)..(417): n is a, c, g, or t
gaattggtgtgtgccccccgcggngntctgttttggccccggttattctagccacggggaggtgggcgggggtgtgttttgannggggaggtttggggttgtttggtggttttgttcntgggggccgggggcgcagaggaaaataccggagaaggttggtgtgggcgcnnnnnnnnnnnnnagtgtatctgtttttccttggtttcttgtgttcttggttcnnnnnnnnnnnnnnnnnnnnnnnnnnnnnnnnnnnnnnnnnnnnnnnnnnnnnnnnnnngtgtgtttgatagggtttgagggtttgtgggcccgttgggtggttttctgccgttggggtgcggtaactattcgaaagttgtttaaaccagcactgttatttgtcaggacaagagcaaaaatcaccccctgcagaancttgggaactatgtacagaactttgcagaatagaggcaatactttagcttaagcgtgtctgctgaccagagaatggaattctgcgtggactcaaggaacaaaaggaaactaggcagggaaggggaagaaaagtgcccatctgaatcaaacttcagctgccatcagggcacatcttgtggtggtcacagattgtaggctgttttttggaagattcgggttcagcacaggattccatttgtctacttggctacacccctggctgaggtgccatgaggtcaatgtcactcaagttcctggccagccaaactcccgcagcaaagagtcccaaatttagtatcaagttcctccggaagtcattcctatcagtggcaaagcggtagacgccccgaagccaatctcccacgttgtccggtatttcgggagtttcattagccgagccagcagcgctcaccgggacagtgctggaagccatagtgccccggccgtaatggccgaattcccgggcatatgtccggtaccgtcgactg

SEQ ID NO: 128495 - DNA, 1808 bp, Homo Sapiens
aggggcgcgggggggttttcgtgtctgttcgggagtaccccagccgctcagttcctgggcgccgggatttccctcggagagccgggtatgggccctgtttcccctgccctaatggggcccgcggcgcccaaacgaaagggttctagaaagtttttttgggggccgaaggcggcccgacagagtttttctttattgtcgcttttctcttgttccgcctttgtgtgcggtatttatttcaaatgttttttaaaacagcactgttatttctcaggacaagagcaaaaatcaccccctgcagaagcttgggaactatgtacagaactttacagaatagaggcaatactttagcttaagcctgtctgctgaccagagaatggaattctgcgtggactcaaggaacaaaaggaaactaggcagggaaggggaagaaaagtgcccatctgaatcaaacttcagctgccatcagggcacatcttgtggtggtcacagattgtaggctgttttttggaagattcgggttcagcacaggattccatttgtctacttggctacacccctggctgaggtgccatgaggtcaatgtcactcaagttcctggccagccaaactcccgcagcaaagagtcccaaatttagtatcaagttcctccggaagtcattcctatcagtggcaaagcggtagacgccccgaagccaatctcccacgttgtccggtatttcgggagtttcattagccgagccagcagcgctcaccgggacagtgctggaagccatagtggaaagcttcgcatgggcctcggtggaggaaccgtatcggcgtcgccggtgaatgacgcacctccggtctggcacttccggctgctaccggccggcagtgggggcgctgttcgcttagtccgacatccggaagagggacggccctctgctgcgcctccacgaactcttaggaggggtatggagcgcggccccggttctacggtcccctgctcccggtcccacctccggctctccagccggtatactgtcacgcgtgctgtgatcatttaattggcttgggaggaggatggtggggtacggggctgtcccagcctgtggaggtgggggtaggggctatctcagcaggggaagcttagctttggggaatggtttttgccaagaaagtctccgccaaaagtcttagaacgcgcagtactgaagggggcgcactccaaacttgtcacctcgccgcctcttgcgggcgtgcgcctgactgcgtctcagtctaggattgttagggggaggctagccttgttctcccgctttacagacccctttcctcccactcacatcccctctctgagctgcgccactagcacatggtgcagtgcgtcttagaggcgttgctgtcctctgcttggaggcttccgggggtcttccaggactggggaaggcgctcgcctaagaaaaatccttcaggttccgagtcagaggaggaggagcaggtggagaaaggggtgtccttgggatcacgaatagtctccaggcggcattgctcctgccctttgggtgcctccgctttgtccccaggtcggttctcctgctggggactggatccaggcagccccctctgagtttgcaggctggaaccgccggcagcagcgagaaggagtgttcgggagagggttgcagagttcaccgaggtttggtcccttccttcagttcggtcgagtccagtctcacctgttccgggccgggtcggaaacgctggtctcagagccgcggagctggactacacctcagctagtgggtgccgtgcgtgccagaggtaga

SEQ ID NO: 128496 - DNA, 648 bp, Homo Sapiens
tttcttagccaaaatataatcttctttaatataaaataagtccacatgatgtataatggtaaaatattttcaaatatctcacatttgttatacaaataaggactgtatttgattatttttgattgccacccaataaatccagacaataaacataattatctctacacccaataatgagcattgattccaggaccacaggagaagagaagacttctccaggaagttcataaacactttgcaattgtccactctgagattccaagatccacactttcccatcagtagatgctgctgccagcaacatttcattgctgccattgtagttatggaaagcaaacggtgttgcatagacccttgaagtagtttcaaatttccactgcaggtgacctttcatgttacaacagtagataaagcaatcatgggaaccaaaaaatattttttgctctgatggtgaggtacacggggatgaaaagattggtccactggtagagaactgccaaacctgttctccaaagtgagtaaagcagagtaaattcccatctacacagccaatacaaatatactgtgagcaacattgtggggaagagaagagtggttttccacaggaatgtttccacataacgttcccagtagcaggatttacagcca

SEQ ID NO: 128497 - DNA, 613 bp, Homo Sapiens
ataatttttatatttctctaatttttgattttagagacagagtctcattatattgccgaggctgaccttgaactcctgggcccaagcagtcctcccacctcagcctctccagtagttgggactgcaggcatgcaccactgtgccaggctaaaccgtaacattttcttgtggttgattatgtcacccttcagactcagtagttcttgatgtctttccttgtaggaaagcagctgctgttttggatctcagtttgattgaggtggtgactatccctttggtaccattgagaccagaaaccagaccaccagttggacattgtttttttctggttatcctgtcctgccttactatgagatttacggatgtttggggacacaggtctctgggctcatttctttttctgaggattcatataattgcctagtttttggcttagaggttggtccttccctggtttaatgatgcttttgttcagactgtcctctaggacttgaattttgaagcagaaacagaacagcaacctgatcctcagttatactgcaaagcagggcctcagaaagggtaactccaattactgactttcacctaaggtgaaaaagcatccggcttcttt

SEQ ID NO: 128498 - DNA, 487 bp, Homo Sapiens
  misc_feature (301)..(350): n is a, c, g, or t
ttttgttttttaatatgctttattctgcatattagtatcacattacacagtttggtcatggtatttgtaacctggagagaatactagtgcagtcggtcttcataccaccccattcacaaccagcttaaatggcagtatccctctgtgaactcaactacccctcctgtgggtccaggctgagctctacaggtcagcctcttcatctcagcccttctaggtcctgctgtcagggctgagctgtcacttcacttttttcccagagtagtgcagcatcctctctgaaacctgagctatcatgacnnnnnnnnnnnnnnnnnnnnnnnnnnnnnnnnnnnnnnnnnnnnnnnnnnagagacagagtctcattatattgccgaggctgaccttgaactcctgggcccaagcagtcctcccacctcagcctctccagtagttgggactgcaggcatgcaccactgtgccaggctaaaccgtaacattttcttgt

SEQ ID NO: 128499 - DNA, 631 bp, Homo Sapiens
caagatattacatttaatttttaataattagtaatatgtaataattcatgcttagaatatcattggccaggctggaaacagacccaggtgcactgctggattgctgagttcgagaataagcaccaggctcccatcccggtggagtccttgctgctggatgtgggtcttgctggtcaaatgaatggagacccggagcacaggcagccgaggattgggcagtcatcgggatggcggctcatctgcaaatagccagtgcacacctccaggcaacaggatgacgagtctctgcagtgtgccctgagaccctgcagctaagtcctgagatggaaaagccaagcttgcaggctcttccatggaccactgaaatagaaagtctgggataagggcccagaggtcttcattttttcggaaacactccagcagatttttatgcagttccattctggatgccatgattttccaattcaattattcgtcactccacgaagataaatgcagaactcatccagagtccatgagccataaatccacagcatagcaggcttctcattttgactactgttggtgagagtaagttacttacatttgaatcctggaataaaccagctattactgactcaaattcagaatc

SEQ ID NO: 128500 - DNA, 2779 bp, Homo Sapiens
gctcttccttttaaaaactttatttaaatggagactcttagtcaaatgattggaaaaccaataacgaaaaatagttcttcaggttcttctcctggaaaggcggaggacacaccaaactgcactggccctgtcaggggacacggcaccctcgtgggaccaggctcagccctcggggtggcacgaggtcctgcaggctgcaggaccctcacactccagccccgtctggtgacccaacccgggcccgtggtgcatgctggggaaggccactggccggcccctgggcttcggctcctgaggaggcatggccccacaccctgcccggccataaatatatacagattcctgggcatccagggcaccaggaccgacgcagagctggggtcctgtccctaagcctgtggcacagcgactcttgacatgggagccagggagctgggaccgccgcacccctcccctgcctccctcctggggtcaccaccctcaggcggctgccagctggcctaggacgcggcggaactgctgggtgctgtggcccagctccttgaccctctccaccatgtcctgggccgcggaaggcgatgggtactgcaaggcagcggccttggtggtggccacgatgccgcgcaggaggtcgcacagcaggttgctgtagtgggtcacctggctgcgcacgtcagcagccttggcctgccgtgacagtgtgtccccgatgaacaccagcttgtgggcgctgaggatgacgaacttgctgtgcgccacaaagatcttgggcggctggttggtggccacggcggtaaagaaggcgtccacggcgttggtcagtgtggtcaggttggcctcacactgctccaggtagaagagcagcagctgccggtccgagggccccaggccgcctgttcgccccggggccaggggttgggctggcgtccagttggccaggtcgtggtctatgggccgtgacacctcctgttccagtcgttcaaactgcttcagctgctgcaactccagctggctcttgccctgccgcgtgatgctgcccttttccagcagctccttctgggtcttctcaaactcctccttcccctgtaggtggacgtagtcatagtcctccatccagcccccctcgctgttctcgtactgcccatctggcgagtcctgggaggtgaacttagggggtgagggcaggggtcgtgactggatgctgctggtcttgtcagtggggttggggtgcagggtgccacccccctcaggccccggggcagtggccttggtccgtctgaagagcagtgaggcattgccgtgcaggaaggaggccagctgcttggcgtcctcgggcacagcccgcgagcaggccaccagccggtccaggtcctcaagggtggctccagagcctccccggccagcgtcgagggcctgaccatgtgccaccagcgtctggtgcacgtcctccatcttctgcagctgccggctaagcttggcatgcagggcacggtcagatgtgtgggcagcattgcccaccgcgctgcgggcaaactccaacagctcgtggacggcactctggacggcggccacagcagcctgcaggtcctgcaccagcggctcctgtggctcagaggggctacgccagctcccagtcgcaccggcgctgcctgccaggtccagaaggtgggcaacggtggcgctcacaccctgctgcagccgtgccagggcctccacagcaacttccagctccaggggttcccggcccggccctgccacctccaaggaggacgcagactggctgctgcgtgtgctgccggtgctggaggccgacaggcgcttgccctctgccggggcttcacgttcagctgggggaggcaccgcatacacaccactgtcgaccacgccaccatcagccacctcaggaggaagcacccgttcacggggcacatcgtacagggtgcccgggccaggccgccgcaagccagggggcacgtcgtagaggtcaggagccgggggcggcacgtcatacacgtcctcggccggcggggagtctggagggggcgcagccagtaccagtggggtgcgggccgggtcaaagggcttggccttggcgaaggcggggggcacatcgtaggtctcctcacgcagcagtgggccatcgggcacatccttgctcaccgatggaggaacgtcgtagactgcgtggtggttggacggtggcaggcccttctccacactggggggcacgtcatacacctccagcaacgggtctcggccattgggacccttgacagccatggggggtgtgtcatacacctcctggccatactggctgggaagcagcccccgaaccgggggcacatcatagatgtcctgtggccccggggccagcaggtgtcgcgggatgtcgtactcgtcctgctccggctgggcggcctcgtatacatagccctgccccacgcgggtgggcaccaccacctttgccgggggcttcgtgccctcccagctgcgtgtgtccatggacggggggacctggtagatgtcatgccccatcccggcagaaggtggcacctggtaaatatcctgggcagggcctccaggccctgggggcacctggtacaggtctgtggccgggctgggaaacgggtgatggggtgtctgcttcgagaaggtggatgtctgcttggctgggggagactggaactgagggctgggacccgggacttggtagaggccttgctgagccttgctgggagtgggcacccaggtagacgctgcgtgtcctgctccagcaccg

SEQ ID NO: 128501 - DNA, 794 bp, Homo Sapiens
ttcttccttttaaaaactttatttaaatggagactcttagtcaaatgattggaaaaccaataacgaaaaatagttcttcaggttcttctcctggtaaggcggaggacacaccaaactgcactggccctgtcaggggacacggcaccctcgtgggaccaggctcagccctcggggtggcacgaggtcctgcaggctgcaggaccctcacactccagccccgtctggtgacccaacccgggcccgtggtgcatgctggggaaggccactggccggcccctgggcttcggctcctgaggaggcatggccccacaccctgcccggccataaatatatacagattcctgggcatccagggcaccaggaccgacgcagagctggggtcctgtccctaagcctgtggcacagcgactcttgacatgggagccagggagctgggaccgccgcacccctcccctgcctccctcctggggtcaccaccctcaggcggctgccagctggcctaggacgcggcggaactgctgggtgctgtggcccagctccttgaccctctccaccatgtcctgggccgcggaaggcgatgggtactgcaaggcagcggccttggtggtggccacgatgccgcgcaggaggtcgcacagcaggttgctgtagtgggtcacctggctgcgcacgtcagcagccttggcctgccgtgacagtgtgtccccgatgaacaccagcttgtgggcgctgaggatgaccctcgtgccgaattcggcgcgccgtcgacttcatactctccccccctttatgca

SEQ ID NO: 128502 - DNA, 1298 bp, Homo Sapiens
  misc_feature (1271)..(1271): n is a, c, g, or t
tttaggcgcagcacaacgggctttaatcgaccggggcattacatctcgcgcggattgaggtgcacgtacatggtgcgcggtcaaggctgcttgcgaagcggggcacatgtagttctcagcagcagtggcatcggcactcttgctcacgatgagaacgtgtagatgcgtgtgttggacgttgcaggccttctccacactggggggcacgtcatacacttccagcaacgggtctcggccattgggacccttgacagccatggggggtgtgtcatacacctcctggccatactggctgggaagcagcccccgaaccgggggcacatcatagatgtcctgtggccccggggccagcaggtgtcgcgggatgtcgtactcgtcctgctccggctgggcggcctcgtatacatagccctgccccacgcgggtgggcaccaccaccttttgccgggggcttcgtgccctcccagctgcgtgtgtccatggacggggggacctggtagatgtcatgccccatcccggcagaaggtggcacctggtaaatatcctgggcagggcctccaggccctgggggcacctggtacaggtctgtggccgggctgggaaacgggtgatggggtgtctgcttcgagaaggtggatgtctgcttggctgggggagactggaactgagggctgggacccgggacttggtagaggccttgctgagccttgctgggagtgggcaccaggtagacgctgtctggctggggctggtaggtgttggggagcatgggcgtgtactgggaggccggaggcgctggggcatggaggccaggctgaggctgggccggggtggcgggagggccggagccaggccctgctggcttcttatcatacatgcccaccaagatcttgaggcggttcccaggcacgatgccctggcgcccatgcagcgagcagagccaccagccgtccaggccctgcgtgtcctgctccagcaccgtcatgatgtcacccttgcggaaggagagctcatccggggactcggccacattgtcatagagcgctttggccagcacgttaggcacggacatcttggccgccgcccccggggcctggcgggcagcggcgccagcgggctgggggctcgggtccgcccgcgccgctcagaggccccgcgaggggtcccggcgctttccggctcctccggctcctgagcgttcccggacgccggactgtcccctcgtgtcggattcgccacccaggcctcgctacctaggaccttagggggcnttatctttggtgggggagggtgggtag

SEQ ID NO: 128503 - DNA, 1150 bp, Homo Sapiens
tttttaacaagccaaagttgtattttttttaaacaggaaaattatgtcaatataaaacagataaaaagacaaaaatcaaaacacacaacacagaaaagcacaacactcaagaccagtgcaaacccttcccaacccacttcccaggttttaaaaccttgattacagatccccaaggattagactgtatcggagaggtcacagtattgaatcagaaaaagaagacatgttttaaaaggtctgtacacaggtagtggtgtgtggggtgggggatgtacacttcatcactccaacatcaaaaaacatgatgcaaaaaggatttcagcgatgaccacagatttctagaaccctaccacgtatgctagcccccctccccatccacttttaaaagttgcttttaaaaaggataaaaagtgcacagacactttcgtaaggcacagacagattgtcacacaagtcgtttcattagggactcggataagacagcgagacagttaaataccgagaaatgccaggaggccgcatgttcctgagccggtgccccctgccaggactggggcaggcgcagggccgagcaatgggaggttattgcctctgcctcaactggacggactcaccggggttctcctgggccttggcgacttatttccagggcctgaaagcagcaatttagccaacctcctcactgtgtctccctggcaggacctgagggtgatcaccaaccggcggggcctctgggggttctacttaacgccgttttggcagcagctcactgactgcaatgtgcccagcatttccaatgaagaggaggttctgtgaagcgcacagcaggttctggtcaagaaggcagcctttgggcacccacctcaacagacccaaggcagcggatggccaagagagcccagtggattctgccccaaatatctcatttccctcttagtgtcacctctgccagcatcacagctggggcacagtcctctctgctctatcctcacagcacctcacacgtactaggtactcagcaaatgtttctggagtatctttgtgtgcgttatgtggtgctgttttatcaaacccctgaacactcataatctgatttctggtttactcagcaaacctctactgagtaactactacgtgctggcacaggacc

SEQ ID NO: 128504 - DNA, 1054 bp, Homo Sapiens
  misc_feature (360)..(372): n is a, c, g, or t
  misc_feature (711)..(719): n is a, c, g, or t
  misc_feature (977)..(986): n is a, c, g, or t
ttttccctttgggtctggcagcacatgccagccaagtcccaaactagtttattagtttaaccaaaaggtaaacagatgatggagatgcagaaagacaagcatgcgagcagctaaaagcattacccggctgtccaccaggaaacaaatttaagacatttaaagtggcattaaataaatgaagctaagttttagctacttggaatttccattgtctttaaaaaaggtaaatatatatatattttacattgcagtatataaatctagactctacatatacagtataaatacacaggatgaacacgggcacaacatatatgtcttggtggtcacgccctcaaccaggccaatggttttatttannnnnnnnnnnnnaccttcgcaccaagaatatcaggctgaggctacatatacttcaacctgcatgagggctgccaccctggccatctctcctacaagcacagaagcacaaatcgaacagggattgaaaacagaagaaagtgctttttgactagttgaaacccagtcagtctttacaatgtgtagtccaatctcctggaaagaccaaaggaaattggaggacttcctggcccgttcttcggtccattgccgcaaatctctaaactttccctggtgcttcttgtggaattcacatggctatttatgcaacgcaaatcccacacaacttttaggagctgtattatgggattaagnnnnnnnnntagctccatgttacaatctgcacttcatattccgggtttgttctctaaatttttggaataaaaactggtattttgagaatcatttcttaaaaaggacaacattctgaaagtgcttcttacacatgtcaatattccacatatggcttttagttcaaaccccagcacagctcagacttggaaggaagagtgtgatggtgttatgagagacaaaagtgtcacttaacaatgatactgtgatagcaagcacgggaacctggnnnnnnnnnngttattgattccatctggaagaatgtacctcttagacaaatgattcagataatctatacagccccatc

SEQ ID NO: 128505 - DNA, 1537 bp, Homo Sapiens
  misc_feature (49)..(60): n is a, c, g, or t
  misc_feature (195)..(195): n is a, c, g, or t
  misc_feature (416)..(425): n is a, c, g, or t
  misc_feature (514)..(623): n is a, c, g, or t
aaagtaaggttgtgggaaaaaagcggttgtgataaggagagcgtccgcnnnnnnnnnnnnaaggggttatatagggggttttcccggcgcttttttcgtagataaggatagacgccggaccggggagtccgcaaaaattttaggtttggggggcgcgccgcgggggagaacacccccggtgttggttagaaactnccccaagtatgaggtcgccgcaaaagggcatcccggattttggagcggtttgtgtgtttaaaagaaggaattctatagtggggtttctcgcgacgggggaggttgggttttgtattttggtgtggaggggaaggtggcaaaaggggggatggtggtttttggccgggggggttgtttttgggaagaaaaggagtagggccacgggttccgctgtcgcgtannnnnnnnnnccgggcccacaaaaagagggttttaaaaaatcttttttaggggcgaagggcgccggcaaagaagaaggtgtaggtgtggtttgtgttgnnnnnnnnnnnnnnnnnnnnnnnnnnnnnnnnnnnnnnnnnnnnnnnnnnnnnnnnnnnnnnnnnnnnnnnnnnnnnnnnnnnnnnnnnnnnnnnnnnnnnnnnnnnnnnggtcatttcataaaatacgtgtttattattaccataggcctacagtccccggtattcttaacacatcttgcctgagaagtatcacactcatgcctatcaaccagctcacacatttaatcaaaggaatttggcagctgtagggttgtcttttcatccatatcgtccctggaattaactgtcctgctataccagtcagattgagcagcatctgtcaagagtttcagtcccacttgcagaggaaaggctctctggcttcggtccgtggctctccgtaggtgccgtgtctggacccagcctaccttcatctctgttaggcttaggggtctttctccacactgtgtcttgtccaatcacaagacttcaacggagcgggcggtctggcctaggctcttatgcgtgggatgtctgcaggccaacaatcccagtcgggattcgaagccgcgcgcagtgcccggaatgacccctccacattgatgccactgtagagcccggaaggaaaagcaagcggcctcggccccgcacagcccaggattaaatgtttgcgccagggcccctctggctacctggtggtggccccgagcggcctcggaggccgcggcgtagctcctgggtgaaggcgtctctaaatcgctcagcgcggcggcacagggagcccacgggcccagccgcgaggtcctgcaggcggcgggccgcgtcctggccccgcagctgggcctgcagcagtgcgaaggccgtgagctgcgccgcacgtcggataggccgcgactctgacagacgttccaccagctgcgggctgtgcagcagggcggccagcagccgccgcagcaccatcttctccaagcgcccggaacccgacctcgccgacgcgtgggtcgacgatatcccgggaatatccggagcgtaccagccgcttt

SEQ ID NO: 128506 - DNA, 754 bp, Homo Sapiens
tttgttgttgttttgtttttaaagaatacagaaggagccaagcttttttgcactttgtatccagctgcaagctcagggcagagtcaagggcctgggttggaaaaacctgactcacaggaatgcataattgacccttgcagctacccaatagcccttggagctggcactgaaccaggctgcaagatttgactgccttaaaaacacaaggccctctaggcctggcagggatgtccctgtgcccagcacagggtgcctggcagggggagaccacaggtatgcaggtggggggacatggtgtggcactgggggctcgaagactggtttctagcactaccggtcacggccatgtcgtcctagaagggtccagaagattattttacgttgagtccatttttaatgttctgatcacctgacagggcaccccaaacccccaactcccaataaaagccgtgacgttcggacaaaccgcgtactgtgaaccttccggccccaaagccccggcccggccaggggtgggagagtctcctccagcacctcttttgtgggcccgccaccccccagcgttatccccgtgtaatgggtggaggcggaacaggccacatcacggcatcaggtctctacagcttagcaaatactgacatttttccgtttgggggatggggggaaccacttcgcctaacgctcaaacacatcaaccccaggacttccttttgtgccctcgtggcgagttcgccacccaggcctcgctaccttg

SEQ ID NO: 128507 - DNA, 610 bp, Homo Sapiens
caatagtgtcctctaattttattgatgcttcagttttcataaagtgcaataaacaaaataaatagatgaaaaaagctttgaagatttatatacagttttgaggttaagataaattactgactatattcctttcagccttttaactctgtgaaagctgtaacgtacattaaaagcacattgaactaggttaaataatgatctttcccccttagatcaatctagtattaaggagtatataattatgcaagttcattctataacacgaggctagactaaaaggaaaatttttgtgctacagactaaatccagatacggtcaggtgctgagcagtattcctggcttcaaaataggaggtatctgtttcatcatctggctgggggatgaaaggcatagtctgatgctgcagattttcccagtccacatcactgaagagaggatgacgttttagctctttcattccagctctctttgtatcatcaatggttaaaagtatttctactgcactttgagcattatcagataacttttcttcaccttctggccaagggatatctcttttcagaatattctggaatacttgttggggtgtttcatcattgaaagggggaat

SEQ ID NO: 128508 - DNA, 462 bp, Homo Sapiens
  misc_feature (74)..(75): n is a, c, g, or t
cagtggattcccttccgggagcactgctattctttccacatggagctgctgctgggccacaaggaggcgcgacnngccgagagagcgggtggggccgtcctgtctatcctggatgagatggagaatgtgtttgtctggaagagttccctgtgggcgcaaataagttccctaacatctccagctcctggctctggtttggagcaaggggaagggttgccagagtcctgggggccccagaggagcaggagtctgggagggcccagagttcaccctctagtggatccaggaggagcagcacccgagccctggagtggcccagtacccttccaagaggccacagtcccagccaggacaaagtatgcggcccatcctggtgcgacagcgtgggacaatgtgaacatggactcgaagacatggccctttctctgtagttgattttttaaatgtgccattattgttttt

SEQ ID NO: 128509 - DNA, 2228 bp, Homo Sapiens
  misc_feature (57)..(70): n is a, c, g, or t
  misc_feature (255)..(256): n is a, c, g, or t
  misc_feature (349)..(349): n is a, c, g, or t
aggggaaaaggcccccgggttgcacttaaaggggggttttcaaagccaaggccctcnnnnnnnnnnnnnnccccccccaccagccccagggttttgccccagtttcgggttcccaaacaggggactccccagggccacccttccattaggccaactggacaggcagctggtgggggggccagactgaccccagggccccagttccccagttcctcccgccttggccctgcccacgcgctgggctctattctgtgnnctcatcattttccatgtctgacaccaggatgttcttctcagtggctcggtggggctggagctgctgcggctgtagcgggcaccctcaaaggcnccgcgctcgatgctctggcgcctccggtaaaggatgagggctgcggtcagcaaggccaggagcagcagcaccgccatcagcaccaccaccagggccgctgggttctctggaagcgctgatggggagaaagctgctctgctcaagcacgaggaagctttggcagacgacaccccatggtgatgttggtgcaagcgccggggcgccatagcccgctgtttgctctgaatccagtagcagctgttgtggctcagcatgctggggcccaagcccggggggcccccagttggagtagttcacagctgtgttgtcctgccagaccagagtgcctcctttggggttgaagttcatgcccagccaggcgccccgactctggccctcatagctctgcaggtgctcccagacaaacacattctccatctcatccaggatagacaggacggccccacccgctctctggcagcgctgtcgcgcctccttgtggcccagcagcagctccatgtggaaagaatagcagtgctcccggaagggaatccacgcggagtctgccagtccctggggacagctgccatggtagcttattcttcggggaggagggggcccactgctaaccccacacacagccccttgcagcttggtgtcacagctggtggtgcgccaggccccgtccacatttacgtaggtacagccccccggcttgctgcggctccccgtcctgccagcccacgtagttcagcggctcctctgagacccaggagtaccgccgagagccctcctcgccagccagcccaatccagagcggcgtgcgcagccctcgggcagcctgcgtgaggaaggcctgggtgtaggggtcgggcacgtaggccaggctggcattgtggctctcacacagcaggagggcatcgtgccagcgcagcggcttctgaagcagccggaaggtgccgttgaggtaggagagctcagtgcccggggcggggggcagcgctgctggggacgggctcagggaggggtccgtgcccttctggcagatgaagccatgggtctcctccgtgcagctccgatcgtcccagcggccagtgaagtgggctgaggggctgtgcaggaccaccgcacagctggtcggtttgttgccactgggagcagggctagggccagagggctccccaggtgcccagttggcatacatcaaaggctcctgctccacccactggaagtccctctgcgaggcatggaggccaatccaaaggtcaaaggtcacattgggcaggctggctgtgatgaatgcttgctctaaggggtttgtgatggtgaccagctgggcctcttgctgttcacaggagaactgtgcctctgaccacttcacccggctctggggttcctggccctggacctgaaaacacttgttgaggaactggatccagtcagaggggcagccccccagggctgtagttggcaggtctgggggctgcgtttctttggtgacgttgctgcgcttgcagatgtagggcaaggctgtcaggcacctctggtccccccagtcctctcggctggctgtcatgtacacgcacttcttgtccttgccgacaggccgaggtttgcctggtgcccaggagatgaagtttataatggaaccatctgtccatctgaagcgcccatcgctctcagaggtgtgcaggccgatccaccagtgctgctcctgggcccgggagaacttctgcaagttgtggctcaggaagtctagctccgcctggctgtgcacggaggtcagctcggcctggaaccacgtgcagatgcgctgcgcctgcgcccacgtggagtggtgctcaaagaactcctcgtgccgaattcggcgcgccgtgacttcatactctctcgcccctaa

SEQ ID NO: 128510 - DNA, 654 bp, Homo Sapiens
  misc_feature (641)..(641): n is a, c, g, or t
ttaaaaacaataatggcacatttaaaaaatcaactacagagaaagggccatgtcttcgagtccatgttcacattgtcccacgctgtcgcaccaggatgggccgcatactttgtcctggctgggactgtggcctcttggaagggtactgggccactccagggctcgggtgctgctcctcctggatccactagagggtgaactctgggccctcccagactcctgctcctctggggcccccaggactctggcaacccttccccttgctccaaaccagagccaggagctggagatgttagggaacttattttggtccccacaggggactcttccaggggcagagccctcccccgcccggcaggagatgacatcccagcccggcccagctcccaccctgggaggttggggtgtctctccccagtcttatctccagcccagcagacaccacacccgtgccctggttctcaggcccaacccacctaggcccctcctgccacgccccacagccaccccagcaggcacaggagtgatggatgctcagccccctcagctgaccctcatcaggaacaagagggctccccaatccccagggcccggctcaagaaggaaggggtgggagagaaggggcgagagggagcagggtnaggggcacagagc

SEQ ID NO: 128511 - DNA, 2359 bp, Homo Sapiens
  misc_feature (424)..(432): n is a, c, g, or t
  misc_feature (500)..(545): n is a, c, g, or t
  misc_feature (570)..(613): n is a, c, g, or t
  misc_feature (633)..(652): n is a, c, g, or t
  misc_feature (717)..(826): n is a, c, g, or t
  misc_feature (1964)..(1964): n is a, c, g, or t
  misc_feature (2282)..(2299): n is a, c, g, or t
gtgggtgagcgggcgtgggtgggtctttctccacgtttcacacggcgagagaccgagggagcacgtccgtagagaagagtgtgtttgttggtgggggcgccgccccccaaaaatataaatacacccccctccgcggctcgtcgtccccgcgcatttttttatcattaaagcgcgccccgcacccccaccaatgttagtgggtgtgcccctctcgctgcgtgtcccgcgcgcggggcgggaagagaaatatactttttcctcgcaaaaaaataccatcattcctcccgacgggagagaagaaaacaaattttcttttcctgggcccccgggcccgaagggacacatcgcgcaggggtgtagtttgttttttcccccccaccttatatttctcgttttcatcaaaaagagttctgttttgttgttnnnnnnnnngggggagcccctcccaaaccactcctctgtgaggagaaaggagcttgtccccccacaataatgttgtnnnnnnnnnnnnnnnnnnnnnnnnnnnnnnnnnnnnnnnnnnnnnntgccccatagtgcgccgcctttttnnnnnnnnnnnnnnnnnnnnnnnnnnnnnnnnnnnnnnnnnnnnttgtgctttatatatggcgnnnnnnnnnnnnnnnnnnnntcttcaacaaaaaaaaggggccggcggaaaacttgggccccccccagggggttttttaaagcggnnnnnnnnnnnnnnnnnnnnnnnnnnnnnnnnnnnnnnnnnnnnnnnnnnnnnnnnnnnnnnnnnnnnnnnnnnnnnnnnnnnnnnnnnnnnnnnnnnnnnnnnnnnnnncgcaagtggaactttgaacatttattacacgtttaataatatttcaaaattattgataattcttttggatgtgataagctttgtaattgtcttttaatgagctctcatcttggagagatacattctgaaatatttacagaagaaataatccgatgcctgagatcagcttcaaaagaactcaggatggggcagggacgggttgtaggtagtcggtagtcagggtactgggtacacggatgttctttgtactgttctttggtctgttgcgcaggttcgaaatgcttcctaattaaaaagcctaaaaagggacttggcaagctcccatccagacttcaaccccacaatatggagagcactcaggtccgaggcgttcctgctccccagctccctgcaaaaatagcgccaggcaaggtccgaggcgagggcgatgcttccatgagggtcccgccgactgcgtcgcgatcctcaatggctcagcgacttgcggcccttgagcattcggcgaaggatgacctgcacgccggccggcgtgctcaggcgccggacccagccgtgcttgttcttgcgtttgatgttgctcggctgatactcattcccgcgagccttgccccgggcctgctgcggggtggggaggccccaggcgtctgggaaccccagccaggcccggggctggagccacctgccacccagcaacgctgccgacctactcgtggggcccaacagggatccagccaagacagccatatccgcagtgggtcccgcagtaccggctgcgggcgattccggagcccagagccgctccagcccttgagccctgcgtcttctgcagatcctgctcctggcattcctgaagctcatcgacgagggcagccacatggtgatgctggaatgccctgagacggtcaacacgctgctccacgaattcctgctctgggagcccgagccctcgcccaaggctctaccggagccactgccggcgcctccagaagacaagaagtagccgctgggccggcggggcatcgcttggtgagcacagccgcagcaggaggaggcccgagcctgcgccaggtctgcagcgcagaccacctgggcgggccgttcgctccggtgggcggggccaggtcagggagacgccccncaggctgcctgggcggggcgtggcatccgagggagcccagcggacattccgctctccgcttccgtcccgcggggcccatcggcgttttggggccgcagccgggaccctcacggaagatgaccttgtacagaagctctcccctcaccttccccccaacgccacggccaaggcaggcccccccaccccgctgtcttccgtgtcagccgtgcttgatcctgggacccacgagccccacagggaccctcgaggccccatcccgttatccgagaccctttcctaccccccattcctcggcgctgggagctatttttgcccaannnnnnnnnnnnnnnnnnctggcgccaccgaacctgcacatctcaacttgtaactcaataaacagaagtgacaatcgg

SEQ ID NO: 128512 - DNA, 903 bp, Homo Sapiens
  misc_feature (112)..(121): n is a, c, g, or t
  misc_feature (137)..(302): n is a, c, g, or t
  misc_feature (306)..(316): n is a, c, g, or t
  misc_feature (341)..(354): n is a, c, g, or t
  misc_feature (363)..(472): n is a, c, g, or t
  misc_feature (664)..(750): n is a, c, g, or t
aggggccaagggggtgattccccgggggattcaggtttctcaacccctttggggggggttccccgtggggcgaaagtttaaaaaattccaccccttttcccaaaaggggccnnnnnnnnnntaatttaaatttgaannnnnnnnnnnnnnnnnnnnnnnnnnnnnnnnnnnnnnnnnnnnnnnnnnnnnnnnnnnnnnnnnnnnnnnnnnnnnnnnnnnnnnnnnnnnnnnnnnnnnnnnnnnnnnnnnnnnnnnnnnnnnnnnnnnnnnnnnnnnnnnnnnnnnnnnnnnnnnnnnnnnnngggnnnnnnnnnnnaaaaaaagtttttaaaaattttttnnnnnnnnnnnnnncccccaaannnnnnnnnnnnnnnnnnnnnnnnnnnnnnnnnnnnnnnnnnnnnnnnnnnnnnnnnnnnnnnnnnnnnnnnnnnnnnnnnnnnnnnnnnnnnnnnnnnnnnnnnnnnnnaacatttattacacgtttaataatatttcaaaattattgataattcttttggatgtgataagctttgtaattgtcttttaatgagctctcatcttggagagatacattctgaaatatttacagaagaaataatccgatgcctgagatcagcttcaaaagaactcaggatggggcagggacgggttgtaggtnnnnnnnnnnnnnnnnnnnnnnnnnnnnnnnnnnnnnnnnnnnnnnnnnnnnnnnnnnnnnnnnnnnnnnnnnnnnnnnnnnnnnnnaagcctaaaaagggacttggcaagctcccatccagacttcaaccccacaatatggagagcactcaggtccgaggcgttcctgctccccagctccctgcaaaaatagcgccaggcaaggtccgaggcgagggcgatgcttccatgagggtcccg

SEQ ID NO: 128513 - DNA, 629 bp, Homo Sapiens
gtcattccattgcctcagttttaaatatttatttaaaatccagaggggaaaaggagaaacggaacccattggggttttaatacactgacatgtggacagagacgtaaacgaagacagcaggaaaacccaagaatgagacagaggccagtggattctggcagcaggagggatccgagcgctgagatgaggcccgagctgctacaaacacgcacttccacgcagagcgtccaggctggggcggcagggcgaggatacagaagtgttgggaggggggacgggccaaagtgaggtattaaataataaaaatcaaatccaattcccaaagagacacaactttaggagagaaatacacaaatagagactttcacatacattttccccttctataaaaataattccatggttaaaataacctcaaaatccaattcaagcgccgacttgttcgctgatgtagcacaattcagaggacgctgaacgtcactatggtgtcgaactccgagattcccattattattctgtctccttgacccaaatttacacttggagctaatgacaatgggtttctacagaatttaatgacaatgaaaaagcaggaacgatgattgcatcttgcaaggacaggctcctgg

SEQ ID NO: 128514 - DNA, 1449 bp, Homo Sapiens
  misc_feature (335)..(348): n is a, c, g, or t
tcctatgctttttttctattttaggcacaatgctttaataaattacacaaagactacaaacctttattacatcaattgttacaaaaggctaagtggagaaagattacttatctgaagctgcacaaaatcagtgggcaatatggatttcatttaagcttgtcaattctcctggattaaattcttggcgctgtctcacatattcccaagtcctacatgtaggatgctaaaagttgcagttactaggttgggaaagccatgcccagacgcccctgtgaaaaacatatcaatatattaagttccttagcaaatcacatctagattaagttcataatgcnnnnnnnnnnnnnnaactttgcaaatctccaaacttttgctactttcttaataaaatacaacaaaatttttggcattccagccacggaaaaacagatctctacctctgaggtggcagtaatccaagcagttactaggatctacgaaacatgaggcataattagaatgttggggaaaaaatctacagaaatatctatatcttcgtcatgaacctgactgttgagtttatgaaaaagtggaaaaggaacctcactcgttccttccctggtaccttcacagcgtctcccgtcccagtctgcctagttgaatctagggacacttaaaggtaaatcctagcctcttggctgtccttccgtctcccaggattctgctaggccgcacagttggcaagcttaaaactccaaagattccgcactctccgtctttcaacagtcatgtcacagagacacgaaggttagcacaggaacattagtttccaaactcctacccaccgcagaacaggcgggaaggttcggtggccacccggcctctccgccgcgcacatggccgtccgcagctcccacccccgctgccgcgcatgcgccgggcgagccgggacttgcggtcgccgagagcggatcattccgccgctttctttgtgtggctgaagcgctagaaatggcatattttctttcccttcgtcaaaacatcagaccctctttcccctctctccccgcgggaacacagctagggagtgggtaggagcaggatctgccgacgagggcagaggcggaaaatcctcgggcgatgagctgaagaggccgggtccgggagggatgctgggagcttgactcactcgcacaccatgtgtccctccgcgcgcagcacgggggacttttcggtggggattttgggcgccgaccagacgcggcattttcggaaaatagcgccctgtgcagctgaagcgctttgtgtgtagcggggccgcgtcagcccggccgggtacgaggcgcctcgggtccccgcaccacctcctgctgccttcccgtcgccgctcccgaagcttttccaggtcagtcctcgtgccgaattcgccacccaggcctcgctaccttaggaccgttatagtactgcctt

SEQ ID NO: 128515 - DNA, 1438 bp, Homo Sapiens
  misc_feature (1390)..(1390): n is a, c, g, or t
ggggcggcattttcggaaaatagcgccctgtgcagctgaagcgctttgtgtgtagcggggccgcgtcagcccggccgggtacgaggcgcctcgggtccccgcaccacctcctgctgccttcccgtcgccgctcccgaagcttttccagatgtccctggtagatttgggaaagaagcttttagaagcggcacgagcaggtcaagatgatgaagttcgtattttgatggcaaatggagctccctttactacagactggctgggaacttctccacttcatctagcagcacagtatggtcattattccaccacagaggtactgctgcgagctggtgtgagcagagatgccagaaccaaagtggaccgaacaccattacatatggcagcttctgagggccatgccagcatagtagaggttttacttaagcatggtgctgatgtcaatgcaaaggacatgttaaagatgacagctctccattgggccacagaacacaatcatcaagaggtggtggaacttttaatcaaatatggtgctgatgtacacacgcaaagtaaattttgtaaaactgcatttgatatttcaatagacaatggaaatgaagatttagcagagatattacagattgctatgcagaaccaaatcaacacaaacccagagagtcctgacactgtgacaatacatgctgcaacaccacagtttatcattggacctggaggggtggtgaacctaacagatgaaacgggtgtatctgctgttcagtttggaaactcttctacatcagtattagctacattagctgccttagctgaagcatctgctccattgtccaattcttcagaaactccagtagtggccacagaagaagtagttactgcagaatctgtggatggtgccattcagcaagtagttagttcagggggtcagcaagtcatcacaatagttacagatggaattcagcttggaaatttgcactctattccaaccagtggaattggtcagcccatcattgtgaccatgccagatggacaacaagtattaacagtaccagcaacagacattgctgaagaaactgttataagtgaagaaccaccagctaagagacaatgtatcgaaattattgaaaaccgggtggaatctgcagaaatagaagagagagaagctcttcagaaacagctggatgaagcaaatcgagaagcacaaaaatatcgacagcagctcctaaagaaagaacaggaagcagaggcctacagacagaagttggaagctatgactcgtcttcagactaataaagaagctgtttaattgaaatgaacatgtagtttgattttacttttggtcaagaaagaatacaatcttgaactgtacacaacaaaggtacagccatgggaatancgaatgatagaagagactaccgatggataattggacttaagccatgac

SEQ ID NO: 128516 - DNA, 831 bp, Homo Sapiens
ccacacacacagcctttattgagcagctactgggcagtgacgctgccgaggcgggaatcccaccacagtcctgaccgcagctgggacccctttgcctcctctgacacccccacctcaatttgatacccacttcctgagcaaatgtgacccctagggcctgggattcccaagaccaccccgaaatgcagcggccccaccgtctcctgaggccggtgaggccaggggcagcagtgcggctcagcaggtgcgaggcaggcttaggatttcggaatcaccacctggaacttacagacgggcagggctgccacggaggcggtgaccacgctctcaatgcccagggtatagagggcgccgcgcaggaggccgcaggtgaaggccaggaacttgggtgcttcctccagatactgcaggccagaggccatcgggaggaggagggggaagctgttgtcttgcaggacgtaggtcccctggtgattggtgcgcaggctgtccatctgcttctggaacaccgccacccacaggtctttgcacaagaacttgaggacatccagctcctccctgaaggccagcgtctcccggggcagcctctcgcctagagcctggcccacacggaaccccataccctccaggaccgacaggctcatcttctgtcccttggtggcccccgcttcctccccacggagcccggcgctcacccccgggccggggtcggggtcgtgagcccacagctcagccaccatctccgtgtgaagaaactcaaacaacacagtatccgccatgccccctcctcctcgtgccgaattcgcaacccaggcctcgtacctagcctat

SEQ ID NO: 128517 - DNA, 866 bp, Homo Sapiens
ttttaaatttttaagttgcgtgacatttattttgtcttgttaacattaatatctgtagaaacatttttattgtcagtataaaaattaacaggttttattaaatactttctccaattttgtaacacataagatcagtgtaatctgcattcatcttgcacggctattgcaaagtgagtgggtgtttccaaagcaaaacacaatactttagtacagaaggaacaacggcgatattttgtctgatgtaggtatgaggctggatcttttggtgaggtcctgccagaattagatgaaagcaatcccttaaaaagatggacgtatccccaaaactatcagcagaacaactctgtgtttcaattttctatgatgggacttgaagatcctaacaggcgtctccaacgccaaagagtctggaagccattatcaaaattcactgaagagaatacaggctaatctgattaatgtgcaactcagaagcagaaggccagctgccagagagaagcacattctgctatcatttcaactaaggtctgtcctcaaggaatggattaaggcatcttttaagaggacgctggtaccatttatcttgggaagtccagttagacgttgcgttgacgtaatgacagggttgcacaccaaaatgaaacaccttcctatgaatgagttcttttaatatggggcatttaggaggtctaagaacaatcgtctgacagcagcatttaaacacaaataaatcaaaacttcattttccccaaattagtcatatattgttaatattctcttttcaaaggatctgataactagttaagtccaagcaatagattaactagtctgctgtgctgcctgcatagaaatgccacttaaattac

SEQ ID NO: 128518 - DNA, 1073 bp, Homo Sapiens
  misc_feature (45)..(69): n is a, c, g, or t
  misc_feature (752)..(858): n is a, c, g, or t
  misc_feature (871)..(962): n is a, c, g, or t
  misc_feature (1022)..(1022): n is a, c, g, or t
taccctcacctaaagggaataagcttgcggccgcggctgtaggcnnnnnnnnnnnnnnnnnnnnnnnnnaaggggggtatttgtttaatacctctctctctcccatttttgttttatacaagttgcatttctagccaccacatcattggcatcttattccagaagaatagcattagttctagcacttgccaggcgggtgccatgcgccaagcagtccgtacgcccacctgctgcggtagttctcccgcctggcctctccatcaaggtggagactgcctcatggttttccagctcgtagagacgaacaggtcccggctcttggtcagccgaaccatgagccggcccacatagaagccactgatttggcccacaccgtcatttctccccatggacaggaggaacgtcagtgcacccggcttgtaggcctggagaggccgctgcttcacagagttgacgatgttggccacggcgatgttggcgtggaggccggcaagataggccatcttgggcgtcctcacgtcggcacagtcaccaatggcgtagacgttgctgtggccctccacctggaggtgctcgttcactctcagagcaccactgctggctagtctgctctcaaatgctttgcggtaggcggagctgttgatcttgatgccggtgcagagaacaccaggttggtggccacctctgtgcctttgtccgtctgcactttgatgtactctccctccgtgcccgaatcttgggctcgagggccnnnnnnnnnnnnnnnnnnnnnnnnnnnnnnnnnnnnnnnnnnnnnnnnnnnnnnnnnnnnnnnnnnnnnnnnnnnnnnnnnnnnnnnnnnnnnnnnnnnnnnnnnnngtggtaagctggnnnnnnnnnnnnnnnnnnnnnnnnnnnnnnnnnnnnnnnnnnnnnnnnnnnnnnnnnnnnnnnnnnnnnnnnnnnnnnnnnnnnnnnnnnnntcgggcacgcgcgggagaggcggttgcgtatggcgtctccgctcctgctcatgatcgctncctggtctttcgtgcgggacggtacactcatcaaggcgtatcggtatcaaa

SEQ ID NO: 128519 - DNA, 1323 bp, Homo Sapiens
ccatgcgccaagcagtccgtacgcccacttgctgcggtagttctcccgcctgccctctccatcaaggtggagactgcctcatggttttccagctcgtagagacgaacaggtcccggctcttggtcagccgaaccatgagccggcccacatagaagccactgatttggcccacaccgtcatttctccccatggacaggaggaaggtcagtgcacccggcttgtaggcctgggagaggccgctgcttcacagagttgacgatgttggccacggcgatgttggcgtggaggccggcaagataggccatcttgggcgtcctcacgtcggcacagtcaccaatggcgtagacgttgctgtggccctccacctggaggtgctcgttcactctcagagcaccactgctggctagtctgctctcaaatgctttgcggtaggcggagctgttgatcttgatgccggtgcagagaatcaccaggttggtggccacctctgtgccttggtccgtctgcactttgatgtactctcgatactcattgagaggcagctcctccagattgctcacccgctcactcagcagcagctgcacgcccttccggaggaggatctccttcacttcctgccggacggagggcaggagctccttgtcagccagggccacttgggagtgaatgagagtgacctctttctcaggatattctgttttaatctctgctgccatctccactccagccgagcctcctcccaccaccacgatgaaccgtgagcgctggacctgcctcaccatgtcctcataggcctggatagcggcctgctggctggaaacctcattaaacttgcccgggaagggcccagtgctgcccgtggccaggataagatgagagaagggcagggcctcgccaccctgcagcagcaccatctggttcttcaggtctatccccactactagcccctgccggaagttgtccttgaaagtcaccgagtaagaaatgaatgtctttttggcgaaccctgtctccacggaggctcggagagcagccacattgtggtggaaggagtccttcatgtccaccagcatgaaggggacgttcagggcctgcagctggctggctgctgcgatcccgccaaagcccccacccacaatcaccacgtgcagagctcccgattccaccgagacctgggaccccatctcaaatcaggcactgtcggccgcgcccgcgcgctctcgctccggctcccgctcccgcttggtcgtcttcccgagttactgacccgaggcgctcccgggcggggcgtgactcagcactcgtgctggtccccgaccccgc

SEQ ID NO: 128520 - DNA, 1046 bp, Homo Sapiens
tttgctttttgctatagactctttaaaaaagttgttcttctggatattattgatagatggaacaaaattcatgtcccttgcttgaatcttttagcgagctattcagagattctatatccccatttactcatggttttttcaaggtgaatgaaacaacataccctgctttcaatattttctccaaatgcaaagcaaaaacagaacaaaaaactttgaaactttaaatcttctttcaaacaatccaatcacatttacagaagtgtccaaaaagagatgatggataatatcagtgccagcactatgtcatacagcaacttcctcatattctttgacggtttgtaaataattttccatatcaccaaaagttacaaaaggttccacagtttcctttagcaagctgaagcttactcttcatttgtcaatgtgcataaaagctgcttatagcatagcatggcgtaagctattttttaagcaataaatggtttgagtcatctattttgtcctgaaatgctatctgtagttaactgcactgcttataaatggtcatagtaaattcagcatgaaagagaatattacagaaaagacagcagcagaagcattagcattatctaatatttatatatgttatcaacataacacagcagtaaaaggtttaaatgcatatcaatgggtaccatgtctaaaaattactatagtacctatttagtgtattggatatttttcttaaagagtgtttgctgtaactagaacagcataatacatgatttagtacagttaattcttattgattaaataatgtatttatgtactgaagaaagtgaaaaggagacagatattttttgcttcattttgattccagatttaacatttaaatgaagattccaaaggaccatgacatgtcattatttaactgaaatgggcttcaaaatatttaaaagacggtatgatttgtatctaaacagcaaggtggcaccagatacacgtaatgctactggccccggccgtaatggccgaattcccgggcatatgtccggtaccgtcgactg

SEQ ID NO: 128521 - DNA, 1194 bp, Homo Sapiens
  misc_feature (915)..(968): n is a, c, g, or t
gaacttgaggctcgggcacaacatccctggtctcagcaggctggagccctccagagctgcctgcatccggggcacgcccgaggtcctgggggaggcatttgggccctcccataccatgaggcctgcgtgtaatttggaggtgcccgggccgtgacccgggccggggccagggccagggccagggccgggtcctgttgcggacaccgagggtggaggtagcgttggcatctgctgctgcatcccgggcatcggccgcttgcccctgcaccgccatctgcaggttgtcggggaggggctgccccctggccagcatcttgtaggccatgatctgagctctgagctggtgcagctggttctggttaaatggggttgggccccggttctgctgccccaaggcctgggggtcagcaccatccagcggggcacctcctggcccggaagacatctggggccccgaagacgggccactggctggaactggactagaggcatgctcagagccacccaggggcgaggggtaaccttgggagtgctggtccatggggctgggcgggggccccatcccagcatggccccctgaccgcatccccattcctttcatctggttgtagcgcgggtcgtccgacatgcccttctcatgcatggactccatgggcttgtgcatctggtgcatgttgtcctgagggtaccctccaggcccctgggtggggatggggtgtcctgctgagggcggccctgggctgggccccatcatgctgtgggcggagcccggcgagggacccgggctagggcccagcatggctccaggggaagggccagggcccggggaaggacctggccgaggagttccgcccaggggtgggtctggagtggacatcttcacgggagctgcagacagtggcctcctgagtccannnnnnnnnnnnnnnnnnnnnnnnnnnnnnnnnnnnnnnnnnnnnnnnnnnnnnaaagggcgagacgcaggagccgccggcgccgtcgacttcccggcgcctcccccgcccctccgcgcggggccgggggcagaatgggcgtctcgcttctcttcacgaaacaaagaagccgccgccgccgccaaacgaggggaagcctcgcgcgcgcgcccgcccgcctcggccaccgccccccggacgcgtgggtcgacgatatcccgggaatccggaccggtccagc

SEQ ID NO: 128522 - DNA, 1371 bp, Homo Sapiens
ttcttctttttctccttggcgacctgggcagccttgtgctgccgcaccagctccgtgaggttagccacgtactcgtctgtctgctgcaagaggtaggccaggcgcttgtccttcttctggtcgatgagcttgcggtacccctcctcatcttcagccatgagcctccgcatgcgctccttctcgatccgctcgttctctttcttctgctcccgctccgtgttggcatggtacgtggccactgccttggtcagcttctggattttgcctgtgacggatctgtgatattccttgaaatccttggcatgctggagaatgctattgaggtattcctggtgcttctgccggcgcttgcgctcctgctcgatcttctgctgcttctccagcttctcagtgatgcgggcctcgcgcagggactggcgcttgctgcgcttgtaggccttagcattgagggctgtctccagcgctgtgtccctccgcatgcacaccaccacctcctggcgcagctgcctctggaagttcagcagcctgagggccttgagctcaatggtcgctttggttcgcaaatccccggccagggacccgggaaggttttcaagttcctgaattcggtgtgcgatgcgagcctgcagcctgtactcgcgctcctgcaggatctccacagggtcgaggccccgcggcttctggatgggggtgatgcggctctgcttctggtgcagtggcaccatgggcgcgggctgggccggctgcccgggggactgggtctgcggtggcatcacgggcgaggcggcgggtgggacggcagggggcgcgggggaagggcggcccgttggctgcgggggaatcagcttctgaggggtgctcgtgggggcagcagcattcgccatgggtccttcaggccagggcttgggaggccctccaggaggctggcctggcatcccggggggcacgcccgagggtcctgggggaggcatgttgggccctcccataccatgaggcctgctgtaatttggaggtgccgggccgggacccgggccggggccagggccagggccagggccgggtcctgttgcggacaccgagggtggaggtagcgttggcatctgctgctgcatcccgggcatcggccgcttgccctgcaccgccatctgcaggtggtcggggaggggctgccccctggccagcatcttgtaggccatgatctgagctctgagctggtgcagctggttctggttaaatggggttgggccccggttctgctgccccaaggcctgggggtcagcaccatccagcggggcacctcctggcccggaagacatctggggccccgaagacgcctcgtgccgaattcgccacccagcctcgtactagcca

SEQ ID NO: 128523 - DNA, 729 bp, Homo Sapiens
acagtcaattaaactgatgaactttattggagttaaaactataacaaagttcatcctaaaacactttgcaatgcaaaattatttcactcaaggagtgtttaataatttgaaggctaggaattacaagcaattttcaaaagcagaaactcacattcataaaactttatacatcatttgaactaaaatacatttatactactaaaatcaaacatgcatcaccttcaaacattcttatatcatgatttttatatattacattatttaacaccattcctcatcactacatggattttatcatacactggcaccattctccttggatttttgatctttgtcttcattctttacattatccttcttgagaacagtgtggatttcatccattaccgtagataagtttctgattgtcttattcatttggttttcaaattgtaaattcatgttttccgaaatctttaagttttcttgtaactgactaaggtcctttttaacttctctgagttcaccagagaggcttttgttggaattctccaaatttaatatggttttttcatcttcatctgttttttcttctagtaactgcagcttctgttctacctcagctcttactttttcgctcttttccaatttttgcaagaggcttcctacatctaccattgcaccattgtacacaatgaggccaacattttcttccacatcctttgattcctgctttactgttggtgttgg

SEQ ID NO: 128524 - DNA, 1043 bp, Homo Sapiens
  misc_feature (84)..(337): n is a, c, g, or t
  misc_feature (384)..(418): n is a, c, g, or t
  misc_feature (469)..(531): n is a, c, g, or t
  misc_feature (928)..(962): n is a, c, g, or t
gttaaattttcggcgagggcgaaagttgtttatttgtgttttttcttcgagatggatttcatcttgtccccagctggagttacnnnnnnnnnnnnnnnnnnnnnnnnnnnnnnnnnnnnnnnnnnnnnnnnnnnnnnnnnnnnnnnnnnnnnnnnnnnnnnnnnnnnnnnnnnnnnnnnnnnnnnnnnnnnnnnnnnnnnnnnnnnnnnnnnnnnnnnnnnnnnnnnnnnnnnnnnnnnnnnnnnnnnnnnnnnnnnnnnnnnnnnnnnnnnnnnnnnnnnnnnnnnnnnnnnnnnnnnnnnnnnnnnnnnnnnnnnnnnnnnnnnnnnnnnnnnnngaatgcttttagagactgatcaagaggggattttttgtcgatgagtnnnnnnnnnnnnnnnnnnnnnnnnnnnnnnnnnnnttaagcatcatgctattttatgattttgactgaaattttaacagatgaacnnnnnnnnnnnnnnnnnnnnnnnnnnnnnnnnnnnnnnnnnnnnnnnnnnnnnnnnnnnnnnntttggtaattaaatactacagtcaattaaactgatgaactttattggagttaaaactataaccaagttcatcctaaaacactttgcaatgcaaaattatttcactcaaggagtgtttaataatttgaaggctaggaattacaagcaattttcaaaagcagaaactcacattcataaaactttatacatcatttgaactaaaatacatttatactactaaaatcaaacatgcatcaccttcaaacattcttatatcatgatttttatatattacattatttaacaccattcctcatcactacatggattttatcatacactggaccattctccttggatttttgatccccggccgtaatggccgaattcccgggcatatgtccggtaccgtcgactgnnnnnnnnnnnnnnnnnnnnnnnnnnnnnnnnnnncggccgcttcctcgctcactgacttcgctgcgctcgtcgttcgctgtaaccggcgtagcgccctatagtgatctatacatc

SEQ ID NO: 128525 - DNA, 680 bp, Homo Sapiens
  misc_feature (433)..(572): n is a, c, g, or t
cttaactgtacggtgtcaatgcacgcacctacatctcgcagtgtacacaggtcacacggtgtgtcatagagacaggaaagactgggacagatggttgtagccccatggaagcccccctgactctgagggtggctgaggggaaactctggaaatcctcatggagtagaaaccatccagagcccaggtgagaggtggctgcaggtccccccaggacacttctgcagccccaaccgaaggcagcccggggtctcccatcccctgggtatatttgttaaaaatgtgtccatcatatatgaatttgggtttggtatttggttccctcgttgtgtcttgttctgtatttttgtgttaatgtcaataccgtattgtttggaccactatagctcttctatgtcatttgtaatcagggagcataatacatccatgtactttnnnnnnnnnnnnnnnnnnnnnnnnnnnnnnnnnnnnnnnnnnnnnnnnnnnnnnnnnnnnnnnnnnnnnnnnnnnnnnnnnnnnnnnnnnnnnnnnnnnnnnnnnnnnnnnnnnnnnnnnnnnnnnnnnnnnnnnnnnnnttacacttgtgattgcgttttaaaaattctgtttttgcttttggcaacattcattttatgtggatggggacgctgtcttagtgtgatttgatttaaatttttgtgatg

SEQ ID NO: 128526 - DNA, 1609 bp, Homo Sapiens
  misc_feature (289)..(395): n is a, c, g, or t
  misc_feature (409)..(554): n is a, c, g, or t
  misc_feature (1218)..(1227): n is a, c, g, or t
cgttgatggcgaggcgtgactctgcaggtcagtgctgctggcgggtgcaagaaactggtgggacactgcctgagcccgctgctgttgccaaggtgacgaggcataaagccgcggtggatcggtgcgtgggggcgcggagtgggtggtgaagggagaacgaagctcgagcggaaagacaggaccgcgacgcttgtcaggggattcggcttccagtcccccttccagagggcgtccttctgcagccaggcctctgtcttcccccgcccccacacgagtctcacttcatcannnnnnnnnnnnnnnnnnnnnnnnnnnnnnnnnnnnnnnnnnnnnnnnnnnnnnnnnnnnnnnnnnnnnnnnnnnnnnnnnnnnnnnnnnnnnnnnnnnnnnnnnnnatgtgccaccatgnnnnnnnnnnnnnnnnnnnnnnnnnnnnnnnnnnnnnnnnnnnnnnnnnnnnnnnnnnnnnnnnnnnnnnnnnnnnnnnnnnnnnnnnnnnnnnnnnnnnnnnnnnnnnnnnnnnnnnnnnnnnnnnnnnnnnnnnnnnnnnnnnnatggctctttttaaagattgtgttgctttctgcctcaatattaatatgttggaagttaccaagaagttcatgacagatctatttcaaattctggtgaagaaggaagaattggcgccttgaaagaatcagtgttttacaataattttgaaagagggtagcgacagaaggaagaaaacattatcaggagggaattcagataaaggacaaaccatattttgactgctactgacttgttgaactggcagtcggggtcaacttgggaagacagctgtgaccataaatattaaagaagacaaaaggattctttgtgacactgagaccttctgcagtaccacagtggaggaaatgccagtgtacacaactggcctcatttaattcctgggaggagatagtttgggatgcagtgcttgttgttgctgagcaggcgatcacagcatgcactgtgtttctttctttgagaatatttgaatcctgcctgaatactcgtaacagatgagagacgcaggttttgatagcatagatttacgctgtcattagtcatgagctcttgggacgaaagtaattggttttatcctctttagagttagaccctgtggttgggtatgaaagatgagtgtctgtaaaaatccttcttagaaatgtatttcctcaagactctgtctcnnnnnnnnnngaaagaaatttatttcctagttctgtaaaaatcgctatattgagtgttctctatcacttaataatatacttattattaagtggacttaaagatatgcagtgtataaaatcagctaattacgttaaaccatggtatctccctttattgtgttagactgaatagaacaaactttaaaataattttttaaagaatatatttgaattcattttgtttgataatatgtttttattcagaaaagcattttattagcgctaggtgtgaacccgagccttttgctaaataccagcagcaatcatgtcctagagttaaatcccagaaaaattgccatattatatattaaaggttcaataaattacaataaagtattttttctttaaaaaaa

SEQ ID NO: 128527 - DNA, 733 bp, Homo Sapiens
ttacgggggaaattaagcaatttaactttttatttaaaagagatggggtctctctgttgcccagattggtctagaactcctgagctcaagtgattctcctgactccctaagtgttgggattacaagcatgagccaccacgcccagctgcaatttaattttaaatcagagttcaaaacaatagaatttatgccactgtgtgtgcctgccaaacgaactgaacagacagtaactgctctaatagttcagaggagggaaagatcacctcaggctgggggcgagggatgggcttaaggaggggcactatttgagctgagtctggaaaaacagccagaattacaggaagcagagaggctaccagaaagtgggtgtagaccagactgaaaggaggcagcattctcctccttgggccctgggagctcctggggagtaagacttgagtctcccccatctctgcaaccccactgcaggtacatagtagtggcagtttgtgacatgaacgggcaaacagccagggcagatgcagctaacgggtagcccccagtgctttttgcacctctccaagattgggtgactaccagtcccctgaccccttcacctacccaatcctttcctgtcctcggttcttttccactgtctccaccctggggaagtggcatcaacacaggagggcattgtgctccttcaatgtggtctattcatacacatatagcccctttccactgctcagtgtcg

SEQ ID NO: 128528 - DNA, 1589 bp, Homo Sapiens
aaagggggacaaatgtttattgagctagaggaggagagctgagctgagcccagcctgatcacctcctcagagactcagcattgtgaattgcccctacagggtcatttttatacagcatgaagtagccctgcacctgggcaggactgatctggtttgtagctcgaaggacatgttctgcaaagttctcagctaaggaaggtgcctgccctggatagaacctctggaacatctgggtcagctgccagtgtgagcagtagcccacgtactccttcaggtccactcgccccgggcgtatcagggcagggtccagcctgtcaacgtggttggtggtcatgaacacgatgcgggcctcggtggaagccacaccatccaaggcattgagcagtccactgaaggtgaggcgacctaggccttggtactttactgggttctccacagccaagtctcgactgagaaaagcagcatccacatcctccaggagtaccaggctctgctgcggggccacgctcagcaggtggttgagtcggtcatcagagaggctggagtccgtgaggctcagcaggcagatgctgtgctccagttccccagccagggctgtgataaaactgctctttccgcaaccagggggcccataaagcaggtagccacgtctgtaaggaatgcctctgtcagtgtaccacttggggttatcgatgaattcctggacgtctctgacaattcggtcagccagaccctgttgtagaaccacagaattcagtggtcgccggcggcgtggatagccaaagggacgccattcagagcccacagctgtgtacatcacggtcttcccttcctcctgctgcaaggctagctctcgagcttcctccaggatgttgaagaaaacctttcggtcagtgcccagggccgtgaaggtgacagattcccaaggagtccccgtctgcaagtctatcatctgcatctctcgacttcgttctacccgaatccatttcccccgataccagataaaatggtttccagggctggggacaaattcaaacttagtggaaatgcggccactctcatgctgaaggtacgaagtctcgacactgaggtgctgagtacgggtactgtggcgggtgagccagctaagcaaccaggcatagctcctgtctcgagcagggacttccagtgtgatcatgtaatggcgccggaatgccaccaggcccagttggacacccttccgggccagggccagggctgtgcccacacccaccagcccaaatccagccccaaagtagggattgtccttcagagccagaataaagtctgaaagtggcatcttgaaagggaaacaccaaaccttacaggccctggggtgttacgaaaacctttcatggattagctcctaacactacctgtttagcaaatatgcaaatacgcaacaaatatgttcaacaagtaagcaacctcccaactccttgctcatgcagtgctcttggctcggaatgcccgttcttttctccctcattctccccaaatgaaaatctgcccatctgctactttctccacggatcgtcacatcgtagacataagatccgccgtgactctct

SEQ ID NO: 128529 - DNA, 870 bp, Homo Sapiens
cgggagtctcagagaggagacggagtgtgggggagggagggccggccacgcggtggacagagcgagggtgccagggtgaccagaagaccgtcaccacccgacagcaacgcaagtgcctttgaccttgatttggacttttctcccttttgcatttggtgctacagacttgagacaccagcagaagttgtgttcagcccggccccgctgcgcctgtccgggccggggctggcgccggttgtgtttgtgtccaccttgccttctttgcagccaagcagtttttgtggagtggagtgggacttacctgcacgccccaggggtctttcaggattcaggatgacttttcttttacaatggtttcctctcggcagagcccgggttgtgggggatctgtgtggggttctcaacgcagatccatcctggggtctcccgggcagggatggctgacctcgagtcccctcccttcccgagaacccgctctgtcccgagggcagctaacaagggctgagccccaggtacaggttgcctcttccacggcaggaatttttaccaaaaccacaagcaaaaaacaaaacagaccaccacgaccaacaacaaagatggggggtagggttttgtacaggttctgttaggttcatatttttatatcattttgcccataaatgcggaatttgccgtgggaatttgaagacaaatgatctatgtttttatggttttctagggaaggtgttctgggggccgggctctctccagctgttgggaggcctgctccctctggggggcaccctgggcaggtgcggggggccttggggaggcgcttcttgccaaaatgccgaccgagggtgagcctgccagtgtttgcgaagtccccgc

SEQ ID NO: 128530 - DNA, 647 bp, Homo Sapiens
tttgtcactgtacatttatttgcatgtttattggtttaacacaggggtcgcaaactcaaatgcccacaggggccaggttaggttagcggctgaagcagtctggggagaggcaaaaagcaatggcagggaggtgggacagaggaatgtgggccccaaactatgggggcagctgctactcagtgccagctgttcgtcgccatggggggaagcgggaccagagccgccgggtcttcggctttttcaagaggacgcataactccggattgttatttgaactgtcctgactttggtaagactctgtgacggtgacagtgaaggaggccgactcatcgtcaatttcacacaagtactcgccggagtcctcgagctggacagcgggcagcaccaggcggcggacagtgtcttccttctgcaggagcagcgcggggctctccaccacctcctctccatccttggtccagcgcacctctgcccagggccggtatagctcacaggtcagcaccacacgctccaggcgcacgggtgccacatacaccttgccgctgggatacacgatccacgaggagacgtctgtgatggtgacagtgaagtaggcacactcatctccagcgacgcactgaaactcgcccccgtctgagggctgggtg

SEQ ID NO: 128531 - DNA, 551 bp, Homo Sapiens
ttttgtgagtaaatacatttaatataacaatagtattataataacagtaattacatatataaagtctacggttcccctgtcacaccctcctattgtttgcatagcttcattgcttgtgacacctcagaatggagtcaccagggactccagttgacctggcagagatgattcttctcagggaaagtcagggggtgagaaaagaggagaacatgggctgccagggagggctggcatgggagtgatgtcctggatacagtggcccaggatgggaaagcaccggaagagggataacttccccacctccagggtatgaaggcaagcaatgtggctgctctgactcctgcaggagaaggcaccaagctagggagactagagatagtggtggcagggcaatactctggtcgttagacctcctctgtgtccaggaagcagagggaagaaattcagcgatcgcccagggctccattatgccccactgccatcccagcccaaagtgtgctgagaggagaagctgcacgcaagttctggattttctctagaagccaggagag

SEQ ID NO: 128532 - DNA, 1344 bp, Homo Sapiens
  misc_feature (43)..(91): n is a, c, g, or t
  misc_feature (177)..(223): n is a, c, g, or t
  misc_feature (1088)..(1088): n is a, c, g, or t
  misc_feature (1135)..(1135): n is a, c, g, or t
  misc_feature (1150)..(1150): n is a, c, g, or t
  misc_feature (1167)..(1167): n is a, c, g, or t
  misc_feature (1197)..(1197): n is a, c, g, or t
  misc_feature (1228)..(1228): n is a, c, g, or t
  misc_feature (1241)..(1241): n is a, c, g, or t
  misc_feature (1267)..(1267): n is a, c, g, or t
ggagtcagggacatgtttaattcatttgtgaatcccctggtannnnnnnnnnnnnnnnnnnnnnnnnnnnnnnnnnnnnnnnnnnnnnnnnaaatgagcaagtaggtgaatgaatgattctgaggtctcctccagctttgatggcctatgaccgtgtgactcctgcatatgcatgannnnnnnnnnnnnnnnnnnnnnnnnnnnnnnnnnnnnnnnnnnnnnnttggagcaaagagggatgaagcctgccacactgcaggtggtcctagctgcctgacctcccttcctcacacactgacacacctccctctttgttgacctgttatttattgtgcacccattgggtgcatggcctagccctaggccctggccggagacccaaacatggcctccaagggccaaccttactttgtggaggtgcaagccccagagctggttacaagcatgggaagggaggagggtggcctagcaggaaggctggggaggcagtgtgtcagccggcaggcagcagcgggtagcagaggccccctcttggcgggcagcctacttgcacacttggctgaacagagacaatggtggctggtccctccggcccagcctccttcctacaggcagagccccaagtccatgagtctccggaacctccctcagagaacaagcccagctgggaggcagccagagggcaggatgaggggatttcccaggggagagcagcagagaccctctgagctgccagagatggggaaggggtccaggcaccccacaggaaggaaggtttaaggcatgtgtagaaaggagcacagaaaagtctcccgagcctggcctaggcctcgcctggtcgccagcctccgtcccatccctcacaactctcctgagctgtggctcctgccaggcagacccctaagggaaactgtcgccaccttttacctctctatcctctccagtggtctgaacatagagaacctccttctctgctctgttggaacaaaggctccttgttcctagggttccagggttccctgcaaagctctggagggcccacccgcccagcctcactcatggcatcagctctgctctgttgatgagcntttggtatgtgagactgtttcatcacttcggggggaaaggaacacanggagacaaggcacanggccccacagcgtgcanagcctttgagccccccgagtcctgcccaanggtgtccctcctcgtgccgattctggctcgnaggcaatccctanatgagtcgtataatcgtatcagtcanactgttcctgtgtgaatgtatcgctcaatccaacacatcagcggagataaggtaagcggggtgctagatagcactcc

SEQ ID NO: 128533 - DNA, 424 bp, Homo Sapiens
  misc_feature (125)..(139): n is a, c, g, or t
ttttgagacgggagtctcactgtcacccaggctggtaggtgggaatcttaacatgttactttcttaggagggaaaagtgacaattgtcggcaacttactcctttcctagacttgatgataaattnnnnnnnnnnnnnnngcaagcaaacaaggtccctccagtagtcctcttcactccccacaaaccaaaccaaacatcaatcccccaattttttaacaatgaaagttaattgaaggaatgtatgaatggacagcaaaatttctatcgataattactcaacattttcaaaacaagaagcattttacaactactatcatatatgtttatcgcatgattttagaaagttctgttggggccatcaatacaccatcctaaaaaataagcaggttcaattttcatttgtttccatgctccaaactttgt

SEQ ID NO: 128534 - DNA, 599 bp, Homo Sapiens
  misc_feature (1)..(1): n is a, c, g, or t
ntataataacttagtttgcattttacagcatttccaatcggccagggcatccttggctggaagctcatggggttgagtgtggcgagaacgtccacagcttcggtaccagggtcaggcctgggcccagggcacgcggctcccagcgcgcggccctcaccgcacggccccaccaggaccgcagcgcccaccgcagcctgtgactcatcaggagaggaagggcagcggcccacggagtcagtccgtgccaacctcacaagggttcagccccctctcctgggcatccctgtacatcctctggaagtccttgaagcgtggggcacagccgagccgcgcctccccgaagtgcatgtggccagtgaagaggaagtcgccatgccccggccgcacgccacactccagcagcgtcctgacgcgcccctgccagtggccgtcaccctcgggcaccggctcgaagaccctgcttttctgccgatagagtctgctcacgcgcaggtggatggctgagtcctgccgctcatgctcgtgggtgacttgctggatggagcctcgaacggcgaagtctctggtgcagacggctaggagcacctcggtgtcactgc

SEQ ID NO: 128535 - DNA, 1186 bp, Homo Sapiens
atgcttcatgaattttattatttaaagagcaaaataaaaggaagtaatgcacattcaccaaagtcaagttttccgttaaatagaagaaaaatctaatactttgtaataaagaccatccagctaaaaacagatcattaaaacaacaatagcgatttgactctgtattttatttcaatgagcacacttcgttcattgtctgcaggaaaactaggctaggtctcaatagacaacagtcacagttactgagcaagtaaatactccacacttgcatgccctcctttatttcttgatgtcttcagtctcatctggctctctctcttgatgctctctttcccacctcatttcttttaactcttgtctgtacttccgttcgatgaaccgcttctgatgggccatctggggaaaattatatttttcaagcgcatccattgctgctcccatttccgcttgctgaatacttggtcctttcccacagcctattctttctcccttgaaataaacagccacagtgtaggttcgggcatgggatgggcccactgtctgcagagtcttgtacagaggaatgtctggctcttttccttctgtcctaagtgtcaagcaacactgctgaagctgggatttggggtcattccaatcctgattcaaaatgaactctttcaatcgtggaaagaagcagacattcatgaaagtatgaacatattccaaatccttatcaatgtacagcgctgcaataaatgattccaaaaggtccgccaaggtcttggtgcgaagcgccacaggcctcttggtcttgtcgttggttatggcgtactcctgcatgcccagctcctccgctaccttggcctgagttctattattcaccaaagagcttcgcaacaaagttaagtgtccttcatgatgatctgggaaatgaatgaataagtactctgtggctaccagttgcattatggagtcacctaggaattccattctctgattgtggcctagggtcagatggttaaatcccacagttctcaatgtgaatgcccttgccagaagtcgaacatgagtaaaaattactccaattgcttcttcaaactcagtaagtttttgtagaactggagaagtttcaataagttgtcgatcagtatttggctcttgtagttgcctcgtgccgaattcaccacccaggcctcgtactagccta

SEQ ID NO: 128536 - DNA, 1275 bp, Homo Sapiens
  misc_feature (25)..(25): n is a, c, g, or t
  misc_feature (859)..(867): n is a, c, g, or t
  misc_feature (1087)..(1107): n is a, c, g, or t
ggtcggcccgttgggaatccggccncctgggtggtccggaaacgatttttggacctgcgggtatatccagggcccgcactcccctgggattgtgggaaatgtagttttttgcctccgtaagggaccaggcggagctgaggaaccgcgcgaggactgggaccgtgattccactaaccggaaaccgtcgcctttcgggcccggcggggcctgagccaatgcagaagcgggggccgcgaggacgccagcgggcgctgtgcgtaggaaccgccgggtggccgctgccgatcggggccgacttggggacggaccggaagtgcccgagggcggccgcagaacggtcaatttgagccgcgtcgagctcccctgggacctgtggccgccgcccacagaccatgctcctggggcgcctgacttcccagctgttgagggccgttccttgggcaggcggccgcccgccttggcccgtctctggagtgctgggcagccgggtctgcgggcccctttacagcacatcgccggccggcccaggtagggcggcctctctccctcgcaagggggcccagctggagctggaggagatgctggtccccaggaagatgtccgtcagcccccctggagagctggctcacgggccgctgctttcctgcccagactggatacccgggaccggcagggacttgtggctccaccgcaatcctaccagttgtccgcccccgccagataaggggaaggggccggagcaggggggattgaaggcgttcgcggattgcgccctccaaattcagtggcaaaaacgtgcttgaaaaatccgccgggcggaatatggacccacccccaagttcccggaaaaccttgtggnnnnnnnnncgcggggttccctcgcgggaggaaaggtcccaaggagggaaacgccttgacagacccaaggcaagatccaagtaccccacaaaaagaccctgggaggcgccatcctggctctaaaaaggcgggggacataaagcggaaacctccccccaaaaggttttggccaaacccccccaagaagatttcaccttggggggggacaacacaagagtccggatggcannnnnnnnnnnnnnnnnnnnngagcttccgtggcggtgagaacccccgctacgcaaatcaaaacctctacaacggggagctctgcatgattaaacacacactcgatgactcctcgacaggccgtccgtagacgcgacgccacaaatgcgcaaaactcacattatttacggcccgcggcgtcttgtatcg

SEQ ID NO: 128537 - DNA, 588 bp, Homo Sapiens
  misc_feature (394)..(394): n is a, c, g, or t
gcggccgcctgcagaaaaccagacgccacggtcaccgctcgcgagaccacacaggcccgtcgggttgaggagcagcaggttcgtcccagcgaggatcccccgcacctcattcctggcctgaacccctgaggttccctctgtgagcatcggaagcttagaggggaaagagtgtgtgtgtggccaccggccctgccccagcggagctgctgagacccgcactcctaaccaggtgtgcatcctcccatccgcccccgcggggcttcctacctgcccaaggaacggccctcaacagctgggaagtcgggcgccccaggagcatggtctgtgggcggcggccacaggtcccaggggagctggaacacaagtgcccgttcaggtcaggcggcagcgcctntcagtagtcgcgggcgggccgggactggggcgtctggtcccgccgcgaccctcgcttcccttctccctcagccaccccaacccacaaggaggactttgcttccaacacagctcgcgccccgaggctcccaagcccccgacgcggccgaaattgcgctcggacgcaccgaaaggtcccagaacggggaggccggc

SEQ ID NO: 128538 - DNA, 1302 bp, Homo Sapiens
  misc_feature (200)..(210): n is a, c, g, or t
  misc_feature (428)..(436): n is a, c, g, or t
  misc_feature (456)..(517): n is a, c, g, or t
gtccgctaaaaaatgttcctcaataacaatattcccgattagacaaattttttacataccgcatatataatagtacgcctcatcgtttttaaaccccatgatagtccctctacaaattttcaataaattattcccttgcagagccgtccaaataaatatctccttgaaggaaaattctttcgtccaccactattgttctnnnnnnnnnnngacatacagttaaggggttgtctctttacccacgacaagatgttcctacatctagacacgcttttttcaccaagaccacgacacggtggttttaaacaccactgcgccaccgtgtcggctatctatctctattaaataacccggggctctaccaataattgggggcccactcgtgtttcccacaaaaccccggcggttcccgccctaatctttgtggnnnnnnnnntgtggggaatctttttgtgnnnnnnnnnnnnnnnnnnnnnnnnnnnnnnnnnnnnnnnnnnnnnnnnnnnnnnnnnnnnnngagtcctctgagaatttattactacggatcacagcagcaacgggcgggaagggcggcgccagactcatttgccccgcaggtagatcttgggggtctgccagccttcgggggcttcctttagccccgccttcagccagatgcgcctcaggtctttctcgaacttgatctgcttgcgtctcaggcgtccctcctggaccttcctccgcaggaaccgcgtcttcttcaccagcttccggtacttgtggtggttcatcttccgccggcggatcttcagcacgtttttgcactgaatttgaggcgcatccgcgacgccttcatccccctgctcggccccttcccctatctggctgggcggacactggtaggattgcggtggagccacagtccctgcggtcccggtatccagtctgggcaggaagcagcgggccgtgagccagctctccagggggctgacggacatcttcctggggaccagcatctcctccagctccagctgggcccccttgcgagggagagaggccgccctacctgggccggccggcgatgtgctgtaaaggggcccgcagacccggctgcccagcactccagagacgggccaaggcgggcggccgcctgcccaaggaacggccctcaacagctgggaagtcaggcgccccaggagcatggtctgtgggcggcggccacaggtcccaggggagctcgacgcggctcaaattgaccgttctgcggccgccctcgggcacctcgtgccgaattcaccacccaggcctcgctacctagcctat

SEQ ID NO: 128539 - DNA, 844 bp, Homo Sapiens
ttttctgagtcctctgagaatttattactacggttcacagcagcaacgggcgggaagggcggcgccagactcatttgccccgcaggtagatcttgggggtctgccagccttcgggggcttcctttagccccgccttcagccagatgcgcctcaggtctttctcgaacttgatctgcttgcgtctcaggcgtccctcctggaccttcctccgcaggaaccgcgtcttcttcaccagcttccggtacttgtggtggttcatcttccgccggcggatcttcagcacgtttttgcactgaatttgaggcgcatccgcgacgccttcatccccctgctcggccccttcccctatctggctgggcggacactggtaggattgcggtggagccacagtccctgcggtcccggtatccagtctgggcaggaagcagcgggccgtgagccagctctccagggggctgacggacatcttcctggggaccagcatctcctccagctccagctgggcccccttgcgagggagagaggccgccctacctgggccggccggcgatgtgctgtaaaggggcccgcagacccggctgcccagcactccagagacgggccaaggcgggcggccgccgaaaggtcccagaacggggaggccggccccctccccgggttcacccccgcgcgaatcgcgttgcctggcgcccggaccctctcggctggaccccgggcccgcctgccgcagcgcccggcgccctcaggcctcccgctgacccttcccaagcccgacctcgacgcggctcaaattgaccctcgtgccgaattcaacacccaggcctcgcacctagccgtatagttc

SEQ ID NO: 128540 - DNA, 262 bp, Homo Sapiens
gggtgggcgggggcatttcagatcaacacactttattaaacaccaacagcgggccaggctctgcactaagaacacagagatgaataagacactgtccctgtccctagagggcttacagtctagtaggaaaaaccaggcaagtttcggctaattactgtactgttggattaaggtaaaatgttgagggggagttggtatcctaaaccacctaacccagcctggggctttagacagtgcctgaactgagagctagttgtaggtt

SEQ ID NO: 128541 - DNA, 931 bp, Homo Sapiens
tgggacaagttccttccccataaggccttggtcccaaatagggaaggcgggggtgggttccttcccttagccctgcaggaaagccccttgttagccccacttatccccctttcttcctgggtgtgtggttcagcagccaagttccttgtgcactgggttgggtccccagcatgagcctggtggcctggcgggccctggcacccatggagagcagcctgttgccagtgatggcctggatctccaagacggcctccagcactgtcatgcccttgaccagctagtgctggtacaggacctgggtaacaggcatgtccttgggcgtcactggctcaggggcagaggacgaggttgaggaggaagctggatacccctgtccatggtgggctggggctggaagggtggctcagtggcctcgaagtgccgggaggactcccagctggcaccaggccatcagcagccgggtgggcagtgccgtgctgctgttgccctcagggccttgcagtggtagctgaagatggcaccttatcaggttggatcaggtcacccggcagcagcagctctcgagagctgaggcacaaggcaggggcccggctgtacacctgcaggacccaggagagcctgttgcagttcttgcccgaagcgccgagatagccagctcagtgtccctgcagcaggagcagaaccagctctggcccaggtgggtgggtggcagcgctttcctagccatggctgcagccacgcctaggcaggaaacagcagagtgtctggagggatgcaacaccaggagtaacaggcagcctcctctgttcttaatgagtgatggtcaggcccttcagcacctggataggcatggtgggtggtcctaagcttgaagctgcaccccagcatttccggacgcgtgggtcgacgatatcccgggaattccggaccg

SEQ ID NO: 128542 - DNA, 1061 bp, Homo Sapiens
gaaccacagagaacgagaccagccgaaggcgcaggacacccagaccagggggcctccccaaaggggggcgcccaccggggggacgagtcccccacgcgcttgaggcaccggcgccccagtgcggtcgccggacccgcggcggtccctgggacagcacgtccccggcgaaggccagccccccaagccgtcacataggaaccggggtgcccctccctagccggcaggagcccctggtagccactaaccacctgctcctgggttggtgccagccagccaagtcttgtgcactggttgggtcccagcatgagcctggtgcctgcggccctggcaccatggagagcagcctgctgccagtgatggcctggatctccaagacggcctccagcactgtcatgcccttgaccagctagtgctggtacaggacctgggtaacaggcatgtccttgggcgtcactggctcaggggcagaggacgaggttgaggaggaagctggatacccctgtccatggtgggctggggctggaagggtggctcagtggcctcgaagtgccgggaggactcccagctggcaccaggccatcagcagccgggtgggcagtgccgtgctgctgttgccctcagggccttgcagtggtagctgaagatggcaccttatcaggttggatcaggtcacccggcagcagcagctctcgagagctgaggcacaaggcaggggcccggctgtacacctgcaggacccaggagagcctgttgcagttcttgcccgaagcgccgagatagccagctcagtgtccctgcagcaggagcagaaccagctctggcccaggtgggtgggtggcagcgctttcctagccatggctgcagccacgcctaggcaggaaacagcagagtgtctggagggatgcaacaccaggagtaacaggcagcctcctctgttcttaatgagtgatggtcaggcccttcagcacctggataggcatggtgggtggtcctaagcttgaagctgcaccccaaccctcgtgccgaattcacacacccagcctcgtacctagccgtaagtg

SEQ ID NO: 128543 - DNA, 1676 bp, Homo Sapiens
  misc_feature (148)..(261): n is a, c, g, or t
ggggggaaattccaaccccctttttcttggccccggttttcttggggaacccactattggcccctgttccctttcccctcgggggccgccgcccccaaacgaaaggttttgaaaacttttttgaggggcgggggggcccccccagggnnnnnnnnnnnnnnnnnnnnnnnnnnnnnnnnnnnnnnnnnnnnnnnnnnnnnnnnnnnnnnnnnnnnnnnnnnnnnnnnnnnnnnnnnnnnnnnnnnnnnnnnnnnnnnnnnntaaaagcttcaagatgcttttatgtcaagggtgtggggttgccctgcttggcctgcagtgctttggggccccatgtggtggaggggtgggcacccatggtacccacccaccctgctgcctgggcagaagtgcaacatggcacacgatgcctgggggatcactccccccagggactcatggtcagtgtccactcacaaggcctgcttccctcatgacatctggccagtgacacccacaggggaggttgggggcagacacccttctcttccggtacccttgaacatggtgtcagggtgtggctagctcgacggacaccgaacagctccacagggagggtagtgcccaaggctttttgcctcccctaccatgtcccgcacttcctgaatgcagctcaaaccaggagcagctcccccaggattctggcctgcttcacccctggagcaccaggccaggcggtgtctgtccttgagagccaggcccaggtctcacggtggcgtatggacagctcctccccataggcctggtcacaatagggaagcgggggtggctcctcccctagcctgcaggaagcccttggtagcccacttatccaccttctcctgggtgtgtggctcagcagccaagtccttgtgcactgggttgggtcccagcatgagcctggtggcctggcgggccctggcaccatggagagcagcctgctgccagtgatggcctggatctccaagacggcctccagcactgtcatgcccttgaccagctagtgctggtacaggacctgggtaacaggcatgtccttgggcgtcactggctcaggggcagaggacgaggttgaggaggaagctggatacccctgtccatggtgggctggggctggaagggtggctcagtggcctcgaagtgccgggaggactcccagctggcaccaggccatcagcagccgggtgggcagtgccgtgctgctgttgccctcagggccttgcagtggtagctgaagatggcaccttatcaggttggatcaggtcacccggcagcagcagctctcgagagctgaggcacaaggcaggggcccggctgtacacctgcaggacccaggagagcctgttgcagttcttgcccgaagcgccgagatagccagctcagtgtccctgcagcaggagcagaaccagctctggcccaggtgggtgggtggcagcgctttcctagccatggctgcagccacgcctaggcaggaaacagcagagtgtctggagggatgcaacaccaggagtaacaggcagcctcctctgttcttaatgagtgatggtcaggcccttcagcacctggataggcatggtgggtggtcctaagcttgaagctgcaccccagcatttctcctcgtgccgattcgaccaccaggcctcgtacctagcgcgtta

SEQ ID NO: 128544 - DNA, 1275 bp, Homo Sapiens
tttactgaactatggctttacatttatttattttttcatttttgtcggtatgtaataggtgttggcttttcatttatttccagaataagtaaagtttgagatacaaatgcatcctttcttatatctaataaattatttttcattcatgagtttcttttgaaaaaatccactacagcagaattatgcttcaggttcctaccattgatgtcatagttacagtagtcctgccttatccacagttccacttcccatggtttcagttatccatgggaaactgtggtcaaaaatattatatggaaaattccagaaataaacaattcataacttttaaatggtgtggttttctgagtactgtgatgaaatcttgtgtgatctgctctgtcctgcctgggctgtgaatcatttctttgtctggtgtatctacactctatgtactacccacccatttgtcatttagtagctcatcctaagaacctggttagggtttggtacatcagtgatttcaggccttctctgtgggtcttgaaatgtatcccccatgaataagtggggactactgtatggggtctttttcttataaaaactctcagttgtttaaaaggctttggtctttggttaaatgttttcctcgaagttgttatattcatgatcatccttttgactcgctttttcttgtaatctggatatactggtgtttctcaaactggtcatcaaattcgagttcttctaatgtgaagtattaggaaccatcatttgaaaaaaaattctaacatcatatgatgacattattttgtttttcagaaattctctgctttggagtggatgctctgacttcagatatagtatccaggattaagtagaagatattatctctttcctatttaccagtttattataaaggatacaattcaggagaagccattcaggaagagatgcacagggcaaggtgggcagaagggaaaggggtatagagcttccacatcatctctgggcatgcgacacttccagcaccttgatgtgtagaccaatccaatgagatgaggctgtaacagtttttgaagatcacatccatgtgccatgtctctgacatcttccaatgccacgggttccaaagaccatgtagtcaggggccagtggtcaggtccttcttcttgatgccatcttatataagtaagtagagacctgagaaagcagagctgctccaccgaaaaataaagagcacggtcgggcgatgtggttcccaagccaggaagtacgcctgcgcacgcggccgca

SEQ ID NO: 128545 - DNA, 602 bp, Homo Sapiens
ttgctttaaatcccgtatttattgcccaaagctcattagtattacacaaatcacatagattgagaaattttctgaggttaaaaagacgctgcaaaggcccctgggagtggctgaggcttgcgtgcgggggcctcactctcactgggccaggcttgaagaccaccctgggtctgtccaccagcctttttcctcctctaggctcctgcccttttcccaggccagaggccagaacaccaaagaagtcggctcataaccaggtgaaaggggtccgtcggccagctcgactccacggccagcttgacatcttggtccctgcaccctcacactgctgtctgggaatggaagaagggcatccccaagcctgagggcatgtttgaagtgaccagaggagggccaggcagggacaccaggggtgcaggaccatcgcaggcgtggcttgtgttctcgcacagctggccagccccgccctgactgtgtccaggcttagcctccaccccaggcatgaaccaatctgcccctcaggcctcccttcctctggcctcagcaaagtggggcatgggtgctgggtgaaggtttccctcacaggtctttccaaagccaga

SEQ ID NO: 128546 - DNA, 2150 bp, Homo Sapiens
  misc_feature (57)..(75): n is a, c, g, or t
gtgccaagctaaaataaccctcactaaagggaataagcttgcggccgcctgctaggnnnnnnnnnnnnnnnnnnnccaataaagcagtttattttctgagagcccgtgccctgtcccatcccgccccacgagcccatccaggagccacacaccctgcctgggctgtgagcactattctcctggtgacacggcgctcagcccgagggacctgggacaagagctgctctgtcctgcttggtggctctcagaggagagccttgggggctctgagcagcaggtacaccgtcctcccctcctgccagcctggttctgccctcactggaagagtcaaccccgccagcagcgcccacagccccagccccacgtccaggctgccatgtcccggcgggcagtgcccaggcccagtgtatttttagcggactggctgcactataaatagcggcaggccgggccttcctgcatctgcactctccgtaccggatgcggccgaagacctggcctcgctacaaagcctggctctgctgctccaggccgctgctcagccgcctgccttgctgtcggcgagggtggtcctggggaggcctccagggactagggagacgcgggtgggaggagcctgttcttgagtctctgcagaagcagcagggccctcagtgccagcgtcctgcagtcctcgtccgggtctttctcagccacgtccgccagccaggaccgggcttccagcagctcgtccatcaggtcctccagcaggcgcgcagcaggcaggctgagcaggacggaggagacggccgacaacagcccttggcgcacgtaggcatcgatgtggaagcgaagggcccacacgaattccagcagggccttgcccatggccacagccaccgtggtgttaacagccaggcacatcagggcccctaaggtgtgcgccagccttccgagaaccagctggtcttctcccaagaggtcgaaggtcaccagaggcctgtcaaagcgctgaaggagggggaagaagaagtggccggccacggagttgaatctgctggggctgcctgccgggccctgcctcgggccacccttggagagccgctgggtcttgcttctgatccgctcctccaccaccacccgccagtcagacgccacggcactgccaggctgagagacggctgcctctggcaggcacggggtgttgggacttggggagccaggttggggagtcctcccgaggcacccaggcctagacagctcctgggcagccagagtcagcacatccaggatgtccatgcgctgccggaggctgtagttgagggcatagaactgtgaggtcagatagtcggccaccggggccgggtctgtgaccgtgacggccaccagggctctctggcgcagccctgcaaatcccaccacacaggtcttctcctccagatgcagaagcaccttggccagctccacgctcacctcccgagtggctgtggggctcctgtagaccaggccctcaagggcccgcagggctgcctcccagcgctctatgtcctcagacgtggtcagggcttccacgcagtcccggacgtaggcaggagccttgctgctcttcagctctctgtcccccgacatgtcgtaggggacaaactcatcatcgctgtccaggtccgagtcagagcccgccagctgtgcttgggggaccgccgccatccacgatctctgcgggggtctcatgcagggggcatctgccagtggctggaacgagggacgtgcccgcctccgaggcgccagtcacccgcaggctggggggaggccaaggccagcagcatcgaggctcagttcatccatcttcagtactggaatttcaggggaggccccatcaggggtggatcacgggcactaacgaccatcatgccacgatcatgccacaggcgtcagcacaggggggcaggctactgtccaggcggcacttcacgcaccgccatcatgctggccagcagttcatcccggctgtcccgcagttccggctccccgagttgcgccaggcacgatgaggacagccttgctgacgtggcgctgctgcggcaggggagtgtggcggatggcactgctgctgccccacgtctccaaccctcgtgccgaattcaccagcccaggcctcgtacctagcgcta

SEQ ID NO: 128547 - DNA, 1143 bp, Homo Sapiens
  misc_feature (48)..(90): n is a, c, g, or t
  misc_feature (1031)..(1065): n is a, c, g, or t
ttttaaggtgtgctctccctcaaaggaagtgtttattttttggagctnnnnnnnnnnnnnnnnnnnnnnnnnnnnnnnnnnnnnnnnnnnataacaacaggcagcacatgccccccacaccgcaccccatgcccaatctcagggtgggagacaagaggggggactcattgtccggagggaggctctggagggagacagccctgggtcaacccgactgtgtccccacacccaggactgccccatggcccctccagacctgctccagaggcccttctccggctaccccgtgctctccccgctaaccgtgttgccccatgacccgctcagaactgatgagatcaagggaatgttcaagcgaaaagccgagcaggacggaccttccaagatgtgccagcttcctgggatctcactgcagcagagcgctgaggcccagcagcacaatcagcagctggggcgccgcagcggagctggagtcctgggagctggggtagtacttcttgtccgcgattctcacgcttaagacctggttttctcttctcagtcgctccacctctgcagacgcgtcctgaagcttatggtttaatgtagtgatctctccctcaagctcctccactttcttttgtccttgggccttctctgcatccagggaagccattagggccatcacagtgtggttgcaggtggcggcctgggcctccacatcctgaaagcccttctgggcctcggtcagctcttgttgcaggagatgggtgacattgcgacactccatcactgcccgaaggccgtcccggcaggcctcgctgttggccttgatggtgaagataatcaagggcacccccagaatcacgatgatcaggagcaccagaattcctatccccagcagaagcttacagcgcttatccccgtcttccatgggcactctgcaatagtcatacgaagtagatgccatccagatctcccctttagctgaaaggagtctccccggccgtaatggccgaattcccgggcatatgtccggtaccgtcgactgnnnnnnnnnnnnnnnnnnnnnnnnnnnnnnnnnnncggccgcttcctcgctcactactcgctgcgctcgtcgttcggctcgcggagctagcgccctatagtgatctatctatt

SEQ ID NO: 128548 - DNA, 1037 bp, Homo Sapiens
  misc_feature (45)..(63): n is a, c, g, or t
  misc_feature (737)..(737): n is a, c, g, or t
  misc_feature (747)..(803): n is a, c, g, or t
  misc_feature (941)..(941): n is a, c, g, or t
  misc_feature (999)..(999): n is a, c, g, or t
  misc_feature (1011)..(1011): n is a, c, g, or t
ctcatttattcaaattcactgcaggaagtaaacactaaaagattnnnnnnnnnnnnnnnnnnnttcacactgcagtatgtacagtttcatgacatcacatgaagaaattaaatttctaataaaaatggcaaattatattactgagcagatcgcatcaaatttggttgtgtaaacaccagaattcttactatgaatggtaatgtgcctatattccagtattgctaatactgggatactcttggaataatgtttgcaatgggattaaaaaattcatgaaagtagttgtgtgaattctttatgtttaaaagtggttgacgattaaaaaaattctttaagacccttcgaatcaaagcacattctttcacaaagcttaaaccacagacgtcatgtccagaaatggaatactgtcatgttaggatgaacatctgatctgatttgttaagacattttgccaaatgcacagatgcacagggtcccccatgcacttttcatgcagcaggtaatcacaacttaaataaaaggtttattctatacatttgtccagacttgcaactgtatacatacatgcacaacttttaaacctgtctgattatatttacacttatacatggaatatacaggaaccaaagagattaaaaggcttttctgttgcattagaacaatacaaaatatgtatttttcattaagggaatcactatttacatcaccttttaaaaccgattttaacatcttcatgntacaagtcannnnnnnnnnnnnnnnnnnnnnnnnnnnnnnnnnnnnnnnnnnnnnnnnnnnnnnnnctctcaccagtttactccttctgtagatgcagcagagaaataacaggggtatgatgctaccttactgatgtcaataagctgtagtaccttttccaaatgactttattagagaaatgtctagattctaaatatcctganatgtgttatgtgcatcgtgtatcacatagcataacaagtgatctgtgatgtagcttcncactgtcttaancaccctaatcaatggacatcctataa

SEQ ID NO: 128549 - DNA, 1949 bp, Homo Sapiens
  misc_feature (235)..(266): n is a, c, g, or t
caagttctttaattgattttatttttttacataaaaagttcagtaaaaattggataaagtaaagtgattttaagcagtaaatcaatcttatcaacatagcacaaggctggccaaaaccacaaggcagcctgctttggaatatttacatgataacaaattaaaccttgcaggagaacttaaactgtccttacaaagtcttcctgtgatcctagcatgtagaggctaaaagcaaaannnnnnnnnnnnnnnnnnnnnnnnnnnnnnnnttattttcaatatattcacatatacattaaaatataatacagatcatcagggtaaagggttgtgggtggggatgcgcatgggtctgtgcgctgacagcaccgccaaggagaagacccaggtttaagagtggagtcaggtctggccagggtcttttctaagcccttgcacctctgatggcttctaaccacatgccaacagctcacaactaggtaatcacttgtagatggagttcatttttgtggccttcagttgacatctgcagggttgaattccccagggtgatgtatcatcagtagcacagtgctgacaggggtgggacagaaaggcccacaggatttcctctccctagagtctgtcttacctgaccacccatcctcccaccctggcccaacagtcactctaattcagtgtcctctttgggtttgtaaacagccccaaacttctgcatgtacttcttaatgtactccttggttttgtgtttcacattctcattgcactccaggtcctcaggattcttacagtacttcagctccttattcataacaccgtgagtcagcttgcgagccagatgtttaaagtcttcagttgtggtaattcttcccactttgcagtcaggtttccggtaagggttcaggcactggacgatgaactgggacatctcttttctgaatacttctttgcttttctttgctagttcactggaggtgtctgcttctgctgtcttgggctttttcgaggccttcatggggttttcatcatatgttggagtttcccaggtccatctcagcttcatgctcaaggctggcatcatctcctgggctttcccaagtaggaggatccccactgagtctgccttgtgatcacatggtagtaataaatcttcccttctggatctcgagctgtcttccagttgggaggtaagacaatggtttttggtttgggaggagaggggggcggcagatccaagagattatttgtcacaaccatttcagatggctgcaagggctgaggctgccctggtgcaactattgtagtcactgctgcggctggctgtaccaccactccttgtggatgagctgtgaaaatctgttgcccctggatatactgaagacttggctgggcataactctgtacaattggtggagttgtctgtgaataaggtgatgtcacaccatagactgttggacatgtctgtccttgataatatatggttgcttgagactgtgcaggagagtactgctgctgtacactgacagactgttggtttgaatcccaaacactataattctgtccctgaactgggccgggggccggcactggcaagacagcaacgctggagtcttggtgtactacaccatcactctgggccacatactgggaactggaaacttccacaggagctgccacatgtggcaccactggtactggtggaggggcagaaaggggttctgtagaatgtcccaccaagggctgagcatgatcataaggagcaggagaacacactgggtccatgctgggtgtgggcaggagcacctttccagcattagggttgctgggatccacataggcctgcatgggataacctggtgggtaaccagcaaagggatgatgcggggcattataaccaagagagtcatagggcagtggtgatcgccacccaggcctcgctaccttggaccgta

SEQ ID NO: 128550 - DNA, 570 bp, Homo Sapiens
ctagaaaaaaaacacaacccggggaatttatatgacaaactatcagtgtcaggatggcagagggaaagagaaagaagaggaaggccaaagacatggggagtgaataaaaagtgggttccggatcgtgcggaacagtccacagggtcatgtacaggtcctcaggagatgaccagtccctttggcatgcaggtccagtgcctggtcttctggtctgcctgctcagacacccaagggcagagagagctggccacaagtaaacctgccaatgacaaactcaggacttaacagaaagacttagttcagttccttggctttgtgctcaggcatcacatagcaggcagcctgcagcctttcttgcctgagagaagagtccagaagagcaggagagtcacctttgaacacactctggcatcacagcagtgaactgcaagcagccactggctcgtgtgcagatgtggccctcaccacccatgcaggcatctgtccggacatccccagtcaatctggccaaaggatgggacatgacagtccctttctagccacagcttcatagtgttgtccattctcccc

SEQ ID NO: 128551 - DNA, 966 bp, Homo Sapiens
  misc_feature (853)..(887): n is a, c, g, or t
cttcatggaggtcccctgctcgtccttggaacgcccagttctggaccctttcaggcacccttcacgaccaaggtcattgccctgcccagcggcccctgcccatagcttctccagagtgagttctcgttgagcttcgtcaggaagttaagttgtttgaagtcaatgccagagtgtttgttcaggggttccattttcgggtccgagtgcgggtggtccccttccagaatgtgtccttgtatggaatacggttgagattctggcccatcttctctgcccgctctcggagaagctctctcaggggtgccttggctttgtccacaggcatctctccatacttgttacagatgctgacaagggccccatttgccaccaggtcctctgccacttgatcttggccccaaaaacaggcatagtgcaggggcacattcccgtgttcattcactgcattgatgtctgccttgtactgcaatagcttctgtacaatatcacggtgtccatgactggctgccagatgcaggggggtgtcatccccacggttcattacattgatccgtgccccccgcatgatcaacatctcaaccacagcagagcggccctctcggcaggcccagtgcaagggggagaagccatgatcgtccccctggttgaggtcgttctccgtgttgtccagccacaggcgaacggcgactgcgttgccctcccggcactgagtgaaaatgtcgtccatagcagcgtcccggcgccgagtcccctggattggggaagcctgaggacgggactcgggctgcaggatccttctccccccggccgtaatggccgaattcccgggcatatgtccggtaccgtcgactgnnnnnnnnnnnnnnnnnnnnnnnnnnnnnnnnnnncggccgcttcctcgctcaatacttcgctgcgctcgtcgttcggcagtaagacgctagcgccctatagtgatgatacatt

SEQ ID NO: 128552 - DNA, 997 bp, Homo Sapiens
  misc_feature (260)..(268): n is a, c, g, or t
tttgcaaagtaactcttatgaaataatggacccttttggtaattatcttccaaactctcaaaataactgcattaaaaagtacttactttgcccatgaacacagcaaacaaatacaaaaacaaagatttggaactgctaaaaatatcaaggacaggatgcagacaattacgatgtcaagttatttatactgttagtagttaatgtaaagacatacactaaaactactccaagaatgggacaaatacgtggatttgtaaaannnnnnnnnaagactgatgacatgggggatttcgctggttctcataacccatcatctatttgggggtatcagtggggcctggaggcagtgggagaaaacaaacttcacagggcagatgctgctgggaccaggaaaaaggcttcatgccctaaggtcctcactgtcgtacagcccagtgcaaagtatcattcattcatgacagatgcatgacgacatgaaagtcaatatacacagttaacccattttgacacattcattcctcagcattttttcaatacaattcatctgaaattatactaagacataaaacagacctgcttttgtacatccattactgatatgtctcccagggtcaggcagaaggaaccagaatgactgtcacacaactgctaattgtcgagacctgagacggactcacccatgagtgctcctgcatgccaggtactgcttgtcgactcgtgcacactggactcaaagacttttgaaaactgctcttgcccctgaaacctaaaactccacggcctgtccttcagaatcactgtaaatctttccaatgatggacggatgaatgccttcaatgattagttaatcccatacacttggatagtacgtgtccgtcattcccacctggctgagggggccccggaacagactggtcagaggcagggcagtcatgtgggtgcggctcccagaggagggcccaagtgcagaaatatcttcaacttttaatatcatcag

SEQ ID NO: 128553 - DNA, 1816 bp, Homo Sapiens
  misc_feature (43)..(62): n is a, c, g, or t
ctaagagcgagcctgggtggcgaattttccacgaggctcgagnnnnnnnnnnnnnnnnnnnncataataaactttattgtgacaggcggggctgatccctcccatgttgggagacaccatgtggcaagtgacaaagctctgagcccgcccctcttggggccacagtggtagggatgggggaaggggatggaccccatggctggggtagtaccatgactggaggcgggggaggcaaccagaggcctgctgctttggggaggtgcattcccccaaccatgtcccgacacctctggagttcaggcaaggaccttccagtcctacttgtcctgcatcttctcaaggataggcacaatcatgtcaaatttgggtcgctttgcagggtcttcattcatgcagatcttcatgagcttacacacatgaggggaaatacctggtgggatggtaggccgaaggccttccaatgccaccttcattccaatctccatattggagaggtcagcaaagggtacctcccgtgtcaccagttcccacagaagcactgcaaaactccacatgtctgctgagcgtctgtttgtgtcttcaggcttcttctgcagagcttcgggggctacccaggcaggtgcatacatgcgaccaggacattggaaagagaacttgacatcagccatgctaattcgggcagtcatgtcctcatcaatcattacactacggctattgagtgcatgtcgtgggatgaggggctctagtgtgtgtaggaaggccatgccccttgccatgtccaaagcaaacttcacagcctggctctggtccacgacgaaattggtgccttcatgtagtacattgtagagggatccatatggcatccagtgtgtgatgagagtaggatgaggagcaggtggagactggcaggcacctagcactgggagcacatttggatgcgagaaaatcctgagccggggacactcttcattgaagtccctgctcttccttgtactccagtctcgaaccttcagcaccttcacgacaatgtcattgccctgccagcggcccttccatagctctccagagtgattctcgttgagcttcgtcaggaagttaagctgtttgaagtcaatgccagagtgtttgttcagggttccatttcggggccgagtgcgggtggtccccttccagaatgtgtccttgtatggaatacggttgagattctggcccatcttctctgcccgctctcggagaagctctctcaggggtgccttggctttgtccacaggcatctctccatacttgttacagatgctgacaagggccccatttgccaccaggtcctctgccacttgatcttggccccaaaaacaggcatagtgcaggggcacattcccgtgttcattcactgcattgatgtctgccttgtactgcaatagcttctgtacaatatcacggtgtccatgactggctgccagatgcaggggggtgtcatccccacggttcattacattgatccgtgccccccgcatgatcaacatctcaaccacagcagagcggccctctcggcaggcccagtgcaagggggagaagccatgatcgtccccctggttgaggtcgttctccgtgttgtccagccacaggcgaacggcgactgcgttgccctcccggcactgagtgaaaatgtcgtccatagcagcgtcccggcgccgagtcccctggattggggaagcctgaggactgtggagtgatccagggaaggaggatgaaccccaagctttatcctcgggactcgggctgcaggatccttctccggggactcccgtccgccgcg

SEQ ID NO: 128554 - DNA, 3249 bp, Homo Sapiens
  misc_feature (178)..(273): n is a, c, g, or t
aatatccccagagcccatatatttcattggtccacggggattctttcttttggagaaccacagggtattggacccactgtttcccgttttcccttcaggggggccgcccggggccacaaacgaaaagggttttagaaaaagtttttttgaaggggcccaaggcggcccgaccaaggcnnnnnnnnnnnnnnnnnnnnnnnnnnnnnnnnnnnnnnnnnnnnnnnnnnnnnnnnnnnnnnnnnnnnnnnnnnnnnnnnnnnnnnnnnnnnnnnnaatctgtgtcctttattccacctggtagggcatacccaagaaccatatactgagtcctgtctcaggttgatggagggttccctgggcccaaggcacacaactgcctgtgctctgctctacagatgataggagggatggacagtggagagaagctgagccttgtgaccaagacccccagcatgatggggaatggaaagttggaagaagtaggactacaagggaggggacagggaggggcttagaggcatttggggcaggctgggcattttgaagtgagaggcatttccatccagctccccatgtccactgacagccacacccaggcttcaggtggaggtgaggctgctgtttcccaatgcggtgctatattcttctggaagcccctttccttctgctgtggctagagctgtgaccaagaatgggaacaggaggctgctaaagtctggagaagcaggaatcatttgtcagaagaacacagaagccacctgctgggagttctatctttttagagatgagctgtttggggtttagaaatgagatggaaggaagtggaaggcagagggcaagggcggagttgtgagaggctaccagcacaaggatggaggctgggggccatgtgcagtagggccagaaaagtgttcagtggaattgtgggtaggaggctgagatgctgctgggccctgtccccaccaaagatggaagaactgaggtggaggcaactggccacttgcctaggagagaactcaggcaccaagttaaaaagactcccatgaagaactgccaccttctacccgctgcagtcttggatggtctacccatgcagaaatcagtggccaggaaggcagggcctactgctgggatatcagggcaagtgcccagtccaagaaagccactgtaatgtcctgtaggcaaagccaggtccagtggacagcctcactgagctgtgtcttcatgcagtcccaggtcacctcacctctgcatgcctcatggcagtgctcctgggcccaggccagggcctcaagcaagaggtgccacagtggcagcagcacattctggtggaaaagcaggggcagctctctcagatagcggagtagctgattcacggaatcggggagctggatctgtagcctctgagagagactggtgagactgtcaccaaaccacgcaaggtgagaggcacagtgggcagaaaggaagctgactgtggcattggtgtgagcccaggccagctgcaagctgggccgcaccacggtgagcaggtgggagccccagagcggcagtgtctcccccagccagctgtagccttgcagactgtaggagtagagcttggcacacgcttgttggctagcaggtaagaagccagatgatcgaagcaaccggccagtaagggaggcctggaaggagctgtgtgaccggaggtcatggcacaggaagcctacagcgaagaccagcagcaacaggaggagccgcgtccagggcagccgaggaccctgaacctgctgcaacaggcccttgcaggccatgtcacaggtgacgacatcctggttgttactgctacccttcctcagcagctcctggttggtaagcttgagggactgaatggtttcttgcaaagacttctgtaccttcttgggaatctgctcccaggagctgagcaagtgctccagcagaaggctggactgtgacaggtgcttagggtacagctgcctccagacgctggcactgagggggtccaccgtcaggcactcagtcaggctgctcaggagctctttcttcatctcagggggacagctaggggtggctctggacaggaaagaagggaagtaggtatgcagggtggaatccggctttgctccaaatgccagcactttcagtcgggggtagagctgacacagctgctcctgcaggctgggtgtcagggagttgttcggcatataggcaaagtccagaagtgggaagaagtccttggggccaatcatgccgaagcccttggtagggttgggatgcatcaggagcagccgatccaggtatgtgatggcaaagggagacagagacttgatgcccagcacaggcagcatgatccccagccacactttcagtccctcggtgaggttggcaaaacctgcttgacccagggcccacatgatggtgagacactttgctggtcggctctggtgggacctcagcagttccaggaacttgcctaggtttgccgtggcaatcttgggcttgtcttgcaggatggcctggatacagatgcggtaaccatgtagtgactcccctggtgtcttatccagctcttgcaacatggtgaacagacagtggtcaaaaaagagctccagagaccctgctgccttcgccagcagccctcggatgatcccacgtagctcccggctcaccaggctgtagggataatcatgagtatgctggctcagcgtgggttcacttagaggagcttgtagcttgtagttgagatagctggccaggtccttcaaccatatggatgggtttccagagaacacactctggctcttgtccagttccttctgcaggtctgccacatccagagctttcagtgcttcctccaggctgcggaagcggccctgcttctggttttggttgggaggagttgccaccttctttggctgcttcttgttccctggtttcttaggttccacagcagggggtgggacctgctccttattctgccgcttcatgatattctcaaagccccgctcataaagggtgcttgtggtctggattgcaggggtcaggtcgtatttccacactccgtttgcttccccgagcgccctgcggttcctgccgcctcctcggccgccggcgccggcgccgaccccaggccgccgacccttcttcactacctcccaccgccccacgcccgccgtcttggtcgccatggctcgcagccctccccctcgtgccgaattggcgcgccgtcgacttcatactcttccg

SEQ ID NO: 128555 - DNA, 856 bp, Homo Sapiens
ccatgtcacaggtgaacgacattcctggtttgtttactgctaccctttcctcagcaggctcctggttggtaagcttgagggactgaatggtttcttgcaaagacttctgtacctttcttgggaatctgctcccaggagctgagcaagtgctccagcagaaggctggactgtgacaggtgcttagggtacagctgcctccagacgctggcactgagggggtccaccgtcaggcactcagtcaggctgctcaggagctgaatgtgctgtctcttgggatccatcttctgagggtgaagctcgagtgagcggggcaggcagctgtcaacagggagctaaggaaaagcctcagaatgggctctctttcttcatctcagggggacagctaggggtggctctggacaggaaagaagggaagtaggtatgcagggtggaatccggctttgctccaaatgccagcattttcagtcgggggtagagctgacacagctgctcctgcaggctgggtgtcagggagttgttcggcatataggcaaagtccagaagtgggaagaagtccttggggccaatcatgccgaagcccttggtaaggttgggatgcatcaggagcagccgatccaggtatgtgatggcaaagggagacagagacttgatgcccagcacaggcagcatgatccccagccacactttcagtccctcggtgaggttggcaaaacctgcttgacccagggcccacatgatggtgagacactttgctggtcggctctggtgggacctcagcagttccaggaacttgcctaggtttgccgtggcaatcttgggcttgtcttgcaggatggcctggatacagatgcggtaa

SEQ ID NO: 128556 - DNA, 293 bp, Homo Sapiens
  misc_feature (119)..(133): n is a, c, g, or t
tttccaaacagatttgttagatttttaataagaacatggaaatcccaatcagcccttcaacaaaattaaaatacagaaagtgaaattaaaagtattctacattaaatgacttttatttnnnnnnnnnnnnnnngtaactgtgaacatataaacagcctgcagggcactacagtacagctggagagatatacattttccaatgtacctatgggccaatgaatcccaccattttcaaataaatccttaatcagactccactcagttggaaagttttgctgaaaatatttctggat

SEQ ID NO: 128557 - DNA, 594 bp, Homo Sapiens
tttgggttggtcagcagtggttattgcaccattggcaaataatgaaatgtgtgtacatcagcgacaaccacagggtcagcacaacaaccctcaaaagtacctgaactgaatccacttcattcttgacaggaggggaataaacaggggccacacactcacgcacacgcacatcataccacagaatggaaagcaataaattattggcttcattcctgcctggaccctaagaaaaggcaccgttacagaacaaagcctctccaggccactgcctgagtctcctggggatgggctcctccatctggctgtggccatggccagccaacgctggaggcctgagcagagcttcctctctctgggaagaagtgagcttaaatatttggcttcttaccagagaacaactatttacaagggaagcagccacaccggcctcacaggtgagtgggaaattgtctcgagccccagtggatggcacaggcaggagacccctgcacacgggagcatccttcctgaagggcggaggggatggactttccgcccacctgagggccctgggcaggggctccatgagcccaggcttgaggggaaggatgccca

SEQ ID NO: 128558 - DNA, 1650 bp, Homo Sapiens
ttttttttgccaaagttaaaagcgcatcaaacacgcctagcttttattattttaatcacaaacctatagacccctcagtataccctccatggggcctggccccagcaatccaaagctgacaaccttgggtgtaggtatgaggggtgggaatggaggggggagtgtctcttgataactctgaaatggggtgattcctccaaatgaagaactgggtggggaacagaggttggggtggcctagattctcagtatgcggagcaataaaaaaatcagataaacaaatgagggggtacaatatgcttttacaaccctcctccaagcttctgccttgctgggggaaggcttccagtttttcctgggctggggaggtcccaggatagccccttccttcatcctcttgccctacatgttgaaaaagaatactgaggtactggttctggtaacctgaactcagtcccccactaatacccatcaccttcccaaactgcccctcaaggaagaaggcaggactctgcccaagggtgggggcctctcactccagatataggtctggaaaattcatccatgaaatttcataatctgtccccttccccaagagcaaggttggctcagagccctcctaggttaggtcaggttggtcccaggttaaggcaggggagcttaagtaccactcctccctgcagtgtggaatgcttagatgggatgttgctgagggacaagggtggggctgtgatctccacaagcactagcggtggcctggtcctactgattctttcacacctgaaatacctgtgctgggctgttcctatagggaaggggtggggcctggctcctccattcctagaaggccaggagagttcccaggggaaggggctgggtctcatcctcacttctgttccttgcctgggcagagcagggcagggttcatggggaaggggcagagcttaaacccccagggctgggacctccattacttgactcctcttctgtgccaggacggactagactggtggttccaagacaaaggatggagcaacatcctgacatctccctttcccaggagacctggctaggacagtccctaggggacagggtcgagacctcatcctgtctccttccctcacctgggcaaggatgagtcccacaggggcaggggtgaggctgtgatccccagggggcaggccctgatctcatgtccttctccagccttctccttctgaaatacctgcactgggcggttcctttggggaaggtgcagggcctcatctgactcctcctccttgcctgattacaggggtggggcctgatcacatctcctcttcccccaggatacctgggcagggcagtctcatgggagggtgggggaaaaggcggggcctcatcctgactggtcctcctttcctgggtgggaaagtcccaggggaggggtgaggcctgatcaggactcctcttccatgctgaagctagctagcggcggcaatgctggccttggagacagcaggggacactgaagagagcaggggatcggaggcagcccgcagtgggtacagggcacccccccgacagtcctcccaccaccccctcctcctcctccatcagaatgtccgacgcgtgggtcgacgatatcccgggaaatccgagcgtaccaagc

SEQ ID NO: 128559 - DNA, 1806 bp, Homo Sapiens
atgatcttaaacagactatttattagaaaagtagaactataaagggagacggttgtgccccttgctctcctcgcaactctctggcaacctggagaggtagtataagatagtatatacacttttcttacacatgccacacacatttctctgaacaatccaaaaagaaaagcaaaacaaggccttgatggcagtaggcattagaaatggaggtggggtaggaagagaaaatagtgcttgtctccagaattacttttttcacttctagccccttgctgtaacagctcacacttcctggcacaggttcaaaggccaagaggggtatgtaacatagtgtccaaagagggaaggtccttgggtgaaatgtgctatatgtgtacttgggtatggcttaggaaggccagagttgtgatccaagaagttgaaaggtgggaaagatttttctgaagcagtgaggctaatgggtggggaaaggggtggaggtggctcctttccatgctcatggggagacatagacatggacacgatgccaggcattgctgagaacacctcgcaggttccagattggggccacggtgtctggctgcacattgtaaccatcatccacagccttacaaacaatgttcagttccttttgtccagctggcacaggggctttcaactgccacagacgccatgcccaggccttcctggggcgctgttcctctccatccagcttagccacctgccaggttaggcccccatccagagacacatccacccggatcacagccctgccaccaccactccatgcatagcccttgatggtcacctcccctgattctacagtctctccatcccggggctctgtgatggcggactggacaggaagttcctgaatggatggagcagagtcaaaatctacagtctcccagtccacagatggagagaagcctttgtaatcccgccgttgccagtggctgtaactttcctctggctgcacactcactctgcccagccatttgacatggcgggcacccaccactccaggaacccccacacgcacagggaaagccgtggtcacgtggcagaggctgcccattcatctcatatgccagcaggacctcagcttcagggtccatggccccgagccagagggatggatgctccataggcagtcccagtaggggtctgagtccagtccctcaaagcagacgtgggcctcagtttcacagagttggtggccagcctgggctaacacatcacagagccgtgccccagcccagcgtgcagtgctgatggctcctgttctccactccagaccttttacttctttgacctgagtcatctcagagcgtcggttgccggcacactgcagagtgactgtgatctcgtacttcctccttagtgtatatgtgtgttgactcctgagcagccctacaccgatggtcctgataggccaacactgcaccgagacctaatagggtccccatgactctccatccctgggtgctggagttatcaccagagaaggtgaggctggggcgctggggctgaaatgaatcatttgtggagcaggcctgaatgcagatccttgaggggattgacttgagtctgcaggcctgttggagcctgaggaccacagctctgtgcagcagcagcattgtagcagacctcaatgccagcagcctgtttgtactagaccagagcagtgcaggtagggctgactcgcaggtgaactcagtgagcccagaatcccaggtcttgggagggacagccttttgcgcggacgcgtgggtcgacgatatcccgggaattccggaccggtcc

SEQ ID NO: 128560 - DNA, 608 bp, Homo Sapiens
  misc_feature (591)..(591): n is a, c, g, or t
atgatcttaaacagactatttattagaaaagtagaactataaagggagacggttgtgccccttgctctcctcgcaactctctggcaacctggagaggtagtataagatagtatatacacttttcttacacatgccacacacatttctctgaacaatccaaaaagaaaagcaaaacaaggccttgatggcagtaggcattagaaatggaggtggggtaggaagagaaaatagtgcttgtctccagaattacttttttcacttctagccccttgctgtaacagctcactcttcctggcacaggttcaaaggccaagaggggttatgtaacattatgtgtccaaagaggggaaggtcctttgggtgaaaatgtgctataatgtgtacttgggtatggcttaggaaggccagagttgtgatccaagaagttgaaaggtgggaaagatttttctgaagcagtgaggctaatgggtggggactcacttcctccttagtgtatatgtgtgttgactcctgagcagccctacaccgatggtcctgataggccaacactgcaccgagacctaatagggtccccatgactctccatccctngggtgctggagttatca

SEQ ID NO: 128561 - DNA, 647 bp, Homo Sapiens
  misc_feature (430)..(439): n is a, c, g, or t
tttgatttcatatgtacattttcctttattaaaagtatggcactttatataacagcagaaataattacatgatttcacatccagaagcaataaaatgtggaggtgcaaacattccttattcccaataaaagtaaaaaaagtttcaacatgttctgtaagcccttaattgcataaagtatatttagcatcatttacagccagtacacttatataaactaattatcattaccttttacattctgcaaaagaaatatgttaaagtaaagaagcatggcgagacaaacatgaattaaatgtcagttctgatcattcatggggaaatataagccgataattataaactactagataacacaatgattttaacaatttttgatgtttttaaagttaaaaaaactccactacatgccatattgaaagaaaaggttgnnnnnnnnnnaactgcagcacctttagacaacaaaagattgcatcctgttcaaccacactatataaattataacatttgtggaaaatatgtacacacaaacataaagcaagtgttctaacagttaataaatgttgtcttggcaagcagtttccagaaacaatactaacaactggtaataagaactgccaccattttgagttttccgttgctatcttca

SEQ ID NO: 128562 - DNA, 1092 bp, Homo Sapiens
  misc_feature (63)..(72): n is a, c, g, or t
  misc_feature (971)..(1005): n is a, c, g, or t
  misc_feature (1009)..(1049): n is a, c, g, or t
tcccccatttctttgcccattttcctggacacccctttgcccactttgcacaaccaactgggnnnnnnnnnnacaacaaaatgtgttaaaaaactttttctaaggcccaaccgccccaaaaatttttattattaataatgtgtattatttttttgaccctgttgcaaaccacagaagctttattgatgcaagtgagggaaaaagctgaggtacacatgtcgggttggaggggcaggatggcccccaagtctctgtcctgatccaaggctgtgtcctgctaggattccccctcctcctgtttcctctccttctcgtgctgcttctccagtggctcacacttatcctttttccaatcggtgtacacgacatctgacttgggaatgcgcaagcagtcgagagcttcgtagaactctcccagttgctccttggtcgtctctggcttgtcagcatagacagacagcccccagttcttctcatcgttcacgtcaaaagcaagcatgtaggtcttggtgtccctgaggatcagcaagtgagcgaaatgctcttggcctcccacgtatctggagatggtcccattttcccgctggacattcaggtaggtggtgttatagatgcactggtcctgtcgggtctggtactctctgagaaagatcgtgtcctctgtcttgttgggggtgaagtaaaagaaggttgcttggatctcctgaaccgacttattgtactcctcgtttcgaaaggccgatgcgatataaaaccacttgccagtgatccggtccagggtggcgttggtgatgggcaccggtactaggttggcacacaatgggatctgggcttccagcagaggtaggaggctcaggactgtaagaacccaggacagcgccatactgagaccaggaggcacgtggagccaggcagtgctccccggccgtaatggccgaattcccgggcatatgtccggtaccgtcgactgnnnnnnnnnnnnnnnnnnnnnnnnnnnnnnnnnnncggnnnnnnnnnnnnnnnnnnnnnnnnnnnnnnnnnnnnnnnnnatgtgacgagctagcgccctataggtgagtctatacgtctttg

SEQ ID NO: 128563 - DNA, 1024 bp, Homo Sapiens
  misc_feature (654)..(654): n is a, c, g, or t
  misc_feature (707)..(707): n is a, c, g, or t
  misc_feature (725)..(725): n is a, c, g, or t
  misc_feature (766)..(766): n is a, c, g, or t
  misc_feature (807)..(807): n is a, c, g, or t
  misc_feature (879)..(879): n is a, c, g, or t
ttttttttacgggagcaaaggaaggtctttattcaggaggcgggggctctgggctggcagtcggggatgcagggggaccctggcggtaggcacccagcaggatggcattgatgtgctccagggtcaggttgctgaagaccatgttgagatgctgtatcccgtgcaggggcagcaggtgcacaggctgtggctggcggccctgccacaggccacagagctcggtgctgcgggtcgccaccgtgtcatcaccatcctcatagagcacacccacagggtccgtgtaggggaagccgtggtcgtagatgtaggtgcggggcgtgggcaggcccacgccgtaaagacagtatacttccacaccaggtgctgggagtcctgccaggaggtcacgtgactgcagccacatgtaccagccttcctcaaagtgcaggtctgcaaagaagcgttggaagtcacggcctgtgtagttgaagctgggtgtggaaatgaacacgtggtcctcaggccacgccatgcgagagggaaacatccagggggaggtgggtggttatgcgctgctcctctttcagcttgatgctggacatgatggggatgccctggttgtcacctgaggccaagaccagcatgggcttgatggagccacccagggagccccangagagatgaagcatcaataaagcggtcttccaggcctggggctggcgcagcangaaatagagcaagtgtanacagccgaggctgtggccatgagggagacaggcttccatangcagcgtgcatctcctcaccagccctgcgagctggcggtantactcctcctgctggccgggctccaccggcagtcataggggggcggcgcgcacagtctccgtccgcacgtanccttgttgacaagttctgcacaatgtgtggaagtacctgtccgcttgctctgtcacgtactcacaaattaagtcttgcaaagcaggaaccggttttgaacaagggggttggcacagccaactccggggttaaacctcgggtatcg

SEQ ID NO: 128564 - DNA, 2404 bp, Homo Sapiens
tttgaccaacgagaagagtgtttatttgctgggggcatctgagacagcagaggtggtacacagagaagatgctgctctggcagtgagggagggattccgtggaagctgcaggcagccatcttttcatcctcggaggtggtggcctgggatgtagcagataccaacgcagagggaggcagaagacactgggtgaaattgctcacctgctgccaatgccaataccactggacttttcactttcataagccaagaaatttccgttaactgattaaacaaattgcctttattgttaaaccaatgattggatatcagaaacagcctagctaatatagctccttttggataaaagtagaagcctcacattcacctttaatgttatttcactttttccaaaatcaatttcctggcaccacacaaacaagaacactggtaaatgtatcacctgaactgcaggccacacatgctcacgagtgtgtccctgccgtaggtggctttgaagccatatacatggctctccagctctcgtggggggccaggggcttctgtgtgctcttcaaagccttcacccattgggcctctgtccatctttccagcctggggacccaatatttgccccacaaggcccaggcaggagggcctccagcacgcgcagccctgaccacactgtgagcagctcacttggcaagggtgaagggccggagtggcgtcctcctgatgtggcttccttccagcctctaccacccctgggggcctcctccaaggagcaggtggttagatgtcctcttgtgcccacacacacggcagggtggaggaggatgaaccggaacccagcccatgcttctgcccccaccctggcaccccaaggtttcttctcaggcaacaaggagcacacaaagtgagcccctgtacacaggtggctgggatatgttcatcttccacagggaggccagtgctggggatgaggacaaaggcctacgcccagtcccagctctgacactgccttgctgagtcacccatcagccctaacgcttcctggacgagacaagcagatagggtgccccagagaggagctgtgtcactaagggccaggacaccccatctctgggtcacgcttggccacggcttcatttttggcttcagtttgtttactgaacagaagggagaggggccctgtgagacagaggacactgactcaggtcggtgagtggccctcactgtatagagtccatggctggggaccaagtggcactgagactcgcccaaagtcacatcacagagctggggtgccttgctgactccctggccccaatctgcttttccatttgtcgaacgcacactggcacactggctgcagcagctgcggggtcggggggttccagggctggctgtcactcggcctcctgcagaggtaagctgagggctatgttggacccgccagaagtcaggtgacagctgctttccctttcaggatcgggagggagtcacctgagggtatattctcagtgggctaaacatgacatgcgagagcccagctctccaagcggccccttcctccttctcacaccaaggcactttcagaagccgctggattccgactggggctgtgccacttcatcgccggtgcctctgctgtgccggctctcctcttctgagggtgtggaagcaaacccaggtcaagctgtgaggagtgcctagcacctggccagagccaggtacatgccagctatgacgatgatgagcccaactgcaacaggagaacacacttagtgcgacatgcagcggtagcctggcgttgggcacctccccatgctccgagaattctatttggagaagcccttctccattgtctcagtcacttcagggtgcaggaagcggctggccaaccgttcgatgtcgtccagcgtcaggcgactcagggacctctcgtaatccctctgtagctgttccaggaccctgctggcatctgccgcactgaagtggcgggccaagactttggagatcagctgccagacctgcgggggtggggagtcggccagcctctgggcctcgccttcttctagtagcaccttctccaggggtttgaccactaggttgagcttggagttgggcccgatgctataatccgagagtcgtttcccatctgccagggccttgcccttgaacagcagccgctgctggcgcactgggacgttcagcttctcggagaccagctgcttcagcgtggacaccagctcgtcctctggcacctgcaggctgcactcgcggccctgcagcgccttcaccgtcagctgcatggcggtcgcgacggcgtccactcgcccacgcgtccgcgacgcgtggtcgacgatatcccgggaattccgaccggtaccagcctcttttttaccactgtttatatgtcaca

SEQ ID NO: 128565 - DNA, 542 bp, Homo Sapiens
ggttcatgtggcataatcatctttcaaaattaaccaaatgccccagaaaatgatgttaccactaaaatattttctccaagaaggcatactgtaacagaaaagataggtaagatatttttttcccaagaagtaagaattgattgtgctgaatgttcaaactctggaaactgttcacagtatgttgttcttagctgttatttatataaagtgaattattttctctctcaatcatgccatagtggagacttttgtttgtgagtaagtgacagagtaatttgaaataatgtgatatgtcagagtgacatgcagcatcctgagcctgtttttatgttctgtgtacagtggcatttgattgagatcaaagcctgtcacagcctgttgctgggggtgtggggatatcccagagtcctgtgtttggttttagaagtttactgaatgtttcccacatggagaataatggatggcatgttagtttctttaagagtggtaaagttgtacatctgtcattgttgcatttcgaattgaacacatagatgcttgcc

SEQ ID NO: 128566 - DNA, 778 bp, Homo Sapiens
atgtttgcagaaaggcaggaaactttattgaataatcttttctttggggtagagaagttgagaaaccaaagcgtatccaggtcagagaggagagagatccgacaggaagagaagagcacagagggcccaccatcaggagagagtcaggacagggggtcctgagagcagagggactgagccttgggtccagcagcccctcctctctcctgcagggaactgccggctctctcctcctctgggtgctgaagacagagggaggggacgccaggcagatttaaggcctacggacatcagaagtgcggcgaccagaggcattagaggtggtggtaacagaggcactagaagtcgtggtaacagaggtgctacgggggctgacgcttcctgctgaggaagggaaaccaatcatcttggcgtcctggccctcgagcaggctgcggtaggtggcgatctcctgctccagacgtgtcttgatgtccagcagcatcttgtactcttggttctggcactccatctcactgcggagctcgctcagctgggcctcgatgctgctgatgagtccctggatctgctgcagctgcagggcatagcggcactccgtctctgccaccgtgttctccagccccgctttcatgctcagctgggactgcagctcaatctccaggccttggagcgtgcgcctgagctccgtgatctctgtcttgctggtctgaatcatggcagtggtggtagacacctccttgttcaactctgcactcttggcgtgaaccattcctcagca

SEQ ID NO: 128567 - DNA, 983 bp, Homo Sapiens
  misc_feature (454)..(454): n is a, c, g, or t
  misc_feature (479)..(479): n is a, c, g, or t
  misc_feature (663)..(663): n is a, c, g, or t
  misc_feature (701)..(701): n is a, c, g, or t
  misc_feature (715)..(715): n is a, c, g, or t
  misc_feature (766)..(766): n is a, c, g, or t
  misc_feature (776)..(776): n is a, c, g, or t
  misc_feature (787)..(787): n is a, c, g, or t
  misc_feature (804)..(804): n is a, c, g, or t
  misc_feature (870)..(870): n is a, c, g, or t
tttatgtttgcagaaaggcaggaaactttattgaataatcttttctttggggtagagaagttgagaaaccaaagcgtatccaggtcagagaggagagagatccgacaggaagagaagagcacagagggcccaccatcaggagagagtcaggacagggggtcctgagagcagagggactgagccttgggtccagcagcccctcctctctcctgcagggaactgccggctctctcctcctctgggtgctgaagacagagggaggggacgccaggcagatttaaggcctacggacatcagaagtgcggcgaccagaggcattagaggtggtggtaacagaggcactagaagtcgtggtaacagaggtgctacgggggctgacgcttcctgggaaacaagagacaagacatgctcaggctggagaagacccacctcaggacagggcagggcccccctnggagggctcacaaactcctcattantcaggtggtgcgtggatggagactctttattgtccccaaagatggctcttcccaagacagccaaatagctctgtggggcagagccatcagtttcaaaaggaaaatcagtgagcgaatgacactttccaccccagctcttccccctccctacactgggagagcccagcactggctccctccctcncccgcagctcccacccgcattggggcagtgaatggganggctactctgcccnccctacacacggggctgttcccttactgctgaggaagggaacatcatctgngacagcgacnaggtggcatgncaagggtactgaggcanggctactgtcctcggggaatgctcggctacattcactcgtgcgattctggctcgaggcaatcctanaggatcgataatcggacagtcaacgtctgtgtgatgtacgccaatcaacaaagacggacaaatgtagcgggtgcagagacatcatatggtgccagcgtcatggacgtcgccgg

SEQ ID NO: 128568 - DNA, 784 bp, Homo Sapiens
ggcaaatcaaagaaatttattggcgttgacaaaaatacataatacagaaaccaaaacaaaacacaacagaaacaaaaccagaaaccccagcctagtgggcccatgtgcctgatgtactgacagtgtgccgacccagactcccacaaagcatggcacttaattcatgaggacctccatctgcaccagcctcgcattggtgtccccagacgttcggtatggtatcattccagcaaaggtaatcagagtgcgggcttgacttcggagttgagagtcgcggtcctcgatgactcgctggggcctggatgacgaggatggacttgtccccttgagcctcttaaactgtgtgaacaagatgttcatggtggcaagaagcacttctgagaggttgtgcctgatttcatcactgaaatttctgaaggcagccactctctcttccacactttcctgattcaggggcaccagcttcaagcgctcaatgatatcaaaagctctatcaatatgaccactatgatactcgtcaaaaaaggtgatcaagtccaaaagaagatagaacgtggagtccacaaatttatttgcgcttattccttgagccctataccgttcggcaatggagagtgccatgttcttcagcctctccttgttggattgcggggcactgatctgggggacgacagggctcagcagtttgttcatcagctccagtaccttgtcagcattcttggcaaggtcatacagctttgctgcctcttcaaacagtcctttattttctgacacagaagcaact

SEQ ID NO: 128569 - DNA, 691 bp, Homo Sapiens
  misc_feature (320)..(328): n is a, c, g, or t
  misc_feature (604)..(627): n is a, c, g, or t
  misc_feature (637)..(637): n is a, c, g, or t
  misc_feature (649)..(649): n is a, c, g, or t
ggtagtcaaagaatatgtttaataaaaaataattaaacttccatttgctctatagaacatcatagaaagtaatttaataaattacaaatgactttttaagacgtttgctcaactacagaaagcaaattcagactacacaaaacacaactggtaaatattgcaaatgtccaaaagaaagattggactaagacttgaatcataaaacctgaaacaagggctataaatacaaggcaataacagctataattcttttagtaactaccaacacatacttggatattctttcaactgcaactttagtattatgtaattctactgannnnnnnnnccttataacccttaactttacacaaccatatttgcatgtgttttcttagctgatagctggacaacttttccccaatgaatattaaatagaagtgtcttgaaacctaagagaatgtttaaagttatgttagacttaatgctttgaaaactgtaattgccttattatatagaaagagaatcactaggatgttaaccaaatttatttgaccataattaggaaaatactttctctcataaatttgatataaattagattttagtgacaagatctacagannnnnnnnnnnnnnnnnnnnnnnnaattggcganaggaaggaatanagatcatgtgggtagaattagagggaggaagggaaatgtggt

SEQ ID NO: 128570 - DNA, 569 bp, Homo Sapiens
  misc_feature (556)..(556): n is a, c, g, or t
tttgaacagaggcagtacaaaaattatttattgaaaagggaaagggtggccccttgctggtgcccccctggccctggccaaaaggggttgccactgctcattatctgaatgcagaaagtctgtccaccccttacctttaataaccttaaaggggaagtgccgtggtggactggtaagtcaagagaatccatctcaggaacagcacttccaggcccttgcctttaagaactccttaaaggcaaagtggacacatgccgcaccagatgagagccagaacgttttcgggaaggtccctggaggaagtgttttcgtgtctttacctttaagactctcttaaaggtgaggcatgttcacgcagcgtacaaaggaggcaaactccgtcaaggagtctacgaagcacttttccagatcttgcttttagaatctctttacagatgaggtggccaagcgcgaattaataaaaaacaaaataccttgcagaattatttttcttcccgacccagcagaacccgccccgctcaccggccgccttcaggtctgcgtcctcgccttctangcgccctgaggcc

SEQ ID NO: 128571 - DNA, 768 bp, Homo Sapiens
  misc_feature (735)..(735): n is a, c, g, or t
ttttttacaatgttagtttctggaattttattatttttaatacatacatttcacaaacagaaaccctctaaaaccacacacaattccacaaccaaatgtttcaattttatcaacattctttaactatttacactgtctttcctcaacaaaagtgcaatccaagacatcttgacaagaaatctttactgacaagaatttatttttgagctggttttaatggagcccatccattatattttctttcaattacccggaatattcagtgaacaggacatagagatgaactgggttaggcagcatcctattataggaaataaaacactaaacaagaacactttctcctcacttccttcccaacctccaatgaaagttactcaacagctgctaccaggacacaaaacagaaaagcaaactggagttcctgacctagacacaggagaacagactgtgtattaagcatcagtcttgcaggactaaacaaaagacttagcaaattagttctggtgctctaataaggtacatatctgtcttatctgttagttttagagttcaaatacctaataagattctttttagatgagttaattttcccccaacatatatgaaaataacttttactcagaaaatgaacttcttgaacaaaacctagaagttaaagggcatttaaggaaagctcctctgtaactagaatgggatattcacccaactccccaacttcatggcaccatgtctatncttttaagtataaaccattatatcaactgcttc

SEQ ID NO: 128572 - DNA, 651 bp, Homo Sapiens
gacggcttaacaacagaaatttatttctcactattctggagattagaagtcaaagatcaaggtgctggtgattttgtttcttctgaagcctctctctttgcttgcagataactgccttctcactgtgtcctctcctggtctttgttctgtgcacacattgctggtatctcttatgtccaaaggacaccatgttggattagactaacagcctcctttgaacttaagtcacctctttaaaggcctcatctccgaacagtcacattcaaaagaaatgggagttaggacctcaacaaatgaattgggggatacacagttcagcccataccaatgacctattctaaggtttctgtttcaaaacactgtagccaaatgcatactcctagggagaaaattattttgttttaggacaatttaaacatatttttaaatggaatacatgcagcaatttgttaaattacattagtaatattttcctatggctaagtccacctggaaagctagttatcaaaatgaaaaattattgtttcatttagtcctcgccagtactaattcattttttataatttttgtaaaatgtactatataagattttctttaaaataagcggacgcgtgggtcgacgatatccggagaattccggaccggtaccac

SEQ ID NO: 128573 - DNA, 779 bp, Homo Sapiens
actggtccaagtactttattgatgcgccctgacgcccaggccagcaggcgagaccagtctacagtcaagtgtagatgggagggcagtaggtggagacgcctggaagagccgagatggagaggtctgggcattcagatgggacatccttctggtctggtttattgtgagggtttctgagggttggccagagcccagggacaaggaagatttttttacaaaaagacacccaccacgtaaaaaactactttgtgcccagcttggggcttcggccccatcgtctgtctgtccatcgctttcccgggatcccccaggcttggatctgggggatgctcaggccatcagggcagcaggcaagcaagacccatgatgcagactccaggtaacggcgcctttgccccgcagtggcgtccctggagcccagaatgcacctcagtgacccgccaactctcagaagggcggggggcttcagagcacggccagattgtggcaggacttggagcgggccttgagtgcccggcggcgtgcgctgcgggctgtcaggcgtgccaggaagcgacgagcgcgctgggctaggctggccggccgtcggggtgctgggggttccttggccgcactgtcccggcggcgcaagcgcagttggcgcaccacgccctccgaagagctcggccacattgtgctgcagcgtggcggatgtctcgatgaatttacagtcgaacaccacagcgcaggcgcggccctcttccacagagacttctcggcagcgggccaagtctgccttg

SEQ ID NO: 128574 - DNA, 1403 bp, Homo Sapiens
  misc_feature (1369)..(1369): n is a, c, g, or t
agccccttatgagctttattagtgttattccaatatttaggacatagtaggcactcaatatgtgaatgacaggttatacgaacaaactgaagtttatacttacgtttcaaggtttttgatattgccaaatggccccctaaaagtgatataccaactcatattctattcaccaaaatatgacaggatttccccacaactctgctaatagcaagatgtacattatttttattgtcagtcagcattgtttttatttgtattttttgtaaccaatggggttcaaggtgtttcatgttttgttggccatttgtatctttttgtgaatcgaaatttggtatgttttgcctatttttcagttggtcttttcttaccaattgaaacaaattcttcatatacttaagacattaaaaacactgtcatatgttgcaaatattttccattaccttctgctgtacaaaaacttaaactatacaaaatttcctttgtttttagctgtcatactttgctaatcacaatttcattcactcgatgtgttacattactaattatttacatataaggaaatgtactaagtattatgtgtgtgtgggtaccagataaaaaccagaataactggacacatggctctgaggcagtatgcaataagtgatttaatagtggtagtttgctctaagtgtttttatgagagacagggtatcttctccttgaatgattcagatagcctttaaaaagttaaaatctgaatcaggccttgaagaagagttaggatttgaaagggtgaaggtgtaagtaaactgcacgagcagaagtagataacagaaaacacaaggcatcttcaaagaatggtgaataatccagtttgggttaaataatgtaggcagagtatttatataaatacgatttgaactgtattcaaatagtagtatttgctgaactgttttctgaatagttttcattacgtggcctgtagctggcttccttagtgccaaaagtttactcagcatattataatccttggaaaatgaagcagaaactgcatgaaaagagatttttattttcacactccttcaacacctaaggctttctcactttgtgttacaactaaattggttgactaatgtcatgtaatctgagaaatacactgtacttcgttctagtagatatttaaggtccctttaggactgaaacttacagaaatcagattccaggaattatccaatctcattttgatttcggataaacattaatttgccttattccttaaatatggtgaattcattatgaagtctttggcatacttttaaagatggaagtacaatattgcaatattatacatatactttgtgtgccatgggtcatctatgcacagtangatgaagcatgatattaatgacatctatttagtc

SEQ ID NO: 128575 - DNA, 249 bp, Homo Sapiens
  misc_feature (154)..(171): n is a, c, g, or t
aaaaaaaattagattttagctggagcttttgactaatgtaaagtaaatgccaaactaccgacttgatagggatgtttttgtaagttaattttctaagactttttcacatccaaagtgatgctttgctttgggttttaactgtttggccacggcnnnnnnnnnnnnnnnnnnttggtacagaaacttgaagctgtttgtgatatgtacaactcagatgtttctcattaaaaaacaaaattagccagaaaa

SEQ ID NO: 128576 - DNA, 618 bp, Homo Sapiens
tttttttacagcatccagagtacttttattgccagaatccagatacagcctgctcagagccccatgtggggcactcaggaacaaggggagacagatgccaggcatgtatgcaacagagaaaatccagctgcacagaaaccctgtgggagagcagctcagtccagcctgaagggttctttgggaaccccacctagaggctgtacccttttctcggcctgtggccagtcacccacttagagcctactgccatgaaggcagccctgactctccatgcctgctgccacagggagatccatggagcaccctggggcagacagaaagcccctaggggcgctcaggggacccctggctctctcagggtcccattcaagtttctgggctagtccagcactaagctgggtgctggccagggtggataggagccccatcctcagccctgtgctgacccacttggtactagtgagaccctagggcagggtggcagtgtgatggtggggttagcaagaggtgcagctcagggaagctgcgagcagccttggctgcttccttggattccctttctccataggttcccagaaggccatggctccaacccctgctctcatccttggaaccaca

SEQ ID NO: 128577 - DNA, 1449 bp, Homo Sapiens
  misc_feature (260)..(284): n is a, c, g, or t
tttgacaatccaagggtttatttccagcaacattcagctgatacaaacacatagaaatacaatctcaccaaagagctaagaagccctccaacacacgcccaatttcagcatacagctaagactacacaacacacacacaagctcaacaaagagctaagaccactacacacatctccacagcaccacaggcacatctcaaaagggtctgtccagtagttccagccaagggaagggtgatggcctaagccaccagctccagnnnnnnnnnnnnnnnnnnnnnnnnngagctggagttttgctcttgttgccaggctcctgagcagctgggattacaggcatgcaccaccatgcctggctaactttgtatttttagtagggtttctccatgttggtcaggctgatcttgaactcctgacctcaggtgatccgcctgcctcagcctctgggattataggcgtgagccactgcgcccagcctccagttttcttttctttagagcagcggttttaaatccttttggcttcaagttctctgaaaatttactatgctctccacaacaagagctcccattttccacagacacagtcaatgtcagtcagcttgtattcaggaggacagggcagagggatcccagtggcacttcccatgggaagacagaagagagtgggccccagagatggaaggaccccagtgtcatcaccaaacaaccatttcagccgctctagcctctaattcccgctctagaacagctggccctggtcgtcagtacacaaggaaagagcccagaaccaagctcaagatacctattcaaagatccctgccagccaggtgggcagttgagtgcagattcctgcgacccccgccatttttgctgtctacttagaagggaagtcaatggcatacccaggattccttcctgatccctcaaagaaatggggaataacactttaaacaagttccaggccactcagcagtggtaggaaagggagggagggcatgaaggaggatggggcacatagctgacattattaaaaacacatccgaagaagtagggggccctgtggggtgtagaagacaaataaggcatcctgtgaaactacagacatcaggggccagagtccggtagcacctgagtaaggcaaatgcagatgataggcggtgagccgaccaggctcacaccaggaatgacgaggtctgtttgaattctccttcacttcgggccactaggctggctgtaaatcaccttcttactcgaagtccctttctttgttctgtcaaagtggcctcggctataggcaaaacagatgccaaaaaccaagattcccaggagaatcagggttacacggatggctgcacgatgacccccacattccgctcacagcttccatgcgcacagcatttgaagtcatgggtgtcccatacccattccgggctcacagctgtatctca

SEQ ID NO: 128578 - DNA, 830 bp, Homo Sapiens
  misc_feature (253)..(439): n is a, c, g, or t
  misc_feature (477)..(493): n is a, c, g, or t
cttcccccggttgagcgatttgtcttcagggcggccttgaaacccgaacgcctttcacgtctgcctttgtgccttgccccttttttctgggttcccgtgattttggaaccctttcccccttggtgagtgtccgttccccaccgaaagacgggccaggggtatgggcgggagcggaagacccccatagcaaaccgctttccccgcggttggccgttcctttatccacctgcacgacagtttccgaattgaaacnnnnnnnnnnnnnnnnnnnnnnnnnnnnnnnnnnnnnnnnnnnnnnnnnnnnnnnnnnnnnnnnnnnnnnnnnnnnnnnnnnnnnnnnnnnnnnnnnnnnnnnnnnnnnnnnnnnnnnnnnnnnnnnnnnnnnnnnnnnnnnnnnnnnnnnnnnnnnnnnnnnnnnnnnnnnnnnnnnnnnnnnnnnaagaattcggcacgaggagcggccgcatacgcgggccnnnnnnnnnnnnnnnnncgttttggggacagtcttttccctcttcaatgtgaaaataaacatttattataaaaattagttttgacattttaaagtgaatgcagacaaggtgttttccagttcaaaaggtccattgtaagctagagaagtaaattccaaggctggcaataactgactcatattcttcacaagtggcctagacaataaggaaccattcacctcaaattcacagagccatgaatcacctctgcttccccatgaccttttccatatccttcctactctgtcttccaaccatgacacagaactgaaacatactttaaaaatctcatccttggctaggcacggtggctca

SEQ ID NO: 128579 - DNA, 1099 bp, Homo Sapiens
ggattgttattattcttaggcctccctctcaatgctccgagtagcaactgaagctcatgttcagcagacacagacacagatgtttattccaggaagaggtctaagaaacgagcttcttagagcatgtgtcacggggcagccagtcctggggctctcagagccagccccctcccttcagcagctgaagcaatagcgcccccattttacaggcggagcatggaagccagagaggtgggtgggggagggggtccttccctggctcaggcagatgggaagatgaggaagccgctgaagacgctgtcggcctcagagccctggtaaatgtgaccctttttggggtctttttcaacccagacctggtcaccctgctgcagctgaagcaccatgccccctgacaccacctggaagagccccttgttggtggtgtcacagaagcccagggagcgtcggacctggccccttgaggaggagacgatggacaggcagatttcccactgggacagcacctggaaggtgaagtagtagtagccgggtacagtgcagacgaatcggccggagtggttctggtacggttcttcctggttggtgatgaccgtgtcgaagatgaccacgttgccccccattggggggttccgccgaatggcggagaaggctggcctcggctggtccttgatgtttcctgggctgcccttggtgcctttaattcccgggatgccacgggccccgagggggccgctgggccctgggtagcccaccttgccggggtttccagagggcccaggttcccctggtctcctttaaggccttggatgcctgtccggatgccaggggcccccggctccccttgctcccccttgaggcctggccgcccccgtctgccaggtcttcctgcctcccctttcttcccgtctggtgctcggcacaagtcctcggtcaccatagaggccagcgatatggccagcacacagagcaccagccatccccggggaccctccatgatgcctctgcctcctgttgtcaactccaactggatgctcctgccctccgcccagggaccctgtgggctgcccagcaggagtggctccaggctgtggccaag

SEQ ID NO: 128580 - DNA, 1125 bp, Homo Sapiens
  misc_feature (167)..(167): n is a, c, g, or t
ggtagagaacgcaaggtagaacagcggggaagtggtaatggagacaatgggaaagggtgttttgtgatcacagggtataggggtgggggaacaggggggaggagagatgggagacggggtcgaggctccggctcgccgaacaggcaaggggaaggccgagaaggggngcgcccgtgttttgcgggagggggagccagggtaaagcccaggagaggggtggtggggggaaaagtggtgccctttcccaggggtcaaggcagaatgggaaagagaaggaaacccgctggagggctgtgtccgccctcagagcccgtagtaaatgtgacccttttgggggtggttttcaaacccagacgtggtgcaccggacggcaggggaagcggcgggccccctgacaccccgggagagaacccctgggtggtggggtcacagaagctcagggagcgtcggacctggccccttgaggaggagaacgatggacaggcggatgttcccactgggacagcacctggaaggtgaagtagtagttgccgggtacagtgcagacgaatcggccggagtggttctggtacggttcttcctggttggtgatgaccgtgtcgaagatgagcacggttgccccccattggggggttccgccgaatgggcggagaaggctggcctcggctggtccttgatgtttcctgggctgcccttggtgcctttaattcccgggatgccacgggctccgagggggccgctgggccctgggtagcccaccttgccggggtttccagagggcccaggttccccctggtgtcctttaaggccttggatgcctgtccggatgccaggggcccccggctccccttgctcccccttgaggcctggccgcccccgtctgccaggtcttcctgcctcccctttcttcccgtctggtgctcggcacaagtcctcggtcaccatagaggccagcgatatggccagcacacagagcaccagccatccccggggaccctccatgatgcctctgcctcctgttgtcactccaactgatgctcgctgccactccgcaccagggaaccctgtgggctccccggccgtaatggccgaaattcccgggcatatgtccggtaccgtcgactg

SEQ ID NO: 128581 - DNA, 1090 bp, Homo Sapiens
  misc_feature (964)..(964): n is a, c, g, or t
  misc_feature (973)..(973): n is a, c, g, or t
gaaaatgatgaaatggtgtttattactatctggatgtaaaacccagcagtgttgtcctatctgacatggtctagggtttcccagccagtgagagaggggccaggaaggaactaggctgcgtgtcaggcacttgtcaggcagtatcaggcactcagcaccctaaggctaccatggtggggtggggctggtaagctctgatcagccatgaaaggccctctctgccctactcaggcccaagccaggaccagacattctgagcatggctcagtcgccttccccaacctcaggtctgacccagagtaaagaaagagacctcaggttaatgggaagccacttagctctgctcccaaccagccactttcacacaagtataccaaaagatagcccctgacttcaacagagaggggctttcctgcctgagatctggtgagcagatgggtgcagggaaagtatgctggcttttgtcacagtgacattttccaaagtggaaaaaagttaaaaatatctcccaccttaagttcagatgaaaagtcaccctttgggtcgggaatagtgaggggatggctaggcccagggactccctcaggggagagcgctgagtgccatctgggctggggctgcagcaaggcagggctggactgcacagggaggcaggcagactggatccagcagcctcagggcccaaggaggagtgagaatgagagggcagccagtgtgtgagaaatcagcctccccaaggcagaggtgaaccctcaatcgcccctcctcccttactcgctcactcagcatttcacaggcagcaacgtggtccctggtcaccatggcaaccaatggccaatgcctttctcaaggccaggcccatctgcccatcccacagggagatgtctctgtggaagatgggaagcccagccacaactcccagtggcctagaaagctaaggccatgcaccagggcaggacagcanagaggcctnactcgggccaacctagctaaaggtgtgctatggcagcaggcagctcccagcccctaggacctgcccatctctagggcttgagcctgggccagagatctgaaggaggtttagggtcag

SEQ ID NO: 128582 - DNA, 1012 bp, Homo Sapiens
  misc_feature (314)..(331): n is a, c, g, or t
  misc_feature (374)..(775): n is a, c, g, or t
  misc_feature (786)..(786): n is a, c, g, or t
  misc_feature (788)..(788): n is a, c, g, or t
  misc_feature (847)..(847): n is a, c, g, or t
  misc_feature (909)..(910): n is a, c, g, or t
ttaaggtaccagagtgcatatggtgtactgtgatcttggttttgcaaatttattcatgtgttttacattatttcaattttaataaacatatcatatgtgtatctttacaatacctgataaagattcagctgtctggcacttacacatgtattcatagagttcattctgatgctctgaacctcaagaggatgtgaaaatgacttgcctgtaattaccccaagatgaagatttattgaagcagttatgctccagcaactgccactcatttgtgctggttctactttttccccttaattgaatgtaaacatttgccnnnnnnnnnnnnnnnnnngcctacagccgcggccgctccaacacctcgtgccgaattcttnnnnnnnnnnnnnnnnnnnnnnnnnnnnnnnnnnnnnnnnnnnnnnnnnnnnnnnnnnnnnnnnnnnnnnnnnnnnnnnnnnnnnnnnnnnnnnnnnnnnnnnnnnnnnnnnnnnnnnnnnnnnnnnnnnnnnnnnnnnnnnnnnnnnnnnnnnnnnnnnnnnnnnnnnnnnnnnnnnnnnnnnnnnnnnnnnnnnnnnnnnnnnnnnnnnnnnnnnnnnnnnnnnnnnnnnnnnnnnnnnnnnnnnnnnnnnnnnnnnnnnnnnnnnnnnnnnnnnnnnnnnnnnnnnnnnnnnnnnnnnnnnnnnnnnnnnnnnnnnnnnnnnnnnnnnnnnnnnnnnnnnnnnnnnnnnnnnnnnnnnnnnnnnnnnnnnnnnnnnnnnnnnnnnnnnnnnnnnnnnnncaaggcagcananggcaggaaccgtaaaaggcgcgttgctgggtttttcataggctcgccccctgacgagcncacaaaatcgagctcagtcagagtggcgaacggacagactataagaacaagcgttctcctgnnagctctcgtgcgcctctgttcgacctgcgctacggaactgtcggcttctcctcggagcgtggcttccctactcgctgtagatccattcggtgagtctcgtcc

SEQ ID NO: 128583 - DNA, 598 bp, Homo Sapiens
gttgagcttgtcagaagacatttcatttgtttcatttctgcacttctctcatgaattttgggatactatatttctgtgaaggacttattgtatagacaactcaaaaaggaaagaaactttccagtattaccacttcttcctggaatatagctgtagtatttctcactagtattattagatacctgtgtacagaaagtatgcagttattcaggttaatgtttcatattaaagaatgtatttgtaaaatgtaacatgatcagtagttaccttttttcaagctctgaagaagttcagattacgtgttagacttaagttacagtgaaaactgttttaatactacttttgtggctagcaaaggttgtgcatctatttaaaattatttacaggatgctctaaataaggggcattaaagataggtttagctcttaattttagaaattgtgacactactgatgtctgtcatacagttattcttcagaagttctctgagatgtcaaatataatttttgtttaattcagagataagtaacacctgctctattgattcactattacaacaaaccctaattttgtcattaaatattttaactctgtggtg

SEQ ID NO: 128584 - DNA, 2818 bp, Homo Sapiens
  misc_feature (1835)..(1835): n is a, c, g, or t
gccagttatgttaactgcttaatttatttagtctgatcaatggcccagttcaggcccaccactcctacacttgctggggacagccaggaaacaaccagccacacaatgctgaactgtgctgctgctgggagtccagggctcagccctaaagcaagcttgcaaacttcacacataagtacagtctatatagcaagtaaactctgaccagagatgacatctggtcccacaactcatcaggtctatgtacaatatttcacataccacccaatagataagataatattaacagcaaccactctcctttatcaattccccctgctccaatacaaccaccacacattgcattaataccccaaacccattcccaatttattaaatatggtgcaagctcatagacacttagaagaggcaaatctagttgtgatgaagagttcctagagctctgggagccaagatggaggttttccagtacctgcacatgtggctcaggaggatgctgcccaggagctaatgagttgggagagcaaacatgggaggtagaagtcagatggcccagctcagggagctatctctctcagcatctcagctttgagactctgccaccacctcttcccagcccaagctgctgcctaaaccaggcatgttgaagggtgagcagtggttgccatgaagccaagaccaagagattgctgagactcccactcccctccctcagactctaggcctgtgacaagccacactgtcctccagaacccatcgagctttaggcaaaatgttttaggcatctgactaaggagcccacccgagtatgagtaacagaagccaagatctgagctttctagagggcagggcctctttctagtcccccagcctcttcctttgcttgtgactgtttgtttcagacagaaaggatgttgtccgtaagttctcagccagtctccagtattaagtttgaaaacatgaggtggaggcttcctctcacattgatgtggtccctgggctggctagagccagtgagcaggtaaacagaagccagccctttctctaactcctggcctgttccaccacatattaagggactcttcaaaacctactccctcaaccttgctccaggaaggacaggatctggagtagaaagggggagcatcactgactttttcacaccctttgagccatcagtctttctttcgtccacacacttgaagtcctcctgcacccagctggactagtgacttcagagttcacaggcaggttcaccctgggatcctgcccagcaggtccaggtcacgctgattagtgtaagcaagagcctcccacaatccactgccagggagttcctgggtggattcgagtaacagattcctcctggcccaaaggccaggggtttttttcttcttcacagctttcaggcaagtattggatttacagacagtaactaggccccagaacctgtggagatacatttccctggtgctgcgcccacttgcctcctggggaggtaataggaatggcttgttctgcttctaaacattccgccaatccacaggaagcccggatggccctgctcacagcaggaatggggcacagaggggcaatgctggctgtagaacacccccctgcagggggctgggccagggctagggaggtgagtcccgggtcaggccgtactgcatgctcacagtgtggtccaactccctccaggtttgcaggcagcggggatgcccagctccccccaggtacagggagaggggctcaaaggagtcttccaatttcgagaatgctggtctgctctcaggctccagtctgcagcagatggcggccagggggaagaaggnccgggggacaatctgtgggaacaaacttctcccagaaaagcttcacgttgaggccaaagtccagtgttcggggaaggcagtcaggatctgcatacacctgcccaatgatctcacagagaacgatcccaaaggagaagatatccaccgtctcatcatagctctttccgttcagcatctcaggggccatccagtaggggtttcccaccaccgtgtagcgcttcttgcggtcgttgttgcgcaaggtgcgtttcttggtggtggccttctccatgggggcccttgttcctctcttccactatgagccgtgacagcccaaagtctgccaccaccacagtcttgtccgacttgatgaggcagttgtgcgagttcagatcccggtggatgatgcacatagagtgcaaataggccattccggaggcgattcctttggcaaacctgaccttctgctgccaggggaacggatccatactgcgcagaaagtccttcagtgtgcccccctcaatgtactctgtcaggaggttcagcttcttatccttgtacagcacaccaatgaacttgagcacattggggtggtccaggctgcgcatcactttcacctcagtcagaaaagttttctgggtctcctcatcacatcgaattaactctttcatgaccatcactttgcccgtggctttgtgtgtcaccttgatagcctgcccaaagaagcccttccccaggacctccccatggattaggtcacagggccggaagatctgctgtgaatagctgctggaacaacgaagggattctgagcggctgatgtcacggctgaacagcaggggctcctttggggagctggggccaggggacttggagatactgttactgcgccttagggaacgtctcctcagtgtcccctccagattctccttggtgtccagggtgccctcgtgccgaattcgccacccaggcctcgctaccttagaaccgttatagttactgcc

SEQ ID NO: 128585 - DNA, 1277 bp, Homo Sapiens
  misc_feature (1161)..(1195): n is a, c, g, or t
tttgttttctaatacctcttgtcattctaaatatctttaatttattaaaaaatatatatatacagtattgaatgcctactgtgtgctaggtacagttctaaacacttgggttacagcagcgaacaaaataaaggtgcttaccctcatagaacatagattctagcatggtatctactgtatcatacagtagatacaataagtaaactatattgaatattagaatgtggcagatgctatggaaaaagagtcaagacaagtaaagacgattgttcagggtaccagttgcaattttaaatatggtcgtcagagcaggcctcactgaggtgacatgacatttaagcataaacatggaggaggaggagtaagcctgagctgtcttaggcttccggggcagccaagccatttccgtggcactaggagcctggtgtttccgattccacctttgataactgcattttctctaagatatgggagggaagtttttctcctattgtttttaagtattaactccagctagtccagccttgttatagtgttacctaatctttatagcaaatatatgaggtaccggtaacattatgcccatttctcacagaggcactactaggtgaaggagtttgcctgacgttatacaaccaggaagtagctgagcctagatcccttccacccaccccatggccctgctcatgttccacctgcctctaatttacctcgttttccttctagaccagcattctcgaaattggaggactcctttgaggccctctccctgtacctgggggagctgggcatcccgctgcctgcagagactggaggagttggaccacactgtgagcatgcagtacggcctgacccgggactcacctccctagccctggcccagccccctgcaggggggtgttctacagccagcattgcccctctgtgccccattcctgctgtgagcagggccgtccgggcttcctgtggattggcggaatgtttagaagcagaacaagccattcctattacctccccaggaggcaagtgggcgcagcaccagggaaatgtatctccacaggttctggggcctagttactgtctgtaaatccaatacttgcctgaaagctcccggaccgtaatggccgaattcccgggcatatgtccggtaccgtcgactgnnnnnnnnnnnnnnnnnnnnnnnnnnnnnnnnnnncggccgcttcctcgctcactactcctgcgctcgtcgttcgctcgcaagagctagcgccctatagtgatccgatacagttctt

SEQ ID NO: 128586 - DNA, 572 bp, Homo Sapiens
tttttttacaattagctttaaaattttattgaaattcaagtttagaatttaacaaattaatacaatattacactgaatactttctaaccagtagtttagctttacataatttctaggcataacttttaagaactgatactttctggttaattttccatgatatgccaattatacattcattaaaatttcagatgctacctgaattattcttatctcaatgacagaatttaaaaaaataagttcaaatactgaaaatctaagacattaacactggggcccttgtaatatagaaaagaagaaaaattgtacaatcttaactgtttaaaactcttaacgtttactgtagtaacagaatatgaatttgtaacataaccatatgaatttctcaagttatttcctactgatgcatgtctgaagttataaaaatctcttttaaacgaacctatactgaattactccaaaaataacagtgatattttagggccttgcaaatttattctagtgcatattttaagtacctaaagtacagcctgtgcactagcaggttactgaaaagaataagtgtggctttc

SEQ ID NO: 128587 - DNA, 1208 bp, Homo Sapiens
  misc_feature (49)..(58): n is a, c, g, or t
  misc_feature (220)..(229): n is a, c, g, or t
  misc_feature (808)..(816): n is a, c, g, or t
  misc_feature (1018)..(1018): n is a, c, g, or t
  misc_feature (1038)..(1038): n is a, c, g, or t
aaaaatcaaaaatgaaatatttattaccgctttttgtgacttaacaccnnnnnnnnnnaacataacgtcacagtcctcatacaagtattttaatgtaaatttgacaaagcttaaaggtaacagcattttcttctagtgaggaacacgtgctgagaaaagaagaattcatggacatacaataccaattccacagcagatctgatactagcaaaaacattcnnnnnnnnnncaattgaggtaaacacatagaatatctaacatgaaacaattaatagaccgaactctgtacgaagtttgttacagtattctcttgctcctttttatcccccaagctttgagtttctgataaagtcctagttatggttcaatgaccattaataacttttttttgtgttgaggaaagctgcccaacttaagattgttttgtccacaaccaaggctcagaactcctggaagaagctcctgctctgtctttaaatcttcattggcaagctctttgaagaagagtcccccaaaaataataataagaattggcttatgaagcacgaactataaagatctgtttgaaactaaaggacacatttatggaggaacaaaggccgggcatgaaaacacattcttgaagctggagttcgagtgatgaggttcagccaaaagttcatcatgatctccagtgtggttcttttctcattggcccaacaggtttaaaatatataccacagtctctcctggatggtgaattcactgatgaaccaaaacagtcattcttttgggaacaacacacatagtgtggaaaacaaggatatannnnnnnnnctcttctaaaactatttgaggcaacataacggcgtgatcaacagaaatgtacaagtttaacttagttcctatatttatactacagtagttataactctcggagtctttttccagaggatctttacatggacagaattgtctcagtcagcccatgatttcacatttgtgttcttgttgcattggtccctctgtgcttgatganaatgacaaagtaaactcgtngcgaattctggctcgagggcaaatcctatagtggtcgtataaatcgtatcagtcatactgttcctgtgtgaatgttacgctacattccaacacatagagcggagcataagtgtaactgggtgctatgatgagctatcaataatgcgtggctatgccgcttcatccggacg

SEQ ID NO: 128588 - DNA, 966 bp, Homo Sapiens
  misc_feature (230)..(230): n is a, c, g, or t
  misc_feature (269)..(269): n is a, c, g, or t
  misc_feature (947)..(955): n is a, c, g, or t
gcgcagagccagcatattgagtgtcatcatagccccagctacactttctccgctgatgtgttgattgagcgatacattcacacagaacagtatgactgatacgattaatcgactcattagggaattgccctcgagccagaattcgcacgagacttcaacattcatgatagataagtaatgtgggtagaagaagaaaacctgtgatctagttctaagctgtgtgacaaatntgaagctcgaatgacaataaatacagcttgtaatgaacntggacaaacatggatggaatctggggtcagtgaaaatgcagtttcagggcatatacagcttataattcctggagaatctgcttgttttgcgtgtgctccaccacttgtagttgctgcaaatattgatgaaaagactctgaaacgagaaggtgtttgtgcagccagtcttcctaccactatgggtgtggttgctgggatcttagtacaaaacgtgttaaagtttctgttaaattttggtactgttagtttttaccttggatacaatgcaatgcaggatttttttcctactatgtccatgaagccaaatcctcagtgtgatgacagaaattgcaggaagcagcaggaggaatataagaaaaaggtagcagcactgcctaaacaagaggttatacaagaagaggaagagataatccatgaagataatgaatggggtattgagctggtatctgaggtttcagaagaggaactgaaaaatttttcaggtccagttccagacttacctgaaggaattacagtggcatacacaattccaaaaaagcaagaagattctgtcactgagttaacagtggaagattctggtgaaagcttggaagacctcatggccaaaatgaagaatatgtagataatggactgggatatattgtatttctcatgttaaagcctcttcccttgaaattnnnnnnnnnttttaactggt

SEQ ID NO: 128589 - DNA, 1005 bp, Homo Sapiens
  misc_feature (679)..(726): n is a, c, g, or t
  misc_feature (734)..(734): n is a, c, g, or t
  misc_feature (777)..(777): n is a, c, g, or t
  misc_feature (789)..(789): n is a, c, g, or t
  misc_feature (829)..(829): n is a, c, g, or t
  misc_feature (847)..(847): n is a, c, g, or t
  misc_feature (880)..(880): n is a, c, g, or t
  misc_feature (887)..(887): n is a, c, g, or t
  misc_feature (897)..(897): n is a, c, g, or t
tttgtttttagatatttttcctataggtttctgctgtggagccgtactcactgcagaccctgaaggaggaggagcacctgctttctgccactcagtggcctcagctgccattcttctcacatatgcatcatccacacacatcaagatattttccggctttatgtcagtatgaatgatcttgcacttactgtgtaagtaatctaacccttgaaggacctgtcgaatgatactcttcacacaacgtactgggaggccttgatagttggatttgatgatccacttgaggagatggtggccaagtacttcgaagaccatgcagacatgtatcccattcatgcctgaaatcttgaagtcgtcaatgagctggaccaccatgtctttgtttgggtcactgggatcactttctcgaacacatttgagcaattttatttcatccaaggctgtctccgtataatgctgggcactttttacaactttcattgcaacaaatcttttcccctgcatatcccagcacagccagacagtagagaagtgcccccatccaagctttctaataacatgataccggccattgaagaggtctccaattttcactggatgatatccacctttgcagtagtccgcagggtcctcttgctcctcatcatctgatcccaggatctcctcctctggctccggnnnnnnnnnnnnnnnnnnnnnnnnnnnnnnnnnnnnnnnnnnnnnnnnaggacgangaactaaaggagctttctgttgaggctccggcttttctgagangacgactctcanagttactgaatcagagctcaatctctgcttgatttctggnaaatcagaaatatcacancaagattgctgccttgccctcgtgcgatctggnccgaggncaaatcctanaggagtcgtataatcgtatcagtcatactgttctgtgtgaatgtatcgctcaatcaacacatcagcggagaaagtgtagctggggctatgatgacatcacatatggtg

SEQ ID NO: 128590 - DNA, 1007 bp, Homo Sapiens
acttttcatccaatatttggcagcaactacaaagtgggtggagcccacgcaaaaccaagcaggattctcccaggaattataagctgtatacgccctgaaactgcattttcactgaccccagattcccatccatgtttgtccaagttcattacaagctgtatttattgtcattcgagcttcaaaattgtccacacagctaagaactagatcaacaggttttccttcttctaacccaccattacttattctatccatgaaatgttgaaagttttccactgtggttatattaatagttgtgtacttcaaaaagaacatcaggattaatgttcctcagagtatgttctgctgcttgaactttacttaatcctgccttgatgaggttggaagaaaagtctattcatattggctaggttccacccttgtcataatcaaagagtagcaacttaccaatgccacatcttgtcagcatttcagcagtcacactacctactccacccacacctactattgctacggcaaaggtacggattttctcatagtcgcttacaattcccattcgtttcaatgccatcaagcggctgtagggattcgaatccaccacctctgagctcatcttctcgatgcggacccggccgccccctccgtcgccgctcctcgggacctgcagactcctctcctgggcaagttcccgctcccagctcctggacccgctgctgcaggcgctccacagactccgccatggctgggactccggccgccaacgctcccagcccggtcacttcgccgccgccttcgccccacgttgctcggctgggcccgcgaggggtacgtggggaggcacctcgccgctgccttcctagcccagagcctgggaccccacccagcgcctcacagacagacacgtctcccgacgcgtggtcgacatatcccggaatatccgaaccgtacagccctgctctgttttgtaaaacacgcgtggttctaattagttgtactatatgcccctc

SEQ ID NO: 128591 - DNA, 1551 bp, Homo Sapiens
  misc_feature (1436)..(1470): n is a, c, g, or t
gagtttcacattttactttatttgaagaatatgtgcaaaagactcactaaaaataagaacaaactaggctttgttgcagctgagtggtctggcaaatttctgtatagaggaatcattgggcatgaaggatttgatactgggatagaatccaattgcccttggaatggaagtagaatatcctttttaagagcactgaagttctgggatttctccggaataatcacctttgtgatgtgtggatcatgtccagggactgtaacatttattatataagacccaggcaagagaaggagataatactctccatatttgttggttctataggggcagatatgttttctgtcttggacttccacaattacattgggtaatggatttcccattctgatcaaaaccttgaccctttacacctaggtgcacctgctttatatattcaattaatgaggctttgttattattccaaaaggatggaagcttctcctcacgaggatatttacagcatgacagctccaacgtaatttcaaaacactgggcccagatgtagttgtaatcttgcattccaccttggagtggataccaagagtatccatttgtaacaccattaggaaagttcattttgtttttacactcgtctcctttcttcatgttgggatttcttgaagcataggtatgtgcaagatattgaaaaacatcatcatcaggcgttaagcttcgggagtataatgccccagttgcttgaacaccattatcaaatgggtaactggccacgagggcaccaccatggaggtttgcagagaggacaaacgtctctgttttcagccacttcatgactgccacagtttcaggctgccttgagacattattatattcaaaagcatcggggaaatttcgattcaagtcatactggttataattttcccttccgatgctgtaataacagtcaggctttttgacggcttcaaatccatctgggttcatggaaggcatgatgtgtatccgggtactattgatcagatttgtgatttcagggtctttgccatcactggttacgagatagtcaatcagatggagcagcagctcccgcccaacagtctcatctccatgcatatttgccacgtatttgaactctggaatcccaattctgtgttcctttggaaaccgccccacaacaagaacccacaggtttctacctttcacagatttcccaatactgtgtaagtgagtgacagaactgtagttttgggcaacagtcttcaaaaacgcttccatcccttcctggcggtggtagttgaaatccagcgcagctaccaaaggcagcaacagccctagccagaggcacgggaagtccatgttcaggtcccaggcgcgcacctctacccacgccccccggccgtaatggccgaattcccgggcatatgtccggtaccgtcgactgnnnnnnnnnnnnnnnnnnnnnnnnnnnnnnnnnnncgccgcttcctcgtctcactgatcttcgctgcgctcggtcgttcggctgcgacgagcttagccgccctattagttatgaaa

SEQ ID NO: 128592 - DNA, 663 bp, Homo Sapiens
tttcattttcattcattcatttaatgaggcttagcaatgatatcaaaagggtcagtctcctgacgttggggagctcacagtacatgcaaatttcttacaaattgaaatacaggttgtcatggaacaatttacagaaggctgtttctatgagggaaataaagggggtgtgccctagggcatcaaagtatatgcaaggggtggccaaggagggtcaccttcccagaaaaggccatacttgaactaaggataaataagaattagccaggcagatagtgtgaaggagggaaaggggtaatacaggaagaaggaattgcactgggcaaagacattttggggctagggagaattctctaaggctggcattttctaagatgtgcatgtggaatgacacaggtaagcctggagagtggacaaagtgctgtagtaccttgtatccaaagccaaggcacgtgggcacagagctgaagctaaggagagtacttcagttctgtaataagggctgtcaggagcacttatctcttgagtaggatctctctgacttcagggaggaaagcaagggtaggaggatgaggtggggctatgggtaatccaggaaggaagtgagcagagtacattcacgtggcagcgctgggcatggaatacagtgtgggtttgacagtgatg

SEQ ID NO: 128593 - DNA, 1086 bp, Homo Sapiens
  misc_feature (220)..(257): n is a, c, g, or t
  misc_feature (771)..(788): n is a, c, g, or t
cattaaaacaggaaaattagggttttaccaagcatcaatcttagccattatctataaatcaaagcatgctaataatttccattgctttactttttaaatgacattaacccttttcatttagaatgttctagaagcacaattaagccaagaaagttttcagatatatggctgtatagtatggctgtttatactgtatgaccttcactgaggaggttgacannnnnnnnnnnnnnnnnnnnnnnnnnnnnnnnnnnnnntaggttagcactatcaagcagcaatcagaaaaagcccacagggttcctggacatgaaaaggcagattccatagggttttcgagaggcctagattaatttttccacaaatgagagcatgtggaggaaggtaatgataatggtgctcacacttgtgattcccataccagtttttgtccctataggcttactgtaggaggtgttccctacagccacctaggaagttgatgacttacgctcttacttctgcttgccaggagtaaactgaaagcaaacaccacagtctgttgtttattagcttttacaggcttgttaacattccttgttaacaatttctttttgggtagccttttatacaatgcgtaggtgatgagtgatccagcagacaaggcggtagacaattttcctagatccagatattagagaaaatagagcttgcaagttaatccttgatctttccttgctatctctaattccctccagcttttacctgacttttggagctatgtggaatccnnnnnnnnnnnnnnnnnnaaatattattgccttcaggggctaaccttagcaatgtcctgggaaagtcaaccctaccaattagaggagagtagataaatctcctaaaacctcagagattagtgagctttggatgcagtaggagtaacacagttaccttaatacaaacatattatttcaaaaaaggaagaaaactggacttctaagggtgaattattctcgctgtaatagaaatggtttcctttcaggtttttagcctaaaaagagtacccggccgtaatggccgaattcccgggcatatgtccggtaccgtcgactg

SEQ ID NO: 128594 - DNA, 550 bp, Homo Sapiens
cacaaagcacagtattgatttcatactcaggtttttccaaaacaaatcataaacccacaccaattatgtccaatcagttttatggataaagaagcctgagactctccaacaggagagcttgagtttcccttctcactcttgtgctgggtgtccttttcctacctccagaccatcacaaggatatctgtaatgtagatgaggccagtccttttgcccaatgttgacagacaagaggaagattccagggagaaatgccgcagcagcaaatgaatatgaatgatgcttttccactttgtgcttataaaatgccttttgtaccagaatctcaaagctctccaggaagcaaggctttgaatgggactttcacttggggtaaacatgagtggtcggagctttccaagtcatttgtgataagaaagaacaaaagtccgggcacttttaaaatgcaatattcttgccttctgggtagtaaacaaagtgtgcagatggataatgacatctgtggattctggctccacttccgtgagcggcgtgcagagggcggagccta

SEQ ID NO: 128595 - DNA, 994 bp, Homo Sapiens
  misc_feature (154)..(182): n is a, c, g, or t
gacatgttttatttttgagaattcaagtctttagtcgatacacacatttctattttattatggaaaaggtggaaacgccaccttctccacaacagcaaccagtaaaatttatcccaaaaataactcggtacaaaacaggtctgtttcagaattnnnnnnnnnnnnnnnnnnnnnnnnnnnnncctttacatgagtttttaaatcctattttaaaacataaaagaaacaaatccatcattggccgcacagccccagccaccgccccccaaccagggagcaagaggagacgcctgggtcctgttccgcacgcggatttgctggtctgtttaactggtgtccattctcgcattataggcgtccagctgggcatccagctcctctgccgaaagctgctgctttgaattcctgccggcacctctgcctcttccacgggcgcctccgcgggtgcctctccgggtgcctccaccaccaccaaaacctccagcgccacggtttctagtcatgccacctctgtttacgctctgtgcaggcctccgctgtgcgtcaatctgtgacgtgacaagctgaatgttcatggggcggccatccagagggacgccgttgtactgcttcatggccttcagggcatctgccttccgctcaaagtgcacgtctgctgttcctaagctgcgaccagagcgatcatagtgcacagccgccttcttcagcgttccaaattcagcaaagagttcctgaatatcggcgtctgagactccaaaatccagattggacaccagcagtttcccacctgtctccacgccggcaccaccgccgaagccactgtcgaaaagatcgtgctgccacttgtcgggaagttgttttggcctgctgtagggcgccggtcggttcctgccgcctccgccggccgcgccgcgggcgatggccggccggttccggatgggcccgccgcctcgattcactcgcgcggcggcctgcgccccaccgccgcggccgc

SEQ ID NO: 128596 - DNA, 1936 bp, Homo Sapiens
tttcagaaaaagaacttctgtatattttactaaaataaaaagcttttacaatagctggcctgtggcctcctccagcccaccccagtatggagtgatagggagggaagggcaaggggagcccacctactcaaggaagcgccctctccttcgaggggtgtccaggccgaggggtgtccaggccgggcttctgctcccgaggtgggtggaggcagggcaggaacggcacattctcccagcaacgccgacgtcatccaagaattaacccaagccagaggacgggcatcgccacccagcaacgccagtgtcaccgaagaattaacccaagccagaggacgggcattgccacccagcaacgccagtgtcaccgaagaattaacccaagccagaggacgggcatcaccacccagcaatgccagtgtcaccgaagaattaacccaagccagaggacgggcatcgccatgccttcatcttcggacactctcaaaaaagataagcttctgcccagaaacaccacaggttcaagctcatcactcagggagcctgctgccaatcagctgaaacctgcctggggaacagggacttgaccatggggcaaaacagaagaagcagaaacctgcccaaaggtcgctcaaaggcttcctctaggccagacgctggtaagagccaggcgccgtgctcccaggtgagtgtcggtgggacctgcgtactgcccacgcggcaccgaagcccctgcctgctctctgtgaagggttcagaagtatctgtggctgccaaagcctgaagagggcctcaggcctcccatttgcaggtccccaaaccaagccagaaaacaagactcccttgtcatgggctgggggcactgccctgtccgcagaccacgtatgtctagaattcccgtgctgggacatggttcagacacaaggacaactgtgtcccctgccatgacggcagtgcccctggtggtggaggggctgggcacatgctctggtcacatgctctggtccccctccaggcaatggcaagagtgaccccacaggaaggaagaaccctccttggatgggagtgtggacggaagggctgttgccactactccccaggctggccggccacacggacacgtgtgggatgtgtctgggacatgcctgggatgtgtgcacaggcctcctgggatggtcacagctcattgtggaggggctggcactggggagagagcttctcctccaggacgccgtcgggggcgcacacccaggggtcgtgggtctcccactgccacttggccagctggtcccgaagcatctccagaagctgagcaaagtgcgggtcggtggccaggttctgggtctcgtgggggtcccggctccggtcgtagagctcccagcgcgcccggtagtagtaatgacggaggtccttgtaccagcccgtgggctgaccagctgtggtgcggttcaggaggtcctggaaggtgggtgagacgtagaagtcctggtcgatgggaaagggcatcttgaagttgaggttgtgcacgaggcggaagtgccggtgctgcacggagcgcatggggtaggacatggtgacctcgtggtggctctggctgccaaagacggtggcccagaggggctcggcctccagcgccggcaggagggaccggccagtgaggtggatggtcttcgagccaaagatggcgtagctggggtacgggatcgagaaccaatccaagatggtgggcgtgaggtcagctgtgcaatcctgagcagcttacttcacctctctgagcctcattcttttcctctaggaggctcacgtaggcctcgctgacttggccccagcgttttgggtgctccggggatgacaccagtaagggttcagcagtgcccggccagtacaggttggtcctgccgctggggaaggggatcccgttgtcggacgtgaagatcac

SEQ ID NO: 128597 - DNA, 1403 bp, Homo Sapiens
  misc_feature (65)..(103): n is a, c, g, or t
  misc_feature (162)..(163): n is a, c, g, or t
  misc_feature (197)..(300): n is a, c, g, or t
  misc_feature (1364)..(1364): n is a, c, g, or t
ggggggataacccaaccccttgttcttgtgccccggtgttttctttgggaaaacaacttttttgnnnnnnnnnnnnnnnnnnnnnnnnnnnnnnnnnnnnnnnaaaagaatggttttaaaaaatttttttgggggccggagggggcccccacaaaaaaaatnngtttggtcctttttaggggtgtttctatggaaannnnnnnnnnnnnnnnnnnnnnnnnnnnnnnnnnnnnnnnnnnnnnnnnnnnnnnnnnnnnnnnnnnnnnnnnnnnnnnnnnnnnnnnnnnnnnnnnnnnnnnngaagggagacatgactttattagaaaaataaaaaacaactgaggtgatgggttggtcttcagcggatgccttggtggatgaggctgcttttggctgcactggccttctcccgctcccgccgccgcgcagggtccaactcaaaacagcgccatagcctcagggtctcatctgctgctgcggatgccactgtggccccatctgggctcatggtcagactcaggacccgggatgtgtgacctttgagttcagccaccttggccatggttgggtacttccaaataactagctggttctgtgcaaagccatggcctgagatgagctccttgtaatggggagaccagaggatggagcacacctgggaatgggcatccacggcactcagacaggccccagagcacacattccagatgcgaatgtgtcgatcactggtgccccctcctgttgccaggacattggactgccagggacaccatgctacggccttgacagccccttgatgctgggtgaatgtctgcagaggaacccagccaccctctccaggagcactaggccacacattgaccaagttatcattaccaccactggccaaatgtcgtccatctggggcccagcgcagcccacacacttcctggctgtggccactcagtgtggccacatggtgttctgctacccgaacatcatggtggtggatgtggccagaacgtgaaccactggacaggatatagctgttccagcttagggagcccactcgggcagaacgtgactcggtcatatttcgaagccgtttctgctgctgcacatcccatagctgcacctcagcactgctggtgcccacagccaagtagttgccctctttgatccaggccacagaggatatatattccccaggctgctccatttgcaaaagctgcaggatgtcaccagagcttgcactccacaggtacacactgttgtccagtgtccacggccagtacattcccaggacgtccagatccacaaggttcagcctcgtgccgaattcgccacccaggcctcgctaccttaggaccgttatagttactgcncgtcgtttatcagcctgcggtttgacaacctggtcctgt

SEQ ID NO: 128598 - DNA, 1461 bp, Homo Sapiens
caaaaaaactaaggcgggtttgtgttgaaaaagcccctaggccgtgaaaagaaggctccctttaaacggggaagccccagaggatgggggccccccctggggaaaggggcattccaggccattcggaccgggccccagaggcccactttccagatggggaatgtgtcgatccctggtgcccccctcgtgtttgccaggacattggcctgccagggacaccatggtagggccttgacagccctttgatgttgggtgaatgtttgcagaggaacccagcccaccttctccaggagcgttaggccacacattgaccaagttatcatttaccaccactggcccaaatgtcgtccatctggggcccagcgcagcccacacacttcctggctgtggccactcagtgtgggccacatggtgttctgctacccgaacatcatggtggtggatgtggccagaacgtgaaccactggacaggatatagctgttccagcttagggagcccactcgggcagagtgactggtcatatttcgaagccgtttctgctgctgcacatcccatagctgcacctcagcactgctggtgcccacagccaagtagttgccctctttgatccaggccacagaggatatatattccccaggctgctccatttgcaaaagctgcaggatgtcaccagagcttgcactccacaggtacacactgttgtccagtgccacggccagtacattcccagaactccaatccacaaggttcaggtaatagtcatttcggatttcaggcgcatccaggatacggtctggcagggaaggaatgtaacggcaggtcttccggctggagccaggagtggccttttggctgtagagtactttcagtctgttctgataaccctctggcgcattttgtggttttccactgagccgaaggatcttggcttcctctacatcaaaaccgttcaggttcaaagcccaggctttctgatgttccttcttggtgggcgtctggctgttttcaggctggttctccttgctcaggaggaagctggccacctccatctgggcagcactgcgatgggggatatagcggtcaccgccaggtttgctaggagtggtctgaaccttggaactggatttgccaggagttcggcccggagtcctgccggcgctgtgggatcggttggcggcccgcatgggtgagggggccgggcctgcggcttccttggctttgcgctgccagcgcgcagggggtgcattggggatgggtgcatccagctgaagcagcgagtgcaggtcactctcgaacgcgaactgtgccatgggagcgcccgcagggggaggggtccttgcagttggtgcctacggagcccgtgccctccggagcagttccgaccggctttaacacgcctggccctcgtgccgaattcgccacccaggcctcgctaccttagaaccgttatagttactggc

SEQ ID NO: 128599 - DNA, 1435 bp, Homo Sapiens
  misc_feature (112)..(112): n is a, c, g, or t
  misc_feature (136)..(136): n is a, c, g, or t
  misc_feature (268)..(268): n is a, c, g, or t
  misc_feature (276)..(276): n is a, c, g, or t
cgtcgccggcagcaatcaacgcctactcagttatttgtggatcattgcccttggtatgcgatcagccggatttgcttgatcacacctgcatgtggtatccaatactagtgtnttgcaagcatgcctggatgactcntgtatggagaccagagatgacacactgggatggcatccacgcatcagacagcccagagcacacatccagatgcgatgttcgatcactgtgccccctcctgtgccaggacattgactgccagggacaccatgntacggccntgacagccccttgatgctgggtgaatgtctgccgagggaacccagccaccctcttcaggagcattgggccacacattgaccaagttatcattaccacccctggccacatgtcgtccatttggggcccagcgcagcccacacacttcctggctgtggccactcagtgtggccacatggtgttctgctacccgaacatcatggtggtggatgtggccagaacgtgaaccactgggacaggatatagctgttccagcttagggagcccactcgggcagagtgactggtcatatttcgaagccgtttctgctgctgcacatcccatagctgcacctcagcactgctggtgcccacagccaagtagttgccctctttgatccaggccacagaggatatatattccccaggctgctccatttgcaaaagctgcaggatgtcaccagagcttgcactccacaggtacacactgttgtccagtgccacggccagtacattcccagaactccaatccacaaggttcaggtaatagtcatttcggatttcaggcgcatccaggatacggtctggcagggaaggaatgtaacggcaggtcttccggctggagccaggagtggccttttggctgtagagtactttcagtctgttctgataaccctctggcgcattttgtggttttccactgagccgaaggatcttggcttcctctacatcaaaaccgttcaggttcaaagcccaggctttctgatgttccttcttggtgggcgtctggctgttttcaggctggttctccttgctcaggaggaagctggccacctccatctgggcagcactgcgatgggggatatagcggtcaccgccaggtttgctaggagtggtctgaaccttggaactggatttgccaggagttcggcccggagtcctgccggcgctgtgggatcggttggcggcccgcatgggtgagggggccgggcctgcggcttccttggctttgcgctgccagcgcgcagggggtgcattggggatgggtgcatccagctgaagcagcgagtgcaggtcactctcgaacgcgaactgtgccatgggagcgcccgcagggggaggggtccttgcagttggtgcctacggagccctggaggaaaggaggcgacggtctccctcgtgg

SEQ ID NO: 128600 - DNA, 1450 bp, Homo Sapiens
cgagctcggtacccccccgactagcccgacagtatcggcatcacctgggaacttgtcagacatgcaaattcttgagcccgccaagatctactgaatcggacaccctgggatttgcaatttggatattaacaagcatcccaggtgattctgaagctcatcggaggtaggcggggaaaaggcaatggttttgaaagcagcaggatccaggcgagaatcctagcttagtgcttaccagcatgtgcaatcctgagcagcttacttcacctactctgagcctcatgtcttttcctctgtagagtgggagtgacagtcccttcctcacccagatgatatgagagccacattaggtaatgggtgtggagcagaatctgacaggtcatgggcccgtcccagatccactcccacacctttcctgacggagacagacaaaggcatacctaggaggctcacgtaggcctcgctgacttggccccagcgttttgggtgctccggggatgacaccagtaagggttcagcagtgcccggccagtacaggttggtcctgccgctggggccggggatcccgttgtcgggacgtgaagatccaccagtgtgtcgttcaggacaccgggcgtcaccgcagctcctggagcaccagtccaactccttggtccatgcggccgacggtggtgtactgagcggccaggtcggctcgggctgccggggtgttggggacgaagtaaggcaccagcacgtcccagtgggtcgtaggcctggggggtccagtctgggatacgacccatgccgctctctccgttgccaaacttctcacagaaggttccgtactggggctgggagtgcccacagcggtgggggtcgtggaaggcgacgtagaggaagaaaggccggtcatcctgagtctgcaggaatttccggacgagcagcttaattctagtgatgttccgccccacctggaggacggagccattctcctccgtgtacgcaaagtcaaacgggtacacggtctccggccccacgtgcttcttcccgatgatgcctgtgcgcacaccagcttggctgagcagcagcggcaggctccgcaccttgtcgaaggagttgaagtggtgcacgtcctggtgcagcccgtacatcccattctgatgctggggcaggccagtgaggaggctggcgcggctgggagagcagctgctgaccgaggtgaaggcattgcgaaagaggaggctgcggcgggccaaggcgtccaggtgcggggtggcgatggcgctgttgttgtacgcgccactctcaaagcctccgtcatccgcgaggagcagcagtgcgttccggggacgcgcccggcagagccccaggactagcagcagcgcgcagcaggcgggcacggggcagctcatggcggcggcggctcggactcgggatcgggatccggctccggctctctgtttcccgctcg

SEQ ID NO: 128601 - DNA, 383 bp, Homo Sapiens
gcaaaaaggagacttcttttccagtccatgggattttagaaggatcctaaatgtcaccgaatcagggcctcttgttataccattcaaggcactgaggcccagagagatgacgtggcggtgagaggtgtcggctcgacaaggcacctcccgctgctgattggattggagaagggagccgcccagagtggcgtaggttcggcccttccgagggcagctcctgtgtgctgagggctctgctgctctgagatgccgcgtcccttccagacctcacgcccaccatcttggattggttctcgatcccgtaccccagctacgccatctttggctcagaagaccatccacctcactggccggtccctcctgccgcgctggagcgagcgcac

SEQ ID NO: 128602 - DNA, 1783 bp, Homo Sapiens
gatcttgcaaagcactttatatacgtcagcgcatttgactcccaaaacagctctaggaggtaggtgctaaatgaggaaacgaaggcaccaaaaggtgaaggctcacctaaagccacacagctggaagtggcagaagcagaatgggaacccgggcagcctggttcctggccctgccattcacccctctgccatctagaagatgctactggtggcccacccgagtccactggggggtgatgcctgctgctgagggttcacatctgtgctctctggaggcttcccttggctactggaaggcaccctgccctggaggtaagtgtctgggaagttattcactcctctctggccccctcatccaggagccagtaaccggtggtgtgggcacactgtggtactgtgggctctgcctggagctctccgtggggccagctgaggctggacgtcctctgaagccacttccttgcccagctgctccctcccctcccctgcttccctgactccctcgctgaagccccattccagaccctgcttctgacaaacctgaactaaggcagcatctttgcccatagaatgacccagaagctggcacaccgttgagccaagaagtgcagtaggctgcggggattttatttctgcccccagaccaaggcaacggagccctcacctgcctgccacccccacactgggcccaagcaagctcaggtgagcgcacatacatccaccgtggcgggctcctctcgggtgaagccatcaccgaagccctcatcgtccaccaggtcgggctcacggcagcacatgggacagaggctgttgcgcacagcagaggctcggagccagacgacaaggttccaacgctcaccagtgcccaagggccgggctccatgcagctggccgccacggtggaggacaccctggcccaccacgtgctccacctccaggggctccgtcagggctgtgggtgcctggaagaggcccccaaaatacagggcgccccctgtgaagaccttgcccaaggccacattgagggtgagctcggcattatcatagtggcagcccagctccaggtcctggcccggtgcgtatttgaccacaaaggcccggtggctgtcgagccggcccccgccacagtcagggtacagcagggccatcagcggctgcaggaagcgctcccgcagtggtgtcatcagcggctcgtccagcccgagctcgtgcagcagcaccccgtagttgttcatggtgttgggcctccccttaggcatgtccgattgctcgaagtgctccagctcttccagcagggcctggcagaagggcgctgtgaaaacaggcacccggtagatgcgcttctcctccgatactgtctccagccgctggagaaggcccttgaggtctgcgtctggggacacgctgtactcagtcacggccaggaactcgggggccagagctgcatcctgcagtgagtcgtagacctcaggccgtgccgggtggtaggaactcgcgatgagggctttcctagctgctgactcctgccccagccgctgccgccgctccacctcctgctcaagctctgctaacagctgctggaagtccttggcgctaacacagcctcggctgcgcaggatcgggccgtagtcccggcgcagctgctgctcgcctcggaagcgcacgtgcagcccatagcgcgccacgtacaagttatcggtgcagaagcaggcgcagcggcagaagtgccgcggagcccccaccgtcgccatagtgaagcacccatcccgggaattccggaccg

SEQ ID NO: 128603 - DNA, 406 bp, Homo Sapiens
cacctttgaaatattagattttatttgacattttctcagtggatctataacaatattgagaacatgaaaatgacaatattaaatcactttaaaatttttatttttaccaactataaattcctatttgaaatttaaaagataaaatgttaaaagaatacatttattgaaatggctgtacatgtaagcaggtaactacacagcagacgtggcaatatgtgtggagagaagggtgaaagtagaaacagtggctcaaggcatatctatgtacattagcttttactggaatgcttatcagaaaagttaagattctacttatttattaaggcacttgggcacaaaagatttaatattctttaatgaatgaatctctattttcaactaagataacttgctattatcacgcacc

SEQ ID NO: 128604 - DNA, 445 bp, Homo Sapiens
  misc_feature (380)..(380): n is a, c, g, or t
  misc_feature (391)..(391): n is a, c, g, or t
  misc_feature (420)..(420): n is a, c, g, or t
  misc_feature (430)..(430): n is a, c, g, or t
taggattccatatttcatttccattttattacatgttcacattatttcctgaaatcatcttagaaccttttgtttttgcaaaattttagaggtccaggccctgtgatagctatgtgatgttttttccagcacataaagcaaattcatgatgtgaaagaggcaaatgacaatagttaaagtatgtcttattttgtaataggatttttttaataaaaaattattgtggaacaaggtacattaaatttggcttgcaattaggaaatatgggagccggacttgaagagccgtgtgattgagtccccacatctaactgatgaggaaacaggctcagatgggtctattggatggggtccactttgctagaagcaaaactgggaacntaggaaaccangcccttggccttcctaggcagcaagcaanaggttttgcnaattttggttccccc

SEQ ID NO: 128605 - DNA, 1044 bp, Homo Sapiens
  misc_feature (87)..(105): n is a, c, g, or t
  misc_feature (646)..(892): n is a, c, g, or t
  misc_feature (901)..(935): n is a, c, g, or t
ttttttttgtgcagaaacatgtatttatttccaggatattttcacataacaaaaccccaacgatgcggcgaggagccacacacggcnnnnnnnnnnnnnnnnnnnttgggcctgccaggtgagattttgtctgcatcagtgcaggcgagaggctggggaagggggtgcctcttggcagactggccgggggcaggacctgaagaccctgaagcatggccgtgagacccatgggtgctccatcctggctgccgtccatcgagacaccatggccgcctccgggcacccagcggcattccgtaccagcgaggggactggctcacatcctggggagggctccagggcagcaggcgtcctacagcaacagcatcctgggggtgaacgggtggggaggggtggcagcctggggtgtccaaagttgtggtcagcgagtgcaggaaatgatgaaggaaaagtttctttttggcccaaccgttgtgaatggtgctgtgaaaatgtcttgcctgggagaggtgttccagggggagttggggggtgaggggacaagacaattgtggccgctgccggacccctccataaggcacagatttgacgggtcccctctcataaaaggccactccaggctgggcgcggtggctgacacctattnnnnnnnnnnnnnnnnnnnnnnnnnnnnnnnnnnnnnnnnnnnnnnnnnnnnnnnnnnnnnnnnnnnnnnnnnnnnnnnnnnnnnnnnnnnnnnnnnnnnnnnnnnnnnnnnnnnnnnnnnnnnnnnnnnnnnnnnnnnnnnnnnnnnnnnnnnnnnnnnnnnnnnnnnnnnnnnnnnnnnnnnnnnnnnnnnnnnnnnnnnnnnnnnnnnnnnnnnnnnnnnnnnnnnnnnnnnnnnnnnnnnnnntctgtctcnnnnnnnnnnnnnnnnnnnnnnnnnnnnnnnnnnngcctctcctgcagggctccggctgctgggaaaccggctctctgccggtttgctgggtttggggagcggctgtgctcccgacctggcgtggatccccgactctgaactca

SEQ ID NO: 128606 - DNA, 1026 bp, Homo Sapiens
  misc_feature (904)..(904): n is a, c, g, or t
  misc_feature (917)..(917): n is a, c, g, or t
  misc_feature (925)..(925): n is a, c, g, or t
  misc_feature (952)..(952): n is a, c, g, or t
tttttttagatttagctttcattttattttagttataaaacgattgccaaaacacaaagttttagaaaaacacacaaacacaagtttttattccttttttagttgcagaaaataaatacaatcacatattccatatgcttgtctacaaaagcatctctaaaaatgtcatttactggacttgacagtataatcttttcggcttttcaattgcaggtatcatacagatcattttattttattaactttttaagcacttggctcaagcaactttggaagaaggctttgtgagcttacaaatcttattccaagtgttattttttaaacagttacaactaaaacgaggtcttaccttttcaaaagaggagaataaagtttttcttttataaaaattgctccccaaactcacaaacacccaaaccgacataaaaagttggtctatcttcttaggaatcaataagaagtgaggttacaggggagagggaggaacaagcatgacggttcctgtgaaatccatcccaccgagcagtcactcttatgtttccagtttggccctcgggagttttcctaaaggaaaactcagtcatctaagcctatgtttctgaaaaggtaggacatggactccccattgtggatccgacggatcgcctctgaaaggatcatgctgatatccacagttttaatcttggggcactggagcttctggacttcatgtggaattgtattggtgaccaccacctcatcaatggcagactcttcaatccgccggggggcgtcaggagacaacaagccatgagttgccatcacaaagatcttatatgcacctctttccttcagggtctctgctgcagcaagaaagctgtcaacatcatcaatgatgtcatccacgatgatggcatcttcctcnacatcatcacaancgctcgtngcgatttctggctcgagggccaatccntataggagtcgtataaatcgtatcagtctagctgtcctgtggaatgtatcgtcacatcaacacaacagcggaga

SEQ ID NO: 128607 - DNA, 919 bp, Homo Sapiens
gagttcaaaatgttttttccaatttatttagaaaaatagactctggattcacattcaccccagggctatgtgggatgacagcaaggagacacctgagatgaaatgaggaaggtttgaattactggtatccaaggggctgggggcaaaagccagaagcctttgtcccttcagagccagagtggcatgagtgtcttggctcccctcctctccctcccttcagtagtcttcagccatggccagtaagacaaggctggtccagccgtggaaagggcggcagcccatgcctcgcccatcgcggtcactgtactgctcccaaagaaagcctgtagcctggtactggcgccatacattgcctaccacgttggcacggagctcaccgtggagtttggcagcccgagcctggtgaggaccctccagatgcccatagtggtggagtgctcccaaagccaggtagttgacattgagccacacagcaccccgccagtaggggggatcatgctctgaattgcgctggccataaaaggagctggaggctgcaagggagcgtaaaccaaaggggctccagagatggcggctgtcggctagaatgtccagcaggggcccaaggcgggatgaggtggggtccagcagtcgcagcagcaagggaaaaagactgacatagccaagagcatctacatactgcagttgaggttggggcccgacccaccacccgaacgagcccctgagggggcctggggcttcagctgtactgccttttgtgtgggttcccaaagtctgcaaaagactcctaagctctgggggggcaagtggcaagctcattccagggctcttctgcctggcctcccgtggaaggcagcccaattggggcccaaggcttcagcagattaccctccaacgcctctaccccaggatggctctt

SEQ ID NO: 128608 - DNA, 997 bp, Homo Sapiens
  misc_feature (790)..(790): n is a, c, g, or t
  misc_feature (798)..(798): n is a, c, g, or t
  misc_feature (840)..(840): n is a, c, g, or t
  misc_feature (848)..(848): n is a, c, g, or t
  misc_feature (879)..(879): n is a, c, g, or t
  misc_feature (922)..(922): n is a, c, g, or t
gtctgtgttttgttttttattttgtgtttgtcctaatgttcagtaatggtagaaaataaatcagtttattcatcatagcatgtggcttaaaaaatcaacagaaggtgccagcgtcaacggaaccggcgggggctgcacccaccaagccacttcctcgaaaagaaacgtcagttagaggtttgatatataggactagatataggattcctttaaaaagcaaacccacattttctccaaagttagtggtggggtcggtctcctgacctctccgagcctgacaggagactgtgccctccgtgcggcccctgggactcggccccagccacgcaggccgtgggcagggcgaacggagcagctcgcgctaacggtggcttcggcggcgccacacagaagagtctgggccggacaggagaacagagcaaccccgtggtgcagcggggacctcggaggtcagaggaagaaacgagaaacttcgcaacgacaaatcagcatcagaaactcagaaggtgatgccagtgcggactctcagcgtctctggcgcgcggaccaaagtgtgcgctccagcctgggcactgggcccgcggtgaggccgcaagtctgggaaggtggctgggaggcatccacacccgcccgcaggggctgcagcctcacctccgacccctccaggaagccggcggcgcaaccccgaaggacctttcggttgcgtgcggatctctcctcctcgtcctctaatcggcgacgcggcggtccctggctcccgagcgcccccgctggcggcggcgtctcatangggggtcnggcggcagccgcggagctggtgtccggcaagcgtcctcctgngctcctgngcgcgctggctgagctgggcaaggcgcctcnatgcggactgggggacgcacgcactgaaactgcttgattccanacgttcatatcaaccgatgtccggctcatagcgtgtgaaaggatcgggacgagtctgggcataaccgacgacatg

SEQ ID NO: 128609 - DNA, 733 bp, Homo Sapiens
  misc_feature (126)..(143): n is a, c, g, or t
  misc_feature (150)..(283): n is a, c, g, or t
  misc_feature (402)..(402): n is a, c, g, or t
gtggggggaatccacaccccttatttaattccccgggttttttttgggaaaacaattatgggcccctgtttcctttcccctttggggccccgccccgccaaaagaaaagttttaaaaaattttttnnnnnnnnnnnnnnnnnnccccagnnnnnnnnnnnnnnnnnnnnnnnnnnnnnnnnnnnnnnnnnnnnnnnnnnnnnnnnnnnnnnnnnnnnnnnnnnnnnnnnnnnnnnnnnnnnnnnnnnnnnnnnnnnnnnnnnnnnnnnnnnnnnnnnnnnnnnagtgcttgatatttattgaaaataatgccaatgctttttccaggtagtattgaggagctgggctgagtgcttgtttgttttgtttttaagtactatttgtccaaatgcacacatctgtngggactgctgcaattttgaaagaaaaatgacagctgtgtaaaaccagtgcataggaaaaaagaagtgtcaacaatttggctgccaggcacaccgcgcccctgcagcaatctggtggggcaggggaggacactcggagtaggtagaaaactaaccaggctgaacggccccttcaggggttggtgagctgtccaaatcaatgtctgaaaaggcatagccaactctggcattttccaggttggtcctgatctcgaaaggtggtagtctgtaggtgggatgtggtgagtggatgtgaagtggcagcatagttctctgggaagatgtaagcctggc

SEQ ID NO: 128610 - DNA, 644 bp, Homo Sapiens
ttttttttaattagaagcagtttattacacaaaacgaaacctgagataatagaaaataacacttgcagtaataaaggaagcagccttgcactccacctccacactccagagtataattaaaagactcctatcagacatttctatcaccaataatgccaacctctgtatacagcagcaggctgggccccaaatcagaagattcatgttgcttgctttctctatagggaaagtgaagctttcggtaagtatcatgtggctattcctggttctactttcccttgtggaaatgtaatacctggtttacactgctcttttgtgagtacgtatatggtgataggaataaaggagaaagtctggaaagcaccaagcacaaagcaggcctgaggctccagcaacagtcattcagaaacaactgcccactttatacgtaaaagtatgaaaggaatgccaatgtgagcccatgtcattaggagaggtaaggataatctacaccttgcttaaccatcacttaacctttttattgcacataatgaaatttaagccctaacctaggtctgtacttgtgtaataattatgcactctaaattagcatctgcatttagatagattgcaagcttagaaatcagtcctgcatttgacctctt

SEQ ID NO: 128611 - DNA, 1375 bp, Homo Sapiens
  misc_feature (41)..(41): n is a, c, g, or t
gccccagggtgggatagacacatgaagatttgcaccgtggnagccagacgcccggccagatgcctgtgaggcctcctttgacgcggtctccaccatccgaggcgagctctttttcttcaaagcgggctttgtgtggcgcctccgtgggggccagctgcagcccggctacccagcattggcctctcgccactggcagggactgcccagccctgtggacgctgccttcgaggatgcccagggccacatttggttcttccaaggtgctcagtactgggtgtacgacggtgaaaagccagtcctgggccccgcacccctcaccgagctgggcctggtgaggttcccggtccatgctgccttggtctggggtcccgagaagaacaagatctacttcttccgaggcagggactactggcgtttccaccccagcacccggcgtgtagacagtcccgtgccccgcagggccactgactggagaggggtgccctctgagatcgacgctgccttccaggatgctgatggctatgcctacttcctgcgcggccgcctctactggaagtttgaccctgtgaaggtgaaggctctggaaggcttcccccgtctcgtgggtcctgacttctttggctgtgccgagcctgccaacactttcctctgaccatggcttggatgccctcaggggtgctgacccctgccaggccacgaatatcaggctagagacccatggccatctttgtggctgtgggcaccaggcatgggactgagcccatgtctcctcagggggatggggtggggtacaaccaccatgacaactgccgggagggccacgcaggtcgtggtcacctgccagcgactgtctcagactgggcagggaggctttggcatgacttaagaggaagggcagtcttgggcccgctatgcaggtcctggcaaacctggctgccctgtctccatccctgtccctcagggtagcaccatggcaggactgggggaactggagtgtccttgctgtatccctgttgtgaggttccttccaggggctggcactgaagcaagggtgcttgggccccatggccttcagccctggctgagcaactgggctgtagggcagggccacttcctgaggtcaggtcttggtaggtgcctgcatctgtctgccttctggctgacaatcctggaaatctgttctccagaatccaggccaaaaagttcacagtcaaatggggaggggtattcttcatgcaggagaccccaggccctggaggctgcaacatacctcaatcctgtcccaggccggatcctcctgaagcccttttcgcagcactgctatcctccaaagccattgtaaatgtgtgtacagtgtgtataaaccttcttcttc

SEQ ID NO: 128612 - DNA, 1417 bp, Homo Sapiens
  misc_feature (1176)..(1176): n is a, c, g, or t
  misc_feature (1208)..(1208): n is a, c, g, or t
  misc_feature (1365)..(1365): n is a, c, g, or t
  misc_feature (1367)..(1367): n is a, c, g, or t
cgggggacccccaagcccaaagggcagccatggacccggggacctttcaccaaaggccccaagtttggttaaaggggttccgggccccaaggactgggttttttcacccgttcgtaccccccagtaattgagccccttcccggagaggggaaggctgccagggaccttccccagcccccccattgccatgcccccgccactgtgggacttgcttgacccctaccacaaagattctcccagcttcagtttcctcatcagtaaaacatgcaggccaataatgctggtcaagcacccccacccggcagagggaagcgggaggcctgggataagctggggcagtgaatgctctgtaaactagtgcacgggtgaggttactctcatcagtagagggctgcctgggcggctgctccttccactgggcatttggctgtgacaaatgcctactggacccactccctggggccctgcaggctggactgccctggaacccacgcagggtttcccatgctgtgccttcatttgtgaagtccctggcatctgcaatgctccaggctctcatctctgccagttgaggatggaaatcccagctcttggaagaaccaaatgtggccctgggcatcctcgaaggcagcgtccacagggctgggcagtccctgccagtggcgagaggccaatgctgggtagccgggctgcagctggcccccacggaggcgccacacaaagcccgctttgaagaaaaagagctcgcctcggatggtggagaccgcgtcaaaggaggcctcacaggcatctggcggggcgtctggctccagcggtgcaatctcattggtgtctatcccagcctgggggcccagggctggggtcctggaggtgacagtgggccagggctggccatataggtgttgaacgcccctgcagtcatctgggctgagactcagtgggtagcgaaaggtgtagaaggcggacatcagggccttggctgctgttgtgtgctgcagccccagcacgtggccaaattcatgggctgccacctgcagcaggtctgtgccctggtcatccccgatagtccaggtctcatcatagtcgaagtggacatccccttctcggtgagtcttggggaagaaggcatgggccaggatgcccccaggcccatcaaacggcaggtcgtcccccatncagtacctggcgaagtcgatcatgatgtcaanacggccctcgtgcacctcagtaaaggtgagtggcgtcacatcgctccatacctttaggcctctgccatcgtctgccgcacctgctcctgcaccaactgccatgggaaccgaaggatcctgtaggtgaggtccgtcttctcccagcgcccgccagaangnatgaacctcttctgtcggttgcggcactcagcccatcagatgggtcgggc

SEQ ID NO: 128613 - DNA, 456 bp, Homo Sapiens
  misc_feature (20)..(20): n is a, c, g, or t
  misc_feature (57)..(110): n is a, c, g, or t
ttcactgccccagcttatcncaggcctcccgcttccctctgcgggtggggtgctgannnnnnnnnnnnnnnnnnnnnnnnnnnnnnnnnnnnnnnnnnnnnnnnnnnnnntctgtggtaggggtcaagcaggtccacagtggcggggcatggcagtggtggctgggcaggtccttgcagccttccctctccggcaggtgctcagtactgggtgtacgacggtgaaaagccagtcctgggccccgcacccctcaccgagctgggcctggtgaggttcccggtccatgctgccttggtctggggtcccgagaagaacaagatgtacttcttccgaggcagggactactggcgtttccaccccagcacccggcgtgtagacagtcccgtgccccgcagggccactgactggagaggggtgccctctgagatggacgctgccttccaggatgctgatggc

SEQ ID NO: 128614 - DNA, 470 bp, Homo Sapiens
acggtggagcggtggagggcgtcactgggtttcggcgtctggcaagcggttcagctgtctgctccctagcagccggccttcgggtcgggcgtctccgcggctactgcgctttcagttctcccggtgtggccacgagtcgggttgcactgctgtgatccatcctcatctcctaaagatgcatcctgacttatctccacacttgcacactgaagaatgcaacgtcttgattaacttgcttaaggaatgtcacaaaaatcacaacattctgaaattttttggttattgtaatgatgttgatcgggagttgagaaaatgcctgaagaatgagtaccgtagaaaacaggaccaagagcaagggagcatggcattgcaaatgcgaaagaaacttttttaatcctccagaggaatcccgaaaaattaaattgtaattttccactccgatgcccttggctggagaagaagacctaaag

SEQ ID NO: 128615 - DNA, 1119 bp, Homo Sapiens
  misc_feature (218)..(232): n is a, c, g, or t
  misc_feature (248)..(423): n is a, c, g, or t
  misc_feature (504)..(505): n is a, c, g, or t
cggcaaagtgggagtatccctcggtattgggggggaagggagcggtgcgggccacgaacgcgtaattggtaaaatggtcatgcgggggggtgggtgatgtgatggatagacgatcatcgagtgctacaagttactcacatatttcggggcgaaatcgggagagcgtgggtagatgcggcataggaggaattggaaataggcgggaaggagaatcaaannnnnnnnnnnnnnntattaccggcgttctnnnnnnnnnnnnnnnnnnnnnnnnnnnnnnnnnnnnnnnnnnnnnnnnnnnnnnnnnnnnnnnnnnnnnnnnnnnnnnnnnnnnnnnnnnnnnnnnnnnnnnnnnnnnnnnnnnnnnnnnnnnnnnnnnnnnnnnnnnnnnnnnnnnnnnnnnnnnnnnnnnnnnnnnnnnnnnnngggtgagttaagggtggtgaatatggtggtatggttacgggggggttgtgtggtgtaggatagggggggttgtttgttttnngtatttaaattattttattgaaggagataagttactcagatattaactggttgtaggcaaagggaataaacatggtgaagtcaggtttgctggtaaaggggagacagtactaaacgccctgcccaacaaatactcagaatccagggttttcatatttctccatggttcaatctctcacaggtcactttccattcaaaggattatggagaccaaataagacaggattctttcaggtatcaacccagagtctttaggtcttctctcagccaaggcatcgagtgaaaatacaatttatttttcggattcctctggaggattaaaaagtttctttcgcattgcaatgccatgctccctgctcttggtcctgttttctatgtactcattcttcaggcattttctcaactcccgatcaacatcattacaataaccaaaaaatttcagaatgttgtgccgactcgtggccacaccgggagaactgaagcggcagtagccggcggagacgcccgacccgaaggccggctgctagggagcagacagctgaaccgcttgccagacgccgaaacccagtgacgccctccaccgctccaccgtgctcccggctcccccctactctg

SEQ ID NO: 128616 - DNA, 948 bp, Homo Sapiens
tttatttaaattattttattgaaggagataagttactcagatattaactggttgtaggcaaagggaataaacatggtgaagtcaggtttgctggtaaaggggagacagtactaaacgccctgcccaacaaatactcagaatccagggttttcatatttctccatggttcaatctctcacaggtcactttccattcaaaggattatggagaccaaataagacaggattctttcaggtatcaacccagagtctttaggtcttctctcagccaaggcatcgagtgaaaatacaatttatttttcggattcctctggaggattaaaaagtttctttcgcattgcaatgccatgctccctgctcttggtcctgttttctacgtactcattcttcaggcattttctcaactcccgatcaacatcattacaataaccaaaaaatttcagaatgttgtgatttttgtgacattccttaagcaagttaatcaagacgttgcattcttcagtgtgcaagtgtggagataagtcaggatgcatctttaggagatgaggatggatcacagcagtgcaacccgactcgtggccacaccgggagaactgaagcggcagtagccggcggagacgcccgacccgaaggccggctgctagggagcagacagctgaaccgcttgccagacgccgaaacccagtgacgccctccaccgctccaccgtgctcccggctccccgcccccgccgcccgcgggccccaaggcgcatgcgccgcctgtcctggaggggcccatttccgtccgtcgtggggggaggcacagtgagtccactggggcacggcagcgtctaagccacaagccgagcacataagccaggtcctaacggagcctatgtgtaagtccactactggtgcaaggttgcacacttctaagaagagcggcgtggggggctcggcgaccttcg

SEQ ID NO: 128617 - DNA, 660 bp, Homo Sapiens
tttttcccatagaaaaaccctttgttacatttattgcttttcatggaaacaattacgtgatacacacttgaagtagaggtttataagttctagttctccaatgactgctttccaattaacatcatgtggatatctgtcctttgtgagtgccctggtgcttaataaagcttgtgtgccacttgaaagattttccacatatgacacattggtagggttggcttccagtgtgaatgacctgatgtcgaaaaagattcctcttaaaactaaacgttttcccacattctccacattgaaagaattcctcctttgtatggattctttgatgctgaatgagatccacattcctaccaaaggactgtccacattcactgcatttatgggtgttcggtttactgtgaatctgttgatgacatagaagggttgaatgccggccaaaggcttttccacactcaaggcatttatggcgtttttctccactatggatcacctgatgtcgaataagggttgaattctgactaaacgttttttcacatttgctacatttataaggtttttctttggtgtgaatcctcttatgttcaacaagatacgcgagctgccgaaaacactttccacagtcatgacatctgtatggcttgttttgcaggtgacactgtttat

SEQ ID NO: 128618 - DNA, 656 bp, Homo Sapiens
  misc_feature (573)..(573): n is a, c, g, or t
ccatgttacgacactttaatcaagttcacaagctcctccacaacctttggccagtcttccagagcctcatgaaggaggcagagccggggctggcatccccacttgcaggtggggaaatcaaggcctagagggcaagaactgtgccccaggtcacaggagaacccaggtgtcctggtactggtttgggggctcttcacagctctttctaccacccttggtgctgcagcagttaatggcccagccagtttctctgggtactggaggggccagaagaggaattttgcaccacggtgcctgacaccagtctgaccggaggactggcctaggccatgtgaagacccaagaaggtcaacccccccgacccctgccctccacccacagcgcttgggggtccctgtagagagcagccagattgccatgcttcagctgggggccaggcttggagttgcctccaggcaactcccaaacaccaccacagggatcccgtgttaagggggaagccttaaaggagttgtcaagtggcaaggccggccaggaactccaccgtggccccaggctccagggccacaccanagagtcacaaagtcattagagctcattttacagatgaggaaactgaggctaccagctcatgtgggtcacctgaggtcacagag

SEQ ID NO: 128619 - DNA, 1700 bp, Homo Sapiens
  misc_feature (224)..(224): n is a, c, g, or t
  misc_feature (231)..(231): n is a, c, g, or t
aattggggtgggggagaatccccaaaggcccctaagttccacgtggccccaggggatttcttcccttaggggaaaaccacgctttattgggcccattggttttcccctttaccccttaactgggggcccccgccgcggccccaaaatggaaatggttctagaaaagctttcctccgaggagccgaggccgggccgaccatgtttgatttttttcaggaacgctngggttgncggccccaaatctgagttttatttttgctggaatcaggtcatctggcctggctgtcccaccaacccagctgggagcctctgagtggcctgccagcagcatctcattacaaaacagccccctggaaccaggtagccaaggaagcggcccacctgaaaggcatttagattgagaagaaaaactgcaccttcctgacaaaggtcaggggtcacggtgaagggagggctgctgggatcacagggacagcagcatcttctagcagcttggccataccagccactgaggtcctaactgcagccaaggggccgttctgcacatgtcgctcaccctctgtgctctgttccccacagagcaaacgcacatggcaacgttggtccgctcagccactggttctgtggtggaacggtggatgtctgcactgtgacatcagctgagtaagtaacaacgactgaggatgccgctgacccagggctggggaaggggactcccagctcagacaggcttggctgtggtttgctttgggaggagagtgaacatcacagggaatggctcatgtcagccccaggagggtgggctggcccctggtccccgggctccttctggccctgcaggcgatagagagcctcaacctgctgccgcttctccttggcccgggtgatggccgtctggaagagcctgcagtagaggtgcacagccagcggagagtcgtcattgccgggtacagggtaggtgatgaggcaggggttgcagttggtgtccacgatgcccactgtggggatgttcatcttggctgcgtctctcacggccacgtgtggctcaaagatgttgttgagcgtgtgcaggaagatgatgaggtccggcaggcggaccgtggggccaaagaggaggcgcgcgttggtcagcatgccgcccctgaagtagcgagtgtgggcgtactcgccacagtcacgggccatgttctcaatcaggtacgagaactgccggttgcggcttataaacaagatgatgcccttgcggtaggccatgtgggcggtgaagttcaaggccagctggaggtgcgtggctgtctgttccaggtcgatgatgtcgtggtccaggcggctcccaaagatgtacggctccataaacctgtgccgacagccagctttgtgtcccagatggactcgggcatcgaagaggcttctcacggaaaacagttccttgacattgaagaagtcagagtgcttgaggggctcattcaaaatcttgtcgttgaaatcggtgctgtcctccgactcgcggatcataagggccgtcgcgcttccaagcgtcctgcggctcggccgagcaggccggggggtcgccttcccgagaaagcccaaccagcgcgacggggcccgggcacccgcgccgagtattcggggcagcgcggccgaggctcgtgccgaattcgccacgcaggcctcgctaccttaaaccgtagagttactgc

SEQ ID NO: 128620 - DNA, 896 bp, Homo Sapiens
cgtccggccttggcctcagcatgagcctcaacggccgttccctggccggtgagccttcggagacccccagtagagtgcacaccacggagatcgtcatccgggtacaggttagttgatgagcagggttccagttggtgtccacgatgcccactgtggggatgttcatcttgctgcttctctcacggccacgtttggctcaaaagatgtttttgagcgtgtgcaggaagatgatgaggtccggcaggcggaccgtggggccaaagaggaggcgcgcgttggtcagcatgccgcccctgaagtagcgagtgtgggcgtactcgccacagtcacgggccatgttctcaatcaggtacgagaactgccggttgcggcttataaacaagatgatgcccttgcggtaggccatgtgggcggtgaagttcaaggccagctggaggtgcgtggctgtctgttccaggtcgatgatgtcgtggtccaggcggctcccaaagatgtacggctccataaacctgtgccgacagccagctttgtgtcccagatggactcgggcatcgaagaggcttctcacggaaaacagttccttgacattgaagaagtcagagtgcttgaggggctcattcaaaatcttgtcgttgaaatcggtgctgtcctccgactcgcggatcataagggccgtcgcgcttccaagcgtcctgcggctcggccgagcaggtccggggggtcgccttcccgagaaagcccaaccagcgcgacggggcccgggcacccgcgccgagtattcggggcagcgcggccgaggatgtcgccatggctgggcgacgcgtgggtcgacgatatcccgtgattccggaccgtacagcctgctttttataccactgtttatagtcactatgccg

SEQ ID NO: 128621 - DNA, 791 bp, Homo Sapiens
tccgggtacagggtagtgatgaggcagggttgcattggtgtccacgatgcccactgtggggatgttcatcttgctgcgtctctcacggccacgtgtggctcaaagatgttgttgagcgtgtgcaggaagatgatgagtccggacaggcggaccgtggggccaaagaggaggcgcgcgttggtcagcatgccgcccctgaagtagcgagtgtgggcgtactcgccacagtcacgggccatgttctcaatcaggtacgagaactgccggttgcggcttataaacaagatgatgcccttgcggtaggccatgtgggcggtgaaggttcaaggccagctggaggtgcgtggctgtctgttccaggtcagatgatgtcgtggtccaggcggctcccaaagatgtgcggctccataaacctgtgccgacagccagctttgtgtcccagatggactcgggcatcgaagaggcttctcacggaaaacagttccttgacattgaagaagtcagagtgcttgaggggctcattcaaaatcttgtcgttgaaatcggtgctgtcctccgactcgcggatcataagggccgtcgcgcttccaagcgtcctgcggctcggccgagcaggccggggggtcgccttcccgagaaagcccaaccagcgcgacggggcccgggcacccgcgccgagtattcggggcagcgcggccgaggatgtcgccatggctgggcggacgcgtgggtcgacgatatcccgggtaatccggccgtaccagcctgctttttgtaccactgttatagta

SEQ ID NO: 128622 - DNA, 206 bp, Homo Sapiens
  misc_feature (140)..(155): n is a, c, g, or t
atctttgtgttttgaacaaaggaattttcaatatttgattggtattctgttctgaagtctaggatatttttcagcctataaagccccctgttttatgcccttctaattctgatgtttgggtattgtgtgagtgcatgtgnnnnnnnnnnnnnnnnaaagcgtgtgtgaacaaatggaaataaagcagggactgtgaacatttaaaa

SEQ ID NO: 128623 - DNA, 623 bp, Homo Sapiens
taagtatacaaaatatttcattttttattttcatgaataattgtcattaatacagcagaaaccgatatgattataaaagataccaaaaaatcagaagaatgttagcattcaatagaaattaaaacctgagctgagggctcattagagtctgacacttggcaccattctcatggaagtgaagaaacatgtttgccggactccttaaaacaattcatgtaacacagaaagagttaaatttcaaaggagctacaatgtactgacacattacgactcttgttgttgacaaacatttaagcagggctatccaaagctcacagtcttgaaggcagggaggtgtgtaaattgtaggtttttaattaagcagtaagcaagctgagatttttcttggtaaaatagtttgtttattcatgtagatctaaaaggctggctcagtttgtcagagcacaggagaatgccagaagaggtcaagggcatggggatgtatcgacatgaatccatcccaacttgtggaaaacaaacgacacagcagttaccatcacaaagaactctattagtaggaatagaagacttgaggtccaattcagttctcatttggattctatagtatctctaagaatttggtt

SEQ ID NO: 128624 - DNA, 746 bp, Homo Sapiens
ttttcaacttataaataaccctggggcggagcccggccctccctgcattcctgcagagcctcggtccactccaagcaacatttattgagggtggcgggagccgcgctggacaggggtcggggctgccctcggcgtccagacgccaggctctatagaacacgtatgtacaggcacggggcggcaagggccgagacgctagctggggactgcgctccagcctcagacggcagacgccagcttccgcttggtgctctcgctgcagcggttcaggatgaggtcggcgctcggccgcgggggcaccgccggctgcggtttaaagcgctgcgtctgccgctcctcctcgagcgggctcccggggctctgcggtcccggccgcgcctggcggcgtcgctgctgcagaaaacggacgctgttgcggcgataggcgtcctggctgaggcgcttccgcgaccgctggtggatgctgtgcgcgttgcggatggacgacctgcggggcggcgccccccgcttgatctggcgttgggcctgggacacgtcttgccctgacttttgcaggtacatggacgggaagtagcctgtgacgtcgtcttttctgatgacccaccagccgtccaggagcttgtgaatgacctcaaacagctcaccctcgagcagggacacctcggtccccctcacagcagtgtagggcttgatggcgacgtatggctcaccttcctagttgggctcagggtcttccgtctcgtcag

SEQ ID NO: 128625 - DNA, 617 bp, Homo Sapiens
  misc_feature (586)..(586): n is a, c, g, or t
attttttcaaaatagaagtaccttttttccttttattatacaagtaacatacttacggtcaagtcagtcaaatattacataaatttatcatgcggaaagggaaaatcacctataacccaattcctcagagataactgctatcagaatattatttcagagttctgctatacacaaatacgcaggtttcaatgggtacttccagggaccgcatggagatcccttaagttgaaactggacaaacagaacagtggatggttctagctgagatctgggatagtttctgaattcagaagtgttcaccagccacattgcatgtattagctggaaccatatatgaaactacgatactcagctgtttctaacctacaaacacagtgattacatatggctcaacttaatgtatatgaagcctagaatgtcagaactgatagagccttagagactttcaagtctatttcattatgttgaagaggaaaacggatgagggagagaagtgtccagcctaagatcatacatcaccttaagtggtagaatcagggctgcttctcttcctactggaccatgtacctgtctctcatactctgcntcttttaatataataataatttaggtgcgat

SEQ ID NO: 128626 - DNA, 1360 bp, Homo Sapiens
  misc_feature (1129)..(1129): n is a, c, g, or t
  misc_feature (1205)..(1205): n is a, c, g, or t
  misc_feature (1220)..(1220): n is a, c, g, or t
  misc_feature (1222)..(1222): n is a, c, g, or t
  misc_feature (1235)..(1235): n is a, c, g, or t
  misc_feature (1259)..(1259): n is a, c, g, or t
ttcatggctgttcaagttagaaaactatggcagcggctatattaacaaaaatacaaacgtgtacactaattacaacatttatctacagtcattttaccagttgtgcagcctaaactgccattatcttgtttagtcattcctaagatgcgttatttctgacatcgaaatatcctgaaattgggaaactattgacccaaccccaactgtgttagaactgcatgaacacctaagatgaaggaccagcatcacagcagcacatcaggccaacaaaggcagaagtccagcagcaggagagggcaatcgcacgaggacagcatcgtgaggtcagctcaccgacactctaggtgtgcaggcttatcctgatgacaagagccatggacctcaccatgtgtctgaaaaccgcaatgttgctacttaaatgctaagcctttaatggtgcattaatagatggttaagtagcatattagcagcttaaatctacataagtcagctgtgtactgactgtacctcacagtaacaaattcaccaaatctgtatcttttcttctttgtaacaatgttaaatattggtatatctcagttctcaggtgtgattccagcagctatggtgagaccattgctgctcctgaatctccactttcatttgccttcactggtgtcactgtcgctgtcactgctgctgtcagtatcactgtcactggtcaatgcagttagattacttagggcttccttttgttcctggttgattgcaaaatcactcattactctctggggtgaggccctcacaaataggtaagctgaaggcacttgccagctctactacttcaatggcctgggaagggctgttagacacttttgcactgtccataagctcattcagcaactcacttctaggaatcttattatgcttcctgaaaagccccaacattttccaggcttcctgagttctcccagcccttaaaaagaggatagctatacagttgagagaggtggctggccaatcctgagcagtctgtctgatgggttggctttcatacgcagatttgatatcagcagcacagtcagcaaatgccacctgaagctctggtgggtgcttgtcccttgccatgagcacaggactcttctctcangtcactgcggaaagtatgacaatatctttactttccaattttaggatcactctagcgattggcacatcatgctggngaaatgttcatgttngngaatgggaaatangtgaggtacaggctcaacactcanggaatcattttgtcataacatcatcgagactggataaaatacagtgatcagcatgattcattgccggtttaagcagctggagatcaatccgaaatgcatgc

SEQ ID NO: 128627 - DNA, 3137 bp, Homo Sapiens
  misc_feature (830)..(855): n is a, c, g, or t
  misc_feature (2495)..(2535): n is a, c, g, or t
  misc_feature (2795)..(3002): n is a, c, g, or t
  misc_feature (3020)..(3020): n is a, c, g, or t
  misc_feature (3093)..(3093): n is a, c, g, or t
tcaggattgaaagaaaacatttattgaatcaaaatcaatactttctttttagtatctacaagccaacacagaactcattttattcaagaatgaacacaatgtacaaaaaaagtatgcttatattataaaaatatgtcaattttatcttctgggtgcttagcagaagtcattttaaacaaaatcaaggcaaacttgttctctataatgagtctgctataatttaacaacaaagtgaaagctaatgtacttacgaagtatttttaaaggcccactgataatgctgcactggaaatgctaaacccaatgttaactaaagtcaacatttccgctctacgcttactggcaccacttcatgcctacatcatgggaaagtacctcttttacagaatgcagatcactgctaacaatccacatgactaagtcttcagtttcccttgcttaacatttgttagcatatatttcagcaaagattaacagtataatgaatgttgagtagtaaaatcctatttaattcgcttcaatttaaaaatgagatatgctgctatggggaacaaatgacctcttgagatttacaaccccctttataaaagtgggaaagctgcctccctaaaaaaattatgtccaaggttaataccgtatctttttttgtagttttcttatttcttgattttattggcacctcccaggcactttggcatgtgctcctgtataaagtgtagttactgtgcctgtagagttagtggcagctgcagagtagttataggctgacaagtccacttttggcttaccatggagatctgctccaacacatgctggtcgttggagcagcnnnnnnnnnnnnnnnnnnnnnnnnnncagcgatttggaaaaagactaaaatcatgagtcagggaaaaggatcacggcttcccgtactattgttccaggagttatatgacaagtagaaaaattgtactaatttaaagagtcagtcaaaatagaagtagactaaatagcatgagtgctgataatgccaagaaaatccaatctctcttctaaagagcttgcacacagcacatagcaatgtccctggccaagaaactgaccgtgcctggctgagcagaatgacaacagtactcaggcaaattccacaatgcaacatccacttggtgaatcagtgacaatggatgaattcaacttactttagaagttgttattaaacaaactgcaaaatgtctactccgaagatgcacatgtttttccttggcagatcctctctgtgcttgggattgacacaaaggctcaaaactgcaaaatacaaagatcaagtaatctggtgccccgctgtactgggtaaattaaattttaaaaagtggaggagaaatgctttcacattttacctacataaacctaatgtttgttcagttgcctgttttgcaagaatcttggactaaggtaaatgaaggcagaagataaagtgatccctgttcctttattccaagttaaagtttttaattaagccccatttgttatatgaaatgttaatcctaccaaatgtagttagataggcttgaattggacataggatttaaacaaacattttaatgagaacacaaaccactgactctggcttaacaccacactctaacagaaaagaagaaacctttacagaaatatttgaaatatacaaaattcgtgcaaggacaaacatattttagaacctgagcaaaggcttcgtacaggttgttttcactggcaataattcagccaggtcggtatgtatgttgctcttggcaactgatgtggcccctaaaataatatgtagagcacagaaaggccagtgactctggaggtctgcagttagtagtacaggccagaagttcaagaaactgctactggaaacaactggataccataacattaaaaagaagtaaaaataaaagaatgagtgcacaaagaaacgaacagctaattaataagatgaagatgctcaggattggactggaggagagtatgaccgcaacactcagatacataaccacacctgtaaccacacctgtttacaaccacaggtccttgctctcaaaataaatatattgaacatttacaacagaatgaatgccttatgaatgcaagcttttcttttattgcaattctaatcaatcaatcaaacagaccaaaaggtcatacttctaaaataagctacaagtaatctttttctatgaaaatgatgtgacttggtgccacagctaaactttatctaatagcagcatcatcagcccatggcagcaaagaaatgttaatttctggcatcccatgggctcttaccgaagcaacaacttcataaagcatgcagatatctattctgctgaagtttcaaacaaacaaacaaataaaaatgatcattgtgcttgtgggtctcataccttccaaaatatacataaatgatggcaaattaacaaataatagcaggtccttgctttccaataaaatcgtaaggcagggggtcggcagtnnnnnnnnnnnnnnnnnnnnnnnnnnnnnnnnnnnnnnnnntggtgttagcattcacaaaaaagatcatgcgaagatcagatccatactgattaaacattgaaaattcagtgacaatccaaagaactctgtccatgagtccaaaggcatgcatgccagctgaaggaaatgcaggattcgtctgacagtatcttcttcagagcagaacagtaacatctcactggaataatcacgacagggtggacaaggtgccatcacacttcttttttgtaattcaaaataaacctagtgccgaattcttnnnnnnnnnnnnnnnnnnnnnnnnnnnnnnnnnnnnnnnnnnnnnnnnnnnnnnnnnnnnnnnnnnnnnnnnnnnnnnnnnnnnnnnnnnnnnnnnnnnnnnnnnnnnnnnnnnnnnnnnnnnnnnnnnnnnnnnnnnnnnnnnnnnnnnnnnnnnnnnnnnnnnnnnnnnnnnnnnnnnnnnnnnnnnnnnnnnnnnnnnnnnnnnnagctgcattatgaatcgncacgcgcgggagaggcgtttgcgtatggcgtctccgctctcgctcatgactcctggctcggtcgtcgctgcgngaacgtacagtcatcaaaggcgtatacgtatcaagatcagggaa

SEQ ID NO: 128628 - DNA, 958 bp, Homo Sapiens
caggctttttgggcaagacggtctctgcgcatcctgtgacaagcggattcgtgcctatgagatgacaatgcgggtgaaagacaaagtgtatcacctggaatgtttcaagtgcgccgcctgtcagaagcatttctgtgtaggtgacagatacctcctcatcaactctgacatagtgtgcgaacaggacatctacgagtggactaagatcaatgggatgatataggcccgagtccccgggcatctttggggaggtgttcactgaagacgccgtctccatggcatcttcgtcttcactcttaggcactttgggggtttgagggtggggtaagggatttcttaggggatggtagacctttattgggtatcaagacatagcatccaagtggcataattcaggggctgacacttcaaggtgacagaaggaccagcccttgagggagaacttatggccacagcccatccatagtaactgacatgattagcagaagaaaggaacatttaggggcaagcaggcgctgtgctatcatgatggaatttcatatctacagatagagagttgttgtgtacagacttgttgtgactttgacgcttgcgaactagagatgtgcaattgatttcttttcttcctggctttttaactcccctgtttcaatcactgtcctccacacaagggaaggacagaaaggagagtggccattctttttttcttggcccccttcccaaggccttaagctttggacccaaggaaaactgcatggagacgcatttcggttgagaatggaaaccacaacttttaaccaaacaattatttaaagcaatgctgatgaatcactgtttttagacaccttcattttgaggggaggagttccacagattgtttctatacaaatataaatcttaaaaagttgttcaactattttattatcctagattatatcaaagtatttgtcgtgtgtag

SEQ ID NO: 128629 - DNA, 1057 bp, Homo Sapiens
  misc_feature (890)..(890): n is a, c, g, or t
tttcttttgaatatttctttaatattacatttaaatattctctttaaatacagcattatcacaatgtaaagaacctaaaggggaaaaaattattttcagagaaccagacaagctttggattcacattgaaaatactacctgtgtacagtatgtgagaaaggaaattggaaaataataagggttgtggtaataagagtcatttatctaggcctagactgggactgaagctatctgcttctatgatcagaggcctagctttcctagcaaccatgagctagaattctgtccaactcaggtagcaccagaagtgagatggactaggttgtagagaaggcctttcgcttgacaagacagttaatgctaaatgttaatatttagcacttaaaagtttgggatcagtgtgagtcacaactgtagcgttaatgaaggggatggacttaaattaagaaactacaggttttcagaaacatatcttgtgggttggcaatgagcttaataattacagattcatattcctggtttgatcccaaaagctaatgtgttcctcatcgtgcagctggaatctacttcctagattaagccggagccttcctgcagagacagtgggcaaacctcaccctccccttccgacacaaactttgaaaaagattcttttctccataaagccaaattcccaattaagcttcagtcctgtgtttgagggtaccagtctaaggtaggggagtctagttcagttctgggtagcttcgagagctcaggtacttaaaagactctcaactgtgttttgtgaggctaggggatggggagagataaggatctgtgtacttaagttcccctccaaactaaaaccaagcaaaaactgggacaaataggaaaggcagattgaactnaaaaatgttatgtgtattaaatacaaatcttttcaggctcagagtttagagacttcaggggtgaaatgctgctgcgacatacgtgatggtttctgtaagacaccagggccttaatatcccaccagaaaaggctttatgagcaagataagtaggagtagtgtctcccc

SEQ ID NO: 128630 - DNA, 657 bp, Homo Sapiens
gccttttttaaaatatagaactttattttggttactgaggtttttgttactgttggttcacagaaaagtcatttcttagaaaatagtaacggcagcattttttacagcgactcacattggggccaccaaacaagtgcaaaggacagtgccagggatagaagaggccagtactcttgtgcccagtgttctcagggagaacccagtgctcctggctccctttaccccctcccatcccacccaacagagcagcacctagggccaatagaaccagccacgcagccaagtgcacgacagtgaccccagcaggctggtgaaggccccacaggaaaggccgagtgggaggggattgttcaggttgagctggccctgcatccagccctcttcctcaggcagtggggtctgacctcacctggctttgggacttggacatattcacagtacggttcagtaaagtcctctgggagctggccttcctctcctcactcaggccactaatcctaccccaaccccaggctggatctggggacacacagtcagaagtggccctacctacggggagcacacaggtgagtggggggtcaggcaatggacccagatagctccaggacaaggcagaaagtgctcagtaccctgagagggagcagagaaaggccactg

SEQ ID NO: 128631 - DNA, 1372 bp, Homo Sapiens
tattaaaattatagatatatagatgtagatataaaaacataaaacagacacaacgcaagcagacgctgtcatgtgcttactctcaggtccctgacaccaagggaagcactgacccctccccagtgtgctttcccacggcgcgagcaccgcagccaggccggggctgcggacgtggcatgccttggggtggggttctccagtttggcagggagggcctgagggctggggagggggctctgggtgtcaccagccccctgtggcagcatcacccccgtgcctgctcccgcctgcccccccgtcgcctcccacaagagcataaagcaaaggttaaggctttgatgaaagggacagcggcggccggagcactgacacatcagacacggcgcggcagcacagcacacagacacgggacacatggagccgggcccccggccacagctggctggctggccgtctgtccacctatccaccaccacccagagcaggccagggcagaagcatcagccttgccaagctacaagcttccagcggggtccgtgaaaggcaacgcgttagttaggagtagcctggcgggggacactcggtccgggagccccacaggctgtgtcagaaggacggtgggggccctgggtgcctctgtccatctctgggaccctgtccgtaagggggaccgttgggggctggcctggcggtgatctggggtgctgggtgatggcagtgggccaagcctggctgagagagggtgccccaaagaggctgactgggccccctcactgccccagccatgggacaggcccagacacagaccagcccagtggcccttgtcccagtgagccgacttccccatgggcagatgagtggacgggcaggcagagcgcttggggcaagctgtggaggcgtggcactctctcccgccgatgggtccacaccaggctggggtggcctcgggtccctggggcagagaagttggtggggagggggggtgcgctgcggggtcctggtccccgtggcaccatggcggatgtgtggcagtcagtcctcacaccgagatctcgtaggtggtcccacccacgccggacaccttcttaaccagcgtgtgccgtgtagggctggcagagggccctggggggccggtggcaggtcccagccgggccaggcccggggactgcccattaagcttacttgggggagtcttcagctgagggtggtccctctgcacggtcagcgagggcggtggctctgggaggtccgtgtggatgaaggcgacagctttggggcccgcgtaggatggtgagtggggagtgccgggcggggagggcaggccctggcgtgcaggtgacctgtgcctcgtgccgaattcgccacccaggcc

SEQ ID NO: 128632 - DNA, 1390 bp, Homo Sapiens
  misc_feature (168)..(186): n is a, c, g, or t
  misc_feature (1278)..(1312): n is a, c, g, or t
tttttattcagttaactttagttaaatgagtttatttgttcctttttaagaacctgttctaaaacactgcttcttaaagttcaatgagcatacaaatcacctgaggattttgttaaactgcagattgatttagtaaatctggggcagggcctaaagttttgcatttcnnnnnnnnnnnnnnnnnnngacccaggatccaaagcagtagagattttgcatttctaaaaaagttcccgggtgatgctgatggttctttaaggttctaaagggtgttaaattagccatgactcgaattagcagaaaaagggatgaaccaactgtacacataatccaaaagcccaggggtagacctcaggcatggctggatccagagggccacataatgttatcaggaaatatatttggccatttctcaggttggacttcctttgtgttaatttcattcccaagcaggctctccccaggtggtggcaaagatgatcgccattagctccaggcttacatcctaccagctcaacaggagactcattctcaaagtgctagtaagctggcttgcatcacatgaccaattactgtggccaggggagagactactttgactggccaggcctgggtcatgtgaccatctctggagccaggggatggatgagtgactaggggagggtcatccacgtccttggtccagcagtggtcacagaacccatagggaatggaggagaggctggagggaagctggggttccagttcttcaccttgtgaatcccctctcccgataggggggccttctcggaggtgatcctggcagaagataagaggacgcagaagctggtggccatcaaatgcattgccaaggaggccctggagggcaaggaaaggcagcatggagaatgagattgctggtcctgcacaagtgcgtgggccacagcctttccctgccccaagctgaccctgccttggccctcccatcctcctcctttcctgctttggacaaatcatttaaactctctaagccttaaattgcccctttataaaatggggatcacaatttccacttggcagggttgtggggaacatcagaagtcctttatttcaagtgcctggcctaacatgacagatgtgatggaggtgccagtgcttagtcacaggggtttaactgttcaatcaggtgtaaagatccatcctgaacatggcttggacccacatatctcagttggtgttgtctctggacccggccgtaatggccgaattcccgggcatatgtccggtaccgtcgactgnnnnnnnnnnnnnnnnnnnnnnnnnnnnnnnnnnncgccgcttcctcgctcacatactcgctgcgctcgtcgttcgctaatacgcggagccctctatagtgtcatacagggtt

SEQ ID NO: 128633 - DNA, 780 bp, Homo Sapiens
aggagggtacccaagagcaagatgtaagcgatgacacctatgaccagcaatccacagccttgctttaggcttctggcacaggacttcaaggggccaacgtatcccggagttccacaagccggtgaagagcacactgcccgggtcctccatcttggagaggccaaagtcggagatcatgattttggagtcttcaatccaggctgtagtacagcagattctctggcttgagatcccggtgtacaatgcccaggtcatgcaggtatttcacagcatccagcacctggaagatgaggcggctggcgtcccgctccgtgtagaagcctttttccacaatacggtcaaagagctccccacccgacaccagctgcatgatgaggtagaggtggcccccactctcatagatgtcatccagggctacaatgttggggtgcttgatcttgtgcaggacagcaatctcattctccatgctgccttccttgccctccagggcctccttggcaatgcatttgatggccaccagcttctgcgtcctcttatcttctgccaggatcacctccgagaaggcccccgtgcccagaacatctcggaagtcgtagatgtctctaatgtcctccgcctgcttccacctggggccttccactgcccccagcatggcccactgccccccgaccacagccagggctcctgcggctgccccgccgacggggctggctgggaggcccgcggtggttggcgccgagctgtggccgcaggtcctcaccgctgcgtgcctgggccacc

SEQ ID NO: 128634 - DNA, 724 bp, Homo Sapiens
ttttttacaaataaagtgttttatttacaggagttgtctctccaggtcccagctccctgccacccccaccccagccccagggagaagagggcggatgccagaggagctggcagaggctgggcaggtcctgagtgggccaggctaggccaagagagaaggcacgaggccctgggcgccccagtcccagggcagaggccaggcctgcctggagaaggcagcacggggtcagctctcaggggtcaggctgggttccacgccgccgcagctctgctcataagacggtggggcctcataggggtagccccaagaactgtactctggaggaagaatcaaggtgctggtagtgggcactggccccccggagccctctgcaaagtaggggacagtggcacctgttgaaatgcacaagggagggtgcagcgggtgtgaggcagggctgccatcctgagggcagggctccggcgcaccaggcacagaactcaaggtggccagcaggggctgccgctgcgaatggctcttggtggagaggaagacggggtccaagaagtgggggccgccagccgcagcctcagcctcagcctcctcctggggtggtgcggaaggcaccaccaggggtggggccccaggaggcagccccaggcctggccgggggctcactggggcatggttcacagcaatattgccaatgaagaccgggagggtcacagtagcttccggcgccttc

SEQ ID NO: 128635 - DNA, 644 bp, Homo Sapiens
  misc_feature (487)..(487): n is a, c, g, or t
acaaataaagtgttttatttacaggagttgtctctccaggtcccagctccctgccacccccaccccagccccagggagaagagggcggatgccagaggagctggcagaggctgggcaggtcctgagtgggccaggctaggccaagagagaaggcacgaggccctgggcgccccagtcccagggcagaggccaggcctgcctggagaaggcagcacggggtcagctctcaggggtcaggctgggttccacgccgccgcagctctgctcataagacggtggggcctctgcgggaagaaagcagggtctgcgtggggctcttggcgtcccctccctgccaagccctggctgtcgactcaccataggggtagccccaagaactgtactctggaggaagaatcaaggtgctggtagtgggcactggccccccggagccctctgcaaagtaggggacagtggcacctgttgaaatgcacaagggatggtgcancgggtgtgaggcatggctgccatcatgagggcagggctccggcgcaccaggcacagaactcaaggtggccagcaggggctgccgctgcgaatggctcttggtggagaggaagacggggtccaagaagtgggggccgccagccgcagcctcagcctca

SEQ ID NO: 128636 - DNA, 991 bp, Homo Sapiens
  misc_feature (420)..(420): n is a, c, g, or t
  misc_feature (587)..(624): n is a, c, g, or t
  misc_feature (629)..(629): n is a, c, g, or t
  misc_feature (641)..(641): n is a, c, g, or t
  misc_feature (738)..(738): n is a, c, g, or t
  misc_feature (741)..(741): n is a, c, g, or t
  misc_feature (744)..(744): n is a, c, g, or t
  misc_feature (789)..(789): n is a, c, g, or t
  misc_feature (795)..(795): n is a, c, g, or t
  misc_feature (882)..(882): n is a, c, g, or t
  misc_feature (894)..(894): n is a, c, g, or t
  misc_feature (943)..(943): n is a, c, g, or t
ttttttacaaataaagtgttttatttacaggagttgtctctccaggtcccagctccctgccacccccaccccagccccagggagaagagggcggatgccagaggagctggcagaggctgggcaggtcctgagtgggccaggctaggccaagagagaaggcacgaggccctgggcgccccagtcccagggcagaggccaggcctgcctggagaaggcagcacggggtcagctctcaggggtcaggctgggttccacgccgccgcagctctgctcataagacggtggggcctcataggggtagccccaagaactgtactctggaggaagaatcaaggtgctggtagtgggcactggccccccggagccctctgcaaagtaggggacagtggcacctgttgaaatgcacaagggagggtgcancgggtgtgaggcagggctgccatcctgagggcagggctccggcgcaccaggcacagaactcaaggtggccagcaggggctgccgctgcgaatggctcttggtggagaggaagacggggtccaagaagtgggggccgccagccgcagcctcagcctcagcctcctccnnnnnnnnnnnnnnnnnnnnnnnnnnnnnnnnnnnnnncccangaggcagcccanggctggccgggggctcactggggcatgggtcacagcaatattgccaatgaagaccgggagggtcacagtagcttccggcgcttcagagagactgtantantantcgatgtggatggggtgcacccggcagggcgactggggcaggcangcacangatctgtcgtgcactgcgcccgcgcaggcttgacgccgcacctccactccgcatggtcgtactccgtggatccacgcttggctatangaacttctgcanaaactggcacacaggctggtgtcttgctgactggtccaactccgatgcnctgcatgctgcccacacatacgcggggtaagtgctggggtgggacacc

SEQ ID NO: 128637 - DNA, 1528 bp, Homo Sapiens
ctacaaataaagtgttttatttacaggagttgtctctccaggtcccagctccctgccacccccaccccagccccagggagaagagggcggatgccagaggagctggcagaggctgggcaggtcctgagtgggccaggctaggccaagagagaaggcacgaggccctgggcgccccagtcccagggcagaggccaggcctgcctggagaaggcagcacggggtcagctctcaggggtcaggctgggttccacgccgccgcagctctactcataagacggtggggcctctgttgaaatgcacaagggagggtgcagcgggtgtgaggcagggctgcaatcctgagggcagggctccggcgcaccaggcacagaactcaaggtggccagcaggggctgccgctgcgaatggctcttggtggagaggaagacggggtccaagaagtgggggccgccagccgcagcctcagcctcagcctcctcctggggtggtgcggaaggaccaccaggggtggggccccaggaggcagccccaggcctggccgggggctcactggggcatgggtcacagcaatattgccaatgaagaccgggagggtcacagtagcttccggcgccttcagagagacctgtaagtagtagtcgatgtggatgaggctgcagcccggcagggccgactggggcaaggcaggcaccaggatctgctcgtgccactgcgcccgccgccaggccttgacgcccgcaccctccacctccgcaatggtccgtacgtcgtggatccagcgcttggccttataggacactttctgcagcagactggccaccacagggctggtgtccttgcctgactggttctcaacgtcggcatgcagctgcagtgcctgccccaccacatagccgcggagatcagtgctggctgtgaggaccacgctgcccgtcttcaccagcttgtaggagaacttcttggtggcagaggccacgttgggttgctcaatgtctgggatgctgttcaggttcaaggggctcaagatatagaacacgaggctgcacttgtgatccttggaaaaccgtggcgtgtggatggcggccctcacctggtgcacgatcttcccgaaaggaccctcaaaggacgtgggtgcagtggcaggaagcaggaactggaaggggaagctgtgctctccagcgggcaggctccccttgtctgccagcgacagggaactgttgaagtaaccctcctccactacccacgctgtgtcattagccttgttggagaccccgcaggaacctatgcaggtcacccggatggctcggaacggcagcggtgcccccaggcgcacgcgcacggtcccagccaacggctccccggggctgtagacgacgcggccgtggctcaggctgatctcgaagagctgcactcgccccatgccgcggcctcaccggccagccgcgcagcgacgcccccgcccgccgcccgcgcctcgtgccgaattcgccacccaggcctcgctaccttaaggaccgttatagttact

SEQ ID NO: 128638 - DNA, 678 bp, Homo Sapiens
ccattttcaaactgactttaatcatgttttgctgcccaaattttgtacatgcagaagccatgtgaagaattttctcctcaagggaattggcaagaatgttgtacgaaacagccggcagtccctcccagctgtgcacctgccacccgggaaccacaacaagttaggaaagatgctgcacatagaaaatgtatagagcacagatataaaaggctaattgcttcttatctaaacagtgtgcttgtcagtccctatcagctatctctctctttgcaggatgcatttggaaagtctaaaaaaaggggttcttgccttctgtgagtttacatgctaaaggagttggttgagctatcaggcccactcttcctaaggaagcagctgccccaccttctgaaatgatgtctggttaaagacattctggagggaggagtggtcttaagaagcaaactactttgaagggaaataagttccctctctcctcccatcagagaacatttcctttagaattctcagatcttcaactctcccactgatgtcatcccagaagcagaaatgaggaaagacccagcctcatctgctgttggggacactgacttactcaggatgtagcggaggttgtgacatcacatcagcaccttgaaaattgtccattgtagatgacccttaattatgtctcatcat

SEQ ID NO: 128639 - DNA, 1113 bp, Homo Sapiens
  misc_feature (1090)..(1090): n is a, c, g, or t
aaaacaaaccagctttaataccaatatagttctctcttaaataccgtgtttcccaggacaaatgcaggggcaggctcttggcagaaagagtagaaaggaaatgtggaacaaaatggaatggatggcccaggcccagggtccctgccttgggcactagggactgggctgcctcggggatgggggagtgacagcagctccccctggtccagttattgcagaggcgtcgggggctcccctccctccccaggcctgaaacatttctcaggattacttctgaccttcagccccagcagggccagggcctgggctcctctggtctaggatgggcccctttgcccaaaagggcctgcagctaaggcgtggggtggggcggggagcccctggacaggcccgctgctcttagtaggtgctctggtggcccgtgaggatgtagaggttgctgtgcgcctctgggttgtcagtgggaatgctctccaggatgatgtctctgtgggccccaagcactcggaagatccttgtttcatctgtgatctcctgggtcacctcattggtatccaggcttcggccttgcatcccatggctccagaaggccagcaccagcggctccagcatcccagctgggctgggcagagggctggagaagttcttcagcagcagaaacttctgcagcggctcataccactgcagcaggagcaggctggtgggcagggcgtccagcaggaaggtggcacccgtgtaggggttccgcaccacacgacactgcaagcagcctttggtgtcaggaatcttggtggacagagcaaagcgcctggggatgatgcgctgggtgaggcggttggtggggatggagaggggaacctgttgctgtagcctccgctgctcaaacaggcctgggaggtcatgggcccagatgtgcgtggatttccctgagagtgacagcagcacgttgttcacgcagtagagccaggagcagcgatgtgaaatcagcttctccagcgtatcctcatgcagttcatgcaggttgagtgtgtagatgccttcctcggcccctaccaccaggaactggtcccgagtaacagggtgaatccanggtgacagcagcgtggatccgca

SEQ ID NO: 128640 - DNA, 1794 bp, Homo Sapiens
  misc_feature (1438)..(1577): n is a, c, g, or t
  misc_feature (1718)..(1752): n is a, c, g, or t
cgttattggaagaacccgcccttctggcccggtttcctgggcaccctttgcccgtgtcgctaccaatggccccgcccacaacaatgggtttaaagactttttcgggcccgtgcgccgccaaaaagttttttagtgtgttgtgtctcttatttctgcctgtcaataatattttattctgacgaagttacaaaagtagatacaaaatactttttttagaagtacagttaactgacttagaaaaatagataaagcccctaaggattttaaaacacaacataaatttttatgtaaagaacatttaaaaatattttagatggtaaccaaaactaacttacacaaactatttttgatgtagaatagaatgctgttctataataagaagtctgtagcacactggtaatccatttggatctacagaatacttgtttggaacagaatctgataatgagagaaaactcaaatgaatgtcagtgcagttgcttcaaaaaaattactgctaccacatgtactatcatcccccaaggccttttacagtctgaaatatcaaaattgaaagcaaaaataggatgaccaaaggactactattttacctcttttcagaactctacaatagtagaaactaaattcccttatggatctcagggggaaataatgtgcctgttgaaggggctcagtgtttggtgtccaggctggcatttttcaggtgagggtttcatactgacaggaggcaggctcctaaaacaaggcggtagcaccagcaccatgactagggctgctttaaaacaaatttctaggacttacgctctttgggcctgatttgttaatgcttatgaggtaatgatattatgtttgagaagctctacttctagtatacctcaatgctcagagagaaagccaacaatacaatcaggaaaccacaatattgacaaaacttagtactaccaccaagattgttcctcttgccttggcactactaaaaaactttacctttgttactaaagtcatggtgaatacagattttgcatttctcatgtaagcagctatataagctagggttctacaagccttagatgaaaggaaaaactttgctggaagccctgtaaaaatcactttattcacaatctgaagaatgaaagacaaatttggctgtcaatacaaaaactgtagtacaaggaagttcaactgtttaaaaatctgcacatcactgtacaagtgttttttgaaggcctgaaaattaaagcaccataggattaactgcataatttagcaagcactctctaccccatgactgtaatcatgtatgaagagcagagatcagacactgagaggagatggcttctgattagcaagggggaagggagtgagtgttatggaacaggcaaaccttgggcatggggagataaaagtgagaagagtcaaaaagattgatttctatagnnnnnnnnnnnnnnnnnnnnnnnnnnnnnnnnnnnnnnnnnnnnnnnnnnnnnnnnnnnnnnnnnnnnnnnnnnnnnnnnnnnnnnnnnnnnnnnnnnnnnnnnnnnnnnnnnnnnnnnnnnnnnnnnnnnnnnnnnnnncatgactaaaaatagaaaaaattagctgggcgtggtggcgggcacctgtagttccagctactcaggagaggctggggcaggagaatggcccccggccgtaatggccgaattcccgggcatatgtccggtaccgtcgactgnnnnnnnnnnnnnnnnnnnnnnnnnnnnnnnnnnncgccgcttcctcgctcacatactgcgctgcgctcggtcgttt

SEQ ID NO: 128641 - DNA, 1007 bp, Homo Sapiens
cagagtcaataactttattagaaaaagattaatactaaaacttttcaatgacagagacaatcaactttgtaacagaaagtcagagatactttatttttacttctaaatccaaaggctaagtagagcagagttgtaaaaatgaaatcccacttagtctgattcacacgaatactaacgtttaatcctgttttcaaagtccaagattgaaaacttgcaattaaacactgagcaagccacatgtttaagtaatatttcttaaaaagtcttaaagaaaaaagtatgatacaggacctaagttttcagtggcatatatactattaacacatgttctgaaatctggtaggtcacatcagtcctgaattaacttttaataataataataataaaaaaactaactgagctttatactttttctatgccactatagctttctttcacctcattttttaaatgtcgatcttcactttatgccgttctcagtattcttccaaaaatcttcgaacagtagtcctacaacgcaaaatttggggaaaaatgataattagacaacatgtaaaaggccaatttttatgagaaagtgttggcccagtcactaactgctaattaacatgtgtacatggaatgcttgtattctttttaattatcaaggcatcagtgtggttcttaaagccatgtgcctgtgtatgcttgcctaagtgtgaatgacatacacagacataaccttacattgctttcccaaaaggggaatgccaccaacaaatcaactaattggtacttcctttcattaggaatattttgtcccacaccactagcccacagaatgaagtttacaggttttaagaacacttacagtacctaacttttaatatttctttaaaaacccaaattcgttctatatagtgcatcagttctttgatttcacaaattgaaggtgtctgtccttgctattcacactgccccggccgtaatggccgaattcccgggcatatgtccggtaccgtcgactg

SEQ ID NO: 128642 - DNA, 908 bp, Homo Sapiens
tttttttccggcactaagtcaagttctttacttcccagaagtgatggctaaggggagggaggagggtgagaagaggaagacagaaagagccagagagaatgaggaggtgagaagggggggacagtaaaccactgttctatgaagtctcacgaggcaagtgctcaaggtaaaaaaagagtcctggagaatcgtccacggctgcgggaagcatctcggtttccttctgcttttaagtcctctcagggaaggctgtcgccgctgccgctgcattaaatagttatgtacatcgcagagagtcccaggccatgggcaggtgggggaggggcgtcatttcaccaggggccgagttttatcatcgtcaccgcactggtgagctttgtactttttcacttctgccatgtacttggcccacgcgtcacctttacttgttaatacctcatcctccgtcttctgcttcttggctactattcccgtcttgagggctagtttgttcccgcctctgcgtttgcccacgaagctaagtgtggagcccggaccgcccttcctcttcggatccccggggccagcggcggcggccgactggtcgggtcgctgcggacccgggggcggctcctcctgccgctgccgctgctcctcctccatcttccgcttgaacagctccaggaagctgccgtcgttggcgaacaagttcacgccgcccgacaccgggctcgaacccgcgcccgacacctcctcgtccccgctctcgggcgacgtccccgatcccgactcagcccaacggctcccgccaccgccaccgcccgcggggcccggagcctcccggccctgaggctccgcccgtctccctcgggcagccattttgtcgcccctcgtgccgaattcaccacccaggcctcgtacctagccga

SEQ ID NO: 128643 - DNA, 896 bp, Homo Sapiens
cccgcactaatcaagtcttactttccagagtgatgctaagggagggagagggttagaagaggaagacagaaagagccagagagattgaggagttagaagggggggacagtaaaccactgttctatgaaagtctcacgaggcaagtgctcaaggtaaaaaaaagaagtcctggagaatcgtccacggctgcgggaagcatctcggtttccttctgcttttaagtcctctcagggaaggctgtcgccgctgccgctgcattaaatagttatgtacatcgcagagagtcccaggccatgggcaggtgggggaggggcgtcatttcaccaggggccgagttttatcatcgtcaccgcactggtgagctttgtactttttcacttctgccatgtacttggcccacgcgtcacctttacttgttaatacctcatcctccgtcttctgcttcttgggtactattcccgtcttgagggctagtttgttcccgcctctgcgtttgcccacgaagctaagtgtggagcccggaccgcccttcctcttcggatccccggggccagcggcggcggccgactggtcgggtcgctgcggacccgggggcggctcctcctgccgctgccgctgctcctcctccatcttccgcttgaacagctccaggaagctgccgtcgttggcgaacaagttcacgccgcccgacaccgggctcgaacccgcgcccgacacctcctcgtccccgctctcgggcgacgtccccgatcccgactcagcccaacggctcccgccaccgccaccgcccgcggggcccggagcctcccggccctgaggctccgcccgtctccctcggcagccattttgtcgccagcctcgtgccgaattcaccacccagcctcgtacctagccta

SEQ ID NO: 128644 - DNA, 1140 bp, Homo Sapiens
aatttcttatagtcaaaggtatgtttctgccttttacataatgtgacaaaggaatatgttggtcaaggcaatggctgtttcagtgtttcagctttaacaagaatgctggattacaggtcctcactttctaccaaggcagtattcagtgtcaggtgagatgggttggcctcaggttggaacgctgctttgatgtctagtccctggtccgaaagtgctgcatagcgactggctgagggccgtactttttttggcttggtgctctgtgactgctgatgccactgggtgtaaacgtccagcctggcagtacaggacacaatccctgcttcattcttggctgacacagtataccacccagcatcttcttttgtggctccctgaatgagcaggcagatgtagccgtggttgtcctggtgcatgctcactcggtcagtgctgtgagtgagtgattcattttctttcttccaaaatatctgaggtggtggcactcccaatacacgacattccagccgcactgggtacccatcagcaattcctgtgttttggagcttctcaataaacacagggggtttgtgtgcttctttagcagcaaccacaagctccaggctgaatgagttctgtcctgctcggttggtagctatacatgtgtagatgccggcatcacgtgacgtgactggctctatgatcagagagtgcaccccgttctcacgcaccagcatcttgtgagcactgtcagggcgtacgggctttccatctagttgccagcttagatctggggttggtaacccactgactttgcagtccattctgcagagttttccttcttgaacagtcagatctccaggagcctgcaagaagtgaggtctgaagaatcgctcctgaattggttcattttcgtctccactgtcccttgatctagaacgaggccttctgacatgaggatggcctgagggagaccggggacttcgacctctttggttgacagcctgtaccattagccgtccagtacaactgatgcggccctgagggtttgcagccataattgtataattcccatcatcatctagggtggaggctgtggtatggagggagcaggtcccatcgagatctctttgaatggtgtagtgatcactctttggagcc

SEQ ID NO: 128645 - DNA, 846 bp, Homo Sapiens
ttttttcctttaacaagcatttattgagtgcctactgtgggcttacaatgcagggcttgggatccggggctccattgagctaggtgacagggtggctgccttgtcacagctcatagtgcagaggtgggaaggcagtgtcctcgtcgtcaccctcacagctcagctctagcaccaacacccgctgcccaggagcaggtgcctggcctgtcagctgctgaaccagttctgtcaccctgaggggcaggtgctgggcctgcttttcaggtgaccatccggccgcatagagcagggctgagccgtgcagcaggatcctcaccctcaacccgtgctgctcctgaagatgagccagcagcgactccagggtcctctcaggctgcccagctggtaccttcagacggtcccaagaggtccacttcaggtgatggaacgtctggatggctggggcaaaaggcatatagcggatgaggtagttttcagccagatgtaggtagctgtggcgaaaggcactacgaggccgtggcccactcaccaccttatacagctccaggcccaacaggcctgccacagctgctgtagtggtggcaatggctgggataatctggcccacaattcgcttgctctgggcacggttgaccggtggaatcccgtagttctgacatctcaggctagctgccgctaccacaaagtccacatggaagttgctgtcatcatccttctcaaacatcagaggcttcaggggagggcccacactccagacttccagggctttgttcagttccttctgctgctcagggccaaactcagcagaagccgaagccagctctagattactagcaaagatggggg

SEQ ID NO: 128646 - DNA, 749 bp, Homo Sapiens
cattttaatgtcttgatttttaatcgaagcaaaagcaatacatgtgtatagtttttaaaaatcaaacagtagaaaaaggacatataatgaaaagtaatagaactgtctctccttctcaactcttgcttccccaaatcagaaacacaaacttctacacgtgcttgtttagagattacaccccctttttcaataacatgcctttattactatttcttgacttaatgacatgaggcattttctgctgacttcctgccgcccccctcagctctccttccccctgaatatagtcatatcactaatttttaactcttctgttggctacctggttcaatgaatagcaaagtggaatgctctgattggattttctcatcaccgactccagagtcttgatccatgtgccaatattcaaacagattccctttctcacactttcggcaactgttcaaaaccatgccacatctgaggttgcttcatatgtgaaacataagtttcttgcacagtttttaatgttcttccctgtagtttctttctgtcattttttttcctttgggttgaagaaatgtatgccttccagaacatgttattaatgtcctccagcttattattcaatccatctattgcttagaattcatctcattcaattgggtctattcacttcgtttctaattggggagatttgcctgctgtctgagcattcttgttcagtttatctttccttaagtttttagttacctttccccgtttttttt

SEQ ID NO: 128647 - DNA, 538 bp, Homo Sapiens
aaatttttaatttttaactaatttcattattttaaagtaatcagtttttcaaatcatgattttgatatcattattctaaggagttatctcaaaggcacaaaatatgaattctgcaagaaggctattttttattgtagtttgaatgggttaggaaaagcctcaatttttcactcttaagtccttcagtacatttttctttcatcttattacttatgcaagttaaggttctttggtaacagaattcttgcaactgtaaaataaaactacatagatgtaagaagtcatgtaaacggttaacaagcttaccaaggttagcaaaactttcattgtaaatcagtctgtactgagcaaataaaaatcattattagttgtataaacacaaattccattttgactttcaggatgtcatactacttctgtacctagcattttcagtccttatatttgcaatgttacacaaactgtactattttcttttatgtgcagtttgcatgagtaaaccatcagagaataaattctatctttaaattaaaaaaaa

SEQ ID NO: 128648 - DNA, 595 bp, Homo Sapiens
ttttaggtacaaactggactttatttgagttaagaaataggtgtttccaaatttctccacgctcactacagtggccccctgcccctgctcctgcaccaaacttggttaactccctcattcccagacagagcaccccagccctgacagagaaggagggggccccaaatgggccctaaacctgccagggccagggctcagccaggctgttcatcagcacagagcctggggcctctggcttttggtcttttgtgaaatagaaagtgttgtgccattcgaaacccatttctagaatggtcagtgtcctaacccttcctggtaaggcctttgtcaacagcccctgctccttgggcccctccatgccatgccgtaatctctcccactctgtctcaccccacctcagctccgaggcatccttccctgactgtcacagacacacagacagacaaacagatagacaggcctgtagcagcagtagcacatgcactcgcccggtgctccccttcagggagagactcggggggttgatacccctcgcagtcgccccttcccagcactcagtccatctgtgggcctcctggtctgcacagccatgtgt

SEQ ID NO: 128649 - DNA, 1674 bp, Homo Sapiens
  misc_feature (847)..(883): n is a, c, g, or t
  misc_feature (1577)..(1577): n is a, c, g, or t
gggcttccctctcctgtccgggcccctcctccgtcgcgctcccccttccgtcgcttttgtcccgcgtgtgctgtctctcagccacttgtcccgcgctctcctgatggctgctattcctgcctcgtcccagctcgtcgcttgtcgcgcgccccgctccgcgctcttctgccgctgctgtcccgccgcttcctttctctgcctccgctttgcgctctccttatatttgctagagcacttcatctctgtgtcattaaatcgtctgcagtagttgagtgattttcatgattttttgggttcgggtgtctctaagtgatagttgagtggctgtatagccgtacacggtggcgttctagactcgtcgttagttcctttgtgtgccgattatgtgttcgaggcaaagtcgtctggatatgtgtgttctcgtgcttgttgctggtggttctccctctgccgtttgggcgcccatcatcgtttttatgtttttcggccagctgttgtctttgggtgtcccctccttttgttatgtgttccgctcgttttgattctctcgccgggggctccctgctctgtggggtgttcttgttcctcgggcctgccccgcgtgtggtgtgcccgccgcggcggtgttctttgtatttctggtgtggagatggcccctcgcctcgttctgtgcttcgtcccagcgcggttttctcgcacgtgggacacgtcagttgcgttcggaccacgcagtttgtcacctgtcaccccattgggggcctcgccgcgccgctcctctacgtcgattggtgttgtctctagaaagattcttcttcggtggcgtcgcgctggcgcgtgccccaaaagnnnnnnnnnnnnnnnnnnnnnnnnnnnnnnnnnnnnngaataaaccacaaatggttgatttatttctgactctcagcccgtctctcacgaagacagagcctattgaccaaaaacttcaggatctgcatctgagcagatcccaggaaggggaagtcaaagggcccaggtcagaggcccaagttcagacttcagcagcagactagggtcagactttaccaaagtcagaactcgaggttcatgtaagtccttagatcccgctcccaagccctgtctttctcctccctccttctctcctccctccagctcagtgtggccacccgagggggtctctccctcccagccacagctcgggtatcccaagctgggaaatgtgtcactcggggctggggtgctgatctgtagcctagtccttcctggtccctcttgaggacagtggggatgggattggcacggccctcaccccggggtcccagccccattcctggctcccagccccccctcagcagcagtttgaagcccgggctggagatgggcaccccaagtggaaggttgggaggctgaggaccctgcgacagtgacagcaggtgagcagtggatgtgcggtggttggaatcttggaagtgggtgtcacagttctcgcagtactggagggagggagtaggagaccggttttccgggctccttgtctctccatggctctccctgaccatgcgggctactcagggaagcancttcttcagcgagctgagcgcatccctgcactcagctccagaccccacccaggcagcccacggccaggagatactcacagtgcccctggccgctcga

SEQ ID NO: 128650 - DNA, 423 bp, Homo Sapiens
gtcgtagagccggagctgctcctgcacgtcgccgtcggacatctcgccaaacgtctccttgttgtctttcatgagcttgaagatggcagccagctgttccttctgaactctctgctcctcctccagctcctctttggtcatcatcttcttgtactggtttcccctcagcttcccggggctgtatttgaaggagaagccttctccgtcctcctcctcaggcccttccgatgatggccccttctcaccatccaagtcctgctcctcttcctgcctcgcctccaccgcctgctcctccgcctccgctggcgccgccgcgggatcccctggcccttcgggctcccccggtcccgcaggctccccgagctcccccagccccgcgggctctccaggctcctccggccccgcgggcgaggccgccggctc

SEQ ID NO: 128651 - DNA, 1981 bp, Homo Sapiens
  misc_feature (53)..(73): n is a, c, g, or t
  misc_feature (114)..(126): n is a, c, g, or t
  misc_feature (137)..(262): n is a, c, g, or t
ggaagttccttccgggtccccaaggggggtttgaaaatctttttcttttgatnnnnnnnnnnnnnnnnnnnnngtggaggtttcccgggagacccccaaatttttgggattttnnnnnnnnnnnnnccgcccaaaannnnnnnnnnnnnnnnnnnnnnnnnnnnnnnnnnnnnnnnnnnnnnnnnnnnnnnnnnnnnnnnnnnnnnnnnnnnnnnnnnnnnnnnnnnnnnnnnnnnnnnnnnnnnnnnnnnnnnnnnnnnnngagatcatctactcaaagtttattggactgaacaaaggctgaatacagagatccaagccatgaggagtacatgaggtgtggtgcctataagccagggtcggaaactttccagacaaacctagatagctctactaggagggagtcaacgacctattgtatcaattagatcccagcctggacaagggcatgactattgctgtttggggacacgtggctctgtgttgaaggcaatgactgtgtggctgttgccatgtggcctgttctcccctaagccctgaaccaaaggttccaggcccagatgagaaggccactgggaatgcatgccataggggttgatgctggacattccccagccttccattaaatgaaaacattttctataaacttactgctttaaaaaaatgttttaaccaacaaacctaagaactgcaaatgagtttggtatagtataaatattgtcaaatataaaattccaagaaacccatttgagactgatctgatgatctgaagttctaactaatctatcaaactttctaagaaaaggcataggtcaagaaatctttttaaagcaaacattattgcttctgctatagcagagtggagatttggctgagctggtaagaacctcagtgaaaaggtgtcttagcaatgaaagggctgaatccgagattcctctagatgaaaaataaggggaatggtcaagtaaattcctggtactggttctttgctgccctgtaatcaatatggcatctcacccccgacaaccaagccagccacagagagaagtggggttcccagggaaaggggtcggctgaccaccctgacggagctggtgagcacaggtgagctctacctcatttgtctctcattcctcaaagtcttctgtggtttggcttcagtgagggcaaaagaggggagactggagtgaaagtgaactctgcttttaaaatgttctttttatctaaggtgtgcagggtgtgtggatagcaagtttgagtggtaagaaaaatcccagtccagggtctgagctctacctcttaaaactcttcagcttaacaaagtgacccacaggaacagacatgaacatctctacacagggcagggccaaaggtgttcccaggatcctgctagccaagggacaagtcctgattgagggtctagagctcagcagatttatggaggcagcatgcaccctgggagcctgcccagactcctctctggggtttccgttttatctctcaagcttttaagatgccaaaaggaaaagcctttaggaggacgctaaggataacttcgttattcttcagttctctgctcctcctccagctcctctttggtcatcatcttcttgtactggtttcccctcagcttcccggggctgtatttgaaggagaagccttctccgtcctcctcctcaggcccttccgatgatggccccttctcaccatccaagtcctgctcctcttcctgcctcgcctccaccgcctgctcctccgcctccgctggcgccgccgcgggatcccctggcccttcgggctcccccggtcccgcaggctccccgagctcccccagccccgcgggctctccaggctcctccggccccgcgggcgaggccgccggctcgggggcgcaggggcgggacggcgccggggccccggtggcctcggccgggagcgcgggttccgggggcgcgcgggcaggctccgggctcgcggccgc

SEQ ID NO: 128652 - DNA, 678 bp, Homo Sapiens
  misc_feature (12)..(12): n is a, c, g, or t
  misc_feature (235)..(269): n is a, c, g, or t
gagcctacattntagtaggagagggaagaaacagatgtagccaaccacagtatgaggtggaaacataaaattacaaagcgaaaagaagagaatgacttacagttagatcactggtccttagcctggttgctcattggattcacctggggagtttttagtcgtctcatgccagccccgttgcacccaggaccagtcaaatcagaatctgtgagggcatagtcagggagcatgagtnnnnnnnnnnnnnnnnnnnnnnnnnnnnnnnnnnngggaacagatgggggtggggtggagaggcaggccaacaagttgcaagtaattcaaatctccattggaaggggcttctcacagagcaaggcggcagctccagggctctctagtcctttccctcagctatcctctgccactgccatgcagatggcaagatggccaaggcagcccctgccccagcatcccatgctcaggacagtacccaaaggccaggagtgggaaaaggcacattccttccttatatcctggaagcacccagatattcttcatgtcccatgggcttagtgtggaggaaaaaaatctatgatcctttgagcattatttagtgctcagttaatacatttattaaatgaatagtttattaaaagtaaacatttttctaaatatatacgaactactttcacaact

SEQ ID NO: 128653 - DNA, 820 bp, Homo Sapiens
cacaagcatgaaaaaataaaagtggaaccagtcgctctggcccctcctccacttctctaataccagtgacaagtattattaataaagagcgtacatcttcccttttgatttcctttattctctccagggccttttcattgaggtattagatgagaagataatgtacaaactgcctcaactgtaatttaaggatgatagagtctgtatacagttttcagcccctttccctctatagtaagataatcagaataacataaaagaaaactccagttggagtaccggtaaatatttttgtgataagaatatatgaagcttccctccttcccccgtttttagtactaacatgtaaaatgttcaggcttttgtgaaataccttatattttttaagaaaaaggtttctatcatgtcctgtttgcttttgtgcaaattatttttgtttaatgtattttatatcttcgttgcattctaattttgcccttctttaaactgctggagtctcttctcactgcttgtacatttcatcaacttgtataaaaactcttcagactaaaagattgcccctaatgtaaataataaatatttatgaagtagttattttttaaatttttatcgtgtttaattctggctttctctgaaatccactgtgatttcagccaggtctgtaatgacgctggacagaaacaaggctagagaaaaagccatcgttcaaagaaatttcccttgagctcagcctgcgcagtgcccggaaacatggtggggaaagggcccgagcagttggaaggaaaacaaggcaatttaaatttagagtttatgacttgaa

SEQ ID NO: 128654 - DNA, 942 bp, Homo Sapiens
  misc_feature (723)..(723): n is a, c, g, or t
  misc_feature (767)..(767): n is a, c, g, or t
  misc_feature (821)..(821): n is a, c, g, or t
  misc_feature (823)..(823): n is a, c, g, or t
tttttaattaagtcaaatgcagagcaatttcccacactatatgcaggtgtcagaatgaggtatataaaacatgtatatagagaaatgcctttatagaaaagtagaaaccagtaatattctcttctccagcatcactaacaccaagagaccacctgaggtctaggtccccaaagcagatggctccatagaaagccccactaacccctgtctccacattgggcagtggaagggttctggaaaggaagctctatggctaggagctgccaaggcctcttgagtgtgacatcacaggttagaggccctgctgagctgctagcacagtgcagtggagaaatgttgcgctccgtcaggaagctgggctcttgccatgccagtagcttgcttacgaccttgggcaagtcactttttcctctctggggtcctgtgtccaaaaggcttaatgagccctttctaatggttctttgattgctttatgagttaggggctgtgaccctagccccagtgccctacaggaaggtgctgacctggacgcccgcaggaccacctgctaaatcaggcccacttggggagcaagccctgaagtgctttattaccttgcctctgagcttagtttccaggttagcctcttagaagcagctcacaaggccccacagtataattcccataggttagctaactactctcttacctgtgcaaaatgaagacaggtcactatccatcccntgaagagaaactggggcatcccaggtctgcctctgctcctgtgngcaaggcgagcaattctctctatcctctcctagtggatgccatgcattctcttncntatgaacagagatcctgggccagctggccacgtgcaggaacatgcacagtgacatcacagcaactatccatccaccaagtcgatcgtcatcgtcatccaagcatagatcatcatattaa

SEQ ID NO: 128655 - DNA, 624 bp, Homo Sapiens
tttttaagaaaatcacgctttaatgtctggtcctcgatcaccttagcacagcgcttctctgaggagaaatgccagctctgccgcatggctgcagggaatggtcggggggaagcctgcagcccaggcctgctacaagtctagtgactgcagccaggcggcctcccctgccgcataaagtgcttgaacagagccgccgtgcctcagaggactgggcctgtcctggagagagctggagacaggaggcttctgagcaaagccagctccagccctgaaagccacagcagtgccactgcgtcgggccagcgctcccccgacaaccccaggttgcgggaaaagcagagttgacccagccaagaacagactgctgacctcctgggccgagtgggcaaacagatcctgcacacaacacacaggagctgctggggaaccctgagtgcttgtggagtggagactcaatcagattccagaaatttctctggggtgatgtggtggccatttctccctcctcctcctctctgttctttgatggggctgtggagagcccaggtgtggggtaggcctcactggtccagctcactagcaagaccctgctcgtaatcttccacatatatatatttcttccgc

SEQ ID NO: 128656 - DNA, 773 bp, Homo Sapiens
  misc_feature (749)..(749): n is a, c, g, or t
caactccctccaagttgtttatttaataataataaaaaagaaatgcacacacataaacctgaactcccccccaccccaccctcccttactcccagtaactagctccaaaatgaaaaaacttcccttgtcccacctggggactaaattcccacctccactgccataacactagagaaacaaaataaaaaatatgcagcagctcaccacccaccccacaactgaacctcacacaatcccctcaaacaaagaagccaggactgggggttcacaggaatgagaggagccctatattctgaaaagggatgagaagagaggtgaacacccccacctcaaataagtgcttaacccccacacctgctctttcctttaccaattgccccaagcctggggatcagggaaatttgaaacagtcccacctggccacctggtaccccctccccccgttctaagtcagtgtgaatggcagaggtcagggatgattgaggtagaggggctggtgggaggcctggtgggcctggctggctgcagagactggcaaggggccacctgtggcattgcctggggttggggatggctgttttcggagcgaggggggcactgtggaggtcttgatgtgaatcaccctggtgtccatgacctcacactcgatctgcatcatctcctcatagtcccccggggccccacggcctgacagggtctcattgggggccatggcaggcatcaccagggacatcttgggccgggaggtnctgttgtggctgatggctgggagc

SEQ ID NO: 128657 - DNA, 1044 bp, Homo Sapiens
gtattgtattcagcttttatttatttttcagtatgacaaatatttagtattatattttagtatgggtctgagtatgcagacccagcactcatgttagaagacccaggaacatgatagaggacctagcaacagtgcccactgacctggctcgacctagggaagacatagggatgtgcacagcagcagaggaatatcatggaggtacatacaagaggtggtaggactcatttttgaatacaggtgagacctattcttggctacccttcaggaataaccattgcctgctttttagtgtacatgctttcagggttttctttgcgcagaaatgcattatacaaacatttacatttttataaatattggctgataaccgtatacgaggttctgcaaactgttctttatttatttattttttacaatgtgtcatgaacatcttttccatgcacatgggtgaaaatcctctactaaaatatagagcgccgtagttgggtcaaaaggctgctggtaacgagactgacatctaaagcaaagtatcagcttaaggttaaagcattgggcctggcaaatacctaccagggaaagcagggccagcaatattctcatcagagaaatcagaatggaaggccaaaggcattaaaggtatgggatatcgtgtaagcccctctggcccctacctccacccctcactcccctgacaccccgttgtccccttggggcgaatggatcctgtacatctctttgcatccaatgaaaaccacccattttctgttttttccttagctcctcttgagcccttgacacatctccacattctctcatcatctcctcactgctcagatgcctttcctgtaagtcctcctgagagtccttgggggaatcgtccgtccccctgtcggtttttctttttgctttccggggcacataatcttcagccgggcgcttttcggcggcccgcggctggctctctggctttgcctgggaggctggcttgccctcgccttgtggcttgccctcaccttcggacctgccctgcttttcctggct

SEQ ID NO: 128658 - DNA, 633 bp, Homo Sapiens
tttgctattatagataaaattgcagcaaacaccttcatgtatatagcattttgcgtctgttaaagtcagtctttggctgaatcaaagggtgctttttttgtcttccaaagcttctgcttctgtgtgccagtggtttgcaaagatggaatgactgacagtcagtctcacagaagttataattccctgtatgtttctgttggacagacttagtcatcaacttagaaattcacttttaaaaaaagcatcacacacagcagcagttttcctattttaagtgagataattttgagaaaactaagtgggaggtagtccatgagatattctgtaccactgatgagacaaggaagcttaaactactggctcatcaggcatcagtgacagcatctgttctttggatatgacattttataataaggagtggagcaggtgctggaggattagtatacaataaatacatcttctctaagaactttaaagacgggaagtttttctccgcctagagaataatctgaaatcagaagagatggatttctgagaaagatttctcctacccctgttcctatctggagaaaacagctggtgggtctaagagtacgaggagcaaccatgccagggagcaccctgactctgggg

SEQ ID NO: 128659 - DNA, 1232 bp, Homo Sapiens
  misc_feature (221)..(243): n is a, c, g, or t
  misc_feature (1139)..(1147): n is a, c, g, or t
ctgatttcaagtcaagatttattgctttacaaacaaacattatacttggtcttaatagaaaaatgacaccagatacatccaaaatacatttcacattgggatagctgccagttcagcacaaaacatacattactaggagcagggaggcatgaaaataaactatatcttactttttggtacgtcaggaacacttttgcctgaagtaagccctttagtactannnnnnnnnnnnnnnnnnnnnnnaatccacccatctgcacactggccctttagtactctttaagtataaaactttacttgtcctgggctttgacccttgtgtttgatctaaatgacatttcaaacataaatgtcttttgactagtgcgcttactgttatgtacagaatttaaaatgtgatcgtttgaatataaaatctggtttgatacatgatataaaagttgtatatttaaattcaagaaaatgtttttgtggactatttctactaaagaatattaaattaaaataatttaaaaacttatgaagcaatgatctgttaactggacaggtcaattatctgagctgtgtaaatcattgtctggcactacagttgaatcaccttgacactgagctcaggagcagcccatttaagaagcatcttgtaaataacaaagtgacaccttcgagattacagttgcagctatgcaagtcattcacagagtagctgagggctctcttctgaaggaggacccattacatgaaggtagacctttcatgtcttgttgccgacgtccaagtctcttgcggtccagaaatgccaggatggtctgtttcaaatgccattggggtatgaacctgcaccttgaattctgcccttccccttttccgattaaaaccttcttcacataaacttgcggctggctccttaaccagtcccatcccccctggaccggaggcgggtcctctcccggacctgggagacagacgctttaaggcacgctggcggtcctctcttaccggaaacaaacggcgccccctctcaaataaaccgtggcttcgcacgttttccaaccttctcgcgaacccgcccttattcctcaaccgggtgcgggaagtcccacggagctaaacattggggcgacctcgggcaaaacaaacannnnnnnnntgagcgggtgaacaggcgaccaggggcgggtaacaattagtgggtaaccatccccgcgtcccccgaatccatcgcaccccatggg

SEQ ID NO: 128660 - DNA, 1006 bp, Homo Sapiens
  misc_feature (91)..(105): n is a, c, g, or t
  misc_feature (243)..(277): n is a, c, g, or t
  misc_feature (636)..(647): n is a, c, g, or t
  misc_feature (918)..(947): n is a, c, g, or t
tttttaccaagatttaatgtacatttattcttaacacgtggaacatatagtataaagatttcatactgaataaatgatattcattaagccnnnnnnnnnnnnnnnggaggaatttacatcaagttttagctacattgttgaaatacaaatatgcagattttatcactgaaaaaatctcaattgtgtttcttcatcagaacttcaactgaacctagaactttttcacacctcgattagaaagannnnnnnnnnnnnnnnnnnnnnnnnnnnnnnnnnnctataagttgattggctgctgagacagcaaggactttttacagagacctgtacagcatcgcaccaagaggggcgatatctggcaagagattaaatagctgtgtctcgctttgtgcaggtcaccaacttgttaactcgtcatactataaaggggtagctgggaggaggaccaaactgtggggatccaagggtatgtgcaatgtacaacgtcatatatatacacacgtggcagcgtagccgctgcagctaaaggttaaaaccagttctaagaggtgatctcagggttattcatacaatcaaggaggagagaaagaggtcagggtgttgtaggttcacacatgatactttgggggaaaagcnnnnnnnnnnnnctcctcaacgtttaactaaaaacatttttaaaaactacagcttgctgctgacccagcgttttctgtttccatgtgagacattattattacagtatgtttacagtatcaggtgtacagtacagtacatgaaagggtctacactctactgcacaggcctctccagtgaacagggtctgttcacaactgcgaacttcttggctcctgcaagattgtgaatgtacaacaataaaccacacacagttcagcagtcaccttttttgtccttcagaannnnnnnnnnnnnnnnnnnnnnnnnnnnnnaaccattaaaaacagttatgaaatgtggcatcccgttgatgcaaggactgggaaagcca

SEQ ID NO: 128661 - DNA, 1935 bp, Homo Sapiens
tttcacctttcttttgtttatttatattctttagttttgtgcacactttgaggaattgatttaggacaggttcatactgaaaaaaacctcagctgatgttatctgtgggggctggggagggtgtcagggacatttggtggctgaggagagcgcgtcactgctattgaatagctccatttaacaccagccatgtctccgcgtctcaggcacttctgtgaaatgttctcagaaccctgtggtgactgcggcacacccggcaggccttgctagcacacgccgcccactggcagggcccggccaccctggctgttgccattctttcgtagggttttgttcattttactatttgtcatttttctaggaaacatctgtttttgtaaaacaaacaagggggaatcaagtattttaaccacaaagtataaatactggctctaagctttcatcacttcattgacaaactgaatgctgaggaggctgaaggcgaggaggcttttgcagatgtggaccttgagctgcgtgtttgggagacgcacaggcctcggggagactcaagccagatgccagccacggggaccacagccttgtgcccaagagtggcatttgtgggaaaaaggaaacttcaagaaaaacacccctcctgcttctcttccagcagctcgtctccttctggaaggatgtggggagcgtccagggtaactaaagtgctctgcgtccaccagagtcacagtctccccaggagggctgggccgcttacgccagcacctgctgcacccccatgtggtccggggagcagtgccggtccccgcagggcagctttttcatcagccacgttggagcttgctggggaagctctggttcatgtaagcggtagcagaagtggtgtcacaaagctgctggagaaggccaggagtttggagaaatccttcacaaagtgcagtagccccaggtagtgtgcgtccacgggcttccctcgcgagatgatgaccgtgtgccccagcaggatcagatagtgtggcgtccagagcccaaactgcgtgcacacggtggccaccagcagcctgtgtgccgagggctccagccggcccgtgtcccggtccaggggcgtgtcctccctgcggacgcgggagagtagcaccagcgcgtagagggtggccagtgctggcaccacgtagccgatgaacaccagcgtggcgtcggcagcttctgcgttctgcatcttggcgcactctagcgcgcgggtggacacatggctgcagatgtagaagagcagcgaggagaagctggtcagcagcgcgccaccccacacgaagccgcacacgtgccgcgtgttgtacacgctggccatgtaggtccgcggcagtgcacgctcgatgtagtggtcgaggctcagcagggcggtggagtacatggccaccagtgaggacacattgaaggggatctgcagtgccacgtggacttcgccgcccacactccacagcgcccaccgggagctcggggggccgagcaggtgcacaggggccagggcgctgagcaccaggcctgccactgccatgttgacaaagtacacgtccggcatggtcatgctggccttgctgtgtaggttggccagcaccagcagggcgttgtagcacaggcccactggcacgcccaccaccaggcccagcagcgacaacagtgacagccccagctgcaggtcctggcaggcaggcagctcctccaccagccctgtgccgttgaaccagctgcagctccacatggcggccggcgaggctccgcgaccctttactttgtggcccaagcctcttggtgctgtgggcctggccactgtcggtgagcagcatggcgggacagaggtggccaccagagctctggtgaggacctgcgcgctgctgcgcttctctgcaaacccgcaggctcttatcagcagcgcgcctg

SEQ ID NO: 128662 - DNA, 758 bp, Homo Sapiens
  misc_feature (191)..(225): n is a, c, g, or t
  misc_feature (571)..(571): n is a, c, g, or t
ttagtctaagtggccagcagaccccaagcagaaccaggccagtgcctcacacagagcaggcactaggatgcctgtcgacagcactccttcccctccttcccaggccccaagcccttatcggacacgactcattttaaagaaaaaataatatttatttgcaatataaacaaagtcccgttgttggttcgggnnnnnnnnnnnnnnnnnnnnnnnnnnnnnnnnnnncgtagggtcacaaatcttccttcataagatcataaagcaaaactggccaccttctggcataccctcatttacacaaatctggtacatctttctgggttttctttttaaaaataaaagagagaaaaagagaaccatgtacagcatggaagcttgttgtcaatttctcgactgtggcaagattttaatctgctgcgctaaagaatccctgaaagccacccccgtgaggtaagaagcagtggggcagagtttttctgtggcctcactcacatgctgagtgctgctccgtcagggaccctggcctgactcctctgcctgccccaggcccccatgcagtcctgacacctgngtggaactgaggctggagaaggaacaaaactggaggaagataacggaatccgtggcttcgttctgtggaggcaggggaagtgaacagagcttacccccttctgctggtcatccttgccccactgccccgccctagggttgaaatgggtgcaatctcctggcagtagaaggcatgggcaagatgaggg

SEQ ID NO: 128663 - DNA, 600 bp, Homo Sapiens
ttaggcttagtacgaggctggggttgaatcggccgaggagggagccagcggtccccagttctgtgcttcccgcgcctacgagagcagccgcgcagatgagctgtccgtgcccgcgggggcgcgcgtgcgcgtgttggaaacgtcagaccgcggctggtggctatgcaggtacggcgaccgggcgggcctactccccgcggtgctgctgcggccggaagggctgggcgctctcctgagcgggacggggttccgtggaggagacgacccggcgggtgaggcccggggcttccctgaaccctcccaggccaccgcccctccccccaccgtgcccacccgaccttcgccgggcgccatccagagccgctgctgcaccgtcacacgcagggccctggagcggcgcccacggcgccagggccgccctcgagggtgcgtggactctgtgccgcaccccacgacggagcagtgagcgcgaggatcccgatgaggggatggaccgcgccatcccagggctggggaggagcggggagggcggatctccctggccagcagggatgggagggggccatttgctgttcctctgagtaaagcttgttctgcatg

SEQ ID NO: 128664 - DNA, 1249 bp, Homo Sapiens
tttcagttttgcaatttgcacagttggtatttgttcttcacagcagtaaggacttgaatgagaatcgtgaaacttgtggaacacttatatttttcttcgggatttaagaaactttgtctcgtactgaaagactacattcagtgtgggtcaggtccaacagtgttagccagaacgcagttgttaagcgcacccagcactgggaggaaatgtggcttgagaggagcggctgcccgaggccgccccttcactggtctccaagtcgaaagccctggccccagttgtgtctcccgcctccgccattctgatcagcagctcgcctcatgctagcagggggcacaccaaatcctgatactcctcctctcctactgggcagccagcggtacaaaaaactgaggtgtggatagaaaatttcttcctcccaagtccattgggtatctgaacattaggaaaaaataaagatgtccaaccagatttccaataagctcattgattaccgagcctccgatgatatagttgaatccaaggataacccagggtaaatagcaggccttaaatcgtgttccaaaccaaaatgatacaatcatgtctctgttcagctgggcccagacataaagtactgacatgatcagaggaatcatcagcaactgcatatccattgctaagccagtaatcacgatgcaaatccagttaaagaggagcatgaataaatagtctgctggcctcccatcaaaagctcctgtttcaagtcgcgtagaatactgatataagaaatataaattgaccaaataaagaaatccagttcctggacccacagggaaataaaaggtggcagtgattggcctccaaatctgaaagcgataaaggaaggcttcgggccagaggaagaggtaggccgggctgatgaggccgagtttgccgaccaagggcacggcgacggtggcggcgaaccaatagcgcgtgatcgccgggatgctcctgaaccagtctccgatgtccgacatcttcgacccacaggtagccaagatgcacaagaccgcccgactccccgtgccgaccccctcacgacgcggccggctccgcgactgttaggtgtctaggtggaagccgccgaagccgcgatgcagaaggcggagacgggcggacgtggcgccaccgaattcggacggacgcgtgggtcgacgatatcccgggaattccggaccggtaccagcctgctttttttacaccactgtctatagtgtcacatgca

SEQ ID NO: 128665 - DNA, 1171 bp, Homo Sapiens
  misc_feature (225)..(284): n is a, c, g, or t
cagtcgacggtaccggacatatgcccgggaattcggccattacggccgggggctccaggccacagaggcaaagacatggaccctgttccacctgcccctgcaagtctcaagtgccaccagaccccttctcatgtacttgagagggtgggatggtacagagagagccagaagcacagaaaggagaagaagaagacctcacagttgacacctcaacggggctttagnnnnnnnnnnnnnnnnnnnnnnnnnnnnnnnnnnnnnnnnnnnnnnnnnnnnnnnnnnnntgatgatgatgaagagcatggagcccctctggaaggggcctatgaccctgcagactatgagcatttgccagtttctgctgaaattaaggaactcttccagtacatcagtaggtacacacctcagttgattgacctggaccacaaactgaagcctttcattcctgattttatcccagctgtcggggatattgatgcattcttaaaggtcccacgtcctgatggaaagcctgacaaccttggcctattggtattggatgaaccttctacaaagcagtcagaccctacggtgctctcactctggttaacagagaattctaagcagcacaacatcacacaacatatgaaagtaaaaagcctagaagatgcagaaaagaatcccaaagccattgacacgtggattgagagcatctctgaattacaccggttctaaggccccctgcgactgtgcactacaccaggccccatgccccgacattgacacgcctgatgcaggaatggtccccccggagtttgaaagagcttttgggcaaggtaagcctgcccacggcagagattgattgcagcctggcagagtacattgacatgatctgtgccattctagacatccctgtctacaagagtcggatccagtccctccatctgctcttttccctctctgccagagggcacagaacatgtttgtttaatgaacctgcctgcctcagattgctgtccccggggagttaatgcatctacaccactgtggggatttgagttataagaattggaatttctgagatcccatggaggttagattgggaggaaagcttaaaagatgtcctttttgtgagagggatggaattgttttctttcattcgtaaagttagtgagtaaagattttataaatc

SEQ ID NO: 128666 - DNA, 836 bp, Homo Sapiens
  misc_feature (401)..(429): n is a, c, g, or t
gcggccgcggctgtaggctttttactttcatatgttgtgtgatgttgtgctgcttagaattctctgttaaccagagtgagagcaccgtagggtctgactgctttgtagaaggttcatccaataccaataggccaaggttgtcaggctttccatcaggacgtgggacctttaagaatgcatcaatatccccgacagctgggataaaatcaggaatgaaaggcttcagtttgtggtccaggtcaatcaactgaggtgtgtacctactgatgtactgggaagagttcgttaatttcagcagaaactggccaatgctcatagtctgcagggtcaataggccccttccagaggggctccatgctcttcatcatcatcatcagaatcagaatccagtttcagatgannnnnnnnnnnnnnnnnnnnnnnnnnnnntttcactaaagccccttgaggtgtcaactgtgaggtcttcttcgtctccttgttattttcctcttcatactcatcactgctgtatcaccatagccttgttaggaagatgggcagaacgaggaagtccttggtgtcttggggttggagtataaatacttgcaacctcttcggagtcgttaatctctagacgctcatcatatgtttgttttcaacaaccttggtctgtagcccttctgaatccgtctcctctataatggaaagaaccccagcctagggctggggtctcactccagtctcaaagccaggccactttaggattccacgccaagcaaccagcctgttgtcagtcgctaggcccccggccgtaatggccgaattcccgggcatatgtccggtaccgtcgactg

SEQ ID NO: 128667 - DNA, 1198 bp, Homo Sapiens
  misc_feature (915)..(915): n is a, c, g, or t
  misc_feature (1028)..(1028): n is a, c, g, or t
  misc_feature (1040)..(1040): n is a, c, g, or t
  misc_feature (1043)..(1043): n is a, c, g, or t
  misc_feature (1072)..(1072): n is a, c, g, or t
  misc_feature (1081)..(1082): n is a, c, g, or t
  misc_feature (1108)..(1108): n is a, c, g, or t
aattccagaggaaaaatgattcccctcgactgccaatcttggaggattggggtttcattttatttcacaaaatttgtttgctttaactactcttcatttaatgcccattactaagcaaagttcctgtgtctctgcgttatgctcagtcagccttttctctttcatattaaatagcagaataatctgacaatataatagagcatttgatttataaaatctttactcactaactttacgaatgaaagaaaacaattccatccctctcacaaaaaggacatcttttaagctttcctcccaatctaacctccatgggatctcagaaattccaattcttataactcaaatccccacagtggtgtagatgcattaactccccggggacagcaatctgaggcaggcaggttcattaaacaaacatgttctgtgccctctggcagagagggcagcaggacatgcactgcccctgagccaagctgtggcatgggcaaggacatcaagtagctgacaacgatctgtccatctcagctggggcagaggggccagctcagccttgaaacagcagcttgggaagtgtctcagctgaaggttaatgtctccatgtctccagcttgggaggtggaattggatgaaggagtgaatgctttcttgccttcagcgagagctttaaaatgctgtgagttcttgaattctgagtagagggaaaagagcagatggagggactggatccgactcttgtagacagggatgtctagaatggcacagatcatgtcaatgtactctgccaggctgcaatcaatctctgccgtgggcaggcttaccttgcccaaaagctcttcaaactccggggaccattcctgcatcagcgtgtcaatgtcgggcatgggcctggtgtagtgcacagtcgcagggggcttnagaacggtgttattcagagatgctctcaatccacgtgtcaatggctttgggattcttttctgcatcttctaggctttttactttcatatgttgtgtgatgttgtgctgcttanaatctctgttancanagtgaagcacgtaggtctgatgcttgtanaggtcatcnnatacatagcaggtgtaggcttcatcngacgtggactttagatgatcatatccgaagtgggaaataggatgaaggtcagttgggtcaggcatcatgagtggtctatgttctggaatc

SEQ ID NO: 128668 - DNA, 899 bp, Homo Sapiens
  misc_feature (345)..(345): n is a, c, g, or t
  misc_feature (382)..(441): n is a, c, g, or t
  misc_feature (498)..(498): n is a, c, g, or t
  misc_feature (653)..(653): n is a, c, g, or t
  misc_feature (809)..(809): n is a, c, g, or t
  misc_feature (811)..(811): n is a, c, g, or t
  misc_feature (814)..(814): n is a, c, g, or t
  misc_feature (820)..(821): n is a, c, g, or t
ggaaaagtttgggcgccgcccttagggatttttttcgggttaacccacggggtgagggaggccccccgtagggggttcgggcctgccttggtaagaagggttcaatcccaaataccaaatagggcccagggttgttcaaggctttttccctccagggacggtggggacctttaaaggaatgcattcaatatcccccggcagctgggaataaaatcagggatgaaaaggctttcagtttgtgtcccaggtcaatccaactgaggtgtgtacctactgatgtactggaagaggtccttaatttcagcagaactgggcaaatgctcatagtctgcagggtcataggcnccttccagaggggctccatgctcttcatcatcatcannnnnnnnnnnnnnnnnnnnnnnnnnnnnnnnnnnnnnnnnnnnnnnnnnnnnnnnnnnnctaaagccccgttgaggtgtcaactgtgaggtcttcttcttctccttgttattttcnctcttcacactcatcactgctgttatcagccatagccttgttaggaagatgggcagaacgaggaagtccttggtgtcttggggttggagtataaatacttgcaacctcttcggagtcgttaatctctagacgctcatcatatgtctggttttcanacaaccttggtctgtagcccttctgaatccgtctcctctataatggaaagaaccccagcctagggctggggtctcactccagtctcaaagccaggccactttaggattccacgccaagcaaccagcctgttgtcagtcgctaggcaaaaagataananaanattttnnaaaattcgcgagagttgcttccactctcgtgagacctcctgcgcgttaagcctcacccgcgaaggctctcctcgtgcc

SEQ ID NO: 128669 - DNA, 661 bp, Homo Sapiens
tctttctggcttttgcaatatttattggaaacagcgattgttcctttggtgagagtttatacattaagctgtaagatttgcctttcactccacatgatccactactgcaggtggcacatcggaagcagcacgttaaacctctgaaagagtctgtacagctagataaatagaactctggatacctaacaggactttcatgactgatacaaataaaaaaacacactgataagcttacacacagcactgtacacacaaaatgaagacgatggatagaaagggcagaagtaaaagtagcgactgaattgggaaagagttttgcatatgcagccatataccttaaactgctaagcacaaaaatcatctttatttggtcctcattgagggcagaatctgcacaaatgatgttcaaagaacacagggtaaaagtggaaaggaaaggtatttactgtttctcagtctatgaactagtggaaagatggttactagtgttttcttccttgtgtctctgtgccaaatggattcatgaaacatgtaattcacaaataaaactgaagtgaagatatttgttcccccttccctgtgcccttcagaaatagcctaaatcatacatagtttctgtatagcaagaatttaagcttggataccagtttcttcccattcc

SEQ ID NO: 128670 - DNA, 1210 bp, Homo Sapiens
ttttccagatgcctgtgatttatttccaaaggagagctacagcacataggaaaatacacatggcttttcagtctacatttttacagagaaaagagattcggtcattggctttctcagtgccatcatcctgttccatgaggctccaggatggatggcctgtctccaagatcccgctttcaaagcagcagcttggccaaggcctctgggggtaggagtgaagggcagcgacccccatgtgcgggtggaggggaggacatgagcagcactcactgcaaagctaaggcaaagaatagagctggtgggagatgcctcccctcaccccaggggcatggcttgctgaggcccaggatacagaccaggaggggtggggatgggggtctggtccagcctggagcggcagcaggactctgagtgtacacatgggtgtggggtgaagaggggggcatgctgaagaggaagcctaccagggtatagaggggctttagcttgcatattccccctgccccagaacagctcccagaccatggtccccaatcctacacttggcccctctcttaagttctacttcaggtgggggtcctgctcaggttccttctgccaccttatcccctcccactgtcagtgcaaaacattcttagggccaagcccctgagtcccctgcacactgactggagctgcagggaagggaggacagcaaggtgctagctgggagcctcccccagcaccaggaattccttgcacatctctcggacaatcatgcggtccatctggcactggggtgaggtctcctcctcattcaggatgcgtcgcagtatggcctgcaggtcgggtagccggtggcggtgctgcaggtagggtgtggtgcggactatagcatgcatcagggagaggtactccatgcgcagcttgtctcctggtgacaggtctgcgatgtgccgcacagtgatgtcaatgagagccatcatgtctgtgtggtagaagatggcagctgtggccgggctgccaaacacgtcctgcaggaacttgaggacagagtgtggtggctgtggctcatgtttgaagatgcgcacagggtcatcccctctgttcaggagcaacaacagcttctcggagaagatcttgacattggcgtgtttgctcagggcagccatgatgacattctggtcagcagctggccctcgtgccgattcacacccagcctcgtcctagc

SEQ ID NO: 128671 - DNA, 631 bp, Homo Sapiens
  misc_feature (109)..(109): n is a, c, g, or t
  misc_feature (121)..(121): n is a, c, g, or t
  misc_feature (343)..(343): n is a, c, g, or t
  misc_feature (387)..(387): n is a, c, g, or t
tttgctataattcattttagttcagggaggaagcagcaaatcatggccaatatttggtttcgtcgctttgatttctgaagacacagatggagggagcacatgataatgngaatggtattcntgagattgttcttagcagtagcgggaaacagctgaagttggatttattgtactcaaattcaatgtgcagacagtcctcaatcccaacctccatcttgatggaagagttcagctctgggtatgtgctgagtgtgtgaactacaatgtccatctctttgacaacatcatttgaggcggcggctgatggtagcacgaaggaaataagcgtagcttcacattctgnccctgtgtaggactcatacggcttctccacgttgggtaaactcncaaagtcgaaggcctgcgactgggtgatctctccaggccgggccaggtccttcaccagggacacaaactcatggtggttcccgcgatcgtagtagagttcgatctgcccgatgaactcgatcttgatgccctggtgctccagccgcttgttgggttcttgagggcaagctcacctttccggagaccgtctccccgtcgtaaagaggaaatattctccttctccggtctccgtcttgtgctcgcc

SEQ ID NO: 128672 - DNA, 3749 bp, Homo Sapiens
tttttggtggaccgtgggcacaatgcctccaaagccacaggggctttctttaatcagaaagaccattaaaacaaacgttcttcttttaatacagccattgaaaagatgacacattaagaaacatgtaaacactgcagctgcttaattacaagttgcactgcttgatttagtacctatgcactcccaggtttggggaccttaagagagggggacaggagcctcccctcactttcacagttggatagagaaggcaagaatgtgggtagagtaagaaagagaaaacagaagacctggcttgtgcacagcgcctgagagaatcaaagcaaattctgtcttctagttctcccagaagaaaggtttaagatgttaggaaggttggaaaatgaacgtgtgttgtcagttgggaggcaaaggaattgacaaatgcttctagttagaatatcagctaggaaaaggagggatacagagcctgacctcatgctctgaaaaggcaaggaacccagaacttgcctcccttatccacttaagccccaaccttgatcatcaagggcagcgcatgggtgatcctgttcccatgaggattgtgtgtcgcacctgaacacaggacacagcgtgggggaaacaaccttgccttcctcggttctgctgccgccagtcgccctcctaggctacccgaaatgcctctccctccagtctcagctctgatccatgagccctgccaaaggcctgagactgcactgatctcaggaaaacagaagtcttcctttcccacactaactgaaaggtgacacaggaaccaactcctttactttccaaattactgagaactcagactgccaaataccgtacctcttggccagtggggcctgcttggtctttctataaagggaagggaggccaatgggagagtaatgcctgtcatttccaggggaagcagaaaaaggacagtaaacaactttactaccataggccccagcgcagagccgtagagggagaagtaccttcctctctagcataacaagaatattcacaagagtttttttatatgtgttttttaaacacacgataccaatggtcctaaacttgggtcagtcaactggtgaagatgacctatttggcaagcagaatgattcggaagtgtggcagcagtcttctgccgaggccctggtctcccctgtgtaacctatagggagaggggtaaaggggcttgggcattagtaagaacagccttgccaaaggttcgaaactaagccccaattcccagaaatgaaatggagggtgaggagagacgagggttcactctcagcaaggcggagggatcaaggccccttcctgggattggttcttcagggaaccaggccctcttgttaagggcttgctggggcacgtgaagcaatacctagaacagcccagaccttggggttaccaagtggagcgacgtgaaggcaggcggttgccatgcactcatcttccgtggtgggccgggttcagcctcctgggttcaacactgccgccatccgtgcacgacactgaccccagggcttctccgtgcccaaggccatcctacaggcttctgttccaggacattactgacaatccagagaggatggagaagggaggtgcctgggtcccagcagtgagtggccagaaggaggtggcctgtgggaacttgagatcaccacatccaagattcccaaagaggtagcttcccaatcgtgagtcttcccctgccacttagtgggggctggcccaactcctgccactacctccgggacagcaaaggggagtacaagatgtgactacccagggccctgttggcagctcagaatcccagggacatgctcagatcctgtatcaggaagctcagagagccaggagcccaaggatgcgtgctctctgctctccctcctctaagacgcaaggcagccccccgaggaagggggctcatgttccccagagaggctggcttccaggatgctacctcttctatcccacatcggccgcagaatcccaaggagagactgcttcccaccccaagccccttgggttctccagagaaaagaatttaagtcaaaaacatgatttgttttcaggttgcaagtaacgggtcaactgagcctcacaaggtccgcccccgcccccagccgctggtgttggtagatgggggtgctgggtgggtgcccagcatcttctcggccctgggggcctactgcctgcagttgttgtcagacagctggctgggggtccgcacctcacccagggaggtggtgccctcaaagcgctgtgaggcgatgccgcctggtgggacatgctcttccgtacgatgtcacccttccgccacaacaccacttcctgctgcttgaagtagcgccgctcctcctcgtctatcagcaccaggttgaggtaatagcgcacagagaacttcttgttgatgtcccgcatggtgggcgtgagctcatacccggccaggaagagccggatcgggatggactctcctcgcactggtgccccgtccatgatctcgtacttggctatcgtgtcattctcatggtacacgttggggcctgtacccgtcgtttctcgcttgatgatgtctatctccatgtgcttgattttgattctcaccagcaggaagtatatcttccctacaatgacatctttcaagtggtatttggatttattgtactcaaattcaatgtgcagacagtcctcaatcccaacctccatcttgatggaagagttcagctctgggtatgtgctgagtgtgtgaactacaatgtccatctctttgacaacatcattgaggcggcggctgatggtagcacgaaggaaatagcgtagcttcacattctgccctgtgtaggactcatacggcttctccacgtgggtaaactcaaagtcgaaggcctgcgactgggtgatctctccaggccgggccaggtccttcaccagggacacaaactcatggtggttcccgcgatcgtagtagagttcgatctgcccgatgaactcgatcttgatgccctggtgctccagccgcttgttggggttcttgagggcaaggctcaccttcccggagaccgtctccccgtcgtagaagaggaaatatttctccttcttcccgtcctccgtcttgtgctcggcccgcttcctactctctgcatcgttcagaaggatttccacctccacgctctgcccgaagccgaagaagctcatcgcaccgccgggccgggcgggtctcggtaaggaccgctcgcctcgcaccaggggcagcagggcatgcccttaggtaaagaaggccagagggcccgattgcgcgagcgcagctcaggccagccagcgggggctgcacatggcgtccagccagcttgccagcacaggtgcaagtggagcagccggacaggacaagccaggcatccaacagggggaaaggggccacaggcacgggggaaggctggcaggctgcagggctgcaggcagcccagagcagacaaagcacgcagaggagcacgtgccctcggccagagccagtcccagccagtcccgcggccggtggcagtgggcgggcgagggtcggccgtgcaatgctgcggggggcagccgcacagagccgggtgtgggtggcctgcgcctgccgggtggggtccagcgccgagcagcgctgcgagctgcccagcctccggcaggtcaacgcaccgcctcgtgccgaatttaacacccatgcctcgtacctagccgtaagtgtcgcg

SEQ ID NO: 128673 - DNA, 598 bp, Homo Sapiens
ggtttagctgagggtataagtgaccaaggagggaaaaagcaaccttgggggaaaatctcaagactgacttatcagaattagggataaatgaaaccttgttgaatcccacctaaccatgaaaacaataatctttgttttgaataaacgtctcactcagcgaagcctgaagcacttaggtttgggttggtgtgattccttcctacagtgtgagaataggcatctcggctcaagttacatgaaggaagagggaacacaggaaggcatttgtccaaggatacaaggagctcagactggggccataagcaacccagtgtgatgggttgacctaactggtttcatgcttcagagcttcccatcttctacctgcatacatacacatgtgcatacctcacaaacacacttaagctaagcctactagttgtggtttttcatccaagattttttatttgaatgctggtgcccaaactgctgtgcatgtctagccgaccctgaggtagtaatgccagagggggctacccagtgacaatgctgactgcaggctccttgcttcccatccccgttggctcctgatggctcttctagtcctgcttcacttcct

SEQ ID NO: 128674 - DNA, 1351 bp, Homo Sapiens
tttgtagaaaattcctttattatagtgcaaattactttcagcagtgacataatgtaacaacacatttagcaacattttacaccacacagtaaataagaaagtgtttctttgaaaatatgtcatcataggaacattatttctacattaatgccagaaaatgccaaggccgtttatctcaaggcaaacagggctccctccttccttttgggtattttctttttaacacaaatgaaatgacttgccattttaacaaatcctcaattctaaaagtgatctctcagggggctttgaactaaggtcggcaagatttgaaatggggcttcaaaattttaaataataattttaaaatacttctggaatagcccaaaaagtagaagtcacttctattaagttttaagtagatatacacactcactccaattttactgtagaaatggacagattgtctaaagcctgctttctattcccccagagcctgattgttatttatactccttggttttggttattgcagaactagggctctggtcagaaataacaccttacatacccgaatactttcctgtggaagctttacattgcattttccatcctgaaattctcaccttagaccttacaggcccaggagagggtgtgaatattgttttcagtttacagctaaagccccttactaatttgggctatacctgaatcaaatcatcacatcatttagattaatcccaataggcttatccaagaggttcccactaacctcacagagaaacaagcagttaacattgtattttcacactaagctgcctaagggcttggctgctaatgagttagctgataggtagacagaataagcgtttcaattccaatcagtacacgccctgctcctctagtttctgctgaattatgcagtgggtgggaatggttggccactcaaaacagtcttcctatggggctcttccaccataagttggatcaaaactccacaaatgtatttcaaggtgccctttaagtctctcaaatttagggacttttaagtgacaagccatgagaagttaatcacaggcttgaaaatacctggaaccacagaacagcccccacggaacaggctgaatatggttaaataagttggctggtccataaagcttttcaatgtacagccagtcttgttggatacagtgtcttcttatataatacaatggaactgtgctaaacagtttcaaagttgagaagaatccaaatgtatcacctataaaaaattcataattttagtttattttagactttggtactgaaacactgtctacattcttgacacttgaaaatgacatggtcacttcagtgcctctgcatgttgtgt

SEQ ID NO: 128675 - DNA, 1058 bp, Homo Sapiens
ctctcccaacctggacacatctggggaatatgaacctcctttgcagccaggttgggagagaaataaaggaaaagaagtaggggttggggtggagccaccagagagaagagcaggctgaggtgctgggccaggggcactgctgggcagagcacaagctgcaggacctgggagcattgctacttggcctcattgtgttgtcaccatcaccactgccagcataccaggcacagcaggggcagctcctgggtgtgaggcaagtctggcatctctaggaagtacaatcttctggtcactttggaaaaggaggggccagacgatgccagacatcatccatagaggtgagatttgaatccagcaccccgtgtagtgccaccagagtccctaactaaaggtaccccaggtccatattacaactacttgattaaagaacaggtttattggtgacctgagggagccaaggtctcctttgtgaccctcactcccaggtggtatcaggctgcaaggccctctatgggtagaaaagccaatcacatgatccatgggcattcctggcaagaggtcagatctctctactcctaattcgaaaacttccaaatcctgatttcagagtcaacagcaaggtcagaggctagagtcctgatgggcatggagctcaggaggctggcgagttgctcagcaacgtctgtggggctgcgcacatggaagtagaggccaggaagggaatgccatgagggaagcgctttgggatccggcatcaggcggccactggcatcgcgaccaccgatccagcagtcatcaatgttgaggtatgtgtagcccatgtcccgccatccatcctgtgccatccggtcagccatctccatgaagagctgttcacttatgcagttctttgggtcctcatcacagttaatgttgcagcggaagcgttcccaggccagccagcccatgggtggtgtctgcaggagcccattgtccagcatcagcacctgggccacatgtcccagcaagagcactgtcttcagcagcatcgctctggactcagcttcccctcatgccga

SEQ ID NO: 128676 - DNA, 1078 bp, Homo Sapiens
ctacttgattaaagaacaggtttattggtgacctgagggagccaaggtctcctttgtgaccctcactcccaggttggtatcaggctgcaaggccctctatgggtagaaaagccaatcacatgatccatgggcattcctgggcaagaggtcagatctctctactcctaattcgaaaacttccaaatcctgatttcagagtcaacagcaaggtcagaggctagagtcctgatgggcatggagctcaggaggctggcgagttgctcagcaacgtctgtggggctgcgcacatggaagtagaggccaggaaggccacaggaaaattgccccaaaagaagtttccaagagggtttacgcttggacagggcatagaacctggccgtgagattgcactttgggtatgatggggtcagtcaccgagcaggcctggggagcagagaacctccccacttgccctgggcatgccaaggctccatggtctaggctcagtggtgccaccacagcctgtcacatgtcccagctcctcactgctgggacatctccaggttcttgatgggatacaggtaccacatcactacccctgaagggttgatgatcactgtgaagttggtttcatctcggaggccactgatgatgtcacctgagtagacgtcctgggcctcatatatcacagacccggtgaagttcagctggccaagggaggagtggtagcgataaggcatatcggtcctgcagctgaagaagactaaggcgctagccttgttggacagaggccgcatgtacacttcgatgagagatttttccttgtgaatcctgcgtccctggatgcctaagggatcctggttgattttgatcatgagtggattctgcagaatgtccatgttctgggcggagatggtacgcaggtctgtggacatcaagaggggggctgccagcaccgtccacagggccatctgggcccgggattgctctaagctgagaccaaagttcccaatgagcagcatgtcagggtcattccagtgcccagggccggccactggctgcagtagtcctggtcccgaaattccggaccggtccagcc

SEQ ID NO: 128677 - DNA, 882 bp, Homo Sapiens
caggggttcattccccagtgccccaggggcccggccacctggctgccagtatgtcctgggtgctccaccgaacccaattcaggatggagagcacggctcccaccaggagtccttggatgtcatcatagttacgccagaggttgcagatgtccgccatgcagactgtaggttcaccccttggggggaggccgcctgtcataggctggccagctgcaggagaaggcgatggggcggcctgtggcattcagggcagcagccatcttggggtacccctgggcccgctcctcgggggtggagaagcagccatccagcttgagcatgtctaccttccactcggcgaaggtctgagcatcctggaccaccttgtccagtgtggtgcctgggtaacccatgcaggtgaagttgcccatgtccgcgtagatacccaacttcaggcccagggagtgaacgtagtcagccaggaaaggaatgccatgagggaagcgcttgggatctggcatcaggcggccactggcatcgcgaccaccgatccagcagtcatcaatgttgaggtatgtgtagcccatgtcccgccatccatcctgtgccatccggtcagccatctccatgaagagctgttcacttatgcagttctttgggtcctcatcacagttaatgttgcagcggaagcgttcccaggccagccagcccatgggtggtgtctgcaggagcccattgtccagcatcagcacctgggccacatgtcccagcaagagcactgtcttcagcagcatcgctctggactcagcttccgaggacctgaccagatctggtctgcgtgtatcagctgtatgtgttgggctcgaagcgttcagacctgccgccgcttctgactcgaatccg

SEQ ID NO: 128678 - DNA, 1706 bp, Homo Sapiens
ccgttccgagtggccgcgggagccacaggtgcccctctacgtgcccagttccacagcggctgggagcctcctgtggatgtgctgcaggaggccccctgggaggtggaggggctggcgtctgcccccatcgaggaggtgagtccagtgagccgacagtccataagaaactcccagaagcacagccccacttcagagcccacccccccgggggatgccctaccaccagtcagctccccacatactcacaggggctaccagccaacaccagccatggccaagtacgtcaagatcctgtatgacttcacagcccgaaatgccaacgagctatcggtgctcaaggatgaggtcctagaggtgctggaggacggccggcagtggtggaagctgcgcagccgcagcggccaggcggggtacgtgccctgcaacatcctaggcgaggcgcgaccggaggacgccggcgccccgttcgagcaggccggtcagaagtactggggccccgccagcccgacccacaagctacccccaagcttcccggggaacaaagacgagctcatgcagcacatggacgaggtcaacgacgagctcatccggaaaatcagcaacatcagggcgcagccacagaggcacttccgcgtggagcgcagccagcccgtgagccagccgctcacctacgagtcgggtccggacgaggtccgcgcctggctggaagccaaggccttcagcccgcggatcgtggagaacctgggcatcctgaccgggccgcagctcttctccctcaacaaggaggagctgaagaaagtgtgcggcgaggagggcgtccgcgtgtacagccagctcaccatgcagaaggccttcctggagaagcagcaaagtgggtcggagctggaagaactcatgaacaagtttcattccatgaatcagaggaggggggaggacagctaggcccagctgccttgggctggggcctgcggaggggaagcccacccacaatgcatggagtattatttttatatgtgtatgtattttgtatcaaggacacggagggggtgtggtgctggctagaggtccctgcccctgtctggaggcacaacgcccatccttaggccaaacagtacccaaggcctcagcccacaccaagactaatctcagccaaacctgctgcttggtggtgccagccccttgtccaccttctcttgaggccacagaactccctggggctggggcctctttctctggcctcccctgtgcacctggggggtcctggcccctgtgatgctcccccatccccacccacttctacatccatccacaccccagggtgagctggagctccaggctggccaggctgaacctcgcacacacgcagagttctgctccctgaggggggcccgggaggggctccagcaggaggccgtgggtgccattcgggggaaagtgggggaacgacacacacttcacctgcaagggccgacaacgcaggggacaccgtgccggcttcagacactcccagcgcccactcttacaggcccaggactggagctttctctggccaagtttcaggccaatgatccccgcatggtgttgggggtgctggtgtgtcttggtgcctggacttgagtctcaccctacagatgagaggtggctgaggcaccagggctaagcaattaaaccagttaagtctcccaggaaaaaaccaattagaaagg

SEQ ID NO: 128679 - DNA, 258 bp, Homo Sapiens
gtttggggagacttaactggtttaattgcttagccctggtgcctcagccacctctcatctgtagggtgagactcaagtccaggcaccaagacacaccagcacccccaacaccatgcggggatcattggcctgaaacttggccagagaaagctccagtcctgggcctgtaagagtgggcgctgggagtgtctgaagccggcacggtgtccccttctgtcgtcttctcgcagccgtatagtagtagtagtaggcggccgc

SEQ ID NO: 128680 - DNA, 581 bp, Homo Sapiens
cgttcattaaatatatatttattgaaggcaactatgtacctagtactgtgggtaattaataaaatacagactctgctctcaaggagtttacagtctaactagaggaaccaaccaagcaaaccattaatccattaaaagagcacaacgaatatcagagaagtgatgcctatggatgtaaaaggccaatgaacaagatactatgaaggataagcaacataaagccaaaggcagttaagatgaggtactgagcaaatattcaattagcacatctcagacacaagctgtagactaacagaccactcccaagcttacagcaggttcatacaatggtgtttattcaaagatatattaaaattaagatgaaggggcctggtgcagtggctcacaccttgagcgtgaaaaggctgattcggccaggcagtttataaaacaacccctctcctcctcttgaattggaatgtagcatagcattgaggcatgcgagaggggaagtcccacttctcatttcctttagtccttctgcctctatgacctgcagaatctgttttggtgtcattggagcatccgagtagttttctaat

SEQ ID NO: 128681 - DNA, 560 bp, Homo Sapiens
  misc_feature (150)..(150): n is a, c, g, or t
aggtttccagccttttattcatacaaggactcaaaagaacacacgtcacccgctgacactgagcggtggggggaccttgtggaggaaggacacagcaggcttggcactgccctgaccagtgaccactcagggctgccccttccagagatngagcgtagggtggggtctgagcgccacccctaggccgtctgtgtgcagcgggagtgctgctgtcctggcgcccggcatcactgtgccagagtccccagcccaccctggcactggcagggttattatggggtggacttgcctgtgttgggggctcctgattccaaaacatctaaaagtcaggttcccagagaacaagccatggggaccttgaccagcaaccggggacctccgtccaactgttgcgggaacggtgatgaaaagcaaagcagcactaagcggcctcctcagggtcagtcggttcaggaagtgtcagtaaatggatgcatgtttggaaaagcccttaactatccaggtcccccgtgcctgcagctggctgggtcgggaggggactaggcattccgtgtgcagtg

SEQ ID NO: 128682 - DNA, 1423 bp, Homo Sapiens
tttttctctctcctctcgaggcctcgccctgctgtaggtttccagccttttattcatacaaggactcaaaagaacacacgtcacccgctgacactgagcggtggggggaccttgtggaggaaggacacagcaggcttggccactgccctgaccagtgaccactcagggctgccccttccagagatgagcgtagggtggggtctgagcgccacccctaggccgtctgtgtgcagcgggagtgctgctgtcctggcgcccggcatcactgtgccagagtccccagcccaccctggcactggcagggttattatggggtggacttgcctgtgttgggggctcctgatcccaaaacatctaaagtcaggttccagagaacaagccatggggacctgaccagcaaccggggacctccgtccactgtgcgggacggtgatgaaaagcaaagcagcactaagcggcctcctcagggtcagtcggttcaggacagctgcccccagaccctccaagtcctcctccccctgcaggaccccttcccaacaccacaccacccctccccagggccacctggcagctggggcacaggagggaaggagggcccgtccaggcctggggcagggccctgatggcctcagtgagtgacaggaggtcaccagggtccaaggtgggccctgcggccctccgaagccatctgggaggagcgaacagctctccatgaacaaggacaggaagtgtcagtaaatggatgcatgtttggaaaagcccttaactatccaggtccccgtgccctgcagctggctgggtcgggaagggacctaggcattcccgtgtgcagtgcggggtctcaccagccaccagcatccctgtgagcaggtgacagccgagggtcactctgagccctgacctgtgtcaccgtgaacagggaggacctggttcctgatctgggtgaggatgggagcaggcgggtcctggctgctcctcagccctcggggtcctccaacagcctggaccccagcaaggcctgccctgtgagccctgtgtgcgaggggcagcccacattggcagagcccacgctgcctcctgggcctttgggcccagcttcccctcctccagcagaagcgcaggtgggtcagtggcccctcatctgcgcatggagggcccctcactgcaggtctgtgggaggacagtcctcagactcctcagcagtggtgctgtctcaggcgtcaccctgcagacgctggggcccctcaagggcgcagggaggtggggccgggctctgcagcctgcgctgaggggagggcatcatgcatcatctcagaggctctgccagacctggatggcgacacccagacagcccgtgcggggcctcgtgccgaattcgccacccagcctcgctaccttaaaaccgttagtagttatggccgtt

SEQ ID NO: 128683 - DNA, 1533 bp, Homo Sapiens
ttttttggcagtggcaggtagattttattggcctgggacacacaggggataccctcacccacgatggggtggggggtgtggtgttgaagatataatctgatggtcacttgtggtagaatcgcgggttctggctgtgttggatgaaggggagccgagggccaggttggctggtagctgcaaagcccgactttcctgctggctgcatctgcacagggagctggggggaagcaaggagtccaggggctggatgcagagcctgggggtgcatggggcgcagagaggatgagtcggagaagccagtctgctggttagcatgttccatctgcttttgcaaggacagggcaccaccaggctggaggaaacctgtctgagtgggctgaaagtggccatgcacagcatagggctgtggctgtggctgagataggtactgcactgcagggaatgccgaaggagctctgagctgctgactaggactataagctggctgtgtgggcccatagtgaggtgggggctgagcagtcccataggcaccaccaggactgccttggaattgtccatgctctggtgtccctgcaaaagcagctgctgagcccacgtagtgccgggtcgtaagcacttggggtccaacatttgtttggctctgtcagctgccatgagggtgcctgggcgattgtgtcctccagggctccctagaaagggagaagggcttcatgatgctgaattgttggggtctgtgagctgccatgagggtgcctgttcgatctggtggtttctttagtgctcagcctgcatgctgaggagatgagttcctgtgtgaacagtcaggctctgctggtatgcagctgatgtcagggtggtcaggtcactctgttcctttcgcctccgtttttcttcctcatgtaaaactttcttgagctgcaggaaaagctggtgcttctcttcctggtagagccaaaagcttctcctccaacttcagaatttgttccttggtctccgtctaatgacagttctcgtcgttccagtcgtccgtgttgtgtcgttgccgttcgtctcctgttcgttccttcatcttcgtgttccatcatcttatccacctcttcttcctcctgccgcttgcgctcccgctccatcataatgtgccggtgcagcgccctggccatggcgttggaaagcttggggcgctccaggagtgcgggcatggtgctgccgtgggcgctcgggccgtgggcgcccggctgtctctgactgccagacctcagacggggcctgcggggaggcgggcgctcagagggggccgcgcccggcccaggcggaagcccgtccgcccggcccgctcgccgccccggtcacgtgtcccaggagcccgccacccggccgggaccgcagccccagtcccaccgcgcgcgggcggcgccggggtccccggctcgctgctgccgctccctgcccagcccgacgcgtgggtcgacgatatcccgggaattccggaccggtaccagcctgcttttttaaccctggtcatagtacatgccg

SEQ ID NO: 128684 - DNA, 822 bp, Homo Sapiens
cagtggcaggtagattttattggcctgggacacacaggggataccctcacccacgatggggtggggggtgtggtgttgaagatataatctgatggtcacttgtggtagaatcgcgggttctggctgtgttggatgaaggggagccgagggccaggttggctggtagctgcaaagcccgactttccctgctggctgcatctgcacagggagctggggggaagcaaggagtccaggggctggatgcagagcctgggggtgcatggggcgcagagaggatgagtcggagaagccagtctgctggttagcatgttccatctgcttttgcaaggacagggcaccaccaggctggaggaaacctaggtggggaagaggggcatgtgagatgagaatgaaacagggaggggaggacctgagagctagagctccctgcatgggatgttatcacctgtctgagtgggctgaaagtggccatgcacagcatagggctgtggctgtggctgagataggtactgcactgcagggaatgccgaaggagctgagaaaggaaaagacagagccattaaaatcttttactgaatggcattcctcctttgaccttgaggaaggccaagccccatccctcctattactcacctctgagctgctgactaggactataagctggctgtgtgggcccatagtgaggtgggggctgagcagtcccataggcaccaccaggactgccttggaattgtccatgctctggtgtccctgcaaaagcagctgctgagcccacgtagtgccgggtctaaggaaggagaatgagaactcgcctacaactcc

SEQ ID NO: 128685 - DNA, 1393 bp, Homo Sapiens
ggttttcggggattttgctataggcccgtttctcccgtgcttcgttagtgatggtaaaccgagggggccgcggcgcattaacgcgtttttggtgattgtctataggactataacagggaaaatggggaaagcctctcccaagggcccggtggggaacatagctttcaccgacggggaccccggtttagaaggccctcggccggggttcgccccccgagaaaaggctaaaaataagagtgggaatgaatgtttgaggtaaaaacccgtttccggcgccttagtgtttttccgcgggaagggaatgttgactcgggaaatatgcgcccggcgccaatggccccccgagggcgccacagaaaggtttttgcctcgcccagggggcgtaggaagggacccttttttgcaggctggaaccgggggggaggagtaaaccctcttggttaaggggcaggtgccagaaaggggaaaattgttggtgtggggaggccccccacgcagagttccttgttgggggcactgcctagttggagctggaagaagaggtccaccgtcctccagacccccagaatggtagatccacgtacagctggcaccgtgcacctggaaaagccgcaggctctgaacaacagccgtgaaagcagccaggagggaggctgtaccgtacaaagccacaggggcagagctgcgcaagagcatgggaacccacttcttgcatcagtatgacctggatgtgagacctggagtcaaaggagattattctggagctttaaaattttactgccctgctggatttcggacttgcatgggctctgtaacccctttgttttggccaatttctcccatttggaatagctgtatttactcaatacctgtacccccattgtatctaggaagtaactagcttgcttttgattttacaggctcataggtggaagggacttgccttgtctcagatgagactttggactgtggacttttgggttaatgctgaaatgagttaagactttagggggactgttgggaaggtatgattggttttgaaatgtgaggacatgagatttgggaggggccaggggtagaatgatatggtttggctctgtgtctccacctaaatctgcatcttgaattgtaggctcccataattcccatgtgttgtgggagggacctggtgggagataattgaatcatggggttggtttctcccatattgttcttatgatagtgattaagtctcatgggatctgatggttttataaggtgaaacccctttcccttggttctcatttctctttttttctgctgtcatttaagatgtggctttcgccttctgccatgattgtgaggccttcctagccacatggaactgtgagtccattaaacctctttctttttt

SEQ ID NO: 128686 - DNA, 664 bp, Homo Sapiens
gtgtgacctggatgtgagacatggagtcaaaggagaccattttggagctttaagatttgactgccctgctggattttggacttgcatggggcctttagcccctttgttttggccagtttctcccatttggaatgggtgtatttagccaatgcctgtacctccgttgtatctaggaagtaactaacttgcttttgattttacaggctcataggtggaagggacttgccttgtttcagatgagactttggagtgtggacttttgagttaatgctgaaatgagttaagactttgggggactgttgggaaggcatgattggtttttaaatgcgaggtcatgagatttgggaggggccagggggagaatgatatggtttggctgtgtccccatccaaatatcaccttaaattgtagctcccataattgtgggagggacctggtgggagataattgaatcataggggcagtttctcccatactgttctggtggtagtgaataagtctcacgagatctgatggtttaataaggggtttccccttttgcttggctctcattctctcttgtctgctgccatgtaagatgtgccttttgccttccaccatgattgtgaggcctcccagccacatggaactgtgagttcattaaacctctttttcttcataaatt

SEQ ID NO: 128687 - DNA, 1473 bp, Homo Sapiens
agtatacattattcttgaacagaagtggaggctattaatgtgacaaaaaagtggcttttaaatgcgtttaaccaatgcttaagaaccgcaaacctaactctatctaacatgtaattgttaaggaaacacaattattttgttaaggccccaaatactgaaaatatttacttaaaatgtttctcccctcagttggcagaatctatttagtgactcattatctacaatttttttaaaaggatccatttgaagagcaatacaaaatattagaactcaaaggcctgacaaaatgaagttatactgctgctattcctcactttccaaaaatgtgcccttagatatatgtctacttacaaactgaaatcatggattttgtgaaaaaagagggaaattggcataggcataagtatttttaaataattttctccctcttattaaaaaacatttttaggaatttaaaatttgagtaaaatgtttcaacagtttggtatattttcaacggcttaaattattttttaaaaattgaaagaaaagtgaaaaggaagccaggaataaagtaaatcatagtaataataaatcaatactctttaaatacacaaccagaaagcctgaatcatattcctgtttacccccacccccttgtttaagaaaagaaacaacccaaggaatttgtataataatttctttagagcactttatttgattcaatatgcattaaaaaatattgacctcttagacaattacgtgaaataattttctgagtagtctactctctgaactgcttaaatgaatttttaaaaaggcaaataaatgatttgccacaaatctgctgacttctgaaaaatatctaacagcaaattcttctattttggtctctgaatattctaatgtgtccatacaaaagtaggactaaaatctttaatcaaacaaaagagaagcctgtaacagtgtagaacacacattttgaatctgagcatcacaaatgaagaaaagaaaaatgaaccagagccaagttggtttatcggcctcgggtgctgtaattggggtggtaaaggtgggtttactccagtaaccattcaagtggggattggctcattttcaggatttacttacaggtctcttctaagtcctttaagcccccagtccatgcaaatgtcccacttggtggacagatgagtaatctaaccccaccgggtttatttcaatatttcgatatttcaataataagctgcttctgaagattttttgagaagtctgttctctattaaaataagatagaacctcaaaatatgaatgtgaacattagaaatagacagcatatattacaaatccattcttgataggaacattagtaagaatacacattagcttaaaaaacaggctcagcaatgttgctgatctgccaaagttttagttcactatttaccccggccgtaatggccgaattcccgggcatatgtccggtaccgtcgactg

SEQ ID NO: 128688 - DNA, 747 bp, Homo Sapiens
  misc_feature (49)..(49): n is a, c, g, or t
  misc_feature (88)..(88): n is a, c, g, or t
  misc_feature (156)..(156): n is a, c, g, or t
gagtgccaggttcacagacaggtttcccaccagccacacgcaccagctntatttgggggaagtgtagtgaggagagcccagaggaccncaggggagtgaggagggagaacttggaaggtgcagcccacttccagactctcccctctcccacccttntaccctgtgaagggaaatgagggctttagtttcctgggcagggaggggcagcttctgaggttgccaaaggcccccactggatggaacctgttagctgctcctctccgcagccagaaatgctgccggctgcacccagagggagcagtgaggcaggacagatggacaggttcctcctgcgctgtaattccctgctccctggagactgggaaaaggccgcagggcagggggactgggcggtggtggctggtggtttaaaggttgaactttctctgaagctcctttccccttgctcttggtccctgccccgcaagcaaacctgccccctctgcctcccagtgcacccaatgaccccctcccttggggcgactcctgatgaagcacaactccccgcagggcccccagcccacaggggtggccatatttgggcagttcccagtcctgtgggctcggctatctggggagcagattttgggtctggatctccctggggagtgggtcctgggcttggatctttccctagggggccctcttactccttcctctctcctcctccttccccattgctgtaaatatttcaacgaaatggaaaag

SEQ ID NO: 128689 - DNA, 636 bp, Homo Sapiens
  misc_feature (484)..(590): n is a, c, g, or t
ctgattccactctcactaaaagccagtgactttactatatcagcaagtataaagcactacttgactctgtagattgtatggacccaagaatgtagatatgagacagctgatctctacgaactgaatttttagtgagtaaagcaagcaagcatgtaatagagaacaataaaagctctgatagacatatgtacaaggtgttgtagaggtacaaaggaaagttattcagactaggcaagagagtgattaaacttaagtattgaagaacaaatagatcatagctctaggggatgtggaacatacaaagtggaaagtttgggaagagtattcccaaggcaaaaagcttagcacatacaaacataggaggaaagcgagacactcttataagagttgctatgctttgggaggtggaggcgggcggatcacgagatcaggagattgagaccatcctgtccgacacagtgaaaccctgtctctactaaaaatnnnnnnnnnnnnnnnnnnnnnnnnnnnnnnnnnnnnnnnnnnnnnnnnnnnnnnnnnnnnnnnnnnnnnnnnnnnnnnnnnnnnnnnnnnnnnnnnnnnnnnnnnnntgtgccactgtactccaacctggcaacagagcgagactcttgtctc

SEQ ID NO: 128690 - DNA, 1626 bp, Homo Sapiens
cagttatgaaggtaaagatgacctgtttacatgataatattttaagataccagtgactgcaagcatgtagttattaagtccattacagtgcacatttattgactctgtgtatcttcacagtgtgatcttcaccacagcttgcaaagtgtaaccactcagcaccttctgcttccttctgttcagtttttccactgcaattcttccagcataattttctgatagccagtgtatgactttggctttgacttgtttctacacagtgggtccagtcatttatttctggaacttgatcagtctttttccaggtatataagcaaatctttccacactccaatcctactgcaaccacgtatcgttgagaagggtggagcactgggcagacgctgacagctgtcacagccccacccacgtccaggactgaggagcaggggccaatgttgtgctcaatacagtcatcagtggagtcacactcaccccagacaaccacctttttgtctcgactcccagtgaagaaatacttgctgtcaggactccaatcacaagaccaaataattctactgtgcacagaagtaattttgttggtgaaggcaaaaagactaaaaactggctcgaactcaggtgagattgtatcctgctttttccacaatgaccaggttcgatctctggaaacagctagtaagaacttctcattaggtgagaaggccatctgcgtgactgtcaaactgtggaaaactaaattctgcacctgtttccaagatgtagtgttccaaagaatgatagctgcatgctctttcttagctgccttacaagctgaggcaagcagagtctttgaactgttacaagtaacacaaaatatttcataaccgtgcccatatagtttttgaacttcaggccacaaagtattctgcagaagatgatcctcagtgggaggctcagtaagtatggagggctgaaaggccacctgctgatactcaaaaccagtactagttaacagctcctcttcatcagaaggctgagaagctatatctccctgaaagacagctttatttgataatcccaatgcagggacagtggctccttctggaagatcactatcttgattacagagcacatgattcagtgattgtcctgtaatggcacaaaaattttccacaaaattccgaggtgcagaaaaaacccgaagaactttttcatctgctccagatacaaactgaaaccgattaatcattgccaaacatttcaggtcatacccatgtatctgaggccttgcaatttcatgccaagtcacctgtgattggtcttttctcttccatggagcaaaaagtctagttgtctgatcagtaccaacagtgataataaattctccttctggatcccagactaggtcttggacaccatcaaagtgtcctgaaatgacaatctctggagtccactctcttgggttaactgtattctgtttccaaaggtgcaacgctccgtggaaagcatgagcaatgatcatggagccatcttcattgaactggcaatcataaaatcccaaagtattcccacctacttcacctactcgaacctgttctagccaaactcctgactcttcatctggagcccagagaatcatgttttatc

SEQ ID NO: 128691 - DNA, 683 bp, Homo Sapiens
  misc_feature (554)..(554): n is a, c, g, or t
  misc_feature (581)..(581): n is a, c, g, or t
ttttttttgaaagaaacagtgcagttttgttgctcacagggacccgtccccacacactggagagacttgaaggtgggggctctgcccatccactggggaatatctgggccagcctaaaagtctgtggggcctaggcctgggcaggctctgggggctgtggagccgaggagccaggcagagcggggtccttgggggccaagcccatgcgtcggatgctgtcctggtacttgcggcggccgagctccaagactgcgcgcacctcttcagccacgtcctgccggtcactctgctccagggcctgcaccaggagccccacagcccctggctgcccagcctggcgctcagcccaggagaagagcatgtgacggatctgctcatccagatcatcccggaactcgtgccggatgcgctgcacctcccggtaggacacccccaggtgcagggccacggctggccagtccagacccagacgcccagccacactcagcaggttgctctgcgtcagaaagccggtctcggcatctcccagattcaagggtgccaaggagaggccnccccccgccgtggcccctcggacctcngaatctcggcacttgatgggcagagtggcatccacagggcgtctgcgccttccctctgcgggcagctcagctcctcgggcaccgcacaggcacgcgcacggt

SEQ ID NO: 128692 - DNA, 1316 bp, Homo Sapiens
  misc_feature (438)..(469): n is a, c, g, or t
  misc_feature (509)..(527): n is a, c, g, or t
  misc_feature (557)..(557): n is a, c, g, or t
gcgacccgcaccagagaagacacgatgcggggctgggtggggcgagagagtcggcgggcggtgaaacatcgcgaggggagaggaaaaagggcccgcgtcaacaaacgtggtggggtaaagagaggaaaagtgctcgcggcggggcggcgatgatagcatgtaggagatcggaggggtaatccagcgagggtgagagcgagacaagccaatacactggggggtcaaggacgagggggttactcatggtgtgggagaaagaggcggcggcgataaagcgattgactgggcaggccggtcagctcaggcgagcggcggtcacccgcggagccgactggtctggttgggtggagggaaattggggtgggcaagccggggctattcacacagcaagacgagggggcttacggcgcggtcaaacctctgcggagcaacgcacannnnnnnnnnnnnnnnnnnnnnnnnnnnnnnnactagttgattagtggggtgggtcgtagtgcggcactgtnnnnnnnnnnnnnnnnnnnacagaggtgttggatggggtttgattttcngggtttgcttagagaaaatgttttattttcattagttgacaactagttgttcagttgaatggtaagtttcacactgcatcctaaaataagacagatactctgctggcaagtagaaaatagactaatttcattttttatctgttaagctctcttgataaaaaaggcaaaccaggccagttttaaatttaagaaacagaaacattgtcagtgcttcttgtatcaacacacttcatattcagaactactcccaagagataacatattatctccttttcaaagatggggaaactgaaactgggcattatctataatgaccaaaccacatagtaagaggcacaagccagcattagaattcagatcttacttgaaagtgtacagcttaaaattttttaaaaaattccttccattataaatgtagtacctgcttactggagaatgtttggaaaagcagtaagaaggaagaagatgaactcatgatcctgactcccagtggtagccagatcaatgttttggtacatactttccgatactctgctatgtgtattttttaaagtgtgaatacatggtatatcaaaatggatgtatcagttttttaaaaactaaaatctgattttaaaaggaaagcatatagaaaatctgaaaaatactgatataaagaaaattaaagtcatctagaattccattcatccaaaataaacattgttaatatcccggccgtaatggccgaattcccgggcatatgtccggtaccgtcgactg

SEQ ID NO: 128693 - DNA, 570 bp, Homo Sapiens
  misc_feature (130)..(163): n is a, c, g, or t
aaatggtatttgttagtagtgcttcttccccttaacatttacagtgtaaatactgcaggtaaccgcaatctaagttagccaaaaagcagctttttttcccatactgtatgtaaataatgtagacctgggnnnnnnnnnnnnnnnnnnnnnnnnnnnnnnnnnnaggtactggaatctaattaatatctcttaggtatcaacaaaagggaacaattggaatgagaatttaggccttagcttccatggtgatttttagttttttatacagtaataattgtgatgctatttgtcaactggatataaatacacatataattttaaaaagtcaaaagtgcttttgtttctttgtttaatgtaatttttgtgcttcacctacaggatgctgcagtaaattaaatatcagtgaagcttctgatgtataaagaatgctatgaataaaacattaagaagctgtgtaattttaagttatagttgcctctatttttaccatttcattggtaaaaattagctaatttttttcaagtgaaatgaaaaataaaaatataaatttatcaatatgatggaaatctt

SEQ ID NO: 128694 - DNA, 1169 bp, Homo Sapiens
tttatgattcatatgctagtttatttatcttattattgagagataatttcatgatgacagttatcaataatcaattacaatatcaagaaattcaaagaacaaaatcttgcagagactatgcttttgtatttggatttaaaaagtatgtgatctcattttcacataccaagctgagaggccatttagactatctctttgctaatttttgcttactgctgtagggaagaagatttccaatgaactttaaatatctcattcatgtctaccattgtcgaaaaagagaaggaaaacgaggaggccaaaagaagcagcaggacagagaaaacgccacatggattcaagagttgagacaactgacagtaaaatatatgctctttggttagcaaagcaaaaagggggaaagtattgcatacatgatagatacacactagcattctaaagcaggagacaagaatgtcaagagtgtattctacccccactgccagatggaagggctattattataaatgaaaggcagcagtagtggatgccaggcacttttgttgtgtgccagattctaaagtccagatgtaagcaggttacccctgagacaggacaggcttcagttcccgcagcagaacagagccaatcacagttttctcagtgtttatgataagctgggctgtagagccttccttcagttccactgtgactagcatcaatgacccactgtgcacagttttagctgcaaacctgtgtatattatcctggccagaagggactgcacctacattggctacatttacaaccttctgaaagatcacagagggagtgaaattctgtggtgcagcaatgattacagcagaagtttcattcattcctgttagcactccttgctctttcttaaaatctttctctgacatggccacaggtaaaagcagttctccaacaggtggctgaatattaacattgaagcaatcatccttggtacacaactggaaactggcagtctgagtagaatcacaaaagtcaatacccattgaaactgtaatggatccctcaggctcaagagagtctattggattaaaaacatgcattttcatgcctataggaagttttttttcccctatgtggaatattttctatctttcgatcagtaggtcctcgtccgaattgccacccaggcgtgc

SEQ ID NO: 128695 - DNA, 1143 bp, Homo Sapiens
  misc_feature (985)..(1010): n is a, c, g, or t
tctgacctggaccctctgcatctcagaaaggtttattatcaattgaaggaggtaacatgtagcctttgctggggacaaagatgcaacaagtctctgccccatcctaggtgctgccccgtgtagggctcttcccaggcccgccccccttgggcagcctggtagcgctgggctggcgtggcatcctctggctggatccttcgcggttgctgcgttccgccagggccaatgctcccccgagggcagcgctgcctttgtttctccctcgggtctcgggcacgctcgacgtgggcagagacacggccgcagggtcctggggctcgctcgctagcctctgcccggcacacatggacttgagcatctggaagacggcgaggggggccacgttcagcttcagcaggtccaccaggatcttgaacacgtcggggtcgatagcgccgcccgccgcctgcgccagctcgtacagctccatctcctcggtgctcagcaccttcttccgccgcagcgccagcttctgccgggccgcctccagccccgggggcgccgccgaccccggcccaggccctacgccctgcgccgccatccccgcggcccgcggaaaggtgcgctccgccccgccgcgccccctagcggctgcgcccaccaccctctccctgcagcgtcaacgtctgggctcccgggctgccctggcgggaggggcgggagcgcggggacggggccggctccgcggcgtcattgaagcccaacagttattgggcgctcacggtgtgctgagcggcgctctaggagccgggagtggcatggcgggccgcaggggtccgctgcttggcgatctgggcctccctgatagactgcattggtcgtgctcgcttaggtggcagcacccagcccagtgccaggcatacattgggcgctcggtaaatgcctctttcaagaaagcgtgcaattttctggtccgcaccggtgcaccactaggggtcgcttttcnnnnnnnnnnnnnnnnnnnnnnnnnnactaatcaacaatactgcttacgcgcacgcggattccttgctggggagaaagtaccttggggcgccggaggccgccacaacgcaggcgcattcagctaaggaccactccctcccccgcactcctgcctcgcca

SEQ ID NO: 128696 - DNA, 847 bp, Homo Sapiens
  misc_feature (266)..(294): n is a, c, g, or t
  misc_feature (297)..(356): n is a, c, g, or t
  misc_feature (358)..(363): n is a, c, g, or t
ctgggacctcccggttgagtaggaacccagttaaatggccctcccgaaacccccattttggaatttgttcacgaaccccttcgttttccccccggggcgtttttttattggggggggaatcccaagccccttaattcatggcccagggttttcccttgggaaaccagctatggcccatgttccctttacctaacgggggcccgcgcgcccaaaacgaatggtttagagaagcttcttcgaggggccgaggggcggccgaacaaggnnnnnnnnnnnnnnnnnnnnnnnnnnnnngcnnnnnnnnnnnnnnnnnnnnnnnnnnnnnnnnnnnnnnnnnnnnnnnnnnnnnnnnnnnntnnnnnnttttgcatctcagaaaggtttattatcaattgaaggaggtaacatgtagcctttgctggggacaaagatgcaacaagtctctgccccatcctaggtgctgccccgtgtagggctcttcccaggcccgccccccttgggcagcctggtagcgctgggctggcgtggcatcctctggctggatccttcgcggctgctgcgttccgccagggccaatgctcccccgagggcagcgctgcctttgtttctccctcgggtctcgggcacgctcgacgtgggcagagacacggccgcagggtcctggggctcgctcgctagcctctgcccggcacacatggacttgagcatctggaagacggcgaggggggccacgttcagcttcagcaggtccaccaggatccttggggcgccggaggccgccacaacgcaggcgcattcagctaaggaccactccctcccccgcactcctgcctcgccatttgtcttc

SEQ ID NO: 128697 - DNA, 630 bp, Homo Sapiens
  misc_feature (53)..(75): n is a, c, g, or t
ttttattggaaaattaatatatttacttttccaggacctactgcctggctgtnnnnnnnnnnnnnnnnnnnnnnncaaacaatcttgaaccctttgtcacgagtcagttgccaagagaagcctatttgttggtttgagagcagttcatgcagacacagaccacttcctctgagaattcatttgcttccccaggatggaatctggctgggcctctgaccttgctggtcacgtgggccggggctccatcagtcataccctggactcctatctgtgtctaaacaccacgccccacccccaactgcacggcagccactcgcatagcactctgggagggctgtgggcatgagcagcgaggactccatcagcagctcccccacatgagccctgctgatgagggggcttgcgaagcagctttgatgtgctggtaaatccaggtgcaaaacagaactcaagttaaggcctccgcacagcactgcgttctaactgtgaaggtttcttactctagtgtcctgtgtggaggtattggaattgtccattgctaagactcagaggagaaaagcacttagcatcgcaggacttggagcaccggtactgaggcacccttcattcattcgtcggatgtgtgttaag

SEQ ID NO: 128698 - DNA, 801 bp, Homo Sapiens
tttttcactagtactcaacattcattgtatttattttactaaacagtatggttcaaaaaaacacaaaccggaaaacctttatttaaaactagtccaactaactggatggggctcactccatcccatcccacccccgatctttctatatatatggagctggaaccctatcagacagcgagcattcacgtacactttgtctttcctgttgaacatgaataaacgtctttgaacataaatgaacttctctgaaccaaaagaaacaaatgaagttttacaagatacaggcactttatgttcccagttttaaaaataagccaagtgaaaaatatttaataaaaataactggagcagagaaagctttaggagttataccattagttcaaatgacttacactcaatgcaaatagacagcatcaaacaggaaaacaaacaaaaatttaactgaggttaatggtcgtatttgtaaaaaaaagatatccaatttaccaaaattggagaaaaatggccatttgaatccaacttaaagatacgccaataatgtgcattacatctgcgtaactatgcagctgagtaacacctgaaagctctgcaagagtgtgtggttagtgagaaaagcaaaaggtgcttttattccacagtatctgattaaacaaaacaaagcaatttacaaaaaaagtaccaaatgatactttaaaataaatagttcatcattttgatgaatatatacatgttaagtccacttcctggggatttagctatctaaaagtggcatatcactatccagaggtgcaggagcaagtt

SEQ ID NO: 128699 - DNA, 1962 bp, Homo Sapiens
aatcaagagataagtacttagctgcaagctcaaggtctcggttgaggacaatcattatgagtcctagtaaaagacaaccagttttaagaacactgtcaggcaagctaccatgtagttctccttgactccatgcttagctctttcagacttcccagtaattacgaagggtcacatttttgttcagctttgcccagtgctgtcattcataatagatgaatgaaaagtcccagaaacctgttctgtttgggaaggttttcttttgttccaggcttcggtggttaatatgcttgacaaatttcagagtctctctgtctctgtagaccaatgccaaagaattgctttctggattcactgttagcagctcttcatcttcacctttggcaatgtaagaagtaaaaccgccatattctggctcccagccttcacagccacagtacagaattaagtctagggcaaattcagccttgctatggtcatgaattaaagtgtagtgaccggtcttccaatgcctcagttccccttggcacatgggaacacttgattctttctttgtttcattttcctctggctctgggtctgtctgctcattgctctgttggctgttgttgctgatggccatctgattattctctggctcaggaggactatggctagtcccttcttcagtgatatcagtggtttctgcctcttttttatcattcatctcatcttcttccgaaggggccaagaaatgaagcttccggcctgtgaatttggagagcagcaaagaatagtgcctcagagcgaaataacttcatgcactccttcaatatctcaggaagcttactctcctcagctttctcataaaaccttttgttagggggacctcggctgctccattccacatgtccatgctccaaggcctcacagactttcgtgaatttctcaggcttaagaaactccttcaggagaatttcagaactttcttcaaactcttcttgaatttgaacttggtaatccatgtccagataagtagggttgatccaatcatacaaaatctcatgatcttgtgggatgtgagggctccgaggtatggggggttcaaagtagttgggaggcccgagtcaatgatggaccatgaaaccagccacttattagacaaacgtgacttttcttcagacagcacttcagacacctggtgaaaggacacaggagatacttcaaagaaaacccagtttgttccacgaagggataagagacttgacaatctgcttcggctgaaagtgttcatcaatgctgtacaggtccagggtaccacccatgctcctgtcccagggaggaaccaggtacaggatgaaggcaatccggcgcccttccagctcatcatcatggcacagcagggcatcagtgaattcatatttagcacaggacatgtcaatggttgattccaggtcaattttagaaatatcagaaagccaggaccggaaatcttcaaacagaattttccttaaagtggagatgtgaggctctcttctcttcttcaaatcatcagactgctggaacttatataaatcattatacttctcatggaagtccaagttcatcagttccttctgaagcccttctaagaagtcttggctttggatgaagtttgggatcacacagtgaagaaaagggtccatgtccatgacaatgacttcgtgactgaacggcgtcctgcggctccaggcctcagccacctgctttttcaaggtttcttccgtaacagcgtccgaaaactccgccatcacctccttctttcccttttttcccacccgggctgggccgggctccgctggccgcttcccattcatctcttcccaaggcacagaaccacgccacgcagatcaagacgctaccttcctgagggtactgcaactcccggcatgtcccccccggccgtaatggccgaattcccgggcatatgtccggtaccgtcgactg

SEQ ID NO: 128700 - DNA, 758 bp, Homo Sapiens
  misc_feature (638)..(638): n is a, c, g, or t
  misc_feature (685)..(685): n is a, c, g, or t
tttaacatctttacattttaatgaaaaagtagataatctatttgaaaagtacaaactcaattgcaatttcaagaaaaaaatatgtatttatataccataaataagcaaaattggactctgaagccctaatacttcaaaagcattcatcctattccataaaaacctagtattattcagcaacagtactactactgatttaaaaatagaaagcaagtctatcttcacatgtagttctttgtctttaatttgtacaactcaccaaggttattttcattcttagcacccggggttcaccagggtgtgatccaaagcaaaccagcataggtttttaacagaaaatctttgccaggaacttcatgacctgtattttcctcacctaggaagaagctgtccccactcgcatgattttgaacagtgtgttgatgttattgcttcgaattgcatcccgacaagcagtgatcacctggttctttggttttccaacccgcagacgacctgctctttgaattgcttgatttactgctttgaggtttcccaacagctctgtgtgattgttacagcgaattttatatccatttagcaagtctctattaaggtcatagagttccatataacgactcttcattgttttcatgtcnctcatcagacgagcatcctcagctccgaccagcaaacttcggatcanattagaatgatcagccatatcagcactgagcttctgatgcactgaatgatattcatccaccttaactagcact

SEQ ID NO: 128701 - DNA, 1054 bp, Homo Sapiens
  misc_feature (43)..(109): n is a, c, g, or t
  misc_feature (827)..(827): n is a, c, g, or t
  misc_feature (854)..(854): n is a, c, g, or t
  misc_feature (859)..(859): n is a, c, g, or t
  misc_feature (897)..(897): n is a, c, g, or t
ccctcaactaaagggaataagcttgcggccgcatacgcggtcnnnnnnnnnnnnnnnnnnnnnnnnnnnnnnnnnnnnnnnnnnnnnnnnnnnnnnnnnnnnnnnnnnnaatcaagagataagtacgtagctgcaagctcaaggtctcggttgaggacaatcattatgagtcctagtaaaagacaaccagttttaagaacactgtcaggcaagctaccatgtagttctccttgactccatgcttagctctttcagacttcccagtaattacgaagggtcacatttttgttcagctttgcccagtgctgtcattcataatagatgaatgaaaagtcccagaaacctgttctgtttgggaaggttttcttttgttccaggcttcggtggttaatatgcttgacaaatttcagagtctctctgtctctgtagaccaatgccaaagaattgctttctggattcactgttagcagctcttcatcttcacctttggcaatgtaagaagtaaaaccgccatattctggctcccagccttcacagccacagtacagaattaagtctagggcaaattcagccttgctatggtcatgaattaaagtgtagtgaccggtcttccaatgcctcagttccccttggcacatgggaacacttgattctttcctttgtttcattttccctctggctctgggtctgtctgctcattgctctgttggctgttgttgctgatggcatctgattttctctggctcaggaggactatggctattccttcttcagtgaatcagtgggttctgctctttttatcatcactcatctcttccgaggggcangaatgagcttcaggctgtgagtggagncagangatatgctcagaggaatactcatgcatcctcatatccngagctatctctcactttctcataactttgtaggggactcgtgtcatcacagtcatgtcaggctcaaacttctgatctcaggtagaatctcagaaattctctgcgatctggccaggcaatctaagggcgatatcgacagtcacttcggggatgttccc

SEQ ID NO: 128702 - DNA, 761 bp, Homo Sapiens
  misc_feature (236)..(271): n is a, c, g, or t
  misc_feature (729)..(729): n is a, c, g, or t
tttgttttccatccataaattttattcccgatgcgggacagattccttccatccccaaatgaatcacatgctgccctggaaagacctaggaaactctcctaccatctccagagaagtagtgagaaaggcaggtgctggggactgggaaggctttgaagtttcccagcctacttatcctccccttctcaagagaggatagctgttccctattactcctctcatccactcatcccttnnnnnnnnnnnnnnnnnnnnnnnnnnnnnnnnnnnnaaaaccccttcaagtattgggggttaggggttctgggctgggacttggggttatgggtcaccaatgaaagagggaggggaagaggaggaggagccatcactgtttctgctgcagggcttccttccttgccgcatcctgtagcaactgtgtgtcgacctcatctgctggcagctgcacgtatcggaccactgagccccgaatgaagcagttcttcactgataacatgtgagggtatttctcagggtctgtgacactgatgtcagttagtttgatgttgagatactgatccacagaatggagggttccacagatgctcaggtcattctttagttccacgaccacatccttgcccacaagggacttgaaaaaagaatagaagagcatggtgctggcgccgcgggcagcgggccggaccgggaagacagcagggtgctgcgagcaggtctggggaaacgaancgcgagccgcgcgtggggcgaggcgggacgcg

SEQ ID NO: 128703 - DNA, 1358 bp, Homo Sapiens
  misc_feature (1120)..(1146): n is a, c, g, or t
atatttaacaatatatatttatatatattttctaaatcagtacattcagtttttaacttgtttttttcttcacaaacagaagaactcttacaatagtagactttctaaaataaatactattaaaatagagcttcaaaataaatattctatacaaagaaaacctgtggcaactttgtggtggggtggaaatgggctacagtgagggggaaatgaagttgggatgtggcggggtgggagcctcgagcttttctgtttgtaacatgaaaccaagctgtgggacagtaagaagagaaagcaaggcaagacactgcacgcagttacccacagcagaaaatggcaacgcaagattcatcatcgactgtcacagtaagcagagggggcacaaaaatgcttgtcaaaggcatgaaccagaaggctagtgaggctcgcaggatgccctagtgaatcgtacagtgtagagctgtgctgcccacgcccgccagacacttcctgggacagcacagaaggagaacaggatgcttcaaggtgacagtcatccgggttctggtgcagatcaactttcccacgtgtgccatcttggacaagtcattatctagctggggctcactcgaggtatgatggcgactgacaggctccacaaggctgaaaagaactagccatgtcttccatctcagctctgagggggtgcgtaccaaaggaccaaaggaagggattggtcttcacccccttcctgctcaggaaagccttagttgtgcccatcttttctctgggagggctttgctacccaagacccagttcccagggtgctcgcggaagcgctgtccttcattaacacgggcagccagagccccctagaagcgtcctggatcccaggtgcccctcgagttaagacagaacccccacctaccccaggtttaccaggggcgggaactaaccagcacttttcaaaaaaggtcaagccgaggcatcgtccagccaaacaggccattggtgacaggaaacacactcagccagaagcagctacacatgtgtgttgtgtctctgagtgctgggtccctcagtggctctcgactggccccagagccggggagggtccacaggcaagccagtttatccttcnnnnnnnnnnnnnnnnnnnnnnnnnnntaatttttgccaagaagctgagaaaaacaatgctgagggattgctacacaaccaagctgggagaaccaaggatggttccttcgctccttcccatgaccactgagcacacgaggcactgaggtggactcttagagagcactctgcagacatccatcaagcaggtgaaacggacgcgtgggtcgacgatatcccgggaattccggaccggtcca

SEQ ID NO: 128704 - DNA, 524 bp, Homo Sapiens
  misc_feature (108)..(129): n is a, c, g, or t
  misc_feature (211)..(232): n is a, c, g, or t
  misc_feature (371)..(414): n is a, c, g, or t
  misc_feature (433)..(461): n is a, c, g, or t
aacaagatttaatgtacatttattcttaacatgtggaacatataaagattttatactgaataaatgatattcattaagccagaggaaaaggaggaatttacatcaagnnnnnnnnnnnnnnnnnnnnnnaaactacattatcttgaaatacaaatgtggattctcatcactgaaaaatctttgaagttgtgtttcttccttttagttgtannnnnnnnnnnnnnnnnnnnnngactgtactggtaaccattttctaaatcaatccatatataaccatttccacaccttgattcatgaagcaaattgtgatcagctgctctcctgaaatcgagcatgactttatacatacagaaacttgtacattaccctcnnnnnnnnnnnnnnnnnnnnnnnnnnnnnnnnnnnnnnnnnnnnggagatatggccctaatgnnnnnnnnnnnnnnnnnnnnnnnnnnnnntatttaaatctaccatcacttcgtagttaccacatcatgaaaaagaaactaaaactttgtact

SEQ ID NO: 128705 - DNA, 2327 bp, Homo Sapiens
  misc_feature (44)..(61): n is a, c, g, or t
  misc_feature (520)..(532): n is a, c, g, or t
  misc_feature (832)..(842): n is a, c, g, or t
  misc_feature (1497)..(1513): n is a, c, g, or t
  misc_feature (1531)..(2264): n is a, c, g, or t
  misc_feature (2289)..(2289): n is a, c, g, or t
caactgggggcgctcctaagggataagctgcggccgcgacagcnnnnnnnnnnnnnnnnnngaaatcagttcaaagtttatttatagatatatctttccaacacaacactgaccgcttagataaaaatcttaagttatttatttctgtgttttaaacataaatatgtttacttgtgatttagctttggagcaaatttaggtaagttatctacttagccaaatgtactctagtagactagaaccattctttgtgaaatgtcaaaatatggctatggtttcaggaactttaaaatcggttgtattttactttaaatagagatgtagcaatatctcgtttgctaatatttatattgatgacttactccttttttgttgaattgtacttctggttttataacctgaaatcatctacaagcttgtccaactctagcccacgggtctaatgcagcccagaacagctttgaatgcagcccaacacaaatctgtaaactttcttaaaacatgagatttttcttgcaannnnnnnnnnnnnaagctcatcagctatcgtcagtgttagcatattttatgtgcggcccaagacaattcttcttccaatgtggctcagggaagccaaaagattggacatccctgatctacatatttaacttaaagtatcactcagtgaacctctgtcagtataatattgctttcaaaaagatggttatgtcaaaagaaaaaatatagctaagtatataaaggcataaaaaacttaagacaattacatgaacttattctcaaatattttacattttttgtaaactttcttaaaacatgagatttttcttgcaannnnnnnnnnnaagctcatcagctatcatcagtgttagcatattttatgtgcggcccaagacaattcttcttccagtgtggctcagggaagccaaaagattggacatccttgatctacatatttaacttaaagtatcactcagtgagcctctgtcagtataatattgctttcaaaaagatagttatgtcaaaagaaaaaatatagctaagtatataaaggcataaaaaacttaagacgattgtatgaacttattctcaaatattttacatttaaagggttttacataaaaatttttcccttgttttatactggaaaattatataattcatgatctctaattttcaaacattctcaaaagtttagatcttcagagataagctctgaaaatatagatccatacatataaaatatctatgaaattcttttaaaaactattgtctaactacaaaaataatggcatatacatgcataaaccatctttaattagaaaatttagtaacagtcatatcaggcatcatcgatttttcttttcttagctcctgtattcttagaaccagattgctgaagcatgtttgcagccttcttctggaagttgcctgaatttttttcctccatctttttatcaccttgttcagaatgacaagtttgagacgattcagcctacnnnnnnnnnnnnnnnnncctcgtgccgaattcttnnnnnnnnnnnnnnnnnnnnnnnnnnnnnnnnnnnnnnnnnnnnnnnnnnnnnnnnnnnnnnnnnnnnnnnnnnnnnnnnnnnnnnnnnnnnnnnnnnnnnnnnnnnnnnnnnnnnnnnnnnnnnnnnnnnnnnnnnnnnnnnnnnnnnnnnnnnnnnnnnnnnnnnnnnnnnnnnnnnnnnnnnnnnnnnnnnnnnnnnnnnnnnnnnnnnnnnnnnnnnnnnnnnnnnnnnnnnnnnnnnnnnnnnnnnnnnnnnnnnnnnnnnnnnnnnnnnnnnnnnnnnnnnnnnnnnnnnnnnnnnnnnnnnnnnnnnnnnnnnnnnnnnnnnnnnnnnnnnnnnnnnnnnnnnnnnnnnnnnnnnnnnnnnnnnnnnnnnnnnnnnnnnnnnnnnnnnnnnnnnnnnnnnnnnnnnnnnnnnnnnnnnnnnnnnnnnnnnnnnnnnnnnnnnnnnnnnnnnnnnnnnnnnnnnnnnnnnnnnnnnnnnnnnnnnnnnnnnnnnnnnnnnnnnnnnnnnnnnnnnnnnnnnnnnnnnnnnnnnnnnnnnnnnnnnnnnnnnnnnnnnnnnnnnnnnnnnnnnnnnnnnnnnnnnnnnnnnnnnnnnnnnnnnnnnnnnnnnnnnnnnnnnnnnnnnnnnnnnnnnnnnnnnnnnnnnnnnnnnnnnnnnnnnnnnnnnnnnnnnnnnnnnnnnnnnnnnnnnnnnnnnnnnnnnnnnnnnnnnnnnnnnnnnnnnnnnggtactacgtctgagtccacccgtnagaacgactatcgcactggcgcagcactggtacagata

SEQ ID NO: 128706 - DNA, 613 bp, Homo Sapiens
aaaattaaatgttattttaatattttaaaaagaattatgggatcacagcttaagtgacacacaggtcaacagcatgaaattgatcacagcagaagtgaaataaggtgccaaagactttgaccattcaccagcatgcttctatttctgtgtttctggcaggccagtcaatatttcccacagttcccctcacccagaaacatgatggtgtagacaagatcctatccagtcaagtggcagtgggcgtagggcatccagcagggggaagcggcacacatccagcccatcaaggtatttccggtccagagagctgagcccccgctcctggggaatgtttagcaccatcaagaacccaaaaagaaaacgaaagacagctaagcttgcagggtccgttggtcgattcagcagggtcaccagcctccgccaactggacaaatctgtccactcaaaacccaagagtttccctattcggctgtcctgcctgggccctgagatcagttcagccttgtctttctgtactttatctgagctgggcgaggtccgcgcggacccggcagacaccgccattgctctgcggaggaggcaggtgggtcacagctgccgccctcgtgccgaa

SEQ ID NO: 128707 - DNA, 1446 bp, Homo Sapiens
  misc_feature (635)..(647): n is a, c, g, or t
  misc_feature (1336)..(1370): n is a, c, g, or t
aacttacagtgttttatatttaacaggaaaaattatgaataaccaagtttggtgtggtcatggatttcatgttaaggtataaatagagtttttaagaaataatctgtataataaaataagtttacttttgaatcgcagtacagtcatttccttcaatcaataaaaatattccttgattacaaagcagccttattttgcaaatgtatttcaggaaaatagctctagcaatatttgaaataccacactattttaaaaaggcagcgaagtgacagaatttagatttaaaatagtatattgcaaaatagttcaacatattatttctaagcacaaggcaagctccattctgaaggatgctttttaatcttataaagcaaactgttccaatatttctgtggtaaagtctaaatatttacaataaaagatgaatctttacacagacaggacataaacttcaatacctaaccacaatgcaaacattttacattatgacatcactctaatgtgaagcttagtttgttaacatgtgctcaagaaggaaaataaaaacaatacagttctgtagctttgtaacaggcagaactctgcaacaattagagaaataaaaacagcaaacaacaccagttctgtgagtaacnnnnnnnnnnnnntccagatattataaacatttaagtaaatacctaatacatccttcctgatatatctttatttgctctcttctgttaaatacgttttttaaaatgtttctcatatcccaggaggaaaggacagtaaattattcacaaagataaaagtgcatcatgtttgaaaagtgctttgtgtttatgtgttacaagcatatccaataaggaagttaagtaagtctgtgcaaagagagatctaattattacttgaattcataaaccgttaatcatgggttttttgtagttcatccagatgaagcagtcaagcagcagaagaaaaatctgagattagacattttgtatagcagaaagagcactgggccacaagtgaggagacccacagtctattcttagctcagttaaccaaccagttagtgaccccaggtaagacgggcttccatttcagtatttggcaatgggcaagaagcagagctggagagcctctaaggccccttccaactccaaaattatcatgtatctttagatgaggcatttctgaaagggcaaataattttaccaaaatataaaactacatactagtcatctagctactactcactcattggacttattagtaataaagcacagaaagaaagaaaaattcccccggccgtaatggccgaattcccgggcatatgtccggtaccgtcgactgnnnnnnnnnnnnnnnnnnnnnnnnnnnnnnnnnnncggccgcttcctcgctcaatgactcgctgcgctcggttcgttcggctatacagacgtagcgccctatagtgatcga

SEQ ID NO: 128708 - DNA, 617 bp, Homo Sapiens
  misc_feature (92)..(92): n is a, c, g, or t
  misc_feature (110)..(110): n is a, c, g, or t
aaaaatagtaacacatcagtgcaactgaaacatagcacccgtttgaatggcttcaaactacaaagctgccagatatttctctgtgcttcaanaatgtggcatcttacacnaatggaagtatttagtttgaactttgggttggagatatccctttgactatggcagtgtttcccagagtaaactgatcataggaaaaaaataatttattgacagcaagccatcaggagttaacatattacaatttagacttttaaaaatggtcaatggtcatatcaatgaactaatgaatacttaattcatatatgcttataaaaactttgacgaaaaataaatgataaaatgaaacaatttttctgttactaaatataaaagctatcaagccttctgatgcatcatcaggtaatcttggtctgatataccatttcttaaaagtacattattgcataaccatatttttccgatatatttataaatacattaatttttaagatattgacagtatacatatgctataacattgtttgaaaatgcttgtttgtggggcaataaagcaacattttgaattgttttgaattacttaaaattaaatgaggagcccaatataatgattcaaacag

SEQ ID NO: 128709 - DNA, 1118 bp, Homo Sapiens
  misc_feature (693)..(705): n is a, c, g, or t
ttttatttttgtaaaaatggtttattccatggccattgtaaaaaataatgacctgatgagtaaatattggcttaaggcatatagcagagcagctcgctacctctctaacataatgtgtaacaaggtggagagccagctgctctccaaggataggaggttaaaccagtacgtccattttgaaatgctactatatatacacacccaaactactacatacatatacaggacttaaaaacaacaagcccagctcagaatgcttacagcctggcacctaagccttatccacacctcaccatagctctgcagggtgacacctcgaatgttcccaccacagaatttctctgtactggcttctaccacgagaaaggcaaaatgtgaaaatgctggcaagagagtagctcgggagctacagctgccgtgtttttcatgttaaaaagccacttaatgtggaggtcttcagttccctttgcaggaagagtcgtgagcaccatcaggccccacagggtttgagggtggggcagacgcgcctctctcggcaaggtgaaccgggacagagacggcggcaggctgcctaaaggaccgtcacccaggctgtttcaagaagtgtggtttccagcaggtgcctctcttccaaatcacggtctgctcaagaagagtgttgacttggaatggcggaggctgatcccaaaggtnnnnnnnnnnnnntgtccctgcttccctaaatcatgtccagagcgtgaggtgtgaatatggcttcccatacccttggaatgtctgagttacagcaagaccctgctgtaccaggacaggctgggcctcaccaggaagtcactagagtgtcatgccaggaattaggcaaatgcctattcctggaaaactgcaccctattgctgagcgacaatgacttcagcaacaggcttaggaaccacagccatgtaatgatcaggtcatgcacaggcaggttggacttggacatggggcacattagtaagcagagatcaaagtttctcatttcaagcacatatttttcatcaggacacaagaagaccttacatgcattctaatacgcacgggggagcagtgatgagcctcgtcggaatcgccacccaggcctcggt

SEQ ID NO: 128710 - DNA, 1066 bp, Homo Sapiens
  misc_feature (582)..(598): n is a, c, g, or t
gtaattaccttaatttaatagggattttctggattaaaacccctttaccatttatattaaaatgtggattaataaaaatcctttcttgggaaaaaaacttttggtaatgtatctttcagaaagggtttttttaaaaaataatattttaagggggcctgtaaaccattccattcttttaaaggcacagcagaataagtaatggatattcaactgcatacagaatatagaatcaaaaaaacaatttattatgtatttgtagaaaatcattaccagagtaagcaaaaaaaccaactatttaaaagtatcaaacttttaaacagttctttttccattctgataaaaaatgttataaaatcaccatactccattcatgtaccttagatgccttttaggataagacctcaaaaataattaacctagtctcaaaaatccattcaagtccaataacaaacttttaaaaacccacttaaaaagacttgacactagaacaagtatacataatcagaacatatactttatatatttagtaatgtactaggttttctcttacctttgtaatttagaatttattggcagaaattnnnnnnnnnnnnnnnnntatatataactaaaaaaaggtaaatttcagcaaacaaatgcaaacctgtagggtaaatggatttttaaaaaaaattcagtttatcaaatttcatcttctctgccattttagattggcaactattggttatttagaaaatttagactgctgaaagttcatttcttgctccttgaatatgtttaatttctacaaagcttccagttgtgcccgtagcttccttgaggtcattttccactttctcctctgtcactagatatcgtgcgtaagatatttatccttgatttggaaaagcctaaataaaaagcttcagttttgaccttttaatttataaaactccactaggaaatccatttaatttttatgcatgtccacaaaaatttttctttcttaggaatcaaacacttttattggaaaaagtccttcaaatttttaatcttctattagagtttattttgattttccaggact

SEQ ID NO: 128711 - DNA, 1250 bp, Homo Sapiens
tttgtacatcagataaaagtttaattagagtgtagagtgccacttcacaggaattaagataatcatgttttaaacaaaatattttgccatgaagatatagataaaatgtacaaacatgtcacatgatacagaaaaacaagaatcatgatcttcacatttacaggaatttaaaaaatcttctctgatggaaatgtgttacaactcaaacttctcttcttgaaagtaatccgcaaaattgagatattcttcaagttgaccatatttctccttaatccagccattttcttttgaccgcctgaaaattctttccactgtttctttaacttgttcatcttcaacttcttctgtcattgcaatggtgcaacattcctggtatagtttgaatttaaaatgtttcagtttatgataaattctggtacggctggcacaaattctgccaacagtgaacacctgtttatcatgtgacatgaaattatctatttgcatggtcctggtgttatacaactctcctgataaatgcactgaatatttacagtagcgatgcagtccacaagcctggcaggaacagttttcaggattcttcaaatgaatacttacattagaataattttctactcgctccttatattgctctttccaacgacttctagataccaagctctctagacgaggctgaacaaagcgggttatccaaataatgaagagatgttagcatatcttttgcatatgatttttgccttgtgccatcatataatgttcccagaaaagattcatctaaagcgttgatcagaagagccttcacaactctttcaaaatgagtatagtggtcactaaaagaataaagagaattctgttttactaatttcagttgtgatgtagtcaatttttctccttgttggtttttattctcttcatcaccctcctcatcttgcactacaaagtcatcgataatataatcatctccatcttcatcagattcataattatcctcttcttcctcctcatcaacttcatcactgcttgggcaagattccttttcagagtcctcaaaatctctaccactactgcgtctctcacgagatctttgttttgagagttctttgagcttctgaagtttttctcgcttttgtgcagctaatgttttttcaggagtcttttgctccatttccactgaagaaccttcatcttcaaccactctacggggacgtttaacacctacttttctgactagcctatcgctgtcatcactc

SEQ ID NO: 128712 - DNA, 679 bp, Homo Sapiens
tttgtttggaaagatgaaaaatttattagaaaagatctttaaatggcttttactaaagcgtcatttaacaatttttcatattatagaaacagcttttcatggatggtgtgactgggtctgtatccaaacccggttcggttcctggagccaacggtgatgttaacactcagcctcttgcagttaacactcagcctcttaactgggagtggccctggagcaagtcgctggaatgttcaagctccgcgtcactcatcggtaccaagttgatgatctctgcctagggttcttcgccaccctcaggctcaagtcccaggaggcctcctccgctgacttgggtgaacagctctgagttccggagagggttcggtctgcggagaagcgcgcgagagacaagcatcctcaaggttctggtacaaaatttggaaaatggacctggcgttgaaatctttactcctcgtttaaaaagaccatcgaaagggaaaaaataaaagaaattgcagtttatatttttgttatcccatgaaaaattagctgcagtgttttcctcttcatgccaaagagattaatatttacggtgaagattttccaggaagtcgtggttttcttcggtcgtccgcgccgcacccccgcgggcgagcgcacctggggcctgcctctgagcttttgtttcctccttttt

SEQ ID NO: 128713 - DNA, 659 bp, Homo Sapiens
  misc_feature (627)..(627): n is a, c, g, or t
  misc_feature (649)..(649): n is a, c, g, or t
gagttttcagccagtttgttaaacttttaattaagttttgtttataataaaaatataaatggatttgaaagtttccattttttaaagttaccctcgtttttcaaaggtattttctaaacagatctttaatggactatttaaaccgaatttaaggaattcacacacgacagttgacaggtcttcacgcaggctggttggtaacgtgctgccagcacagggctgggtgatacgtacaccctaagccgggggtgcctggggctggggggcgctccttgcaatgcccctccagccacagggcagtgaggtgctgcctgtgtgagccgtcgggggagcggccggctgtgggggcagcgcagcaggagcatcgtggggcctttccttctcggctggttctctgtgacggtggcgtcggctcgcctctgctcctttcatctagaaagaagccactgaccctgacagcccacggcgggtacactgagcagctgcattggtgctgtcacttttttaaggctttctgtccagacttcaacactggtttcttttcagagtttcgaaggattaatgacttcctcagcgcccttgctggcgggctgagggtgacagtcacgtccgtttcttctgtattanaaggctgcggtgattcaattanattgtcccac

SEQ ID NO: 128714 - DNA, 960 bp, Homo Sapiens
  misc_feature (169)..(177): n is a, c, g, or t
  misc_feature (888)..(905): n is a, c, g, or t
cgcgagaagctggcgaacagcgcgcccgtgcgataaaatttctccgccggaggcttcattttagggggggcccagtgaaaccccgccgcacgcgcgggtctgttccgcgaatagccactggccgctcttctccagccgctccgcagggatctcctggccaatctgcgannnnnnnnntccattttcgggctttcccggggtgcccagtgccccaggaggacgccaaggggtggtcgtccagccccctggtcgccccagtggccttgtcccaggaagaagccagaagcagcagccccatgccccaggggcttggggaaagtacatcaccccatatgggagccaggggacagtgtcaaagatgcggctccgggaggaggaggagatcgtcaggctggcccaggaccgggaggagatgaaggtgaacctgctggagatgcaggggcaggtgttgcggcttgtgagagaccacaatgagggacatggcaagttcctggccactgcccagaaccctgctgatgagcccactctaggagccccagccccccaagagcttgtgtgtgctgacaagcaggatggccagtagaaccttcaggcagggtgagcaggcaggagcaggggaggctcgcatggcgctccgatcccctcctccctctctccgaagatctttgtgaggtgagcctcactgacagcgtggagcccgcaccaggagaggccagggagggttctccccacgacaaccccactgcacagcagatcatgcagctgcttcctgtaacgcaggactccccaggagcacccaggcttgggcagcaatctctgcatgcctttcttttcgagctgccgagaacagggagataaacaccaccatcatctaagagctggtcaagnnnnnnnnnnnnnnnnnnctcgagactagttctctccctcgtgcggaattcgccacccaggcctcgctaccta

SEQ ID NO: 128715 - DNA, 657 bp, Homo Sapiens
ttgctgatcatggagacttttattattgagacctccctatactttggacacttcaaacttaagaccctcagtacttttggctaacctgggttgcaggcaccctcatccaaggtgtaaaggtcctaaggggcctgcagaggtttcaggaacatctcagctgctatccaaggagccagtgcttagaataggggctcggctgaagcagttggctgagaggcttctgtcttctcccttcctgtcactatttgccacactcttcccccatgcagcttctgcaggctcaggtgagcaggtccagcgcagaaacaggccttgccacagccgcagctctggggctccacagatggccaagggattgaggaggtagagtgggttctggagtctttgttgctcttttggctggttgagcccagaccacagggagtgcatctgagtcctcccttcacacggcattttcctggatccacttccactccaccagttcctggaatccagccatggtcttgctcaaggggtccaggatgagttgggccagtgaagtcacaagcagggtgctgtctgtggctctccatgaccctggactgccaggcaggtggtgctcagtgcctgctttacatgttacagtcagcggcaccgtccagccgactcaccagttgt

SEQ ID NO: 128716 - DNA, 812 bp, Homo Sapiens
aggggacgccgtgtgaagttgggttagttagtgacggggcacctcctgctggggctcggggtcatgtcaggggagcctgattgccgcattgtgtgcggatcgtctgcgcatgtctgaagccggccgctgtggcagcgcacggggctcagtgctcttccagggaccagtgcaaccagccaggttagcgggcttggtctctgggcctccgccagtcacgcgggcttgtttcgcggcctgggccgagagcgtgtccatgatgaagccccgcgcccaaggacgagcccccgccagcgcagttcgcagcagctcctggtccctgtagcagcgccgcttctggggaccagttaggggctggctggagcgtagcagaagcctcgctcagccgccacgcgttggtctgcagcgcagggaggagagaggccaggtctagggcacccagggagtgccctgtccgcgcgcctcttccaggcccggcgcgttccagccttcccgggcccctacgaccgcgcccacttcgcgagcgtactctcttgcagtagagttcgggcgggaggaagtgccaggagtcgcccaatctcaggcctgcttctcgaaggagtcgacgctacgcaacagcagcagccacaggtccggagaggacgcgggccctggcgacaggagcaggtggtggacggtgactcacaccgtgccgcgaagcgggggcgcctccgggccccgtagaaactctgcttgggctcagcccgtatggatcagctccgagaactccattctgccagtgagagacccggggcccagcagaaggccagactctg

SEQ ID NO: 128717 - DNA, 640 bp, Homo Sapiens
aacgggtgatgcggttggggcggacatgggggacaggctagggcctctgcattaggctgccttcttaggcaggtgggctttcacttccagctcctcttccattttcacgatgtccttcttcctaggcactgcgaggggaggagaaaaggggctttgcagaggcctggtagtattcccaggaagtgcctggttggcgaaacaaccagggagctgctcctgggagctgggctgaggctttgttgggctgcctttcccactcacccttttcccggcccccaccacgccttccccatgggggaggggcagggggctggaggaacacagcttccccctgttccagcagagaaatgctggctgtatgcctcccctagggttcccaggctgactagggtgtggctggccttttgatggagcccactcatgctgggccgctgcccaggggctttgtggcacctaggtcgagatggtactcaggccaggggtcaggattcctgggtgctctggtcccggtgcctctgtctcatctttaggctgggattcctgccaccttgctgctctggggcccaaatactttgagacaaggctataggcttgtcccactgactctcctttccctccctggggtctcctctctctccag

SEQ ID NO: 128718 - DNA, 475 bp, Homo Sapiens
aaaaattaatgatatttattaaagcacagtaagacagattttattccggaccatcaggataggtatagcaaccatggcaatgggattctgaattaggagagagagagtgggctcaactctaaatacagcatgggcaagtgggaatttatagccaaggaacaaaaagcttggggtcactggataaaaaattactaagaaggaacttcaggagtaaaggggtttcttgctgaaaataggtcaaggtgatcagacatcaccttggatggtagaggatgaggaacctgatcagatattgagggtagagggttctaactggattttccaaggaaatgcacagataaacctacgagaaggttgaggagtctgactaaagtttggccaagcaaagaatctttgtcaccttccatcggtgtattcaaaaacttaagactcaagctgctcattactatctttaggctctcttgaaccgacggcg

SEQ ID NO: 128719 - DNA, 1403 bp, Homo Sapiens
  misc_feature (21)..(21): n is a, c, g, or t
  misc_feature (42)..(60): n is a, c, g, or t
ccctcactacaagggaataangcttgcggccgcctctcaggnnnnnnnnnnnnnnnnnnnagaaaccaaggctttctttgtgtccaagtcaaaccgcccgtctgtctctccctccccaaaggggccaaaggtccctgcctagagcacaacgtgggggctgcaacggcttctgctgccacaatcatccatcctcggccaactcgatcttgggagagggcttcctgcccgccccatcctgtgctttggcgtaggccatcactgaagactttctatttctccattagttcattcatcttggtagctagactcatgacggagctgctgccaccccagcagatctgctcgccttgctgcttcttcacggtctccacggccttcgcagaggtgtcagcaactgccatgaccacttgcagcagttggctgtaggaagtcagattctggtgcgtggcctggatgatggggccgcacgggtggaggtcagggcctgggcgctggcagcactcgcccagctcgtcgtcgtagacttggagaaaagccaagattagctggtggaagtcggaagtgaccagacgcagcttctggtctagggtgctgatgtcggctgcgcccgcagcagccccttgctcatgctgtgcaaagtactccgttctaagcgcgtgcaacttggcagcactctcctgcagctgcctggcaagctccgccagcttctcctcctcctcggacttggcagaggcactggcccactgccagtcatcactctgcttgttgaggaggggctgcatgtccaggggccacgggtcgcactctggattcaggagcatctgcaggtgggggctagagaagagctcccccagcaaggcctcgttcttctccctggtgtcctcgaagtgctccatcaggctcgagcaactggagcacccaatggtcaggctccggatggtatcgagcaactggtccatgaagtgtagctgcttctgggcgcaggcacagcccttgaggagctcctggtcatctggcgcacacagcatcagctcgtggcccagcttcgtcatttcttggatcttcacctctgttgggacccctttcagtgagctgaacctgtcctgcagtgagggccagacccgggtacacatccactctaggatctccaagcggtactctgaggggctgcacagcagttcctgaattgtctttggctctgtgatatacagaccctcgaggaaggggcagtttaggtccttcagcttcccgaacacctccacagccgcctggacacgctgctgtcgccttcgtcctctgagtagtcgtcgccgccacggccgcagccagcgtcctgccccgccatgtttcgcgctccgagccgcgccccgcctcgtgcggaattcgccacccaggcctcgctc

SEQ ID NO: 128720 - DNA, 628 bp, Homo Sapiens
ttttagaaaccaaggctttctttgtgtccaagtcaaaccgcccgtctgtctctccctccccaaaggggccaaaggtccctgcctagagcacaacgtggggctgcaacggcttctgctgccacaatcatccatcctcggccaactcgatcttgggagagggcttcctgcccgccccatcctgtgctttggcgtaggccatcactgaagactttctatttctccattagttcattcatcttggtagctagactcatgacggagctgctgccaccccagcagatctgctcgccttgctgcttcttcacggtctccacggccttcgcagaggtgtcagcaactgccatgaccacttgcagcagcatccctgatcgaggggtctcacaggaccagccagtcagaggttggaaggctcggagcctctcgcttagaaaaccaaaatgaacatcacggaatccttgagccaagggcagagttgcgcacgtgggaactgtagtcatcgtaactaaagccggctttttaggttggcctctggggatctcacatgtggaacaacgaaacaagcaacattgacgagcccacttcctctcatcctgtctgtagcaggctcatggcaagacaggtagaccga

SEQ ID NO: 128721 - DNA, 989 bp, Homo Sapiens
  misc_feature (872)..(945): n is a, c, g, or t
ttatttttttccgacgtctgcgtctgtagttttattccgtatctggctgggggagggtggtctccgaggtggatggagtgagggtggaggggacagagatggtccctgctcccacctccccgagcccacctgggaagctgcgtggccgggctgctggagacatcccgagccctgggggagacagaggtgtgggtgtttgggcttcatcttccaggtacaaggagatacatttcatcaagcagttcctgatttcatggagttctttgagggctcggctgggaggtccctctccggggggctccaagtgccggacctggtggtttctggaaggatcaaggacaagtcctgggagtttcaggcttcggcagtaacagtgtgttaattgcacttgttcgattttctggcagaagccaggagagacggggacagcgtgcttctcttcggtgaccatcccaggcgcccagaggtgaccagacttctgtgtggtctgggacagtgcagggctcaggcaggaaggaccactgtggtgaaaggccactgacaattctggtgaggagtagggtggcaggggttcagccagggagaggaggtggctgccttttctcagggccctgctctcaccttccaaaggtctagggtacacagaactcatggattttggtctcgcagccccaggggccacacagaaaaaggggttcaactggaagtttgcagcatctgggaaaggccaattctggcagaactggaagattccagaccaggggagaggcgtccagggagagaagagtcctgcttgggttgatcataagcaaagtggacatcgttccgaagaggcagagagctcactatgttatcgataaaaaaattcttgnnnnnnnnnnnnnnnnnnnnnnnnnnnnnnnnnnnnnnnnnnnnnnnnnnnnnnnnnnnnnnnnnnnnnnnnnnatcaagaccatcctggctaacacggtgaaaccctgtctcttctt

SEQ ID NO: 128722 - DNA, 999 bp, Homo Sapiens
  misc_feature (160)..(223): n is a, c, g, or t
gtgtctgttgtgatggtccgttcgtcgttatctgctccctcttttgtggactccttttagtctctctgttgaaaaagggtgttgggtggggggaactgttatgtggtttgttcgttgttgtagggtgttgtttctctgtctctgtattatgttcctcacnnnnnnnnnnnnnnnnnnnnnnnnnnnnnnnnnnnnnnnnnnnnnnnnnnnnnnnnnnnnnnnntcattaaggggttactgccagtatcagctttagttggaagtgacatagcctcaaggagcctggttgccgccagagtctgctgggtcttgaagcccacagctgcaagccaatgcacatgctctgcgcctcccttgctttccgtttctgttttgtcctccgtgaggcgcttgcgctccttgcttcgtctaggtccctggagcagctcctggaagcgggcactccttgggtccacctggtagcccaggagctcctgggcctcagcctgcagtcgggccctcctctccttgtcagcctgggccttctcccagttctcccgctgctgctgctgccagttcacaatcatctgtggcatcttggccatgcactctgcgatgtgctgctccctctcccgacgcttctgctcttcggccagctgcttcacccgcagcgactcctgcatggtcgccaggctcgggtaccattcgcgttcttcggcctccagctcccgcagctgctccggcgacggccataacgaaccggggaccaccccggaggcggcgccgtaacgcgcgaactgcttagccgcgtagcgcggtcccagctgccaccgcggggtcaggaggtcctcggggtctggccaccggggtcccggcctgcggcgcgggggcggccgcgcccggtagccacgggaacccggggccagggtcgccgccacacctagtaggctgcgtgcctgtcgcacggacgccgcccctcgtgccgaattcacaacccaggcctcgtacctagaccgtaag

SEQ ID NO: 128723 - DNA, 774 bp, Homo Sapiens
tttcactatgttttttcaggggtactgccaggtagcaggctttattgggaagggacaaagcctcaggagctgggtgccccagaggctgctgggtcttgagccacagctgcagccaatgcagcagctcgcgcctccttcttccgtttctgtttttcctccttgaggcgcttgcgctccttcttctctaggtcctggagcagctcctggaagcgggcactccttgggtccacctggtagcccaggagctcctgggcctcagcctgcagtcgggccctcctctccttgtcagcctgggccttctcccagttctcccgctgctgctgctgccagttcacaatcatctgtggcatcttggccatgcactctgcgatgtgctgctccctctcccgacgcttctgctcttcggccagctgcttcacccgcagcgactcctgcatggtcgccaggctcgggtaccattcgcgttcttcggcctccagctcccgcagctgctccggcgacggccataacgaaccggggaccaccccggaggcggcgccgtaacgcgcgaactgcttagccgcgtagcgcggtcccagctgccaccgcggggtcaggaggtcctcggggtctggccaccggggtcccggcctgcggcgcgggggcggccgcgcccggtagccacgggaacccggggccagggtcgccgccacacctagtaggctgcgtgcctgcctcgtgccgagttcgccacccaggcctcgctaccttaaggaccgttatagttactggcca

SEQ ID NO: 128724 - DNA, 998 bp, Homo Sapiens
  misc_feature (39)..(39): n is a, c, g, or t
  misc_feature (66)..(66): n is a, c, g, or t
  misc_feature (86)..(86): n is a, c, g, or t
  misc_feature (536)..(561): n is a, c, g, or t
  misc_feature (857)..(872): n is a, c, g, or t
  misc_feature (931)..(946): n is a, c, g, or t
gccaagacacacaacagctctctcgagtacaacatcttngaaggcatggagtgccgcggctccccnactggtggtcatcagccagngggaagattgtcctggaggacggcaccctgcatgtcaccgaaggctctggacgctacattccccggaagcccttccctgattttgtttacaagcgtatcaaggcaaggagcaggctggctgagctgagaggggttcctcgtggcctgtatgacggacctgtgtgtgaagtgtctgtgacgcccaagacagtcactccagcctcctcggccaagacgtctcctgccaagcagcaggccccacctgtccggaacctgcaccagtctggattcagtttgtctggtgctcagattgatgacaacattccccgccgcaccacccagcgtatcgtggcgccccccggtggccgtgccaacatcaccagcctgggctagagctcctgggctgtgccgtccactggggactggggatgggacacctgaggacattctgagacttctttcttccttccnnnnnnnnnnnnnnnnnnnnnnnnnnaagagcctgtgatagttactgtggagcggccagttcatggggtcccccttggggcccccacaccccgtctctcaccaagagttactgattttgctcatccacttccctacacatctatgggtatcacaccccagactaccccacccaagctcatacagggaaccacacccaacacttagacatgcgaacaagcagcccccagcgagggtctccttcgccttcaacctcctagtgtctgttagcatcttccttttcatggggggagggaagataaagtgaattgcccagagctgccnnnnnnnnnnnnnnnnaaaaattttaagaagttttctttgtggggctggggaggggccggggtcagggagagtcnnnnnnnnnnnnnnnnaaatactaaattggaacatttaattccatattaatacaaggggtttgaactg

SEQ ID NO: 128725 - DNA, 893 bp, Homo Sapiens
tgcggccgcaggagctgtggcggttttcctaatcctgcgaatatgggtagtgcttcgttccatggacgttacgccccgggagtctctcagtatcttggtagtggctgggtccggtgggcataccactgagatcctgaggctgcttgggagcttgtccaatgcctactcacctagacattatgtcattgctgacactgatgaaatgagtgccaataaaataaattcttttgaactagatcgagctgatagagaccctagtaacatgtataccaaatactacattcaccgaattccaagaagccgggaggttcagcagtcctggccctccaccgttttcaccaccttgcactccatgtggctctcctttcccctaattcacagggtgaagccagatttggtgttgtgtaacggaccaggaacatgtgttcctatctgtgtatctgcccttctccttgggatactaggaataaagaaagtgatcattgtctacgttgaaagcatctgccgtgtagaaacgttatccatgtccggaaagattctgtttcatctctcagattacttcattgttcagtggccggctctgaaagaaaagtatcccaaatcggtgtaccttgggcgaattgtttgacaaatggcaactgacttctttagaattttgcagttaacagtagtatgtactcaaattggggggaaaaaaaccctacatgtttcttgtaaaggcgtctgacagtcctgagaattattgatggtaaggaataaaaaatgtacagatgactcagtgaagaaactgaggcttctcttatgaaacaaacattgataaacgtaactactaaatgtttatgcctctgtaaaccaaatttcttttctagataaaaatatgtattactacctgc

SEQ ID NO: 128726 - DNA, 740 bp, Homo Sapiens
  misc_feature (697)..(697): n is a, c, g, or t
ggagtgaacaaaaggtcattttttacagaaaactcaggatctcccctctgcacagtgctaaagccctgtctcaaagttcagagcctggaaggtgcagagatgtggcccttggaaatcaagcccttaagaaaacagcccagctgtgtggggccggaagccccaggctgcagtcctgtggtctggaggcagccgatattcgggtgagagatgtgcccagctgccggtgggtccagggggcacggagcccccactgtccctggcccaggtctaggactaagtcagtgggcccaggccagctccaagggccacagctcctcactcgggggccgcgccggagcagccgcagcagctggggcgccgcagggactgcatgacagcccgcagcggccccctccggccctccacagacaggctgtcctcgctggcgggcgcccgctgcagctgctcaaactgcatctccaggtgcttctggatggccacaccgagcacctccgggtccactgcagctccgtacacctcccatgtcatgccctcagcatcccatcgcacatcccgcacaggggacggcgcctcctccaggctggaccccagagttacctctgggaacacatgcagggctgcaggcgcttccagggacggactggtggccacagccttgcaggccgccactgggggcgcctgcacaccagcatcctgngctgacagcggggatgcctctgcagggggcaagtcattggctg

SEQ ID NO: 128727 - DNA, 1641 bp, Homo Sapiens
  misc_feature (114)..(414): n is a, c, g, or t
cagtcgacggtaccggacatatgcccgggaattcggccattacggccgggatcaaaagttaacttctgggcagatgaaaagctaccatcacttcctcatcatgaaaactgggannnnnnnnnnnnnnnnnnnnnnnnnnnnnnnnnnnnnnnnnnnnnnnnnnnnnnnnnnnnnnnnnnnnnnnnnnnnnnnnnnnnnnnnnnnnnnnnnnnnnnnnnnnnnnnnnnnnnnnnnnnnnnnnnnnnnnnnnnnnnnnnnnnnnnnnnnnnnnnnnnnnnnnnnnnnnnnnnnnnnnnnnnnnnnnnnnnnnnnnnnnnnnnnnnnnnnnnnnnnnnnnnnnnnnnnnnnnnnnnnnnnnnnnnnnnnnnnnnnnnnnnnnnnnnnnnnnnnnnnnnnnnnnnnnnnnnnnnnnnnctggggcctgtgtagccagtgggtgctattctgtgaaactaatcataagctgcctaggcagccagctacaggcttgagctttacattcatggttttaaagctaaacgtaatttccacttgggactacatcacaactgaagataacaagagatttaagttttaagggcatttaatcaggaggaaaggtttggaaaactaactcaggtgtatttattgtttaagcagaaataaagtttaatttttgcttgaagatggttcttaatttcttttaacctaattcctaatcctcacaaagatctttccaacagcaagttcagtaagttcaggtaacagtacgtcaccattggcttctggctcattgagtgatggtgggatcgcggtttcatctctgtaaacttgcccttgactggggagataccatctccttaaaaatactcttcattttcctaaggagtgaactgctgctgcacgaattcttatttgtggagggagtagctgcctccttacttcaccttcatgcaccagtgcagcgtgaacaggggctttattgatggggcttgggaagctgtaataaagtccagcatgcagattgtgaaggtttcgtatagccaccaggagacaagggtcaaaggaacgagcctctgtgggctctgctgcttagagtactttgtcctttctcagttcttaagggcaactgggaaggaagagggatcagcacttcacaaactggtgggtgacctcatagattcccacagactcctgggccttttcatcatagtcagtccagtccttctcctgcagattaatgtcactgaaggctgtccctgactccacaccttcagcagcaaacccagcctgcggctggaaatcaactggttcaaggccccggcactcaaactccactattgtcttgaagttctcattgtcttcagcattgtaaggcttgatggtgctgcttaaaatctcgatggaattttctcttgcacacagcttgcacttctggaccatggaagcactgccacggccccccttcagtgccacactgtccatcagccggatgtactgccacttgtccgaaatctcaccacagttgccacatttcatcttcaggtaccaccggaagtcctcgcccacgggccggaggttggtgatgttctccagcgtggctttgagttgcagcgcgattttccccatggtagccctctccgcccggtgctgctgcgccct

SEQ ID NO: 128728 - DNA, 935 bp, Homo Sapiens
ccagcaccgggcggagagggctaccatggggaaaatcgcgctgcaactcaaagccacgctggagaacatcaccaacctccggcccgtgggcgaggacttccggtggtacctgaaggtgcggccggggcggggcccggggagaggaggcccgtcctgatctcagtgctgaaccggagccttctctccggcagtatgagaaaatatttaaccaggcacattaagtgttcggggttttcctagttagaattttacgtttgctttctattaaagtgtattggtttatctctaattggcagtcttggaaagcttcattttgtagttcttccctgtgttaaatatttcgtggtctgtaaatggacactaaacgaaatgctacttgaagggacgcttgtgattatttaataaggtgaatagttcgcctttcgtttattgatttggttttctttattgtgaaatagtttaattttgtgcgtaatccacccttccttagccctcccacactggtaaagctggtaccctagtggcatggtctacagaggcctccccttccccagcagttcgaggctcttcactcttccagatcccagagcttctgctctgttttactcctggtcaaaaatcccagcatccttctgtacctctcaaaagccctgttttcgggaagctgcctccggactactttggtttcccaggattttgaagcctgaataccagggcttacttgggagaatctgttctttggcttgaagaagcggaatcgagtgaaggagacagaacaaatagagtaacaatagagtgatcaagtgcttataccaattgacatacagggcctgttgggaacataaagctaaacaaagcagagtggtcggggggcttgctgaggccattctctctatggtcttattgcaccaaatgtccctattatgcggaatatc

SEQ ID NO: 128729 - DNA, 1358 bp, Homo Sapiens
atcttgacaaaactttttattcacagaatcccttgaaagtagctattagacgaaataacaaaaacttttgtccaaggttttagccctttttattgaccttcttttcttcatgattctctctcaaaggataaattgtacatttcttgtatttgaaaacatcagatatccaagccatattactatagttctcagaaacaattcatttcttcagcttttcatgcacagctggattggtgcaggcattagcttggagctcttctgtttctccctttaaaacaaactcagcagaggctgggtgttcctggaccctggatttcacagcatgagctgcatagttaaggctggtattttcactccaatgccagtaacctgagaaggggttatagagcattcctaccactgtttgaactgacagaccatttgattccagaatgctctctagtgtttcaggtgaaacaaacttctcccatgtatgagtaccttttggtacaatacctgcaatttgctctgaaaaaacaattcccaaggcataggaaagttgtgttttgttgattgtagtaatgaataaagaaccaccgggttttaacacttgacagcagcactgtaaaaatgtttctagatcaatcacatgttctacaacttcagaagctacaacagcatcaaatgtttctgcagtctcttccacaatctcttccagggaacacactctgtactctattctcttatccaggactggatcaaatgatttatggcattgtgctgttttaatgttctcatccacagggtcgattccaataactgaagccccaagccgccctagaggttcagttaacagcccaccaccacagccaacgtcaagaatcttcatccccaacaaaggttttcctggctggtgattaggaacttgtttccagaagattgtccctaataaatggcaccctcaggtcattcatggaatgaagaggtgcatatactccttgttcatcccaccatttgtgagccagggccaagaaggtttttacctcaccgctgtcgacagtggtttgggaagtactgtacagtctcgcccaagggtacctgaaactctttattctgttcaaacaggaaaagatcgtcctgtaggatttgaaccatatggttctgtattcattgaaaacccctggtttaatctgtagagtcccactgagctggttcttcacataaaccgccgaggaaattaagggacgcgcagcttttgtattacagacctccaggccccagcactcttaaaaaccaacccccggaggagcccagcttacggccactccccccggccgtaatggccgaattcccgggcatatgtccgctaccgtcgactg

SEQ ID NO: 128730 - DNA, 910 bp, Homo Sapiens
  misc_feature (226)..(236): n is a, c, g, or t
tttggcattcttgacattttaattagagcagaaataaactactaaatattttatttctaagcaaaacagagctccagcataaatcctgtttgtctgagaaattcacaatacattttagaaatccaatggatacattcaaaatgttatctaataaataacaaggtcaggtctactccaaatctaagaatctgatttaaacataaggtgccaaaaaactaccagggcnnnnnnnnnnnggtggttataaacaatacttgatatttaagcaacacagtcacactgctttaaacttagttgcagagatctacaatttattattattttcagtgttagagctagagggtaattttttcaaagatggcactcaactccacttatttacctgtcaacaaatacagaactgaactgttagccataagcactttacaaacagactcaggaaactatgcagtagacaatgacatagcttaaccagactctgaaaaagagatacatattttgattcacacttgtacaaagagaacagtcatgtctgcatgacttaaggttccctaaacacaactgttttatgttttagacccctggagtgtgccagtttaccacatcagggaggaatcaagggatgtgtgtgctccttctaaagaaccaagggcaagtggggtgggggtggctacagggaacgctctgggcaaaagagctgcctcaggtttttgtgggaatgaaaattacttgttgcagttaagcaattcctagggtttatctagtttgaggttcaaaacaaaggagagaattatttccttcctcgagctcttcccaaagcaatatgcacatctcataatcaaatctcaagtagtacaaagagataatcaattatctaaaaatttaatttacatacatgttggcctggatt

SEQ ID NO: 128731 - DNA, 1811 bp, Homo Sapiens
  misc_feature (88)..(122): n is a, c, g, or t
  misc_feature (1757)..(1769): n is a, c, g, or t
aaaggattgtatagactcactatagggcgctcagctcgtccgcagccgaacgacgagcgcagcgaagtagtgagcgaggaagcggcgnnnnnnnnnnnnnnnnnnnnnnnnnnnnnnnnnnncagtcgacggtgaccggacatatgcccgggaattcggccattacggccgggtattactaacatagtttggaagaaaaattgagtagtggtaagttttgttcaagcacaatgttgaatgttaagcttcctgtattaattttagttcagttaatggttcagcccatacaaaggtgctatcctagggattttatgaattcctgaaaggaaaatagaatatgatcaattccttgccctgtggaagagtgcagaactgtggttttgttttcctttgacttctgtaaaatgtgaccgtttgacatctgtggtagattgaacggaatatcacagctgctgagtttactccatagctttcaaaccttttttattttaagaaattcttgaaaaaccctatgttccatgggaacataaagttattatagtgcctcctaaggggttaatataaatcaaggaggaagtttatatttaaggaagaattggagtgacgtatcttagaaaaggaaaggctgatgtttccatatagcttgctctccaccaggcctatcatttttctttttagagacaaacgtgacaggctagtcttgtctctctcatatgctaggtagcaaatggggtgatatttttatagaagtgggcaaaaattattttctcaattttactgagtaggcacagaagaaaagtacagataggctgatggttattgccttattttgactgcatttctcttaaatggatcatttaaattagttctttcaagtaacagtttactggttgttccaattcctgaatatgcaggctaaatttgtacagatagggattaaggaatacagactattagagaagactccttatatttacatctagtatatatgtggtaaggaaatgccgattcttcattataaacaagttttaaaattgttctttcttagttcaaatgatagcaatacccctatagcattaggtagaaacaaattattcattacatcgtaaatctctttactatgtcctagctctgtcctgctacctaaaggatataaagaaatattattgctctagaatgtattactttgttctcccatgaaagaattcagtttgttagtacctatatttttaaactggtgaaactgacccaaatatgtaataaataccatagtagctcagacccaaggagatatttttctaaaatcagttttcgttaaagtacttctacttccgttattggatatggtatctcctaaagtgtaaaaaaaatctgttactatatagtgataaaccatctgctcatcgtaagtgtaaggcttaacaaataagtaatacatgctatatttattcaagtgtctattgcttaattgttaattgtgagcagatttattgaatgcctattctattttctgcagtttacaatacaataactctttgagtaagttgaagtttaattgtgcaacaaatttgtattagagtacaatttaaagtgtttttctctatagccttttttgactggggaagcaaggggtaatgttaattagtacactttgttcttgtactagctatgtttctataagatatggtgccctgtgtatcccagagatgctagaaaactgttctttgctcctatttgtgggttctgtttttgtgggnnnnnnnnnnnnngagaaaatgtacacaataaaacattccttgcttgttactgtg

SEQ ID NO: 128732 - DNA, 1419 bp, Homo Sapiens
  misc_feature (33)..(33): n is a, c, g, or t
  misc_feature (227)..(227): n is a, c, g, or t
  misc_feature (418)..(429): n is a, c, g, or t
  misc_feature (470)..(478): n is a, c, g, or t
  misc_feature (520)..(535): n is a, c, g, or t
  misc_feature (575)..(584): n is a, c, g, or t
  misc_feature (640)..(688): n is a, c, g, or t
  misc_feature (690)..(722): n is a, c, g, or t
  misc_feature (1309)..(1309): n is a, c, g, or t
gggcgggcgacagtatagtgttatatattcgtnccaagacgattgctgtggatcaacagggtggtgggtgggtgttgcctcccacgagggcggcgaatatattgaggggttgtctacgtcgcagccgcgcggcttttctcggaagaggggcattatacccgctggtccagggcgaaggaatagcgtgctataaaggggaatattaccgccgccaccgagcacttatnagaaaaaagatgggcccgcggcgccagggggggcttttaaattttgtgtgtatatgcggggatttcgcctgttggggagtccctctcgtgtggtagggggttcccgtgaagaagtcccttctcgggagactcccccttctgggggttttgtgtctagaaaaggcgtcgggtgtttcccgcggcgggggggnnnnnnnnnnnnggggggggatccacaagcccctttgttcttgtgccccgggnnnnnnnnngggagacgggatgtggggccccagtttccctttacctacacnnnnnnnnnnnnnnnnccaacccggaaatgttttaaagaaacgttttttgagggcnnnnnnnnnncgcccaaagggtaggtttagttagtttttttgcgaatttcggatatcacatggggnnnnnnnnnnnnnnnnnnnnnnnnnnnnnnnnnnnnnnnnnnnnnnnnngnnnnnnnnnnnnnnnnnnnnnnnnnnnnnnnnnacagaaaacagaactttattccaagggccagaggttatttaaaattatttacactcactggaaatcacgtggaggggctgggcccagctcagcagagagaaagagcccttctgtgcagccaccgagggccagaggcctccagaggcatggagcccggtgcccccatgcaggccctgggctgtgctgccaggggccggtggacctcacctggcctgggggctgaggaggatgcaccccaggcccagaggagtctttgtcactgggcctgcgcccatgccaaggccaagccaaacacacccaggagactacgggagggagccaggagagctgattacaggccggagtctgtggggtgggtggggcaggcaggcgtggtggccttgaagggcaggcggaactgggacttgcgcacgaacatgggcaccagcgcacggccgccgttctccccggcaggctccttggcccgcagccagttggtggccacgcccttgttgatgcggccggccttggtctcgtactccacaaccaccgcacagatgtgcacagagttggggtggaccttggaggatgaggcgatggagtagtancgggcctgcaggcgcggcagcagctcacacaggtggtcgatggggggccgcagggacgggcagtcctgcaggatggccaggatgtgcctccgggcctccaccacccagct

SEQ ID NO: 128733 - DNA, 2466 bp, Homo Sapiens
ttttacagaaaacagaactttattccaagggccagaggttatttaaaattatttacactcactggaaatcacgtggaggggctgggcccagctcagcagagagaaagagcccttctgtgcagccaccgagggccagaggcctccagaggcatggagcccggtgcccccatgcaggccctgggctgtgctgccaggggccggtggacctcacctggcctgggggctgaggaggatgcaccccaggcccagaggagtctttgtcactgggcctgcgcccatgccaaggccaagccaaacacacccaggagactacgggagggagccaggagagctgattacaggccggagtctgtggggtgggtggggcaggcaggcccctagctccacacgtccagggagtagcggcccttggtcatcagtttcttgatgtagtccaccgcctgcgcgtgctccatggccccgagctcagccacgatgtcgtagaaggtgttctgcacatccctggccatgttccgtgcatccccacagacgtagatgtgggcaccgccttcgatcaacttccacaggtgctctcggtcttgctttagcaggtgctggacgtagaccttgtgggactgctcccgggagaaggccacgttgagctgggtgagcgcaccgtccctgtggaactgcgccagctcctcccggtacaggtagtcctcatccgagcggcggcagccgtagtacagcagcgtctcccccacctccttgccctgctgtcgcagccaggcccgctcctggatgaagcctatgaagggtgccaccccggtgccggggcccaccatgatgacaggcgtggtggccttgaagggcaggcggaactgggacttgcgcacgaacatgggcaccagcgcacggccgccgttctccccggcaggctccttggcccgcagccagttggtggccacgcccttgttgatgcggccggccttggtctcgtactccacaaccaccgcacagatgtgcacagagttggggtggaccttggaggatgaggcgatggagtagtagcgggcctgcaggcgcggcagcagctcacacaggtggtcgatggggggccgcagggacgggcagtcctgcaggatggccaggatgtgcctccgggcctccaccacccagctcaggtacagctccttgccctcgccggaggaggaggccatcttgcgcagcagctcctgctccgagggctccgaggcgtactgcgccagctcgtacagcacgttggtacgcggcgggttggtgatgtccaggtagtaggtgagggccgtgcggtaggacgtagggcacgggaatgggtgcttcttgttggactcctcatccaggttgttcagggacatgacgacgtccaggtcggcacccaggattttgcccagctggttgacgagagcagagtcgttggctgggtacacagccacgtggtccccagattcatacctgattttggagtccgagatgtccaattccaggtgcatgaggtggcgctcggttccctggttcagcttccggttggtggtgactgcagccaggaacggattcttggcatcaaaggggggcttctggttctcgtagctcttcagccggcccatctcccccatgtacaccttggccgcatctatgtcggtgtggaccacaagctcgtactggcgaatgctggactcctcgccagtggcttccaccccaaagtgttcacacacggccggccagaactgctctcgccaggtgatgaagtcctcctccaagttcccatcgtcgtcgcccaaccccagctcaaagatgcgctgggcgccgagctgctccagccgcttgtccacgtacttgcccatggcattgaagtgctcgtaggtcttgttcccaagaccaaacaccgcgaacttgaccccagagagatccacgtctgtctcctgcagccagtcgtagaagtcctgggcattgtcggtggggtctccctcaccgtaggtggccatgcagaaaaccaccagggcgttgtcgatctctggcaggctgctcaggtcggccaggtcatactcctcagggtccgctgacatgcctcgcatcccgtagcggtgggcgtccttggacaggcggttggcaaactcctctgcagtccccgtctgggagccgtagaacacgatgatgttcctccccgttttcttcatcttttccacaaagctgctctctctgacagaggaggtcaatgtctgaattttggtgaactcggggacttcttcttttttctttctgaagaggaaccagtaggttaggagacccacgatgagcgaaaacagaatcatgtccgtcatgctgaaaagagatacttcttcggccaccgcctcggacacggtggagctggtgtccacgtgggagtctcccatgttgatcatgaaacgctggcagcccggctgctctctgcgggcacctgggcagggc

SEQ ID NO: 128734 - DNA, 895 bp, Homo Sapiens
ttcggggtttttgggaagcttagttcaggccgggccccatattccccccccattgaaccaccttggcccgccatctatgtcgggtgtggacccacaagctcgttactggcggaatgctggactcctcgcccagtggcttccacccccaaagtgttcacacacggccgggccagaactgctctcgccaggtgatgaagtcctcctccaagttcccatcgtcgtcgcccaaccccagctcaaagatgcgctgggcgccgagctgctccagccgcttgtccacgtacttgcccatggcattgaagtgctcgtaggtcttgttcccaagaccaaacaccgcgaacttgaccccagagagatccacgtctgtctcctgcagccagtcgtagaagtcctgggcattgtcggtggggtctccctcaccgtaggtggccatgcagaaaaccaccagggcgttgtcgatctctggcaggctgctcaggtcggccaggtcatactcctcagggtccgctgacatgcctcgcatcccgtagcggtgggcgtccttggacaggcggttggcaaactcctctgcagtccccgtctgggagccgtagaacacgatgatgttcctccccgttttcttcatcttttccacaaagctgctctctctgacagaggaggtcaatgtctgaattttggtgaactcggggacttcttcttttttctttctgaagaggaaccagtaggttaggagacccacgatgagcgaaaacagaatcatgtccgtcatgctgaaaagagatacttcttcggccaccgcctcggacacggtggagctggtgtccacgtgggagtctcccatgttgatcagaaacgcggcagcccggcatcccgggaatccggaccggtccagcct

SEQ ID NO: 128735 - DNA, 1042 bp, Homo Sapiens
caaaaagaatttttggcttatttatttaaaaaaagtcaaccttatacataaatagaataaaaacaagaactctaaacaatcacaaatgtctctacaaaataataaatatcatggaagttaaacatacatataaaactttactattaaactaatctcctgtatgtatatttttataccctgctccccccaacaaaaggatagtgtcacatgctcaaaccatttaagtcttgcagtgtagttaccctctgttgttactgctacattctaaacataaggttctcattgtgtgttcctatacctaaataaaaaacagctaggaagtgcacttctataatccaaattctggttcagttatgatcatatctgtacctgccataatatacagcagaatgctctctcttaatccatcaaaactaagaaatctcttggttatggtacctgtactaaatgtaaaagatatacttatttaatactaatagtttaagttagatactggcatagtaaatactctaatatctttcactaaagtcagggaagtaaccaaacaatattaaattctaaaaacagaactcctcacaggagattctttacaaaacaaaagccaaaaggagtaaaacacaagggtagtcattcacattctagagcaattcaagttctacaatcattaaaatatacattaaacacctatgataaaagggacacccaaaaaattctaggtttatttctaagtttaaatcataatgatttgttaaatcacttagtttttcttacccaacagccttcatcttgatgaaaagagggaaacatgagagaaggggaagagagacagctttgtagcattttctacgatgaatgctgcagctcgatatacaaagcatctgccctctctaagaagccacagtgctggcatccaggactttacacagcagataacaactgtggcttagagaagccagtctcaagtggattgcacagttgagggaggggttaatgtgcagcactctccacaagaccaatggagcacactcctatgtgtgtctgg

SEQ ID NO: 128736 - DNA, 1253 bp, Homo Sapiens
  misc_feature (155)..(163): n is a, c, g, or t
cagtcgacggtaccggacatatgcccgggaattcggccattacggccggggcagtgtacctgctgttcatcactcccgccaatattttttgagaagtatttcatttaaaaaagataaaaatagtgaagtttccaagtagactgtcctctcttaannnnnnnnnatcctaatttaaaaccttagttgacgagaacatcagtggaatacagtattccacttgtttggattttctgattttaaagatcttttggtatattttgggagaattggatactctgaagtttgagatgaatgaccactcactagctactttagaaattgtttttgtaataagtcatatagaatgctgtttgaatactttcatttacctttattctagaaacaggatccaggagatagtgaacaaggatttgctgaggattttgcttagctgaattcatattttcactttagttttcctagaagcatactctttattctgggttctaggttgggattcacgtgaatcagttggttccaactaatctgaacccttccacatgtcccagtcgcccatcagttcagtcaaagccactttcctagtgggtcatactctgtccgtgatgtcttcccagttccagaatagctaagaaataccaccgaagaggagcaccaagaagtatttcgggctgctgtggatctggaaatatcatctgcttctagaacttgcactttcttgccaccttttcctgcacatctgccgaccagtcctgatactaacaaggctgagtcttcagggaaatggaatggtctacatactcctgtcagtgtgcagtcgagacttaacctgagtatagaggtcccgtcaccttcccagctggatcagtctgttttagaagcacttccacctgatctccgggaacaagtagagcaagtctgtgctgtccagcaagcagagtcacatggcgacaaaaagaaagaaccagtaaatggctgtaatacaggaattttgccacaaccagttgggacagtcttgttgcaaataccagaacctcaagaatcgaacagtgacgcaggaataaatttaatagcccttccagcattttcacaggtggaccctgaggtatttgctgcccttcctgctgaacttcagagggagctgaaagcagcgtatgatcaaagacaaaggcagggcgagaacagcactcaccagcagtcagccagcgcatctgtgccaaagaatcctttacttcatctaaaggcagcagtgaaag

SEQ ID NO: 128737 - DNA, 639 bp, Homo Sapiens
  misc_feature (617)..(617): n is a, c, g, or t
tttttagttggctttctcttttaatcaaaaacatactttgttacagagttctcaagaaaggttcgactattttttagccacagactttaaccaggcaaaagtatacagaaagccacaaaggaactcctgggactttcaactgaccagttgtcccgaaagcagaagctacgagtggctcttctctggcttctggcatagctgcattcctctgaatttaggggaggaaacagttgggaaataccaccaccaaatctgtccccaacccccaactcacttcttctaaactgggctctgcagcccaccaggttttcatcatctataagcattcacacttttcccttaaatcacatgtccaatgcattgaacagaactcaatacttgaagaaagtttgccaactccatgtttagtcttaatcaatccaagcccgtgagtccttctatcaatgacaagcagcctttgcaacagcagctggtttcatcccttcctctccagctaccacaaagctggcctctaccaggactccccaaccccccaccctcaacccagccccaaggaaggctcccaggtccttgaaaatatgaatttcattaattgtactcatccaagggtaggctanaagagagctctgaatgatccag

SEQ ID NO: 128738 - DNA, 1235 bp, Homo Sapiens
  misc_feature (507)..(544): n is a, c, g, or t
cagtcgacggtaccggacatatgcccgggaattcggccattacggccgggggactccagtgtttctggcactagtctctgacaggagcctcctgtccccactgggttccaaactggcagtgctgccatgctggggcaacgtcattcagtgtcttctcggccttcaaaaggcttggacagactgttctccctcttgttacctgtagggctttttctaaagaggatggcagaacttccaacgtgtagcaatactataagaaccaaggtagcttagaacgtcctggacagactccactcatcatgctgtgtggcacaaatgtgttacatttgaccgagcatatgcaactcgctactgaagaagtgacttccgttgcataccaaagccgactacactgaacagtaccttcctttctagaaacaattttagattggcaaaagtgcaatgttttcttcactcaaaaaattttatattctcaaacatgtatattctttccctgtcttgttccannnnnnnnnnnnnnnnnnnnnnnnnnnnnnnnnnnnnncgtgggctgagaaaggggcaggcaaaatgaagctggccactgaaaactgtaagatggtcaaaagctgacagcctgtgtatgtgaacaagggaattgtaaatggactgcaatgtaatgtacactgtaatttgaatacaattactgtatctaaaaggagctgctatgaagtacctttcttatgttgctaggctactgtttctgaaagccctggatctctttgcaccaaaaatggtccagatagactctttttaaggatcttggctgctttttactagaaggttgcttttatgagcatatttatactgctgaaggctgagtgttaattttaattaactttgccgttttgtagagaaaactattcacaagataaattccaagtcttttcacctgtcaggcatgcatattttaatatctgtttggatagtcagaagtagaatcataaaggtaaaatatgagttgttactttgtttcttcgatgtcatattttatgtgtaatatatatgtaaagggccattcttaagttctctccttaaacttaatgctgtcaagtgttagatgtgtgcatgtgaacttgttgcactgcagaaacatattcagagtttatctatgtaacttattcactctgtaaatacatttaaagtttttgtgatgtaagcttaattgatattctgttcagaactttctttagact

SEQ ID NO: 128739 - DNA, 837 bp, Homo Sapiens
tttttttatttataaaactttaatgagggagaggccctaactcttcctcagctctaccaactactgaaaggaaaagctggtgctggggagccctccacaccactgactgatgaatttcagcacgtcctggcacactgggctgtgggaggtcttgatggccataaggaatttattccagttgtccttgttagcagccttccctggccgcttaaattcaattttgttcctcagaatggggtatcctgtaataaggcagggcagggctcgaacaccagtgctcgctgccactagggaggcctcgtaggcgccacgctcatcccgaggcagaacctgctccagccgctggtccatggagactgtaagcacccagtctcgaacctcttctctctcagcctccggtacatgctgcttagctgggagtggcacctcaaagggaatgtctgtatcctgaaaatcagagtggtcaaggccatctagagtcccttcctcgattgcatcggtcaggtccaaaaagcgattgaggaagatgaatgccatgttatcccagccaactgccttggcagcaatgcctgcttcatagaaggctttgtctacaggtagtagctgggtgtgacgcaagagtgaaacagaaagcctggcagccacggtttccagctgtttgacactctgggctgcagagcgcgtggcatagtaatgagcgatcagcagcatcgtcttgaactcctcatgggctggagagtttgctcactggacttcaccaggttttcacacaggttgaagaggacatctcgaagatccctcgtgccgaattcaacacccaggcctcgtactagcctt

SEQ ID NO: 128740 - DNA, 454 bp, Homo Sapiens
caattatttataaaactttaatgagggagaggccctaactcttcctcagctctaccaactactgaaaggaaaagctggtgctggggagccctccacaccactgactgatgaatttcagcacgtcctggcacactgggctgtgggaggtcttgatggccataaggaatttattccagttgtccttgttagcagccttccctggccgcttaaattcaattttgttcctcagaatggggtatcctgtaataaggcagggcagggctcgaacaccagtgctcgctgccactagggaggcctcgtaggcgccacgctcatcccgaggcagaacctgctccagccgctggtccatggagactgtaagcacccagtctcgaacctcttctctctcagcctcatcggtcaggtccataaagcgattgaggaagatgaatgccatgttatcccagccaactgc

SEQ ID NO: 128741 - DNA, 1222 bp, Homo Sapiens
  misc_feature (597)..(597): n is a, c, g, or t
ggagttgcttcttggcttaagaagctttggggctgagacgatagggttttctagacatgggatcatattatctgcaaatagagacagcttgatttccttgagatgaattttcaaaacccgttttaatgtagcacctgcttggtgcagaagatacttaagagggcctgcttggctaatggtagtatcagggtatgatgcctggggaaggttgggaagcagtttcccagaagaattcagtggatggatggtatggattcctttggtgaactgccgaggtccagggtctggcctttgggcttaggtcctcatatacctaattttatcatcatacaaaaaatagatttatctcttggggtagactcttaataactaagcccgtgaaactcagtaataaaaacagaatgagaattaatgagtaatgtaaccatcacatggaccagactgaacaaatgcaattttcttattacagctaagcttcacaggaagttaataagattgcttggtgaagacaaaatcagaagggtagtcagatttaacaaaagattaatgagaacaagctggtatacctgatatatctgctgcccataaggatgattnttgcaataacataatcaaagtcctttcagttctaatccctggcatctgtgacagctatcaatttattgcctcagtttcaaatctacgcttcattgccctgtctgtgatactggactatttgccagctggcatgctgtgagctttatcaatagaggggttgcagaggaactggaagaaagggcttttcttcctggttctggcatgttctttgtgtttgtttctgtagcacatgggacacccagcagtgcacatcccaatgagttccaaaggccccatccctatgggtagcttcccagcaagttctgtaccaggtcagctccccatggggagcttctagcaccccagagtgtggctcctcagtgagttctgccagctcagcactgcagtggcatctccatccagtgggctgtggctgtgccctctccaacaaggcctggatctaagacctggcaggaaaggggaagttgtggcaccctcctgcaaatttgttcttacctttgatgttctgcctcagccctagagacactctatatctgttattgctgtattcttttgagtttcactttttgttataacacttagtagttaataattcttaacattaaactttccctgttcaaatgat

SEQ ID NO: 128742 - DNA, 1242 bp, Homo Sapiens
ttttttagaggaatgacaggaactttattctaatattgcatgaaatgtttttgaagtagaaatgattatctgacaaaaaaactccttacactttgaccatctaaaaggttattttctataaaattatataaatatttccatgtccatatatgaacacaacgtttatggtcctaaaagttttaaaaatcaacagaattagattctttagataatgatcagcctagtcagaaaacaacattccccaagcaagcataaagagaggacacaattactgacggacagcggaaatgtgctgcgggctggagtcggggggctgaaaacaaggaaaacacaatcaacagcgcgcttggattttataaaataaaaccctgcaaaaactatatgtaaaaagtgaaactaaccatccaaggtgaaggtcagatgacctcctgaatcaagtgcattctgagttgaaacaatgaatagatcacctggtagatttgttcttccaggaggcaaggaccttttcctcgtttattcttatcaggaaaacttctattcaaggtagaaggacaataagagtgaagccttcacagctgacagacactgcttgtccattggctatgtcatcctgggcaaagtcctcagcctcttggagcctgtttccttgcctgaggtaaactgtggtctcagaaacatgatgcacacagacaggcgtcatcagaaagaccctgacagtgaggtctgcagttctctggaaaggcccagtgaggttttttggtcctgatgaaactgttctccatttcacagcagtcatcctaaatactccaagcagaggtctgtgaggagggtgactcgcctctcaccttctacagtccagccaaggactagagtccaagacaaagcccatgctgacggtcccgtgaggccaagaggcaggcaggggcgtcctcttcaggccaagcccagctgcacccagacaaggccgcgtgctgcagggcaggatgactggacatatccagggagcggaagtccccaaagctggaggctagctcagcccatcctgctgctggctgtcctgctcagcttgtggtgagtggaggcaagtccctgccccggcccgcctgcctgaagtcatcagatgtactgctcctcatccctgccattcaggagcagagaccacttgtccccatcatcgtctgctgcagcgctgtgccgagatggcttgtcggacgtcagggaggacagcgacacctggctgac

SEQ ID NO: 128743 - DNA, 739 bp, Homo Sapiens
aacttttatcaatccttcattgatttgaagtaaaagtgctaaagcaatgctttttggttggcaacccatttagcacgatcacaaaatcactgtagtgggtaactaaacacagaggaaacacaagacggcatcctgtgtaactggggttaagcattactctctgaaactcatggcatcagtttcctcttaggctcttccaacagagtataatcatgttcatttcagtttacaatccttgcagtcccatcgatttgtgagattatacccaggtcatccacagtggaggtctgaaaatgttcttagttgtactctaatttcactaactgccaaaaggttttccagaataatctcagttgcttcattcctttaaagatgaagcccgaagaacgcatggcgattactttagaggaacaattagcagcagaggcagggctgtgctgatcccatctggcatcgctgggagctaacattaaagacatggcactttgggtccgggtccaggtcctggttcagagcagctgccacaccgtggctactagaggatccttttccggctttggaaactgaggctgactgcaccatcatcactaaaggcctgagactgctcgccgtgctcaacaccgactggagtggccatgtcttccagcgacgcgtggttcgacgatatcccgggaattccggaccgtaccagcctgctttctgtaccactgttcatattccaaatcccccggcgcctccg

SEQ ID NO: 128744 - DNA, 948 bp, Homo Sapiens
  misc_feature (792)..(792): n is a, c, g, or t
cagtcgacggtaccggacatatgcccgggaattcggccattacggccgggggttcttttcgaggtcggccgcgtggctggaagacatggccactccagtcggtgttgagcacggcgagcagtctcaggcctttagtgatgatgattaaaggtggtggctgtggccttgaaaacagtcatgtgaaaactcatcaccttaaggtgttaagtgtaaggatcttcatgatgaaatttctgtaaatggtgcagtcagcctcagtttccaaagccggaaaaggatcctctagtagccacggtgtggcagctgctctgaaccaggacctggacccggacccaaagtgccatgtctttaatgttagctcccagcgatgccagatgggatcagcacagccctgcctctgctgctaattgttcctctaaagtaatcgccatgcgttctttgggcttcatctttaaaggaatgaagcaactgagattattctggaaaaccttttggcagttagtgaaattagagtacaactaagaacattttcagacctccactgtggatgacctgggtataatctcacaaatcgatgggactgcaaggattgtaaactgaaatgaacatgattatactctgttggaagagcctaagaggaaactgatgccatgagtttcagagagtaatgcttaaccccagttacacaggatgccgtcttgtgtttcctcttgtttagttacccactacagtgattttgtgatctgctaatgggttgccacccacaaccattgctttagcacttttacttcnaaatcatgaaggattgataaaagttctcctggtgtctccgcagagtgccttccaggaacagatctttgcatagaatatcagtggtttccttttttggtttcaaatagtggtcaaaaaatacccagtgttgactcacccaggcatcagcttcttttt

SEQ ID NO: 128745 - DNA, 1310 bp, Homo Sapiens
  misc_feature (143)..(252): n is a, c, g, or t
  misc_feature (275)..(367): n is a, c, g, or t
ttgccggggttctggatggggctcccccccctgtccattttcagccactttgggaaggctgagggcaggcaagatccccaaggttcaggagatagagaccatcctggcccaacatggtgaaacccagtttctacttaaagaannnnnnnnnnnnnnnnnnnnnnnnnnnnnnnnnnnnnnnnnnnnnnnnnnnnnnnnnnnnnnnnnnnnnnnnnnnnnnnnnnnnnnnnnnnnnnnnnnnnnnnnnnnnnncgacagagtggaactccgtctcnnnnnnnnnnnnnnnnnnnnnnnnnnnnnnnnnnnnnnnnnnnnnnnnnnnnnnnnnnnnnnnnnnnnnnnnnnnnnnnnnnnnnnnnnnnnnggaagctgattgccttggtgagtcaacactgggtattttctgaccactatttgaaacaaaaaaggaaaccactgatattctatgcaaagatctgttcctggaaggcactctgcggagacaccaggagaacttttatcaatccttcattgatttgaagtaaaagtgctaaagcaatggttgtgggtggcaacccattagcagatcacaaaatcactgtagtgggtaactaaacaagaggaaacacaagacggcatcctgtgtaactggggttaagcattactctctgaaactcatggcatcagtttcctcttaggctcttccaacagagtataatcatgttcatttcagtttacaatccttgcagtcccatcgatttgtgagattatacccaggtcatccacagtggaggtctgaaaatgttcttagttgtactctaatttcactaactgccaaaaggttttccagaataatctcagttgcttcattcctttaaagatgaagcccaaagaacgcatggcgattactttagaggaacaattagcagcagaggcagggctgtgctgatcccatctggcatcgctgggagctaacattaaagacatggcactttgggtccgggtccaggtcctggttcagagcagctgccacaccgtggctactagaggatccttttccggctttggaaactgaggctgactgcaccatttacagaaatttcatcatgaagatccttacacttaacaccttaaggtgatgagttttcacatgactgttttcaaggccacagccaccacctttaatcatcatcactaaaggcctgagactgctcgccgtgctcaacaccgactggagtggccatgggacgcgtgggtcgacgatatcccggaattccggccgtaccagcctgcttttttgaaccactgggttctatattcactatgct

SEQ ID NO: 128746 - DNA, 1054 bp, Homo Sapiens
tttttgtagttagaactcaactttattgttacaacgaatttttatttacagaatataaatctcttcaaaaagatacattccttcatttaatcaatggtaaaaagccttattaacagaaataaagcctaaacatcacttatatttgaactgaaagacaaacagcttcattaaaagtttatgaacacatagtgaaaatgtatttttacttaaccagttacatgaatgaggctgtttttaattttcttcactgccaacctcattttatccacagaacaaattttatttaaattaacagtagtaaaaatgtaaaacttaaattttgaacatgaaaatatgaaacaagaaaacaggaagtatcttcattatcaaacagattaacaaattctcagacagatagtttctgaggcatagcaaaacacctacatcaaaagttgcattcatttaagaggtatcaatacattttcagtgctgagactatttgtagcacttacattatatacaaagcagcattatactactatggttcacatttgataaacacgaatttaagctttatgccacaatttcccaattcaacataaagctaacgcaatgacagttacccaatttcattctttttcttctgaaactgaataaggaaattatcatttaagcacatggaataatggccatgtctttttccttttaataacagtatattttaaacctcaaatacttcatatcatggaaattttgaccaagctgtacaaaggctcctaaatacagtacagtcaaaaagtttcctctttgcagactcaatttatagtcaatttagtacagataaatataggaaactacttcagattattggacaaataagaatttcagtgtgtcactacctataattaagtagcagcacaccacaaccacagcaagtaaacactaatctcctctactgcctttttggggtcttttccagtcacaggagctaatttacagggataccactgggtttcaaccaatctctgaaagttcctttattatgagttttgaaacccagtggcatcgataaaca

SEQ ID NO: 128747 - DNA, 837 bp, Homo Sapiens
tttttacacttcataaaaccatgtttattcaaaaaaatctattcagaaagtctggaaagcgtaataaatatctgtacagtggccacccatctcaaacatgaattacaaagcaggaacataaaaatgatgtgtaaacataactgctgagccagtgaacaaagtgctgagtcaggagcgaggcagagaagcgtgctcagtagaacgacacagatgctgcagcctccgtcctcagcccctcaagctgcgctggagtccaccttccgccctctccacaccgctcagggaccggcagcgtccttctccattctcgaatttgcatgacgcttagaaaggtaggaggcagcaaaacgtgtcagaaatgaacggagtgcaaatcaaactttgccatgtgcttgagagaatcagtaaagcgttaggtaaaaatcccaagtgcagctttaggataacaccatttaatgaacaatactggataacattaagtactattatcactttaaaattcaaacaatcttccaaacatcaatacatacacagttagtttaaaatcacagacaaatcggacttgagggtaaaagtgaaatcctcacctcttgcccatgtttgactttgggatggaattcagcaaagctctcccactgcagattgggagaatcaggtatttctcccacatggggggctgccaagggaaggaggaccctatagggtggccagcaaggggccactggcgggtaggtcaggaagcctgagatctagggttcaatgtgtttataagttctgtgattttcatgacccgggggtggggggttgggttatgatgaactgtgtgaggaaggagag

SEQ ID NO: 128748 - DNA, 336 bp, Homo Sapiens
tctctgttggaaccggcggcgttgcgtctaatttggcgaaagccttgaggttgaaggtgggacgagcctaatgaagtggttagtcaacgaccgcaccgacccttaagcgttcttaagacgagagctgtgaggggaaactacgcaaggagcccttttcccttaatgtcccttcgactttcctttcacttcgaaatgaatgtggaaatgctgtcacgccttatttttctaattcctcgatgttgggttttttctcttctttatatctcaacttttaatgctcttcttcctatgacctttcatctaaaaactgaccactcctttacaggtttttacggt

SEQ ID NO: 128749 - DNA, 908 bp, Homo Sapiens
gtagaagcagggttttgccatgttgccccttgccagaatcaattctaattataggaaaaaagtttctgagtaatcaaaattttgcacatatttctggtggatttcatagtttagcttaggaaacttgaactcttactgagttggtctgcccatgtagatgcctggtgttggtgtgtgcgctctcttggttatagaataatccacccgaattcttctaccatccagctccattccatttgccctttccatagcctcctttgagtcatctattctctcaaaatacacaaaagcaaatcctcgagatcgcccagttcgctgatcataaaccacattgacaccactcaatggtccatatcgagaaaatacttcacgaagatccctctctgttgtgtacaaactgaggccaaacactccaaggcaagtgttgggatctgggtttgccctgctgccagtatgtcttctccggttagacattggagaatggcttcggctccttcgccgccggtattctggtgtatatgatctacttcgagatcgtctcctatgagagtgagagtgggatctggatcgagtgtaacgtctatgagaatgtctccttgacctcgacctggattttgatcttgatcgagaatgggattcagagtgtttggaaacccttgatggactacgagatcctgacctgctctccgattttacacgagcaggagttcccgttggagattttgactgagagcgagactctctgccctcgaagttgttttcctccacatcactcatgtcgacgaggcgctccccagaactaaataagagacaagtctcggctcgagggccgatggcctaattaacccgctgactggaccgtggggaagaggaaagagtcggcaaccacagccgctccactccactcc

SEQ ID NO: 128750 - DNA, 1253 bp, Homo Sapiens
tttcaaagtaattaaatctttattgaggcatttatgtgccagaaactgatcacacacagacataaggcacggtccctgccctcgaggagctcacagtctagtaaggaagacatatggggaaccgattccccaaagatgcggggagtaggggaggcagtgcttagagtggggagccattgtcccacccaccccacgctccaaagtccaggctggctaggagaaagtgagtaggaagcttagcatcctctctctcaccttccccgtgacagctgacttctctcactctgtcctaacatcacaagaggacaagcggagagacaaggatgagaaggatacaggagctgtcctcaaaaagctagaacacccctggcagaatatatacaacggtattttatttcccaaagccgcaaaccagcgcagcagaagctggggatactggggaatgttggaaaaacaggggctgggccagcccagtccagtggtgggaacaggaagtgatgagaagaggggtacccagggccagagaagtaggtgagagggaaatttccaggtggagaagctcacagtaggacaccagcagccacggccaacagaagggctgccaatccagctgtgggagccacacagcctttattatggggctgctggggccccccttttgcaggatactgccctgaattgctgcggtcctggtggccagcggcgcctccagtcaacctgggctcctcatcccgggaggcctcgtgttctactccctgtctcggagtctgactggttggcgctggcatgggtttggtggtggatgtgggtctcactggggccgaggtagaagtggtgacagatgtggttgaggccacagtcgtgggctctggagggggcagccggacaaggggtgggattcgaggggagaagtaggtcttgttgcggaggtcagagttacagcgggacccctggcaacaggagccactgagcgtgaaccctgggcctgttactccatcccgagtgcagaattcatcctggacacagccccggacaggcaaggacacagtcacattagctgccgtcaaggtgacgttgccgtcgaagcagcccttgtagacatgatcgctggcgttgtagcagctcacgaccggcggcgatgtaccctggcacgcctcccggctcaggcccacacagctgtagcactccacgccgttgggcgggtatgcactctcattacctgccgggtcgagcgcccgcgaggtgaggttgag

SEQ ID NO: 128751 - DNA, 1202 bp, Homo Sapiens
  misc_feature (1126)..(1160): n is a, c, g, or t
  misc_feature (1163)..(1163): n is a, c, g, or t
gatgctaacaaatcgagatttattttaaaaactattctcctgctatgagttcaatatttttatttctttacaatgatttcagaagagattacaaagagattaatatacttaaagaatcagactcttgcaaacagtgacatcattaaaaagagcttattttcattaacatgtgattaacaggaaggagatgattggtgagttttcttcgtaaccaggttcactgtggataggaagggcctgccttccttcccaccatggagatcctaaaatcacaagctccagcctccatcaatgatgacagggttaccagttacataagcagattcatcagaagccaaatacacgcagagcatggctatttcttctgcagttgcgaatcttcccgtcttttgtctcttcaggaaatcattccgtgcctcttcaggatttcctctggcttgtattctttcttgtagagatggcgtatcaactgttcctgggcacacacagttgcacctgatgccctgctggatgaaatctgcagccacagattttgtgaggccaatcacggctgccttggttgtgctgtacacacatctgttcacaactcctttgacgctggaagccacagaagacatgttgataatattgccagatttctgagcaagcattttaggaaggaatgccttgatcatcaggtacatgctgcgcacattgagattcatcgagaagtcccagtctttctcctcacaatccaggacagttccatgatggacaaaaccagcaacattaaagagaacatcaagtctctcaacttcattggcaaactgatcaatttgtttcttctttgtgacatcaaggacacgagtttgaatacccgggtacttttccagttcctgaagtttggactcattaatgtctgtggctatgactttggcaccttctcttgcaaaagctaaggcagctgcttggccaatcccctgagcagcggccgtcaggatgatgactttcccatcaagtcgacccataatggaacctgtggtttaattttaagcagcgagctgatggcgttctccagaactcggtttgagcaacccccggccgtaatggccgaattcccgggcatatgtccggtaccgtcgactgnnnnnnnnnnnnnnnnnnnnnnnnnnnnnnnnnnncgnccgcttcctcgctcacaaactccgtgcgctcgtcgttcg

SEQ ID NO: 128752 - DNA, 1123 bp, Homo Sapiens
tcgcgacgtgtatcttgcaaggagaagatggtatctcagcagtaactatttcattttaaactcacagatccaactatgccagattgtgacattaatccacatattgtactgctgtccttgtccttcaacttgacttcttgctgatggctcagatcaactgtctttgtgaagcattccacaaactcacaggcagttatttccctgtattttgacagcgctttgtacaaacctctgttatatatcatcacactggagaagatgatgtttgctgccttgttcctagttttggactgtgaattcttttatggccagagcacataccggtgctcaatacactattttaaattaattaaatgttaaatggttctttctcccagtttgatgttcatttccatgtccattagaaagaataaaagggagggcaaaaataccccacattttaatttaattttaccactggctcacatcgagagcaaaagatctgtggttaaggaacttaataccaattttgaaaaaagcagttttgaaatcatttcaatacttgaaattataatctctgctatgcctgttcccaaacgcagagctcttaatgatgtgcgtgtatgagcatcgcagtcctcggaaggagacagacccacctttgacgctggaagccacagaagacatgttgataatattgccagatttctgagcaagcattttaggaaggaatgccttgatcatcaggtacatgctgcgcacattgagattcatcgagaagtcccagtctttctcctcacaatccaggacagttccatgatggacaaaaccagcaacattaaagagaacatcaagtctctcaacttcattggcaaactgatcaatttgtttcttctttgtgacatcaaggacacgagtttgaatacccgggtacttttccagttcctgaagtttggactcattaatgtctgtggctatgactttggcaccttctcttgcaaaagctaaggcagctgcttggccaatcccctgagcagcggccgtcaggatgatgactttcccatcaagtcgacccataatggaacctgtggtttaattttaagcagcgagctgatggcgttctccagaactcggtttgagcaac

SEQ ID NO: 128753 - DNA, 1170 bp, Homo Sapiens
  misc_feature (53)..(115): n is a, c, g, or t
  misc_feature (129)..(179): n is a, c, g, or t
  misc_feature (185)..(359): n is a, c, g, or t
aaagaggggtttttttcctaaaattccccccggggggtgttttttcctccctnnnnnnnnnnnnnnnnnnnnnnnnnnnnnnnnnnnnnnnnnnnnnnnnnnnnnnnnnnnnnnntttttcaaaaaaannnnnnnnnnnnnnnnnnnnnnnnnnnnnnnnnnnnnnnnnnnnnnnnnnncccctnnnnnnnnnnnnnnnnnnnnnnnnnnnnnnnnnnnnnnnnnnnnnnnnnnnnnnnnnnnnnnnnnnnnnnnnnnnnnnnnnnnnnnnnnnnnnnnnnnnnnnnnnnnnnnnnnnnnnnnnnnnnnnnnnnnnnnnnnnnnnnnnnnnnnnnnnnnnnnnnnnnnnnnnnnnnnnnggcctgagggcacatgtttatttagcagacaaggtggggctccatcagcggggtggcctggggagcagctgcatgggtggcactgtggggagggtctcccagctccctcaatggtgttcgggctggtgcggcagctggcggcacctgtgcactcagccgtcgatacactggtcgattgggacagggaagacgatgtggttttcagggaggcccagagatttggagaagcggatgaagttctcctttagttccgaagtcagctccttggttctcccgtagagggtgatcttgaagtactccctgttttgagaaactttcttgaagaacaccatagcatgctggttgtagttggtgctcaccactcggacgaggtaactcgttaatccagggtaactcttaatgttgcccagcgtgaactcgccgggctggcaacctggaacaaaagtcctgatccagtagtcacacttctttttcctaaacaggacggaggtgacattgtagctcttgtcttctttcagctcatagatggtggcatacatcttttgcgggtctttgtcttctctgagaattgcattccctgccaggcctaccacataccacttcccctggaattggttgtcctggaagttctgctgcagagggaccttgctcagaggtggggctgggatcaggtctgaggtggagtcctgggcctgggcatgcagagcccccaacagggctaggcccagccacaggagacctaggggcatgatttcagggccgaggaagcaggcgctgtggtggctgctgggcctggcaggggtggaagagg

SEQ ID NO: 128754 - DNA, 707 bp, Homo Sapiens
tttgctttgagcaattttattgcacttcccactgaaaaacaatttcctgggggaagttggggaaacacgtttcccctgctgcctcggattgtccacaaactgcaccaccatgttctccggccacgctgccccacacctgcttttgaagactgaaaggatgcgcatccaattcagtccacactgattgaggaaccaggtttataccaggctgcggcttggcttggaggatagatacatgggtgaaaagggcgacagtgcccgctcttggtggacctctagtgtgaggcagggggacagagaggcctgcagtgcatcagggctagggccgtggtggagagaaagatgtggggtgaagagagggcaggctggacgcccttgggaaggggcccgaggccttacggggtgagttgaggggtgatgggtgagtagggattccgccaggagaggaatagaattctgtgcagatgtcctgacttggcaattttgtgtccctgcctcactgtctccaccaacccccgcctgtcctagtgttgttctgcctcctgtcctctcttgctctcttgtcagtctctggcttcctcggccccatttcacttcactgagtcctgacacccatctccctaggggcctgtgagaggagagggaagggtctgttctgctcagctccatgtcccccattttcctccacaataaactgggactgggct

SEQ ID NO: 128755 - DNA, 1121 bp, Homo Sapiens
  misc_feature (649)..(649): n is a, c, g, or t
aaatctggcatatgtttataaaacagcaccccagacaaaatttgaagttttgtagttttagtaagcaagtcctcaaatgacggtacatccacgtagtttttatataattatgtctgaatgaacttaactataactagtgacataaagatcccaactagacaaagactggtcttaaatatgggaacctaggactttatcgcagctctcagatttacccaaaatccttcccgctgagcctcgtccatgggccactccaggtaggtcttggtgttcattatcttccgcagcttgcagaagcgctggggaatggcttttttctcaatgggctccagaagaatgagaatggcagcatcattgttctcatcaaaaagacggaaatgggagaagtccagttcatacttgcaccactcactcttcacaaagttttcagaaagcacaaagacagttttgtggctcttttcaatggagtcaatgatattgtcaatgatccacttgccaggaatgaagtcccgcttatgaagacacaacttgaaggggggattgaagttctccagctcctggaccataaggttctccacccagtaggcatcccgctcactgtaagaaacaaatgcatcatagcagatgttcctgctgggagctttcctgnggcttccttttggcctggagccaggcccacatcattttcatataccacaggccatggaaacggtggcacaggacccccgtgagcaggatcagcaggaacaagagcacagcacatgccagacaccagtgctgtcctgtgacattccgacaccgagaggcggacatcctgaacctgctggccacgcacatgggatggagagtcacacaggtaatttgctggccaatcaatcaagactttggccagtgcttgctgctcctgagtgaaggagaggaattcacaggagcaaatgaagttattgccaccagcttccaaagtcttcagtgtgtgaaatgagtcaagttgctccttagaaaacgtagttattgcattcctactgattttcaatactagtaacatgggtaagagggaggcatctggtagagtcatcaacttatttctggaaatataaagttctttgagttgcggcaaattc

SEQ ID NO: 128756 - DNA, 570 bp, Homo Sapiens
cgaggtcataagtttaatgaagtctgaaaggtaagcgccatcgtggtcagagatacggaggcccggtcagactctccctctgcacctcaatggaaacgatgtggtgtccgggtaccatggccaggcccagcacacggggctccccggcagagaaggaatccgacggcttgaggaactcctgcgccgagcccaggatgacattgcagtcacggtcagtgcagaggaagcagccgaccagtgtccgtccatctgtcatgcgaatgcgcatagtcttgttgagcagcgcctctagctgctgtcgggcgcgctcagccgccgagtcctcgcgctctccgtccgaatcctgcgcggggtgtaacaagcgctcagaccgcgcagcccaggctgcccgcccgcggaaccacagctccatcttgctgcttgactgcccctcagtcccagaaccagagcccgtgctaaccccagcactggagctgctctgacgccgactgcaacagccattctcttctcgtagcagcatggtcggtccagctccggccatttgcccggaggcctcctctgggcctttca

SEQ ID NO: 128757 - DNA, 1048 bp, Homo Sapiens
  misc_feature (444)..(519): n is a, c, g, or t
aaaccccttcctgtgggaaccagggggcccccaaaaaaagccccccggggccgggggaattttaaaaatcccccaacccaatttgaaaccccaaggcccccgggggaaaaaaatttccaaaaaaccatttcccgttaaaccaaatctttttaaggcggccaagcttagccgggtagttttacccccttatccccttaaaaaattttttattttccctagaggcgttaaaatttccgaggggagtttgtccccaatagttccccccccagaaggaaggttcctcccaaaaaatccccaggtagcagttttcccaatcccggggttgtaaaaagagggccagggcctaggttataatacggccccctataggggcccctttgtaccaaaaaactggggacgggtaaacctgggccccccgagggaaactttagggcggcccccccnnnnnnnnnnnnnnnnnnnnnnnnnnnnnnnnnnnnnnnnnnnnnnnnnnnnnnnnnnnnnnnnnnnnnnnnnnnncggtcataagtttaatgaagtctgaaaggtaagcgccatcgtggtcagagatacggaggcccggtcagactctccctctgcacctcaatggaaacgatgtggtgtccgggtaccatggccaggcccagcacacggggctccccggcagagaaggaatccgacggcttgaggaactcctgcgccgagcccaggatgacattgcagtcacggtcagtgcagaggaagcagccgaccagtgtccgtccatctgtcatgcgaatgcgcatagtcttgttgagcagcgcctctagctgctgtcgggcgcgctcagccgccgagtcctcgcgctctccgtccgaatccccagcactggagctgctctgacgccgactgcaacagccattctcttctcgtagcagcatggtcggtccagctccggccatttgcccggaggcctcctctgggcctttcaacttcctaagcacctttcaggttgggtggtccgagatctcgcgagcgctcccgacctctttcctttcgccctcgtgcc

SEQ ID NO: 128758 - DNA, 419 bp, Homo Sapiens
gccttccctccatgatctccaacactatccgataaagtagaagcaactgaggtaccgtgaaagagaaaggagctggaactgagaaaaagcagaggattcggacggagagcgcgaggactcggcggctgagcgcgcccgacagcagctagaggcgctgctcaacaagactatgcgcattcgcatgacagatggacggacactggtcggctgcttcctctgcactgaccgtgactgcaatgtcatcctgggctcggcgcaggagttcctcaagccgtcggattccttctctgccggggagccacgtgtgctgggcctggccatggtacccggacaccacatcgtttccattgaggtgcagagggagagtctgaccgggcctccgtatctctgaccacgatggcgcttacctttcagacttc

SEQ ID NO: 128759 - DNA, 553 bp, Homo Sapiens
  misc_feature (442)..(442): n is a, c, g, or t
  misc_feature (520)..(520): n is a, c, g, or t
tggtcataagtttaatgaagtctgaaaggtaagcgccatcgtggtcagagatacggaggcccggtcagactctccctctgcacctcaatggaaacgatgtggtgtccgggtaccatggccaggcccagcacacggggctccccggcagagaaggaatcaggcgggtgtgcattccccgggcactgacccgacggcttgaggaactcctgcgccgagcccaggatgacattgcagtcacggtcagtgcagaggaagcagccgaccagtgtccgtccatctgtcatgcgaatgcgcatagtcttgttgagcagcgcctctagctgctgtcgggcgcgctcagccgccgagtcctcgcgctctccgtccgaatccccagcactggagctgctctgacgccgactgcaacagccattctcttctcgtagcagcatggtcggtccangctccggccatttgcccggaggcctcctctgggcctttcaacttcctaagcacctttcagtttgggtggtccgagatnctctcgagcgctcccgacctctttcctttcgcg

SEQ ID NO: 128760 - DNA, 684 bp, Homo Sapiens
ttttaactgatatatatctttttattatgcacagataaaagatttaaaactgtggttatcaaaactatacatctaagcatcttcacaaaatagctgacacactgaacagagaaaagaatacaacaggggtgttcaaactggccacagggattttaagggtactcgttttaccctcatagatgatgaaaaccagcaacaaaatcaggctcattcaggaaaaaccagaagagagaagtattgtatttggaaactgataatagtcctttttagaaaaacatctgtcagtttcatgaacaacccccagataaaacaaacatgaaaaaaatcacataggactcacccaacaaaatgtgctctgttaacacaaccagcagtacaatcatcattcaaaccatgaggtagttacagtacaaaaagactggcacgcgtgtgagcaccccacacacactcacaatcatgcccactaagaacacaagcaggaaatggatttacaatcttattacaaggcaaagaaaaaaaccattttttttgtttagaaaatgctatagaaacagtttagacagaagaatctctggcttttttaaatacagagtaacagctggtaaaaccacatggtgaaaagctatagcgtatatacagacaatctgccttggagtttggggcattttacaacagttcagcatc

SEQ ID NO: 128761 - DNA, 863 bp, Homo Sapiens
  misc_feature (751)..(785): n is a, c, g, or t
tagtataaaaaccgttccatgtgattttaaaaaaacacttacacatctagatagaatagtactctgccctatttgagtgaacagtctccaactatgaagtacatgatatttaatgccctaattttgagtaaatttagtcagcggttcttggtattatacaagacacctaaatacatacgacgaaatataatatcttatttttctatgcaagtcttttggggaataaacagagccttgattctggtaacactgcaaaaaacataattgtcccataagtctgtctataagtatccatgtgcaacagtttattaatggctgcttacatgtactgctcttttactgagtgaacacagttaaccaaccaaacttcataaaccttaagaacacatcttccaccctatataaaatatatagactacttactgttttaagtattcaatttgctctgatgtcactgtaattcactttccccccattttcctgctttagtatttataaacagataatttaatgtggcttaaaaaaaagaatttccaatttacatccaattcaaactggctatttaaaaggtttcctggttctatgaagctgcttcggccattagtagagaaaatgaagtttctgtaatggaggcaggctttttaagtagtgacgtgacttccaccatgccagctccagtccgtggaagattagcgtttaccccggccgtaatggccgaattcccgggcatatgtccggtaccgtcgactgnnnnnnnnnnnnnnnnnnnnnnnnnnnnnnnnnnncggccgcttcctcgctcactggactcctgcgctcgtcgttcgctcgcgagctagcgccctatagtgatctatcatctt

SEQ ID NO: 128762 - DNA, 1195 bp, Homo Sapiens
  misc_feature (1118)..(1152): n is a, c, g, or t
aattttctttaaacctttttttatttagagatttttctggtaaggagatataccataggaaagcaatttcactggcagtgaggtatgtatatactctaccaaaatactccttattttaactgtttttaactttatttacatacgaagcaaagaatcaatgcatatccttggttcaactatagtattagccatactacatgaaataaaatggtgcttgcatacaaaaacttgttgtttgtaaaggaatctgatttcagattaaaatacctaattgtttttggaaaaaatttttaaaaagaatcacaatttatcatgaccaagacacctgcaccatattttccattcctcacagcacatttatttcagtaattctgttatgtcggttcttagcatgagcatagtgttacacgattttcgtacatataatcacatccaaaacaagttctaaaatttaaattgtaaacattctcatatgtagaaatattttaattggtgtattaagttttgctaactgatcaaatttggaagataatataaatgagaacgtctattctaaactgtgtagtgagcattgtttattaattacatttctacaatgttaaataaagtaagaggccaacctgtcctgtaagcatgtcaaattttaggtaaaacattaaaaagaaacgaacctgttaacaaaagaatgtcttgcaataaagaacattagatttttaaaatctattatgatacagagatgtaaagggtaaatagcaactttgttgacaaagtaggaggtagcatggatgcaccactttattgtctgagaaatgcaactggagtaaagaatatttccttaccacgagaataatttccagaactatgtacatatttcttttagaaatacttgtttaaacaaatctccctccactttttagtataaaaaaaaccgttccatgtgattttaaaaaaaacacttacacatctagatagaatagtactctgccctatttgagtgaacagtctcaaactatgaagtacatgatatttaatgccctaatttgagtaaatttagtcagcggttcttgcccggccgtaatggccgaattcccgggcatatgtccggtaccgtcgactgnnnnnnnnnnnnnnnnnnnnnnnnnnnnnnnnnnncgccgcttcctcgcatcactgactcgctgcgctcgtcgttcgg

SEQ ID NO: 128763 - DNA, 1308 bp, Homo Sapiens
  misc_feature (107)..(107): n is a, c, g, or t
  misc_feature (121)..(121): n is a, c, g, or t
  misc_feature (436)..(444): n is a, c, g, or t
  misc_feature (1206)..(1240): n is a, c, g, or t
ggggaggttccatgattttaaatgccctaatttgagttaaatttagtcaagcggttccttggttttattccaaaacccttaaattcccttccaaccaaaatataatnttctatttttctangcaagtcttgtggggaataaacagagcccttgattctggtaacactgcaaaaaacataattgtccaataagtctgtctataagtatccatgtgcaacagtttattaatggctgcttacatgtactgctcttttactgagtgaacacagttaaccaacaaaacttcataaaccttaaaaacacatcttccaccctatataaaatatatagactacttactgttttaagtattcaatttgctctgatgtcactgtaattcactttccccccattttcctgctttagtatttataaacagataatttaatgtggcttnnnnnnnnngaatttcaaatttacatccaattcaaactggctatttaaaaggtttcctggttctatgaagctgcttcggccattagtagagaaaatgaagtttctgtaatggaggcaggctttttaagtagtgacgtgacttccaccatgccagctccagtccgtggaagattagcgtttacaatatgtcgttgtaagtgcttaatccagtcttcctgaacagacaagggtcctcgaaagactaggccacaaaacctgcatcggagaatgtaaacctcgtcagcaccatgaggtaatgttagcattttcttcttgcttccagatcttgaccttgatttcttttgcttacaatctaaggctgagtgcatagtcaagtccattttttgtggctgatacatcaacggactatcctcatttaatggaagaacgcatttctgaacgaatctctttcttgctgtctgattatggatcttttgaggagaaatagcagaattcctttcttctcccatccttttatttttaagaagttctatgagtgtaagagactgattctttttcccactgggcagttctggttttgtttcatcatattcatttaagaaattcagcccttcttcttctgatgcagacactgacagagcttcagtctttagcgaccattacggtatgcttcaagaggtataacattttgagatataaagtcatcacttgatgcaagacccggaccgtaatggccgaattcccgggcatatgtccggtaccgtcgactgnnnnnnnnnnnnnnnnnnnnnnnnnnnnnnnnnnncgccgcttcctcgctcactactcgctgcgctcgtcgttcgctactagactagcccctatatgacatca

SEQ ID NO: 128764 - DNA, 827 bp, Homo Sapiens
  misc_feature (143)..(153): n is a, c, g, or t
  misc_feature (431)..(445): n is a, c, g, or t
aaaatttcctgattttattatcaaatagtttttaatgccaaaacatttaaatccatagtttggtatatttgttgtaagaattggtaacgataaaataacattagtaccaaagtatctgaaaaatgagttacataaatttacannnnnnnnnnnacaaattactaatctacatgtgaatttataatcaatattaaaattcaaaacactagcatgcacattaacaactgatttctaatagtgatgaggaaaacagttctgttacgtaaaaactgtgttgaaaacaaagaaaacaaaatgactatttagtgaaaaagtttataagacgattgccttataatagtaccaacattactggtaggtaacatctcaaaaattcaaaaaggagaaaggttcttttttacccagagaactacatatataaatcacatagnnnnnnnnnnnnnnnaagttttcaaaatgagatattatacataatattaaaaatgtcaaaataagataagatacagggcagaaaagttaaaatattttagtgaagaccacaagcaaaaatgtagaaaaaaatcctagaatactgattaagatgaagactaagacaacaaatacacagtgaattctgggatttgtgacagccatgccaacagtcacccctcagtatcagtgggcaatggttagatcttcctacagatacccaaatccacagatgctcaagtctctgatataaaatggtgtagtacttgcatataactgacgcacagcacactccatacatcaaatcatataactgacacacagcacaacccttacactgaatcatctctagattactt

SEQ ID NO: 128765 - DNA, 558 bp, Homo Sapiens
  misc_feature (464)..(464): n is a, c, g, or t
tcaggcttaaataacaaaatatatttcgatatgcacagttttaactgaggacacacaagccttcctcgggctgcaggcccaccgccctcccagtgggattcacagcccctgcggagtttgtcctcacgcacaccacacacgatcgggtataaaacacattctataaacacgttctgatgcaaactgtgtgtccataaatatatatttatgcaagttcctcccacccactgcagggccgtacagctctggggacaggaggtcacagccgactttaaaccacaggttaagtagaaggttgcaggtcaaatagaagttcccgtgtgattgcatcacccaacggcactgttctgtcatcaggaaatgctgagtgcccgccgtggccgggtgggcgcgggcggtggtcagacgctgctctggagctggctatctgtggcactgtcaggggctgaggactggctgggcanacaagtaacaaacatgggggagtgtgaaggtccctgggtcatggctccctgagggtttccctttcatttctaaggtgggactcagatctcttct

SEQ ID NO: 128766 - DNA, 671 bp, Homo Sapiens
  misc_feature (579)..(579): n is a, c, g, or t
  misc_feature (583)..(583): n is a, c, g, or t
  misc_feature (615)..(615): n is a, c, g, or t
  misc_feature (618)..(618): n is a, c, g, or t
  misc_feature (638)..(638): n is a, c, g, or t
tttttattttcattgaagggttttactgctaatcactctggggaaaacagaggcaggttgggggagggataacaagtaacaaacatgggggagtgtgaaggtccctgggtcatggctccctgagggtttccctttcatttctaaggtgggacctcagatctcttctccagaccaaggaggccccttccattgagaaggtcactcctcccaccccagagatctagaagcaaagttggggcacaacaggtgggaactagcaggaaactgcagtgcactcctacctaagcagttcacagacaatttggagaaccttcagacagtgacacccatctcataagtacttcctcaaaggccagggggactgctgccttaataacatgagcatgttctgagcctaccctatttctctttcaccccaagaaagtaaagccaagactgggtcttctgactttccaacacgagaaattggcctggaaagaggcaagggtttttattccagagtccctcctcaggacttcctgagatcctgacttcagaggctatacaaaaccattctccaaagtgggatgaagggcttgnggtnaaggtagcagcaaaagatgctgaagatcttcntcnaataggttagggtttctcantctctctccctcactctaaatggggctctcctt

SEQ ID NO: 128767 - DNA, 665 bp, Homo Sapiens
taaggtcccggttcgctggttgtctgtgcactgctcaactctgtgacaaggcccttcagtcctgtgtctctgttatcacggtggaatgcgtgtgtatcattcccgctagcattattggcgtctgctctacgacccggttatatgggagagatccctctcactaggcggatgggtttccgtggacctggtgagggtgctgcaggctggggcagggacaggactgggacaggcccaccagtatccaaaggctctggccgagctccccacgaggtccagcgggctcctctctccccaggtgctgggcgttctcttttttgccatagcctgcttcttatacaagcccctgtcggagtcttcagatggcctggaaacttgtctgcccagccagtcctcagcccctgacagtgccacagatagccagctccagagcagtgtttgaccaccgcccgcgcccacccggccacggcgggcactcagcatttcctgatgacagaacagtgccgttgggtgatgcaatcacacgggaacttctatttgacctgcaaccttctacttaacctgtggtttaaagtcggctgtgacctcctgtccccagagctgtacggccctgcagtgggtgggaggcccttgcataaatatatatttatggacacacagtttgcaaa

SEQ ID NO: 128768 - DNA, 1560 bp, Homo Sapiens
  misc_feature (314)..(324): n is a, c, g, or t
  misc_feature (1339)..(1339): n is a, c, g, or t
  misc_feature (1420)..(1420): n is a, c, g, or t
  misc_feature (1429)..(1429): n is a, c, g, or t
  misc_feature (1436)..(1436): n is a, c, g, or t
  misc_feature (1452)..(1452): n is a, c, g, or t
  misc_feature (1496)..(1496): n is a, c, g, or t
  misc_feature (1502)..(1502): n is a, c, g, or t
cccccggaaaaagatagaccccctcgggcggccctgtgggaaattttctacaggtttcgcccccacactcccatttgggagattcccgcgtgggtcccgcccggggtaaaagaatgtgttttggcaagaaagttcctttccccccagtagaggccaagatcttcttcagtggcgccgcaagagccgaatgggcagccttagtctgtgacccccctgtttggccccgtctaaaaaagttctttaaaggtttcgcccttaaggagccgttgaaaattctctctgtaaggattaggtttgttcccaaatttatgttnnnnnnnnnnnaggaagtgaaggttttcctctcccccagagagttccccccaggtttagccatgttttttccccaggtccccggagacgtttggaaaataccgaccggccccagtgtccctaagctttattattacggacttccacttattaggggaccccccttttgtccaaagaaagctgggggttccgcggtaagcttggggccccccccgaggggatactttaggagccggccccccccttatttttgattgacgtgctgtatgagcgtttttttgctttaggtttgccttttattttaccaaaaataacaacaataaagtcttccctctgtttcataaaaataaattttccaaccctccccctatcccagaaatcagcccttgccacagcctagaatccatcatgcaagtcacagcactctgggaaaagctcctactaccctcgctccacagcctctggcaaagctgccaggccactctggaggcggcagaggcagaagtcccaggcccagctggctgggcccaagagctccatctgtttccccaaagtacaggcagcttctaggccattgagtggggcatgatattggatgcttggctcaggaaacaaccccagccaacccaaggggcagtgggacatgttggcctcaggttagaaattattgctcaaagcagaaacagttgtgtcctagagagggtctgttaaaccctctttccatgtgtatctctatgtagcaattgatgggccctgcggtcaggatccctggtttctccagctccatgaatgcctccctgtgaggccctggacagtttctccctcttcttctcctggcttcagtttccccgtatgtacattgagacagtaagactggatgattctcaggttccctctggctttccattctggcatcccagagtggaggctctgggagggcagaaccctgttcctgcctcagtttccccacctgtgggtctgcgtatagggctgggtatggaggtactgagtaatggagtgctgcgtngacatcccagtctccctgtggatagctgtgctgtgagattcaactgggctggatgtgtcagggatggctgggaaggggcangtactttangatgganggatctcatgctgganagtcattcacaactacatctcatgtgtggatgggagacagatcnaggccnattccagtcacagctctctcgtgcgattctggctcgaggcaattctaaagggtcgata

SEQ ID NO: 128769 - DNA, 801 bp, Homo Sapiens
  misc_feature (108)..(116): n is a, c, g, or t
caaaggaatgatcattatctttattcatacacacttgcttccaaactacaattaatgtttctaacaaagcgtatcatgcaaacggagattagaggttatacaaactgnnnnnnnnngcaatgcagtaatttacacatccgtctcctctgctatataaccaaatggtgtttgacggttgaatggcctctacattttgtcagtaggtgcttatacagaaggaaaaacctcaacctccgtctcttcctccaaacaaagttggggcttatatgatgtttttcaattaatgatttaaacgtggtatgtccttcacacacacaaatcatgtagcaaaagcaatgacttcaaatgcttctgtttataaaagatattctgaaagaccctaacagaagggatgtgaggttaatttttagaaaacctttagactcaaaatagtaactgccttcatgattgattttgaatattctagtaaaccaacccttcaagaaaagaatgatattcttccaggaagaatatcaacaaaagtctacaatcacaggaatggatactcctaaagttaagcagaggtgacaaagacacagtcgtttaatcagaaaatgcaaagccaccttttatcttattttagaaaaaaaggttcttataaagtggacttgacacctattttctgaaaagccgagttctgtctactcgcgtaagtggtaactatgaaacagacgtcaataggcacgtttgctgctgcctcttatatcttgggagatcgaagtatttctgagttgcccagtgggcaaaatccttacagggccc

SEQ ID NO: 128770 - DNA, 1533 bp, Homo Sapiens
  misc_feature (1324)..(1324): n is a, c, g, or t
  misc_feature (1331)..(1331): n is a, c, g, or t
  misc_feature (1420)..(1420): n is a, c, g, or t
  misc_feature (1423)..(1423): n is a, c, g, or t
  misc_feature (1433)..(1433): n is a, c, g, or t
  misc_feature (1454)..(1454): n is a, c, g, or t
  misc_feature (1477)..(1477): n is a, c, g, or t
  misc_feature (1501)..(1501): n is a, c, g, or t
caccagcaggggcttatttagtgatggttaataactctctcaaacaatagagggcaggccagctagtttattcaaattgaatctaaaccttagatctctggcttaacaataacaagagaaacctttatagacacaatatatcttgcattaaatcagagacggtttaaatcagtcttgtaacttctaatattctgggctggcaactacagcatgacaaatgtttagtgcagttacaaaatcacattttactttccttggctagcaaaccttaaacaaatctgaaaaatgcactgttttacaaaggcttttaccatatacccactgctgccagtctcaagtaattatggtttcttcatcccccaggaacatttctaaataagggggatttttctttgatccgctcgccttgaagtgtatgtaagaactcaagagagtaagttgaaagaatgaagattaactgagatgccaagaaaagtttttattgcaagcacagtgagcagaaagagatgtcttctcacacaaagtggccacaaggtctgccattaactaaatctctttgacaagccttcattggtttaaagcatatgaattagcttcttgctatcaggtgtacatcatttctgccatgtgggacattttcttgggaatatacaagtaatactccatgtagcctgacaggtcctcaatggtcacatcatccacgaagactcgagcttgctcagaacaggatcggggagagccagacagagttctggcgtgcagcgactgagagtagtcctcaagtgtggatcttcgttctggagccaagggagggacactctgcaggcctgaaaaggaatacacttccatatcatgccatctcttacactggcattccttgcctatgcatgtgcatggcttgccctggtttagcttggaaactgattgaaagtcagagagatcactggctttgagacttgcttgggggacttgggtagcgtcagaggagtcttccttcttactctctgatgggagccttggaacagaagttctcaaaggctcaacgactgcccctgttgtgattagcatcgagagaagtagagctttctcctgcactgaactctttaggggatgaattcccagcccactgctgccatcaggtgagtcagtctggcttttgtgcttgagttgactgctggaagaaacgctattgtactgcaatgtataactttggaggatgaggacaggagacttagacgtcgacgacgctgagtctcactgctcctcgtgaagacttcctttgtagaccgtgccaactgtctttagatgcacatgtggtttttangtttggnatcatctgttgctgttctgactggtgctctgacacctgtgcctttctccaacagacagagatgctacagaccctgatgcatccactccntanttttttgaangcagtctgtagactctctccntctcatccctggcttcggatttncatgtgcaagttttacactactancgatgttctggtttacctaaaaagaaataaga

SEQ ID NO: 128771 - DNA, 1094 bp, Homo Sapiens
tttaaagccataggaattaggcttctggcaaccaggggtacatcttttctgccatgggggccattttctgggaaattcccaagtaatcctccctgtagctgaccagttcctcaatggtccacatcattcacgaagactcgagcttgctcagaacaggatcggggagagccagacagagttctggcgtgcagcgactgagagtagtcctcaagtgtggatcttcgttctggagcccaagggagggacactctgcaggcctgaaaaggcatatacttccatatcatgccatctcttacactggcattccttgcctatgcatgtgcatggcttgccctggtttagcttggaaactgattgaaagtcagagagatcactggctttgagacttgcttgggggacttgggtagcgtcagaggagtcttccttcttactctctgatgggagccttggaacagaagttctcaaaggctcaacgactgcccctgtgtgattagcatcgagagaagtagagctttctcctgcactgaactctttaggggatgaaattcccagcccactgctgccatcaggtgagtcagtctggcttttgtgcttgagttgactgctggaagaagacgctattgtactgcaatgtataaactttggaggatgaaggacaggagacttagaacgtcgacgacgctgagttctccctgctcctcgtgaagacttccttgtagatccgtgccaactgtctttagatgcacatgtggttttaggtttggtatcatctgttgctgttctgactggtgctctgacacctgtgccttctccaacagacagagatgctacagaccctgatgcatccactcttaattttttgaaagcagtctgtagactctcctcctctccatccttggcttcggatttcattgtgcaagtttttacactacttatcgatgttcctgtttacactcctcgcagctgggacgctccggtgatgcggggcagtcagttcagagcgtctctcccaaatctcggcacccgactgacccggatccaaaccagccaagggggcggcccgcgcctcgggagtcgcgttgcgcctgcgcccc

SEQ ID NO: 128772 - DNA, 961 bp, Homo Sapiens
  misc_feature (43)..(51): n is a, c, g, or t
  misc_feature (64)..(65): n is a, c, g, or t
  misc_feature (120)..(120): n is a, c, g, or t
  misc_feature (150)..(150): n is a, c, g, or t
gggcggtgccaagggaaattgaaggaggtaggtcccttcaaannnnnnnnnatctttcggtttnngggaggccaaaggggagggaccacttctgccaggcctggaaaaaaggaaataccntttcccatatccatgcccatcttcttacancgggcattcccttggcctatgccatgtggcatgggtttgcccctggtttagcttggaaaactgattgaaagtcagagagatcactggctttgagacttgctggggggacttgggtagcgtcagaggagtcttccttcttactctctgatgggagccttggaacagaagttctcaaaggctcaacgactgcccctgtgtgattagcatcgagagaagtagagctttctcctgcactgaactctttaggggatgaaattcccagcccactgctgccatcaggtgagtcagtctggcttttgtgcttgagttgactgctggaagaagacgctattgtactgcaatgtataaactttggaggatgaaggacaggagacttagaacgtcgacgacgctgagttctccctgctcctcgtgaagacttccttgtagatccgtgccaactgtctttagatgcacatgtggttttaggtttggtatcatctgttgctgttctgactggtgctctgacacctgtgccttctccaacagacagagatgctacagaccctgatgcatccactcttaattttttgaaagcagtctgtagactctcctcctctccatccttggcttcggatttcattgtgcaagtttttacactacttatcgatgttcctgtttacactcctcgcagctgggacgctccggtgatgcggggcagtcagttcagagcgtctctcccaaatctcggcacccgactgacccggatccaaaccagccaccccggccgtaatggccgaattcccgggcatatgtccggtaccgtcgactg

SEQ ID NO: 128773 - DNA, 601 bp, Homo Sapiens
agtgttatataacttttaatggaaaatgtcaaatagatacaaaagtataaatcaggttggcaagtgaaatacaggccaaaattgggcccaccagctgtttttgcacagcccaaatgttaagaatgatttttacatttttaaatagtgaaaagatgtaaaagggtaatatctaatgacataagaaaagtatgtgaaattcagattttattgtccaaaaagtttggaacacagccacatgcactggtgcgtggccccctggtggcggcttcatgccactactgccaagtggcaagagagccccatggctggaaaagccaacaatctttaccatctgctccaagccctgcttcactcccctgtgtgtacctatccttgcagcctcaaattcccggccaatcttgtttcatttatagttactcccagccccacggattcaaaggaaatcccagacatcctataatttcatcttcatgttgaaatttaaaaagtttgaaaattcaccaagatgtaatatatatgcaccaaacatcagagcccaaaatatatgaaacaaacaattgacagaatcaaaggaagaaatggatagttctacagtaagagt

SEQ ID NO: 128774 - DNA, 1117 bp, Homo Sapiens
ccattcttcaaaaatttattatttattattaaaaatctcaaacaaacacagacatatggggataccagcattcccctcctggataccaggcagcttcagccctggcaggcacgatagaagaaaatacttgttacacatcctcatcaactctcagagggatcctgagccgtagatggaggaaacgcagacggagtaagcacaggtaaaagatctccccaggagctgacacgggcacaacgatacaaatccctgtggaaacagatgctggcgtgggctgcagcttcctgccacatcccactgattttggtcacaccccccatacctgccgtgccggcgggctgtgagcacagcatgctgcatgtgcccatctggacagcacaagtgacaatgcacatggcgaggccgtttaaggacaggctgagtgatacggggccagcgatgagcctcctctggagacccccgagcaaggatcaccatagagaacttttcttcctttggtttcttgttccagctgaaggggatgggatggtacgcctgtgagaagctacaggccaggttggtcaactggggacaagggagttcatggggacactgtgaacacataaaaaaatgaggtaagacaaaagagccatcaatcacaaaacttaaaaactgagaataatagagtcaaaaggggccagggagaagggaggacaggagcagtgggtaggaagagccaggggaatcattaggtaggaactggataggaacacaaagtagtggagagtggcttagctttaccatcttacatttcccggccacgcctaagttcagatccgtgtggtgggacaggcagaagtaatactcaccggggcaaagacaaaaccaggtcgagggtccaaaggtgacttctcttttcccttaaggaccagatccctggcatccatgagaaggctgtgcccagcttttgttccattctccaccagtacctgttcacaaaaggggaaaatatgcagaagacttgaattacacgaaagtataaatgtcagtagctgtgtaagagcaatcatagagggagaaggagtcctaaaaagaaataggcattacataatcaggatggagaccctcaaagagggtt

SEQ ID NO: 128775 - DNA, 508 bp, Homo Sapiens
  misc_feature (374)..(374): n is a, c, g, or t
cttcaaaaatttattatttattattaaaaatctcaaacaaacacagacatatggggataccagcattcccctcctggataccaggcagcttcagccctggcaggcacgatagaagaaaatacttgttacacatcctcatcaactctcagagggatcctgagccgtagatggaggaaacgcagacggagtaagcacaggtaaaagatctccccaggagctgccgtgccggcgggctgtgagcacagcatgctgcatgtgcccatctggacagcacaagtgacaatgcacatggcgaggccgtttaaggacaggctgagtgatacggggccagcgatgagcctcctctggagacccccgagcaaggatcaccatanagaacttttcttcctttggtttcttgttccagctgaaggggatgggatggtacgcctgtgagaagctacaggccaggttggtcaactggggacaagggagttcatggggacacggggcaaagacaaaaccaggt

SEQ ID NO: 128776 - DNA, 2042 bp, Homo Sapiens
ggagcgccgcgcctaggggggtgtggcgctcgaaccacccgccgccgggttgtttgcgcgccggggggcgtgtttttgggtgtggtgggggcaaaaaagcgtggggccgcgccgcggcggcattttatcgcggcccgcgcggggcacacgaagcaaaaccatagggggggcgcacgcacaaggaagaaaaggggggaaaataattcgggggggcgaggggaacaggacaaacgggcgggtattagggcatcggatgcgagggtcgcgccgggtggggaagcgtatgttgtatcggtgtcgtgggtaggcggggaggggttgcggggggttcttcaaaaatttattatttattattaaaaatctcaaacaaacacagacatatggggataccagcattcccctcctggataccaggcagcttcagccctggcaggcacgatagaagaaaatacttgttacacatcctcatcaactctcagagggatcctgagccgtagatggaggaaacgcagacggagtaagcacaggtaaaagatctccccaggagctgacacgggcacaacgatacaaatccctgccgtgccggcgggctgtgagcacagcatgctgcatgtgcccatctggacagcacaagtgacaatgcacatggcgaggccgtttaaggacaggctgagtgatacggggccagcgatgagcctcctctggagacccccgagcaaggatcaccatagagaacttttcttcctttggtttcttgttccagctgaaggggatgggatggtacgcctgtgagaagctacaggccaggttggtcaactggggacaagggagttcatggggacacggggcaaagacaaaaccaggtcgagggtccaaaggtgacttctcttttcccttaaggaccagatccctggcatccatgagaaggctgtgcccagcttttgttccattctcccaccagtaccaggaaatgacctgtcttacgccataaggtttgaactacctcagtgcggtcagccttgctgggcagttcacttagggaaaaagctgacactactacatcaaactgcaccttgggtgatacagggtagaaactgtctgaaaaagacacctgggaatataaggctccccagattctgaaccacctttcagtagtttttctgccaaaaccaacatggcagctgatctgtccacacacatatattcacgtaggctctggccccaaatactgtgagcagcccaggtgacagaaccagtacctgagccaaagtccatcaaagtttgtggctgaaatgctggatttcgagcccggatctcatggaatgctctggagactgctgcaaagccaccatccagtcttgctgccatatacaccaggctcagtccctcagtgtagctcagttcttgccaatggtaggtagttttacgtagtgcgtgtagcactgctccacgaagtttctcctctgtctgagataagtctgggttttccaggaattttttctcaagatgcctagcccgtctttgcaactcctctggctctacaggcaaatgtctgctccagagataactggtcagtgtttgcacctgattctccatagtgggcccagcgctcccaagtagcaataactgggcaccgttagccagtgcctgtggcagccgcacgtgcggcagctttaggatgccagggtgctggcgatgaggcctcttctgcaggaaaccggacttgttatctacctgggtcactccgggtactaaggcggcgagcgcccgggcctggggagccactccaaggccggggcaccatcttcctaatgtcagtagacacttcagtgccgccgccatggctccggaggcgaaccggaaacggaaatataggtgcctgtgaccctcagtcccaacgccgccgcaaggagcagccttcgcagaacttctcccgacagtttcagccaacgagaagagcgagtgtttgccagcagccaataagcaatggttatataaataatccttgaggcagaaaccgtgtttgggccgacttgaaggct

SEQ ID NO: 128777 - DNA, 847 bp, Homo Sapiens
cacaggtataagatctcccaaggagctaacacgggcaaaccgatacaaatccttgccgtgcgggcgggctgtgagcacagcatgctgcatgtgcccatctggacagcacaagtgacaatgcacatggcgaggccgtttaaggacaggctgagtgatacggggccagcgatgagcctcctctggagacccccgagcaaggatcaccatagagaacttttcttcctttggtttcttgttccagctgaaggggatgggatggtacgcctgtgagaagctacaggccaggttggtcaactggggacaagggagttcatggggacactgtgaacacataaaaaaatgaggtaagacaaaagagccatcaatcacaaaacttaaaaactgagaataatagagtcaaaaggggccagggagaagggaggacaggagcagtgggtaggaagagccaggggaatcattaggtaggaactggataggaacacaaagtagtggagagtggcttagctttaccatcttacatttcccggccacgcctaagttcagatccgtgtggtgggacaggcagaagtaatactcaccggggcaaagacaaaaccaggtcgagggtccaaaggtgacttctcttttcccttaaggaccagatccctggcatccatgagaaggctgtgcccagcttttgttccattctccaccagtacctgttcacaaaaggggaaaatatgcagaagacttgaattacacgaaagtataaatgtcagtagctgtgtaagagcaatcatagagggagaaggagtcctaaaaagaaataggcattacataatcaggatggagaccctcaaagagggat

SEQ ID NO: 128778 - DNA, 1456 bp, Homo Sapiens
  misc_feature (174)..(442): n is a, c, g, or t
  misc_feature (460)..(484): n is a, c, g, or t
  misc_feature (1047)..(1334): n is a, c, g, or t
gcggcctttgaaacccccgcacgcccctttacggtcctccctttgtgcctttgcccaagtttttccgctttccccctgttcggtgaaaccctttacccccttgggtgagctatacccattcccccaccggaaggaccgagcccagcgagtccttggcggggaaacggaagaggnnnnnnnnnnnnnnnnnnnnnnnnnnnnnnnnnnnnnnnnnnnnnnnnnnnnnnnnnnnnnnnnnnnnnnnnnnnnnnnnnnnnnnnnnnnnnnnnnnnnnnnnnnnnnnnnnnnnnnnnnnnnnnnnnnnnnnnnnnnnnnnnnnnnnnnnnnnnnnnnnnnnnnnnnnnnnnnnnnnnnnnnnnnnnnnnnnnnnnnnnnnnnnnnnnnnnnnnnnnnnnnnnnnnnnnnnnnnnnnnnnnnnnnnnnnnnnnnnnnnnnnnnnnnnaagaattcggcacgaggnnnnnnnnnnnnnnnnnnnnnnnnnccaatgcattgtttattgagtactaactagctttgggcccaggctctgggttagcagcatgcgtgaaacaatcagaaacaatcatgagcgcctgcccacatggggcttacagtctggcagggcaagactgtagacacagaaataaatatccgattataagctgtgattagaggcatgatggaaaagagcaaggcttcctgagagaaacagggcgagcacaggaaaacctctctgagacagtgacatgaacttgaaacttgaagggtaaacaggagtgggcaagacaaaaggggaaagaaggaatgttccaggcagagagaaagagaaaagacccaggcacggtatagagccgaggacatctgaggaagaaagggccgccggggttggggccctctgggtgactgggagaggaaggcgccggaatggatccagattaaatcggatgctgtgtgccctgtggagacatggggtgtacctctaaacgcactgcgttgtaagcaaaggagtgacctgatttaatttgatcttttaaaagtcattctaggccaggccgggtggctcannnnnnnnnnnnnnnnnnnnnnnnnnnnnnnnnnnnnnnnnnnnnnnnnnnnnnnnnnnnnnnnnnnnnnnnnnnnnnnnnnnnnnnnnnnnnnnnnnnnnnnnnnnnnnnnnnnnnnnnnnnnnnnnnnnnnnnnnnnnnnnnnnnnnnnnnnnnnnnnnnnnnnnnnnnnnnnnnnnnnnnnnnnnnnnnnnnnnnnnnnnnnnnnnnnnnnnnnnnnnnnnnnnnnnnnnnnnnnnnnnnnnnnnnnnnnnnnnnnnnnnnnnnnnnnnnnnnnnnnnnnnnnnntgtcattctacactgtgaaaaatgagctggaggaggcaaagggaagaaaggggagatcagtgaggaggctgttgtcatagctcaggcaggagtatggtagcttggacttggcaacagcgtcc

SEQ ID NO: 128779 - DNA, 985 bp, Homo Sapiens
  misc_feature (72)..(104): n is a, c, g, or t
  misc_feature (157)..(175): n is a, c, g, or t
  misc_feature (205)..(209): n is a, c, g, or t
  misc_feature (211)..(213): n is a, c, g, or t
  misc_feature (215)..(216): n is a, c, g, or t
  misc_feature (219)..(220): n is a, c, g, or t
  misc_feature (222)..(224): n is a, c, g, or t
  misc_feature (226)..(227): n is a, c, g, or t
  misc_feature (229)..(240): n is a, c, g, or t
  misc_feature (490)..(509): n is a, c, g, or t
  misc_feature (969)..(969): n is a, c, g, or t
aattcccaagccccttttttcaaggcccccaggttttttctatggaaaaacaggtttatgggccctgttttnnnnnnnnnnnnnnnnnnnnnnnnnnnnnnnnnaaaacaaatggtgtaaaaaaatttttttggaggggcgggggccggcccacaannnnnnnnnnnnnnnnnnngttgttgtttgttccgggggttgtgtttannnnngnnntnntgnngnnntnngnnnnnnnnnnnnttccaaagacaatttgattttactttattgaatactatcacacacataatatttacagatgtaattaaacagaatttataagattaccatgtggaatatttttcaaagttaatctgaaactcttaatgaaaatcatcaatacatgtgtgttacaatacaataatagaatgtagaacttttcagccaatatcatgatggttcatttaataaaaactctcttttcaaaaagaggtaagtcggaggaaatatnnnnnnnnnnnnnnnnnnnntatttccatatctagtcataatcttccagcttttctgtaaaataaattatagactttctcaattgcatacatgactattttcttaaataccatatttaacttttagcatattggagttgtttttcttttatcgtattttcagcataggtttaaatgtttttcttatgtttcaaaaggaatacataatctaaatttaaaaccacatctgaatattactttaaaaatagcaacgaggcacgtggccaccatcactaccttggctctttattacggctggtccacggaagggaaccacatggacaacaaaagtgagggagtcctctaaccagttctaagtgtgatttattgtagatgccagttgctttcacagacattaagaagacatcagaaatatggcatctacaccggtatgtctgagagatacacgcatctgtgggctaatggtcctacttccatctantacatattcttagact

SEQ ID NO: 128780 - DNA, 889 bp, Homo Sapiens
gtggggaaaatggtgatttcatttttatttcagtacttgacaaaataccccataaaattcaaaacttctaccattatacaaaaataggtctctacaagtgatattatctgtcttcatcaccagtagaatatattaggcaaaacatgtaacttcagtagccttataagaaaagtgcaggacacctcgagctacacattcagcagtattgtaatgcgtaaaagtttaatcttttcacccatttgataaatacacaaggtttataatttaatgttttaaattagcattccacaaatatacaggtaattcaataattattgtgcatgaatacatacacaatgcttatatatacaaattccagtttgttttcatgtgctggcaagggatttgtatacaatcataagctgtgttcatattggtcccattgaatattcacaatacaaaagcacaaaagaaccattgatttacaaaaggaaatctatttaaaatcacttcaattaatgatgtttcaaaggattatcttctcatgccagcatgaaattgagtagttgaacctgactgtatagttccaagtcgtctttgcagtgcctctagccgagtgatataatctgttagggctctgtcaggatcgtaattctgaagctgagaacatgctaaagaaccaggattgaaatcagctggagtgcctgggtacctattctgaaatggtaaaggggacctaatatagtccagatctgatcttgagcgatacgtagtatgtcttggttctccatataactccagcccaccagaagaatgataaaatgagtcagtcttttctgcaccttgattcagtccaaagccatctctgttaatattgatggaaacagaacctgtgactcgatgccaccgt

SEQ ID NO: 128781 - DNA, 715 bp, Homo Sapiens
gtggtgaaaatggtgaagtcatttttatttcagtacttgacaaaataccccataaaattcaaaacttctaccattatacaaaaataggtctctacaagtgatattatctgtcttcatcaccagtagaatatattaggcaaaacatgtaacttcagtagccttataagaaaagtgcaggacacctcgagctacacattcagcagtattgtaatgcgtaaaagtttaatcttttcacccatttgataaatacacaaggtttataatttaatgttttaaattagcattccacaaatatacaggtaattcaataattattgtgcatgaatacatacacaatgcttatatatacaaattccagtttgttttcatgtgctggcaagggatttgtatacaatcataagctgtgttcatattggtcccattgaatattcacaatacaaaagcacaaaagaaccattgatttacaaaaggaaatctatttaaaatcacttcaattaatgatgtttcaaaggattatcttctcatgccagcatgaaattgagtagttgaacctgactgtatagttccaagtcgtctttgcagtgcctctagccgagtgatataatctgttagggctctgtcaggatcgtaattctgaagctgagaaatgctaaagaacaggattgaatcagctggagtgctgggtactattctgaatggtaaggggactatatat

SEQ ID NO: 128782 - DNA, 448 bp, Homo Sapiens
  misc_feature (424)..(424): n is a, c, g, or t
tggcacgaggctaaaaatgtccatttttctctgttaaatattaatacatttaacaattccaggcaggttttctcatattcttacctattctgaaatggtaaaggggacctaatatagtccagatctgatcttgagcgatacgtagtatgtcttggttctccatataactccagcccaccagaagaatgataaaatgagtcagtcttttctgcacctaaagtaacccaaaatatttccttgtaaagaaaaataaaatcccaagaccttaaaaaatttctacaaaataggtaactgctcaaaagactattatactatattatacaatctcctatttatagtcattttctattattcttgctaaaggagaaaacagtacaaacaaaaattcgcgctttcaaaatgttatctttgtttacttttgaantatgaggtatttatgagtattcaa

SEQ ID NO: 128783 - DNA, 559 bp, Homo Sapiens
tctttgagacagggtctcgctctgctgcccaggctggagtgctgcggcacggccttaccactttctgccatgcgctacttaggaatacgttctccagttaggctctgtagactcagagtaccttgcacactggtgctcattgtgcattttgtgtcatcagtccgctgaatgaacatagtaggaaatcatttttgggaggagtgggatctggggtgataaatcatattttcacttaaattatttaaagtcagtttctctgctggttacaagagtttaagctttggctaacttaataattagctcatgcactaaactggaagctttgattatcctaatgagtgtgaaagaatttcaaagaaaggggagctgtgggtctcgcactgtggtgctgccaagatgtggttaaactcagagcacctgactgtatagttccaagtcgtctttgcggtgcctctagccgagtgatataatctgttagggctctgtcaggatcgtaattctgaagctgagaacatgctaaagaaccaggattgaaatcagctggagtgcctgggtacct

SEQ ID NO: 128784 - DNA, 1489 bp, Homo Sapiens
  misc_feature (268)..(405): n is a, c, g, or t
  misc_feature (585)..(595): n is a, c, g, or t
  misc_feature (856)..(890): n is a, c, g, or t
  misc_feature (1054)..(1068): n is a, c, g, or t
  misc_feature (1169)..(1199): n is a, c, g, or t
  misc_feature (1389)..(1434): n is a, c, g, or t
caatacaaatatgtgttcaggaggacttgaaaaccacacggctgtaggactgcttatagcattataatgtatcagcattcccgattgtggaaacaatacacatgagtagtaatcagtcccacacagaagccgacgcagcggtcatgacgagaaccgacagcggcctaaaggcagcgcctctcacgaggagtggccgatcattatacaatagccagaaagaatccagaatgaaaggcgggcatgagcgcaacgcaagtaatgtgagtgnnnnnnnnnnnnnnnnnnnnnnnnnnnnnnnnnnnnnnnnnnnnnnnnnnnnnnnnnnnnnnnnnnnnnnnnnnnnnnnnnnnnnnnnnnnnnnnnnnnnnnnnnnnnnnnnnnnnnnnnnnnnnnnnnnnnnnnnnngtggccctcgagcccaagaattcggcacgagggttcatctagaaatttttaccatttgtcttctgtgtagctgcaaggaacactaatgtttatacaactgtcagtccacccagtggtgcaactggttctgattcagtcttccgattcctttttatttttcactttttcctatttctgaannnnnnnnnnnatttgtgatcttgattttgatgaggggttggggagtggggagggagtcgaaccaagacttggagttaagaggattttcatcttttgcatccaacaggcagaatatgatctgtgtccaaaagtgaacttgagtcaggaatgaatcaatttcagcataaacaagcacaaaaatttagtctgctggctgactggaagcaaaaaagtcaagatggaatatgatgaattccaacacaatggggcaccaaggcctttaggcctctcnnnnnnnnnnnnnnnnnnnnnnnnnnnnnnnnnnnagagacatgctctttctcatgggacttgaagtggactcatctttgtgcagtgctggttttgccatactcatttcaagtattatagacatatgtaatggtgaaaatatatgaactgtggcctttttcattcttgttacttgtgatgcaattaagtgaagataagnnnnnnnnnnnnnnngcagagatttaccatgtatcagtgcctggctttttgttataaagctttgtttgtctagtgctcttttgctataaaatagactgtagtacaccctagtaggnnnnnnnnnnnnnnnnnnnnnnnnnnnnnnntatatttggcttatttttcgcaggagcaatccttttataccatgaatattacaaaaaaattgtcagattctgaatatttcttctttgtagatttttggaatcattatgagtaaaagtttgttactttattttactatttaaaagatgttattttaccatgtgttaccaagatgaaactgtatgggtagcnnnnnnnnnnnnnnnnnnnnnnnnnnnnnnnnnnnnnnnnnnnnnnagttgtaggtcgcagcggggaaattttttgcgactgtacacatagctgcagcatt

SEQ ID NO: 128785 - DNA, 1303 bp, Homo Sapiens
  misc_feature (1124)..(1124): n is a, c, g, or t
  misc_feature (1160)..(1161): n is a, c, g, or t
  misc_feature (1220)..(1220): n is a, c, g, or t
  misc_feature (1241)..(1241): n is a, c, g, or t
  misc_feature (1247)..(1247): n is a, c, g, or t
  misc_feature (1255)..(1256): n is a, c, g, or t
  misc_feature (1271)..(1271): n is a, c, g, or t
tcctcgttgtgtgtcttgcgcttggcccacctgggcccgacctgtgatcccttataatggttataatgatgttgtcctctgggactcccatgtgcccctctcaccccctgctcccatgccatgggcctaccatggacttaagcttctctgcatggggccaacctcaaggtcagcgccggcgagccccttgccagcgtccacacctatcttcttagctgagtttttgcaatatgatgtgttgtgtatcttgccgacttggttgggcagcctcaaaggaagcactcaggtatggtgggcaggatcaccagaaagcttttattttaacccagggccagggaggccgaagcttcaatcctgctgcttggttcgggaggcctctgcattggcccggagcacagcccctggggatggatacggccgctgctggaagaggggcccagctgctgtggtgtcagcgccagtcttggcctcattccgcttggggagtcctgttgaccacgtgccccggggggcgtctgagtatgagctagggtccatggggtctaactcttcatcctttcggcttactgccttcttgctcttgggatagggagccagctcctcccggcgatggtggcgccgttctttgccctcttcccggtctgccttgtcatacccgcggtcccgatcccgttccctgtctcgctctctctctctgtctaccttgtcatagccacgctctcgatccctgtcagacttgtcgtggccccggtctgacttgtcgtggcccctgtctagtttctcatggctgcggtccgacttgtcatggcccctgtccgacttgtcatggctccggtccaacttttcttcagcatctgcattactgcttctgagcttcttggccgatttggtaaccacggagttggggtcatgtggggagagccaggatacaaggtctgtgtctgcattccagtagtaagggagcccgcaggaagggtcgaacaccttgtaccagcttggtggtaggcctcccacctggtggctcgtagtcacaggatcatcgtcatagtctcggcatgatctcttctctggttcaggtcagatgtttggggtgctctcttggcagcggtctgcacgcacgggcncggcatacgatagcaacagacataactcgtgcagtnntggaggctgtcaacgcgtctcctcgtgtcgcgtacatactgggccaagacctctcccanacctcgtgcgattctggctcnaggcantccccaanngatctataattccancagtcaactgtccggttgattgtacgtcaatg

SEQ ID NO: 128786 - DNA, 881 bp, Homo Sapiens
  misc_feature (14)..(14): n is a, c, g, or t
ccttttgcattggnccccggagcaacagccccttgggggatggataccggccgctgctggaaagagggggcccagctgctgtggtgtcagcgccagtctggcctcatttccgcttggggagtcctgtgacccacgtgccccgggggggcgtctgagtatgagctagggtccatggggtctaactcttcatcctttcggcttactgccttcttgctcttgggatagggagccagctcctcccggcgatggtggcgccgttctttgccctcttcccggtctgccttgtcatacccgcggtcccgatcccgttccctgtctcgctctctctctctgtctaccttgtcatagccacgctctcgatccctgtcagacttgtcgtggccccggtctgacttgtcgtggcccctgtctagtttctcatggctgcggtccgacttgtcatggcccctgtccgacttgtcatggctccggtccaacttttcttcagcatctgcattactgcttctgagcttcttggccgatttggtaaccacggagttggggtcatgtggggagagccaggatacaaggtctgtgtctgcattccagtagtaagggagcccgcaggaagggtcgaacaccttgtaccagcttggtggtaggccctccaacctggtggcctcgtagtccacaggatcatcgtcatagtcctcggcaatgatctcttcctctggttcaggctccagatgtttgaggatgcctctcttggccaagcgggtctgcagcgcaacgggcagcggcatagctgatagcagacagacctgggcccacacgactctcttcccaaaacaccgaatgagaccttctctcaacgaggccttcactccccgagcctgaaagta

SEQ ID NO: 128787 - DNA, 1039 bp, Homo Sapiens
gtgccagtcaccgtcctttatctacccgggcaggagccgaactcaatcctgctgcttgtttcggagcctcttgcattgcccgggcaccgcccctggggatggattcgccgctgttgtaagagggcccagctgctgtgctgttagccgccatttctggcctcattccgcttggggagtcctgttgaccacggtgcccgggtgcgtctgagttatgagttagggtccatcggggtctaactcttcatcctttcggcttactgccttcttgctcttgggatagtgagccagctcctcccggcgatggtggcgccgttcctttgccctcttcccggtctgccttggtcatacccgcggtcccgatcccgttccctgtctcgctctctctctctgtctaccttgtcatagccacgctctcgatccctgtcagacttgtcgtggccccggtctgacttgtcgtggcccctgtctagtttctcatggctgcggtccgacttgtcatggcccctgtccgacttgtcatggctccggtccaacttttcttcagcatctgcattactgcttctgagcttcttggccgatttggtaaccacggagttggggtcatgtggggagagccaggatacaaggtctgtgtctgcattccagtagtaagggagcccgcaggaagggtcgaacaccttgtaccagcttggtggtaggccctccaacctggtggcctcgtagtccacaggatcatcgtcatagtcctcggcaatgatctcttcctctggttcaggctccagatgtttgaggatgcctctcttggccaagcgggtctgcagcgcaacgggcagcggcatagctgatagcagacagaccaatacactcgtgcaggtagtggaaggctgtcacaccgcccgtctctctcgtgtcgccgctacgatacctgggcccacacgactctcttcccaaaacaccgaatgagaccttctctcaacggaggccttcactcccctcgtgccgaattcgacacccaggcctcgctacctagccgtatatt

SEQ ID NO: 128788 - DNA, 1062 bp, Homo Sapiens
gttcctcgacgcttatgttaacccagcccctgcagccagacctcgatctgccgcttgttcggaggcctttgcattggctcgggcctcagccctggggatggatacgcgccgctgctgggaagagggctccagctgcttgtggttcaggcgccagtcctggcctcattgccgcgtgggggactcctgttgacccacgtgccccgggggcgtccgcagtatgactacggttccatcggggtctaactcgttcatccagtcggcttagctgccttcgtgctgcttggcataggggacccaggctcctcgcggcgatggtggcgcccgttctttgccctcgtcccggtctgccttgtcatacccgcggtcccgatcccggttgcctgtctcgctctctctctctgtctaccttgtcatagccacgctctcgatccctgtcagacttgttcgtggccccggtctgacttgtcgtggcccctgtctagtttctcatggctgcggtccgacttgtcatggcccctgtccgacttgtcatggctccggtccaacttttcttcagcatctgcattactgcttctgagcttcttggccgatttggtaaccacggagttggggtcatgtggggagagccaggatacaaggtctgtgtctgcattccagtagtaagggagcccgcaggaagggtcgaacaccttgtaccagcttggtggtaggccctccaacctggtggcctcgtagtccacaggatcatcgtcatagtcctcggcaatgatctcttcctctggttcaggctccagatgtttgaggatgcctctcttggccaagcgggtctgcagcgcaacgggcagcggcatagctgatagcagacagaccccaacgttaccaatacactcgtgcaggtagtggaaggctgtcacaccgcccgtctctctcgtgtcgccgctacgatacctgggcccacacgactctcttcccaaaacaccgaatgagaccttctctcaacgaggcctcgtgccgaattcgccacccaggcctcgctaccttagaaccgttagagttactgtc

SEQ ID NO: 128789 - DNA, 967 bp, Homo Sapiens
ccgccaccctttttacggcagcattccttttgcgcttctcccaacccccggaacccctgttaagggccactccctgtcacccatcgcctatcctgggatcctacaccccccgggcctctatatactagccatggtaactttcatccttcgcttaccccttcttctggataggaccagctctcccgcgatgtgcccgttctttccctcttccccgtctggcctggttcataaccgcgtcccgatcccgttccctgtctcgcctctctctctcgtctaccttgtcataccacgctctcgatccctgtcagacttgtcgtggccccggtctgactttgtcgtggcccctgtctagtttctcatggctgcggtccgacttgtcatggcccctgtccgacttgtcatggctccggtccaacttttcttcagcatctgcattactgcttctgagcttcttggccgatttggtaaccacggagttggggtcatgtggggagagccaggatacaaggtctgtgtctgcattccagtagtaagggagcccgcaggaagggtcgaacaccttgtaccagcttggtggtaggccctccaacctggtggcctcgtagtccacaggatcatcgtcatagtcctcggcaatgatctcttcctctggttcaggctccagatgtttgaggatgcctctcattggccaagcgggtctgcagcgcaacgggcagcggcatagctgatagcagacagaccaatacactcgtgcaggtagtggaaggctgtcacaccgcccgtctctctcgtgtcgccgctacgatacctgggcccacacgactctcttccctaaacaccgaatgagaccttctctcaacgaggccttccgagcgcgtgggtcgacgatatcccgggaattgccggaccggtaccagcctgcttttggtacaaactgttctatattcactatgcggggtggaggtgt

SEQ ID NO: 128790 - DNA, 1546 bp, Homo Sapiens
  misc_feature (1094)..(1103): n is a, c, g, or t
  misc_feature (1168)..(1202): n is a, c, g, or t
caaatggtggtacttgcaatctgttttataattagtgctccatttaaatctaatttataatttttattttaagcagcaaatgaaacaaaaatggccagttttaagattgtgttgcctgtaacacaaaatgttacgaaggtttaggaaagcctctttgatttttgtttggccttgcattgccttggtaaagtaaaaggaaacagtacacttggagctaggaaaccaaagcaagctttgtgaaactggcacagtgatagagaattgctgtggagagttatagagcaaagggatgggtccttgaggcctgccagtgtgtaaaggtgttcaaataaagggctgtttctacaggtaacattaaatgtgaactcaacacttccagagtctttaaagggtttctatgtgtatcagtgtaatagtgttttaccaccaactgcctttctttgttcctagttactgtaacaaatatttgatgatagaggtttattaattttgtttatccagaccattaattttatttgtttttgttctatgtaatcaaataaaatttgagtaacatgtaatggtaaggattaatgcatggttatttggaccagaaaaaagtgccatagaagaccaataactgtttagttgaggctagtctggaacctttcattagagcaatatttggttattgcacttcatttttatttactaagaaatgcaatttgggaatttttaatctgttatgctttgtttatcaaccttgattttaattaagacttttataagactagcttaaaacaccaaccaacattatttttgcaaaagtgagttggactcactttccattcttgctagtcagagtaagtaggcagcacttttaaaaatatgtgaactcaaatattgcacttctttcaagatgttatcaattggttattgtactgtatagttttaataattttgattgaaaccctttaacaactctttgtaaattttaactcattttagttgattttcagtactatttacataggaattgatttttatggatatagtagaagaaatgtgctgtattttgataaaattcacttattgtatgtgtgctgcaatctacnnnnnnnnnngaatgacaaaccagcttcttttcctcttccccgcctttcgcaccacccatctccccggaacacannnnnnnnnnnnnnnnnnnnnnnnnnnnnnnnnnntcctactaacattcctaaccctccgcgtctctcccccatcacggcctccccttcctccctctacccctcctactcatttgtgtccccatatctcccgcacggtcgccggtcctccctacacaacaacccccctcgacggcgggctgccgtttttatccgcgtctcacgctcatctttctctaaaaaaggcggtgcgcctcctccccgggagccggcgtcctctctacacagcacaccgtcccccgtgtgccccgtcccccttctcaacacatcctctggcgtgcgcctgaataacaaagcttaccaccgccgcgagacgccatcactctctcccctatgaacaa

SEQ ID NO: 128791 - DNA, 550 bp, Homo Sapiens
atatttaaaacatttattttattatacatatttaaattttagatagttattaggtagatgtacattcctctgttgctttactttgatcttcagttacctgtaaaaacatgaatagctttactttcctaataaacactttcagttttacccttcacccaccattttaaatcattccacagccctcttataatgaccctttatctttccccttaaatagtagaatagaaagttaggtaagaagaaagatttaaaggccaagtaaccaatataaattatcaggtaaagaacaataattccattcaaaaatataatctaaggcatattatacctaggcttctcaagttggccattttacttttcagccgtaaaacaaaatcattagtgtaagaaaaaacacctgaagtgctgtaacaagctattttaaatcagtttattttcttttggagtataattccatttagaatagaacatattacagatttagtctaaatagatatctctatgtccctatttctattctgtgtcactcagactcatcaaacagacatgg

SEQ ID NO: 128792 - DNA, 1248 bp, Homo Sapiens
  misc_feature (1136)..(1170): n is a, c, g, or t
ttatatttaaaacatttattttattatacatatttaaattttagaaagttattaggtagatgtacattcctctgttgctttactttgatcttcagttaccattttccgagatctttccaatagcttatcccatattgtaaaatgtgctcttaagtgaacaggtaaagacacaccctggaatcttcgtatgagacttggctgggtgggttgaagattgtgaactgctgacacttcatactggaaacaaatacttgttcttggaataagagggccctcactcacatcaatgaagtcacctattctgtgtagcttgactattctctcagggttctgagatgccttctcttctatgaaatctactttgtacttgctgtgttgaaatatttccaatgccacttttgcttcaacttccagagtttcaaatggaagatctttataaattaaagcatgagcatcctttgtgaaggaacgtaagttctcttttgttggcatccactcatcaagtttgctatccaaaactacgtcataacagaaggcaccagaaattacaggaacttctggagctctgaccaaattgaccatatattcatctttgaatgccctctctatcacacagcccatcatcatagcacaggaacgccaatatgccttattcacttctcctggatcacaatctttgaaagtaagaaatttaatttcacaggactttgttaaaggcttatacatgtcccaaggctgtccatccaccagagccagaatggacttcctgcaataccactcgcttaaatgcatggcacaactgtagggagttgaaatgtttttattcatcacgaagacagtaccggggtcagttttcccaacatgcttaacttctatcttctcagttcggggagttaatgataactgcctggctttctctttattaaagagatcattccgcatttctgtcaattctgtcggtgacagctgagaagctggcgatgttgctataaatctccatttgatcccgccaccgggtgcgaccagccagagccgcagcgcccgggaacccatggccagcgcctccatagcagcggtgagaaccccccggccgtaatggccgaattcccgggcatatgtccggtaccgtcgactgnnnnnnnnnnnnnnnnnnnnnnnnnnnnnnnnnnncggccgcttcctcgctcactacttcgctgcgctcgtcgttcgactaagcgacgctagccgccctatatgagttatcaa

SEQ ID NO: 128793 - DNA, 511 bp, Homo Sapiens
tagaggatccccctcgcgaacgtgttatcccatattgtaaaatgtgctcttaagtgaacaggtaaagacacaccctggaatcttcgtatgagacttggctgggtgggttgaagattgtgaactgctgacacttcatactggaaacaaatacttgttcttggaataagagggccctcactcacatcaatgaagtcacctattctgtgtagcttgactattctctcagggttctgagatgccttctcttctatgaaatctactttgtacttgctgtgttgaaatatttccaatgccacttttgcttcaacttccagagtttcaaatggaagatctttataaattaaagcatgagcatcctttgtgaaggaacgtaagttctcttttgttggcatccactcatcaagtttgctatccaaaactacgtcataacagaaggcaccagaaattacaggaccttctggagctctgaccaaattgacgtagttttgatacacgctcgcaaggccgccta

SEQ ID NO: 128794 - DNA, 488 bp, Homo Sapiens
tttctttttttacttatttaaaaaggccttggtggcaggaatatagtgtaaaaatcattggaaaaactaaaaggcatcgatacatatccgaatatacattttgtacataaattacatttcctttagtctttctgagtgaggtcctgattcagtactgaggtctagtaattaagaggtcccgggagctgcacgttcaggccggcatagtccaccatgtacattggccattgcacgagtgagatctggttggccgatgccactgaatccgggttagaggacgaggaagaggaagacgaggaggaagaggagacggaatttccttccgagacccgctttctcttgcgcttgggaatgctgctgtctttggctggcaccttggcatcattgcagatttctgcaaagggttggagctggttaatgatgaccatgcggacatgctctcgggccttctgtcgtcttctcgcagccgtatagtagtagtagtaggc

SEQ ID NO: 128795 - DNA, 694 bp, Homo Sapiens
  misc_feature (678)..(678): n is a, c, g, or t
tttttcgatgagcaaactgaactttaatttgcttacctgaaaggcttgctcttcattattggcataggccacagctatttacacagaatcattgtacaggatttacagcaagatgctacacatagcatcattctggataagcgacaaaggagtaagaacagactggggaataaagctctgaaatcaaagtgtaagcagaaatctgaaggtaggtgtacaaggaaggataagggccaaatgatgagcgaggttggtgaggtagacataagggaggaagaggaaacatccaacaacttgtggtgcagagatataagggaagagtccactggcacatagtcttaaaaattatgtttggagtttgaaggaggaaaaatctgccataagccacctctgtgagaaaaaagaaggcagttagaaccttacaggccaaaccttatacctcccctatcaaaaagtaattctgctgattaaatccctggataggagaatgagaaggttgaaaaaagaaagagagagatgcatagacacagaaccttaaacagagttaagagacacaaagtaaatatattcaagagagacacaaagaaagaggaaaagaacagaagctcaggcacatctagaaattagagacatcctattaacttcacgagtcatctttccttacctcatcttccccanagccctcgtgccgaat

SEQ ID NO: 128796 - DNA, 493 bp, Homo Sapiens
gattgtacgtgagagcgggtgttgatgggaaacctgttaatacagcgcctggacggatttctcttctcccgttaaaggctaagaaagcctctgactgaacagaatagcttggaaatcaacttcaaatcactgataccaatatcaatcccaatattttataatccttcttccccctacattttgcttctctttattcaaattcaggttcaatctaaaccaatctggggatatttccaaagggtaagggccataagctccatctttgcttgggttttgttgagctttattggcttggaccacgtactctgtaggtgccgtgtctgctacatgcatcactgtagcttgtggagggagggaggatggaagagatgctcatgcgagaaatcacctcttttgaaattcagagtccttcctagtcttcccaggaaaaactacagcatcaaaagaacctcattatccttttctctcttttcgtgtgggacaaccctttcag

SEQ ID NO: 128797 - DNA, 1215 bp, Homo Sapiens
  misc_feature (19)..(19): n is a, c, g, or t
  misc_feature (48)..(48): n is a, c, g, or t
  misc_feature (73)..(73): n is a, c, g, or t
  misc_feature (102)..(102): n is a, c, g, or t
  misc_feature (118)..(118): n is a, c, g, or t
  misc_feature (144)..(144): n is a, c, g, or t
  misc_feature (167)..(167): n is a, c, g, or t
aagaaccccaagtgggtanccttgaaaaaaaccctgttccaaaaaacnccctggctccccttgctgcccttgncccttcccaacctggaaaagcccaaaaanaaaaaactccctcctnaagttgggcaacctggggaaataagntccccaaatccctgaaaaataanacaaaaatggccgccctcccaactgggccaagtggtccactggggctgcaacggtcccttttcaaagtccttagggtgggcccctcaggtccactgcttggccttctttcacaatggtgccccacagcaagagatgacggtggtccttggagccgtctggcgctggtggtgaccgtgacaacagctggcagggtggctgtggtggtgaggatggtgggctgggctaatcgttgtcactgggatagccgaatcccacttgctctttctcttctgagcatctgcaacagctgtgctggcagtggtagtggtggtggacgtggcgttggtcgtggtgccttttttggtgcccgtcacaaactcaatttttgttcgctcctttttggccttttccaatttgtccatctcaattttctgggccttggctaatgcctcatagtaggagtcctcagaccagccatggggatcaaacatatcctttgggtagttggtgccaagctcgtcaatggcacagaactggatcagcttctcgtagatgctagggttccgaaattctttcttcctttggataatgtagttcatatccattccctcctttatctttcgttcataaagcttctggatcttgtcttgcaagtgatttgaacatctgccagggggttctggcgggatcttgatttcatcaggcgacatgttccgaactctttcagaaaaggaggccacgagttcctgggggtctcgcttttctgcttctgtattatcctttgggtcatcagcctcaggtttttcagtctctgaatcgtcatcttccgactgtctactgttctcatcttcttcttcttcataaccatcttcatcaccccctagacgagaaaagtcatcctccccataggcatcagataccaatccgcctttctcctcagccgcgctgcccaccgcctcgattccagcctcgccatcagactcgggctctgaatcttccgcgtaaactgcgagagacgacagaacattcttcttccccgccatcttattcccacagcccgggcgtccc

SEQ ID NO: 128798 - DNA, 1240 bp, Homo Sapiens
gtggcttactcggcacgaggtttaagaatacggcacttttaataggcggcagaccccaggtggtgcgtggacagaccctgtccacagcgcctggctcccgtgctgcctgtccttccatctggaatgccaaacagaagctcctctcaggtggcatctggggagtaggtcccagtcctgaaatatacaaagtggcgcctcccactgggcagtggtcactgggctgcacggtcctttcaagtcctagggtggcccctcaggtcactgcttggccttcttcacaatggtgcccacagcagagatgacggtggtcttggagccgctggcgctggtggtgaccgtgacaacagctggcagggtggctgtggtggtgaggatggtgggctgggctatcgttgtcactgggatagccgaatcccacttgctctttctcttctgagcatctgcaacagctgtgctggcagtggtagtggtggtggacgtggcgttggtcgtggtgccttttttggtgcccgtcacaaactcaatttttgttcgctcctttttggccttttccaatttgtccatctcaattttctgggccttggctaatgcctcatagtaggagtcctcagaccagccatggggatcaaacatatcctttgggtagttggtgccaagctcgtcaatggcacagaactggatcagcttctcgtagatgctagggttccgaaattctttcttcctttggataatgtagttcatatccattccctcctttatctttcgttcataaagcttctggatcttgtcttgcaagtgatttgaacatctgccagggggttctggcgggatcttgatttcatcaggcgacatgttccgaactctttcagaaaaggaggccacgagttcctgggggtctcgcttttctgcttctgtattatcctttgggtcatcagcctcaggtttttcagtctctgaatcgtcatcttccgactgtctactgttctcatcttcttcttcttcataaccatcttcatcaccccctagacgagaaaagtcatcctccccataggcatcagataccaatccgcctttctcctcagccgcgctgcccaccgcctcgattccagcctcgccatcagactcgggctctgaatcttccgcgtaaactgcgagagacgacagaacattcttcttccccgcctcgtgccgaattcgccacccaggcctcgctaccttaaaaccgttatagttactgccg

SEQ ID NO: 128799 - DNA, 1379 bp, Homo Sapiens
  misc_feature (60)..(92): n is a, c, g, or t
  misc_feature (808)..(897): n is a, c, g, or t
ttttttcaaaagggaaccttgtatttcacaggcctcattttgatggcaaaaagacagtgnnnnnnnnnnnnnnnnnnnnnnnnnnnnnnnnnctgaaaaggattgttcagggggagttggggtctcccgatcctgccatggctcggtggtggctcaggtggctgcttaaggctgaaaggtgggtctgagatgaacctgcagaataatccaagccgagcctcacctgctgggtccagggctaaagcctttgagaatgctcccatggatcctggaactaggtctactgtggcagcaaggcacaggctgggggcctcaggggtcctggaggtcaggcaggtcagccagcagcattggggagtccatctggatctcacgctgcagggactcaatatcggcagggttcatgccatggccttcgagccagtcagcaagcagggaggctgagagagaggctgaatctgcctggccatcctgtggcccatcagccacgcccatgtcgaaagactggtttaagaattcctccaggtcaaagccaacaccgtagccagccccactgccctttggtgtgcctgagaacacagggggcagggggtcctccacctgtgacttagatagctgctgggtcacaaggttgacatcaggtgactttgacatggaagactgaggggctcccccggcgtctgggggcggcaggccaggtgggaagtaaggcaaaactcctggggtgctggagccaggcagcccagggggtggcacaagtgactgggcagccaggaggctggtggaggtggcaatctggggtggcgcnnnnnnnnnnnnnnnnnnnnnnnnnnnnnnnnnnnnnnnnnnnnnnnnnnnnnnnnnnnnnnnnnnnnnnnnnnnnnnnnnnnnnnnnnngcccgcagattgtggttgcgggccagtgggctgggctacagggccaggaggaggactggtaggttggactggggttggggttggcgttggcgctggggcaggggccggcacagaggtgagggctggggctgcgggccgggccattcgagtccagcgttccaacaggcttctgtcattgtcactgagcactagtccagccaaggggtcagtggaggggcccccagaggccccagccccccgttcctttcgctcccgctcctgccgccgtttctcccgctccttggctcgttcttgccgcctccgccgcttctcctcccgctcccgctggcgctcctgggctgtcaccggcttccgaggctcaggagcctccaggggtgcgctggggccatctctgagccggctcctcaaagacttgagcagggcagctttaagggcagccttagtatgtctgagatcctcgtgccgaattcgccacccaggcc

SEQ ID NO: 128800 - DNA, 879 bp, Homo Sapiens
  misc_feature (810)..(810): n is a, c, g, or t
  misc_feature (812)..(821): n is a, c, g, or t
ttttctgtagcatagctcattttattgtttaaacagtttttgcataggaaatatatccgcttccagtaattgactgcagtatgagcagctgctagcagtataggctggatataacagtaacaatcacattaagtcaagcttgatttacaccagtttaaaacttgtggcaattgagttcatttgcaacccacaaaaagtacccaaagaacgttatcctccaaccgggcacaataaaaccttcactaacattctggcccagtctggggttgatcccagaggcctgaactctagaaattaagtaactgtcgtataatacatcctactgctaaaggtttgttacatggagattgtgcatgtgcctccttttgtaaaaaaatttaattaaaatacaaggttctgtatttatggcccatgaggacaaaatgccaaaagttttaaaatggatcaaccctggtgtgtagctagcaagcaataactgactactcgtcacctacagttgtactaaatgtatctaaagaaacacacagtcctacaaaagttgttctcagagaaatatcattgaggtgggggcagctcttcccaggatgctaaaagttctatatgatataagcacaaattaacagcttgatgaagacataatctactgcagctttgagaaacctatgcctgggatgtagttacccctcacattctacaatgttgtagagatttttttcccaagaaatgtcatttgaacattttacactgactcacagagactgtgaattgacaggactgctatttgtttgagtttttggtaacatttgctgngnnnnnnnnnnggtggtcctttctgttgcacactttatcatcatgcactcatgcctcgatgaggagata

SEQ ID NO: 128801 - DNA, 643 bp, Homo Sapiens
catctttgcaactcacttttattgtttctttataaacttcctctcccatggaggaatatattgttatagtcattagcttatctctttttttaaaactctatgctaacagcaatggagccaagaggaggaaaacataagctacgatagaaaggcacttagaacctgttaaaatactgacgtcctggaatgtgcaacaacacaccaatgacaaccacaaaaagtacaccggccctgccgagcctggtccgtcaccgagtcgcatgctgagctcgtcggccttccagtgccctgttcctccgctctgctcaagtcgcaaacccatgaccccgccagggacttaaggcctggggccctcacaggggtggggggtgctcagggcctgggtggggcccgaagaaaggagaccagctccctcctaccttgctcatagccccttcgaggggcagagccagtgtggctgggccctgtcagggctggagtccaaagcccagtggcaaggtgggccgggtcagggtgacccctctgggacagaagggcagtccgggagagggtggggtcagcagagctgccagaggacctgcagggccactaaggaccccaaggctgtccgggcagctgcctcgttttacagatggggaggtgg

SEQ ID NO: 128802 - DNA, 1019 bp, Homo Sapiens
  misc_feature (596)..(596): n is a, c, g, or t
  misc_feature (717)..(717): n is a, c, g, or t
  misc_feature (747)..(747): n is a, c, g, or t
  misc_feature (822)..(822): n is a, c, g, or t
  misc_feature (873)..(873): n is a, c, g, or t
  misc_feature (879)..(879): n is a, c, g, or t
  misc_feature (884)..(884): n is a, c, g, or t
  misc_feature (931)..(931): n is a, c, g, or t
  misc_feature (947)..(947): n is a, c, g, or t
  misc_feature (960)..(960): n is a, c, g, or t
  misc_feature (983)..(983): n is a, c, g, or t
ttttttctgagaaaaatgtgaaaacttttactgttacattaagaacaggtggtagaagcaacctattccgcacttctcaaaagatacagaggggcacatatgccacactggaataaagaatacagaatcaaacatgtacaaaggtaccacagcaggttatggttcatacaggactttaaatgacccatgttgacaatacaatttgcaaaaaatatgagaaaagcaatacatatttctgaaacaaaaacatacctgttgtaaaaaacaacacgcgtagtatcagaatagaacagttaacagagcagcagttactgaagacagacggcaacaggcagctgcgccagccatgggtctgccatgcggctacacccatgaggccctattgtgaacaacgcaacgttctccatcagcggggaagcacacagactgcttggccaccaagctttccgcctggtctgttcatactgagatttagcagtaacagcccagaagggaatgcagctccccgctccctatgacatcaatgtcttcaacacatgtgtaagattcttttctggagcccctagctcctccactctttaaaactaacaacgcanagaaagagaaataagaaagcagagacatcacattgccttagaaaagctgtcctcaactcatcttctctacatgttttcagatcacgtcctgacggaatggaaggagcagctccacctcccngaggcttccgtggactccgcacacacacgnacaccagtcttcagtcatgtgccatggagactttggtcccaacagtgtctgcttttctagaactggagacctgantcaatggcagatgtgttagttccatttgccttgcatacctatgctcacaanatccanactangggtatccctcaccatttcatgcactgacacagatacaaatctcgtngcgattctggctccanggcaatccctaangagtcgataattctatcatgcanactgttctgtgtgattgtatcgtcaatccaccacaa

SEQ ID NO: 128803 - DNA, 1118 bp, Homo Sapiens
atttttgcttctttttaatgtaaacagaatacacaatcacattaaaaaccccaacatgacacagaatacacacagaattatatatagatatttacaggccctcgaaagccaaaaggaaaaatggcccctctggttaagggaagcttctcttcctaccttgtccctgtccaaaatcaaagtgctgaggcagctgaaggagcctccgcaattacttctggatataatgtagcaggaggctggaataacatcagaaacaccccacccccaccccagagcacaaccaagataccgactttctggccctggccctaatcctaaactctcctcctttgcaagctgacaaagcaaggatttgtatgtctcgagaggcatcagcatgacccctgaaattcagatgcacggcggaggggttcccatcccattccagctttcccagccttgggctgattgtgaaatgagccaaaaccaaccatatccaagagaggagggtgggggaagtaaaggaagaatggatctcaggcagagatgactgcttcggagcaggaccctgggaaccaaggggaggtcaagctgggctcacccaagcccaggacagactgcggaagacacagtggggctgtgctgccacctggtgggggatgggagcactgcagcaatgaactaggacagtcccacaggtaccttcagatcatcttttctctccatttcagtcccctaaccaacagcctcactgcagcagctcttcccaggaaatgggcttggagaagacctccctttctaaccagaggtcatagttcatctgaaagtcctcagggaggtccacccgttggcccaggacactctgcaggcagttgtccactggcaggaagtcagggttgctgtgggcccggtcatagcgccgggcgttgaagcgttcaatgttggcacgaagggcacactcctctgcctggaagtcccaaggccgggcatcaagatcattgccgtatgcccagtcgtcgttcagccgatgccgcaccttctggtagatggcagacatggtcttcatgttgctctttcgccactaccgcccccggccgtaatggccgaattcccgggcatatgtccggtaccgtcgactg

SEQ ID NO: 128804 - DNA, 682 bp, Homo Sapiens
ttttaatgattatattggttactttattactacattagaaatgcaaataaactgtgaaaagctgcaaaagcatgcaacttcatgaagattatgaagcaatggaagcacccatcatagcaggttaaaacaggcttatccagtataggatgcaagaactacatacacaaaggtcatcaatggtgagattattgacagcatctgccatctggaacatatgcaccaatggtaagtttaaaaatgaatttaaggaaacattggctacctctgacttcttagccagggaacataggtgagaagatatccgaagacgcctaaaatctctacaaacacatgggtttacaaaaaacaagcctaaaatcaagactctcaggtaatgtcgaaatctgctgttgggaggcgatccccattttatgatgtttgaacacactctttctcttgctggatagtttcctttgagggaagagtatttttttcttcagtattagttttcttcagttttgacctgtcaaacttctccacttccgacaagtctggcttatcactcatcttgactagaagatagcctgaaagcttgaagactcgtgaaaggctgttcgcggggctgagacccagactcgctccggaccaggttagcgttcccgcgcagagccctgcagtgctaagccacccagcaggccccccc

SEQ ID NO: 128805 - DNA, 918 bp, Homo Sapiens
aacgattatatttattattttattgctacattggaagtgaaaataaactgtaagaagctgccaaaggatgcaacttcatgaagattatgaaactattgaggcacccattgtagaaagttaaaattggcttatcctgcatgaggtgcaaggactacctacacaaaggtcatccatggcaaggttattgacagcatctgccatttggaatttacataccaatgggaagtttaaaaaggaacttaaggaaacattcactacccctgacctcttaaccagggaatataggtgagaagaaatcagaagatgtctgaaatctctacaaacacacaggtttacaaaaaaacaagcctaaaaccaagactgtcaggcaatgctgaaatctgctctttggaggagatccccattttatgatgtttgaacacactctttctcctgctggatagtttcctttgagggaagagtatttttttcttcagtattagttttcttcagttttgacctgtcaaacttctccacttccgacaagtctggtttatcactcatcttgactagaagaaagctgaaggcttgaagactcgtgaaaggccgtacgcggggtgagacccaggtggtccccccaggtgagcttcccggccagagcccctgaggggctaagccttctaagaggggcgggccagcctctctgatgggcgagggtgcgggatcgactccttcccctctcggttgagcctcaagaggggggcaccatctcttctaagacaagaggggggatcaaagagaacgccccccaggccacctcaaaggctccacgtgaggcgaggcacatctacacggagaacccctggtcgggaccgtagaagaggcgcacgtggctcaacacaaaacgggggccacgcccaaaaccaccacggagcgaaa

SEQ ID NO: 128806 - DNA, 1131 bp, Homo Sapiens
tttttactgtggcaatataactagtctggataattttattaaatcatagaatatacagtcaggaaacactacagctatatttagctgttagttatctcaataagctacttaatttactggcagaccaaaacaggcatactaagcatttttatcaattaaaaaaagtcttcagttgttcaagtttcacatatactcataaaatttttaactcgggggcacagttaacataatttattgagtgttctccctataaaatataaattaacttttccaaaaacattcctcaaagatactataaacaaaagaaataagggtatattttataacagaagagtgtaatagatgaccattatggtaaaactaaggtgccataaaaaatttggcccagctatgaatttcagaccctatgaatttttatgttgaatacatttggctatattgctaagtgggaaaaggaggaaagtaataccaaaattattgtgaccaccaatttataaaatcattattttaaagctaatcgtaaaacttcaaatgtttagaaaacagtaatttgtgggtactaatcgcatcttactatgtaactgtaaaaggctattttctctttggtgcccaggccagcattttgaatacattgccaaaacatttgcactccctagctctgacaattcaaatacataggattttatctattttacattcctgtttgatagaaatttgaggcaaattttacccacacagcctgaaaaataccttgaaagcaaacctcggtcttctgcatcttccaattgattcctttacaaactctgcacacatacaacttaagcctctgctcaggcttattataccatgcacactgcccacaaggaaaaaaattaattgaaaataaaagccacaactctgtgtactatttaaactgaatatccaattataaattggtacattgaagtgtctaaataagatgtttttagcaatcttgttaaaaaaattcttgggcaaaatatatcttaatttttaaaaacaccccaagatttttaaaaaacacttgtactatacaacttatagtaaccttgaaattggtttacaaggttttaatcaaggtatttacataccaagtaatgtaaaacaaaaaaa

SEQ ID NO: 128807 - DNA, 1351 bp, Homo Sapiens
tcattcattcatggttcattcattcatgtaaccaacatttctgagcatggcacttctggtgtgccaggtgctgggacacagagttgaattagaccactgtcccttggccttgaagagtttatttactcattcactcagcagcattcaccaagccctactgtgtgcattggctgggcaaggggtggtgttgggggtagagtgagcgttgctggcagggggagccggggtggatgtgaagcagcccacaggtcaggcctccatatctggaaagagcaggaacccggaaaagatgctgttggcaccctccatgcccagtagtgagttcttgtcggtggcctgcaggaagacgttctccccctgctccagcttgaggaccatgccaccggtggtgacctggaaggtgttgtaggcatagtcacagaaggtgaccaccttctgtgcacgctcccggccacgcatgaggttcacgcacaggttccctcgagagctggcgtggtaggtgaagtagtagagaccgggcaccttgcaggtgaacttgccactgcggggctcataattgttgttcatgttggtgatcacgtggtcgaagcggatggtctggtcccggcgcagggggacgttgatggttcttgtggcagagaaggcgattttctgggtggccttgtagtctcccgattcacctttggggcctggggctccaggggcccctgggccacctttagggcccatggggcccttggggccgacttttcctggattcccaggaatccctgggtctcccttctctccgaactcaccatggtctccagccagccctggaagccctttctctccttttatccctggggtcccaggttggccatcggggccaggtgtcccagggatacccgggatgccagggatggctgggggcccggtgcagctgagctgggcctgggagatatcgattaggcccaggagcaggagcaacatcagtactgggatgctgccccatgggatcttcatcatcatactgtgtcagacgcctcctgggaagctggtgtcctgtgaggccactgggctgagcagcagtgggaccaggagccgagagcctactgccctcggtccgaagcggaagttcccttccccagaggcgggaagggctttcccctgacggtcccctcccatggaccagcaggctggcccctttcccgtcccctcactgtccccccaccctgctgccctcaggcagtttcaggtcctatttctgcaacccactggatttactgtaaatgagacgggtgggtggcaagtttggttctgccaactcagcagctgtggggagaacacgctgtcctgggggaacatccac

SEQ ID NO: 128808 - DNA, 735 bp, Homo Sapiens
  misc_feature (696)..(696): n is a, c, g, or t
ttttatgttcaatttttggtttattaaaacaaaactacattttctgtgtttcttgcaatacactaacaagcataaaaatcaatcagcatttccaagtatgttttgctcacaaaatcgcagttatttcacagtaccttatagtaattcttttcacgagtcttaacatttctttgtacaacaggcaaatagtttaataccttccatcaagacatttcagagctctagacgtttagaaataaggtcaagaatctctttcaaatgcaatcattagtttgtattaaactaaaatgccagacggcaagtctcaggtttctaaaatagttttaaaaaacaggtttacagcccatagtaagtcttagaaacctcaacgataggtcctgtcatgtctaaacactacaactatctgtggataaaaatctgcattcaaacgtacaatactttcttctagatctgaattaaaaccttatttaccccaattcatccatgtattctgatacgttcagtgaaaaagccaggatcattggggctgttctctctatcaaaggaaagagctccgatcacctacattataattttcctgtgcttattttctgcaggggaggaaatacacatctattcaacgccacactggacgttacaaaatgcatgcatattctgccccagtgctatctgttcattaccgttttgtctccttanagactatctacatagtgtttcccaaatgttcccacagga

SEQ ID NO: 128809 - DNA, 1032 bp, Homo Sapiens
gtgctatgacagtggtaaaaaagcaggctggtccggtcggattcccgggatatcgtcgacccacgcgtcgggcatctgagaggctggtcgtggactgtggttgggggaggtgggagctgttttaaccgtgtgccccctctcctgtgccggcgtgggcatcccccggggcagtggaacgcgggcgctcctccagcttccgagtccagccagcctgggcgcggggcgccgcccccgagacacccgaggagtccgttcctccctggttacgtggactgtggagctggtctcttgtggctcagcgccgtgcggaggttgaagcgtacctgcggaggtcgcaccagggcgtgaggaggaggaggaagggcatgagccgagcttgaggaatccgtgctccaaactctacactcaagggtggcccttgggtagggtgaagatcccctgtctttatcctagttccacaccttggtgtgggttactgggtgcaggatgaactgtcgctcggaggtgctggaggtgtcggtggaggggcggcaggtggaggaggccatgctggctgtgctgcacacggtgcttctgcaccgcagcacaggcaagttccactacaagaaggagggcacctactccattggcaccgtgggcacccaggatgttgactgtgacttcatcgacttcacttatgtgcgtgtctcttctgaggaactggatcgtgccctgcgcaaggttgtttggggagttcaaggatgcactgcgcaattctggtgggggatgggcttgggggacagatgtccttgggatttctaccagaaggaagaagtctcggctgggccatttctcggaaggagtggcattcccatgggggaaatgtggggaccggccaaagtggcatggtggggaagccccctggccccccggaaagccagggagcgggcaagaaatttggcccggggaagaaaggtggtggttgcaaacaacctcttggccaaggaagcacacctccacatccttccgtgggggaggggagacgatattctg

SEQ ID NO: 128810 - DNA, 1450 bp, Homo Sapiens
ttttcatgttctcaactttattccccatcccagtggtggctcttctgtacagtggagaaagaagggggaccccaccagggctatggagagacagtagaggcaggactgaaccgtcagcaaagattaaaaggatgacctgaggctggcaaccacaaaaccaagaagccagcgggggctgccccttccaagtctcaccaatgacccagagcaggttccagagcccaaaggcccaaaagtgcaattcccaaaagccaaggtctgggagccatcaaggagctcccagagatccagcgacgctcagagggcaagggtgtctttgatgagcctgcgcatggtggtggtgactgaggtgcccagggcatcagtgatctggaaggagatcttgtacaggtagggctgcacgtcccgcaagcctgtgtcaaacacgttatccacctccgactgtgtgggcatcttgggcaagtactcatgccgattcatcacctccacgatgttgatgatcttctcgcagagtttctcacccaccttctcccggcagatctgccgctcctgctccgtggccagggctaccacatgcaccttgaccgtccacacttcccatgggatgcactcgtctgagaatggccagcgagacttcttcttctggtagaactccaaggacatctgccccagcccatcgccaccagagttgcgcagtgcatccttgaactccccaacaaccttgcgcagggcacgatccagttcctcagaagagacacgcacataagtgaagtcgatgaagtcacagtcaacatcctgggtgcccacggtgccaatggagtaggtgccctccttcttgtagtggaacttgcctgtgctgcggtgcagaagcaccgtgtgcagcacagccagcatggcctcctccacctgccgcccctccaccgacacctccagcacctccgagcgacagttcatcctgcacccagtaacccacaccaaggtgtggaactaggataaagacaggggatcttcaccctacccaagggccacccttgagtgtagagtttggagcacggattcctcaagctcggctcatgcccttcctcctcctcctcacgccctggtgcgacctccgcaggtacgcttcaacctccgcacggcgctgagccacaagagaccagctccacagtccacgtaaccagggaggaacggactcctcgggtgtctcgggggcggcgccccgcgcccaggctggctggactcggaagctggaggagcgcccgcgttccactgccccgggggatgcccacgccggcacaggagagggggcacacggttaaaacagctcccacctcccccaaccacagtccacgaccagcctctcagatgccaccactctcccggcaggctccagaccacctgggtcggagcctcgtgccgattccacacccagcctcgtacctagccgtaa

SEQ ID NO: 128811 - DNA, 777 bp, Homo Sapiens
  misc_feature (695)..(703): n is a, c, g, or t
tgacacaggccaaatcatggaaggccatgctaattttattaacttatatagtgcataaagtctagaatttaaaattacaaaggttttctacaaatcaataagaaaatacaaataacctatattaatcagaacagaaactcaattcaattatcttaaacaagaaagggactttattggctcacaaaactttaaagtccggaggtagggcaggctttaggcacagctggatctagggcctccagaaaaatgacatcagaacttagttctctttccatttctgctagcatccgagtttctcctcagacagactctctccacatggcacaaattcaggcttacatggtccttggttcctgggatctccataaagccttctttccagtagttccagcagaagttctgttaagggctttccttagcctggcttaagttatatacccattcttttatcactgtggctaggaagctgtgggactcaggaggccaggcctggtcacatgctcacctaagccacagggaataggttccccacaaataaataaaggttgtgttaccagaagatggggaaggagatgctgaacaaataaaaacaatatatccacacataacccaatagaaagcaggtaagggatacgaacaatccacagtaaactataaatggccaattaacatgaaaataaccccaatctcaccannnnnnnnnataatcagggaaatgcaaaataagaaaaggttctttttcgcccaacagataaaaactatcaagtgtaggtatgg

SEQ ID NO: 128812 - DNA, 663 bp, Homo Sapiens
  misc_feature (128)..(140): n is a, c, g, or t
accagtagttcctttcccgctttattttttagctgctttttgggttttatacaatgaacatgtattaattgtagaagaaaacgatgtcatcctttatgataaaatccatttccattttagcttttttnnnnnnnnnnnnngctgttgtggacagatgaacatccaagtactgggcacacctccagccctccctcttccactgaaggccattgcctattcctagaaagttctttcccaggtatgcagctttcagtttccacttcagaggccacagtgtctggggaacggactgcccccaatactaaagggagtcaaatctctttaattccgcactcctcagtacaacaagaagtcccttctttaggccactgatggaaacctggaacccccttttgatggcagcatggcgtcctaggccttgacacagcggctggggtttgggctgtcccaaaccgcacaccccaaccctggtctacccacagttctggctatgggctgtctctgccactgaacatcagggttcggtcagaagatgaaatcccaagggggacagaggtcagtagaggaagctcaatgagaaaggtgctgtttgctcagccagaaaacagctgcctggcattcgccgctgaactatgaacccgtgggggtgaactacccccagga

SEQ ID NO: 128813 - DNA, 1010 bp, Homo Sapiens
  misc_feature (877)..(911): n is a, c, g, or t
  misc_feature (952)..(961): n is a, c, g, or t
cagagcttgctcgggctttagcctttgaccacttccgtgccggccctcctggatccgcccagtgagtgctgtcagctggtcctggggaaagtccaccttggggtgcactgagagatcagggggatgatggtcttcccagcatggccaccaatgacagggacgttgactcgagctggatccaaacccttcagctctgcaacaaaggtgttggctctgacgatgtccagggtcgtcacgccgaagattttgttggggttgtacactccatgcttcttgaaaacttctgctgtgatggggatggtggaattaaccggattggcaatgacgcagatcatggcttccgggcagtgctgggcacaggcagcggtcagggtggccacaatcgtggcattggtgttgaacaggtcgtcccgggtcatgcctggctttctggggactccagccggaataactaccacatcacaacctttcaggcagtcaggcagctgttcaggtccgaggtagcctttcacagcggctttggtctcgatgtggctcagatctgcggccactccgggtgtgtgcgcgatatcatagagggtcaggcggctcaccaaggggctgttcttcaggagaagtgaaagtggctgcccgatgcctccagaggcccctagcacagctactttagcattgttctgggccgaggtgctgaagctgcggcggagagcagcgctgacaggccgggcgagggcggagagcatggctggagcgggaggggcaccgactggcaggcacaggagctggtgacgcggaagtgactccaacgacctccacactgcccagcgcccccggccgtaatggccgaattcccgggcatatgtccggtaccgtcgactgnnnnnnnnnnnnnnnnnnnnnnnnnnnnnnnnnnncgccgcttcctcgctcactactcgctgcgctcgtcgttcgnnnnnnnnnnggccaggccccattggcggccgcaatttattgatgtgtatgattagttt

SEQ ID NO: 128814 - DNA, 561 bp, Homo Sapiens
  misc_feature (54)..(63): n is a, c, g, or t
tttttggtttctcaaaattaggtttaattagattcacctggtaaaaatgcggannnnnnnnnngcagtcttaagcttcttcaatgaacccagacgtctgttttttattagctttctggtgattctgacacactgcagagtttaagaaccaccattctagaagatggctaaaaatagcctaggctcctaggcttaagtggtcgcgggccaagtcaagcactgttaagacacctggcggcaggctcagtccgcccacagcaggagagatcctccaaaaaggttaagaggaagccgtcttcaggtcagaagcgctgaattctaatcctctggccaaatgactgtaaccctggcccagttctctagcctcggtttgtccatactatggaattaggaagtatacgatttcttttattcacgcacaactcacacggatgctgcaaggagattagctacgtcaaagcaatggaacgctgggccgaggtgctgaagctgcggcggagagcagcgctggcaggccgggcgagggcggagagcatggctggagcgggaggggcaccgactg

SEQ ID NO: 128815 - DNA, 790 bp, Homo Sapiens
gtgaggtgctgtcaagctggtcctgggggaaagtccccccttgggggtgccctggagagatcaggggggatgatggtctccccagcatgccccccaatgccagggacgttgcctcgagctggatccaaccccttcagctctgcaccaaaggtgttggctctgacgatgtccagggtcgtcacgcggaagattttgttggggttgtacactccatgcttcttgaaactttctgctgtgatggggatggtggaattacccggattggcaatgacgcagatcatggcttccgggcagtgctgggcacaggcagcggtcagggtggccacaatcgtggcattggtgttgaacaggtcgtcccgggtcatgcctggctttctggggactccagccggaataactaccacatcacaacctttcaggcagtcaggcagctgttcaggtccgaggtagcctttcacagcggctttggtctcgatgtggctcagatctgcggccactccgggtgtgtgcgcgatatcatagagggtcaggcggctcaccaaggggctgttcttcaggagaagtgaaagtggctgcccgatgcctccagaggcccctagcacagctactttagcattgttctgggccgaggtgctgaagctgcggcggagagcagcgctgacaggccgggcgagggcggagagcatggctggagcgggaggggcaccgactggcaggcacaggagctggtgacgcggaagtgactccaacgacctccacactgcccagcgcctgctctctgcctcgtgcc

SEQ ID NO: 128816 - DNA, 841 bp, Homo Sapiens
aaaggtcccccccctgggggggtggcctctggagaagattcagggggggatgaaaggttttttcccaggcaatggcccaccaaatgaacaggggacgttgacttcgaagctggaatcccaaacccctttcagcttttgcaaacaaagggtggtgggcctctgaacgatgtcccagggtcgtcacgcccgaaggatttggtggggggttgtccactccatggtttctgaaaaacttctgctgtgatggggatggtggaattaaccggattggcaatgacgcagatcatggctcccgggcagtgctgggcacaggcagcggtcagggtggccacaatcgtggcattggtgttgaacaggtcgtcccgggtcatgcctggctttctggggactccagccggaataactaccacatcacaacctttcaggcagtcaggcagctgttcaggtccgaggtagcctttcacagcggctttggtctcgatgtggctcagatctgcggccactccgggtgtgtgcgcgatatcatagagggtcaggcggctcaccaaggggctgttcttcaggagaagtgaaagtggctgcccgatgcctccagaggcccctagcacagctactttagcattgttctgggccagaggtgctgaagctgcggcggagagcagcgcatgacaggccgggcgagggcggagagcatggctggagcgggaggggcaccgactggcaggcacaggagcatggtgacgcaggaagtgactccaacgacctccacactgcccagcgcctgctctctggggcctcgtgccgaattcaacacccagcactcgctaccttagccatattt

SEQ ID NO: 128817 - DNA, 1130 bp, Homo Sapiens
gacggcagtaactctaacggtttaaggtagcgaggctgggtggttaattcggcacgaggctcctgtgcctgccatgtcggtgcccctcccgctccagccatgctctccgccctcgcccggcctgtcagcgctgctctccgccgcagcttcagcacctcggcccagaacaatgctaaagtagctgtgctaggggcctctggaggcatcgggcagccactttcacttctcctgaagaacagccccttggtgagccgcctgaccctctatgatatcgcgcacacacccggagtggccgcagatctgagccacatcgagaccaaagccgctgtgaaaggctacctcggacctgaacagctgcctgactgcctgaaaggttgtgatgtggtagttattccggctggagtccccagaaagccaggcatgacccgggacgacctgttcaacaccaatgccacgattgtggccaccctgaccgctgcctgtgcccagcactgcccggaagccatgatctgcgtcattgccaatccggttaattccaccatccccatcacagcagaagttttcaagaagcatggagtgtacaaccccaacaaaatcttcggcgtgacgaccctggacatcgtcagagccaacacctttgttgcagagctgaagggtttggatccagctcgagtcaacgtccctgtcattggtggccatgctgggaagaccatcatccccctgatctctcagtgcacccccaaggtggactttccccaggaccagctgacagcactcactgggcggatccaggaggccggcacggaggtggtcaaaggcttagagccgggagcaggtctgccacctcttcatggcgtatgcggcgccgtttgtcttctccttgtggatgcatgatggaaggaggtgttgtggaatggtcttcgttagtcaacggaaacggatgtactacttctccaaccgtgtgtggaaaaggtgaaaaacgggttcggaagtcccttggggaaagatcgtgccccccagcgagggccagagggggatcgaaccagacggggggacaataagagtaggacgggaagatagggaagagcaacccggggggacgaaacttgggagccctatatccttttggg

SEQ ID NO: 128818 - DNA, 1462 bp, Homo Sapiens
  misc_feature (157)..(157): n is a, c, g, or t
aataaagggaagacggtttgggcctttattggtatccaatgcggtcgttgggttgtttctcttacggggttaagtgaaaattgttttgtggggggcggggaagccaacgggggtgttaaaaagggagtgtggtaaggttaaaaatagttttggtttntgttttacagaagggaccttgaaaaataaaatcaaggacggcttttattgatgcgcccacagagccacccacaatttggaaggcatgatgatgtcaatacagtaatcatcaccaaagcaaattaaaatacaaagtttatctgcaacggctttgcagtgacatgatgccttcataaattaaggaaactggccacccgtcacagcggctcacttcagggtcttcacgaaatcttcccccttcttgatggaggccttcagctcggggatggcatccgagatcatcttctcctcaaaagaggagactttgccgatgcccaggttcttctcgatgccctttttcccaagcagcagcggtgtggagaagtaggtacattccgtttcctgtgacttaacgaaggaacattccacaacaccttcctttccattcattgcatccacaagggagaagacaaagcgggcgccggcatacgccatggagagggtggcagagcctgctccggctttagccttgaccacctccgtgccggcctcctggatccgcccagtgagtgctgtcagctggtcctggggaaagtccaccttgggggtgcactgagagatcagggggatgatggtcttcccagcatggccaccaatgacagggacgttgactcgagctggatccaaacccttcagctctgcaacaaaggtgttggctctgacgatgtccagggtcgtcacgccgaagattttgttggggttgtacactccatgcttcttgaaaacttctgctgtgatggggatggtggaattaaccggattggcaatgacgcagatcatggcttccgggcagtgctgggcacaggcagcggtcagggtggccacaatcgtggcattggtgttgaacaggtcgtcccgggtcatgcctggctttctggggactccagccggaataactaccacatcacaacctttcaggcagtcaggcagctgttcaggtccgaggtagcctttcacagcggctttggtctcgatgtggctcagatctgcggccactccgggtgtgtgcgcgatatcatagagggtcaggcggctcaccaaggggctgttcttcaggagaagtgaaagtggctgcccgatgcctccagaggcccctagcacagctactttagcattgttctgggccgaggtgctgaagctgcggcggagagcagcgctgacaggccgggcgagggcggagagcatggctggagcgggaggggcaccgactggcaggcacaggagctgcctcgtgccgattacacacccagcctcgtactagccgtta

SEQ ID NO: 128819 - DNA, 956 bp, Homo Sapiens
ttggtctcgaatgtggctcagatctgcggccactccgggtgtgtgcgcgatatcatagagggtcaggcggctcaccaaggggctgttcttcaggagaagtgaaagtggctgcccgatgcctccagaggcccctagcacagctactttagcattgttctgggccgaggtgctgaagctgcggcggagagcagcgctgacaggccgggcgagggcggagaaagcatggctggagcgggaggggcaccgactggcaggcacaggagctggtgacgcggaagtgactccaacgaccctcgtgccgaattcggcacgaggaacaaatatcccaaaggaaaagcagcaaccaaatttgccatcaatgatttccccaaaaaaaccatggacccagcactgtattcagggtcaacaacaacacagaatagtagaagatgttttttttgctcaagacatgaagagaaaatgaggtcagatttataaaccctgaaggttctttaagctctgggtatcttcgatatctaaaaataatgagaatggtgagctggctcagcacaatcagcacaaaaaggacccgggccatgatgtagtgatcagtacggagaataaatgatgccaggggatcaaaactgagatgattattctcttgaacagaaaatatgtggtgaacactcttacttcttccagcagaatcctggacgattacttctatgttatgtgtcccactactgtagtttctaggattccacttcagtacgaaaatgggaccagacacatgaacagcctggcctaaatgaactccatcaatcttaactgtgacagaagtaatggaggataaggaaaaggccaagactctaaaatgagagcatatataaaacacatggtttgaggtttgtcattgtttttgcaaaggagaataaccttattgtaacttgcagatatacacgtataggcagaacccc

SEQ ID NO: 128820 - DNA, 1315 bp, Homo Sapiens
  misc_feature (41)..(41): n is a, c, g, or t
caagtggggcaaggcagttcctttttctcgccttatttttnacgcctggccatttaaaggcgaggttttatacaatgaaccgtattaatagtagaagaaacgatgtcatcctttatgataaatccatttccatttagcttttttaaaaaacaaaagctgtgtggacagatgaacatccaagtactgggcacacctccagccctccctcttccactgaaggccattgcctattgctagaaagttctttcccagtatgcagcttcagtttccacttcagaggccacagtgtctggggaacggactgcccccaatactaaagggagtcaaatctcttcaattccgcactcctcagtacaacaagaagtcccttctttaggccactgatggaaacctggaacccccttttgatggcagcacggcgtcctaggccttgacacagcggctggggtttgggatgtcccaaaccgcacaccccaaccctggtctacccacagttctggctataggctgtctctgccactgaacatcagggttcggtcagaagatgaaatcccaagggggacagaagtcagtagaggaagctcaatgagaaacggtgctgtttgctcagccagaaaacagctgcctggcattcgccgctgaactatgaccccgtgggggtgaactacccccaggaggaatcaggccttggcgatgcaagggtgccaacaggaggggcgggaggagcatgtacgggtaaactgaatactgtgtccaattccataaattaacaatttagacttttcttgaagctactgatgaaagcgtcacgcttcagtctaacagttaaacatcatcctaattctgattggtaatgaagaggtagcagacactctaaagttggctctcacagggaagaaagcacagcatttacagaagggaccttgacaaaactaaaatcaacggacggcttttattgatgcgcccacagagccacccacaatttggaaggcatgatgatgtcaatacagtaatcatcaccaaagcaaattaaaatacaaagtttatctgcaacggctttgcagtgacaatgatgccttcatacaattaaggaaactggacacccgtcacagcggctcacttcagggtcttcacgaaatcttcccacttcttgatggaggccttcagctcggggatggcattcgagatcatcttctcctcaaaacgaggagactttgccgatgcccaggttcttctcgatgccctttttctgagggcagatgggaaacatgttaaaatgaagttcccggaaagtgcttgtacagaaaaccgacct

SEQ ID NO: 128821 - DNA, 1365 bp, Homo Sapiens
  misc_feature (234)..(234): n is a, c, g, or t
  misc_feature (307)..(388): n is a, c, g, or t
  misc_feature (401)..(498): n is a, c, g, or t
  misc_feature (646)..(660): n is a, c, g, or t
ccccactttggaaaatcgccgggaaaaaatgcttttatttgggaaaattggggaaggctaatgcctttatttggtaacccatattaagctgccaattaacccagtttaccaacacccaatttcccattcattttaggtttccagtttacagggggaggttttgggaaggtttttttaaagcaaagtaaaccccttttccaaaaatgggtatgcctgattaggatcaggaccagncctgtgaggactgagggcccggaaatgacccctggggccggtgattctaaaatcccccaaccaatttggatcnnnnnnnnnnnnnnnnnnnnnnnnnnnnnnnnnnnnnnnnnnnnnnnnnnnnnnnnnnnnnnnnnnnnnnnnnnnnnnnnnnccccattatcccnnnnnnnnnnnnnnnnnnnnnnnnnnnnnnnnnnnnnnnnnnnnnnnnnnnnnnnnnnnnnnnnnnnnnnnnnnnnnnnnnnnnnnnnnnnnnnnnnnaagttaccagttttcccagtcaggcggtggtaaaacgccggccagtccttagcttataataggactcactatagggcccccttggtccaagaaagctgggtacgggtaagcttggccccctggagggatattttagagcgcccgcccnnnnnnnnnnnnnnnctttaaagaaaacaagttttatttttatcatcagaacattctaataaaaatattatgatgagattagctacctttattctctgagccttgactctgtcccaggcctgccctggagcgcctgcacgctcagctccctgaggtaggtccggagggagaccccccgctgccccccgccctcggccaggatacctctcacctcatgtcccctcctccagacccccacagccctggatgccccatagcagccctgccacggctggcagaactgcctccaccctccaccaacccccaagacaggcaggaaccgtctcaggctggcacacagcaggtggtgcgggggtagagggaagaggcgcacccttctgcactcaaccgctccagcgggcagagctgagggccactgccccccccaggctggcaccaccatggtctagaccccaagtggcctgaatgctgtggatcacttccttctccccttccacagtgtttggggagttggggaggaagggaagggagaggagtgtcaacgtcgcagtgacggggtcctgagacaactcactctgccaccccggcaggcggcagcagacagtggcccgcacgggcctgaggggcctcctgtctgtggtgcccatcccaccgagaggattctggcccgcgagccggcagacactttattatacagaaacactatcgtcgtctccacgg

SEQ ID NO: 128822 - DNA, 321 bp, Homo Sapiens
  misc_feature (69)..(119): n is a, c, g, or t
aaaaaattcccctacccctgtttaaagctgaaaaatacatttggttcatgtgcattgtttacaaagcannnnnnnnnnnnnnnnnnnnnnnnnnnnnnnnnnnnnnnnnnnnnnnnnnncaacttaatatattttggattaatatttggtatttcttttaaagtattttttgtgctgtgaacattttctgccaaagaccatgatgtgtgtctgtatgtttaagttatcgtaaatatttaaaatgtaaacatggctgttttgttatgccaccctgtaccaggattgctgccgcattccactgggtataacagtattttaatt

SEQ ID NO: 128823 - DNA, 903 bp, Homo Sapiens
  misc_feature (552)..(602): n is a, c, g, or t
  misc_feature (803)..(842): n is a, c, g, or t
ctacccggtaccagttctttctgagaaactggagatgtcttgttagcataagtgtcttcattcccacctggagggtttgggagaggagcaaagcagttgaaaactagttaatgagctacaagagtcaaatagtcctctgaatggagcccccatcacaaaacagtgcccaggaggctggctcctcaagctacccatgcccagcgccctaaagcagcaccagatgctttggaattggggtgaaacacccacatggcagcctgctagcagcagtgactttgacttctggtcttaaagagtccctcacttcagccccaggagctattggtgggttttagcagttttgtctttaccgtttttagttctccttgattctttgttttcttcctttatcgtttttaggtttggtatgtgttgttttatttccatggttcctcaagtttcctttttaaacatttgcatttgctggacaattgcaattttttttaaaaaattcccctacccctgtttaaagctgaaaaatacatttggttcatgtgcattgtttacaaagcnnnnnnnnnnnnnnnnnnnnnnnnnnnnnnnnnnnnnnnnnnnnnnnnnnncaacttaatattttggattaatatttggtatttcttttaaagtattttttgtgctgtgaacattttctgccaaagaccatgatgtgtgtctgtatgtttaagttatcgtaaatatttaaaatgtaaacatggctgttttgttatgccaccctgtaccaggattgctgccgcattccactgggtataacagtattttaattnnnnnnnnnnnnnnnnnnnnnnnnnnnnnnnnnnnnnnnngaccgcgtatgcggccgcaagcttattccctttagttgagggttaattttacggttagcac

SEQ ID NO: 128824 - DNA, 690 bp, Homo Sapiens
  misc_feature (601)..(601): n is a, c, g, or t
  misc_feature (667)..(667): n is a, c, g, or t
tttttcttttgctagtagcaagttttattctaagcaaccgcaaatcatccaaggggatgttcacatatgaccccagagcccactcccatccccccagacagcagcggggcacacattcaacactcctgagacaagccatctgtgtgctttttctgtaccctctctggaataggcaatcccagaatgcatttggaaactgtaatccgaaccacctcaagtaaggattggtgtaataggaacaaactcaaataaccactggtacaaggtgaacaaccttaagtaacaaagtagttttctactctgggaggctgcagaacatagccaggaggaggtgggaagaggagaggggtatgccgagacaccgcaagtcccagaccacagccataccatcagcaacttcactggaatctttcttctcaacaggggctgcagggtctacccctccgactcttttcctcttggtccttttgagacaatttgagagcaccaggcactgcacgagggaacctagcaccgtgtcccctgctctccggcctaagtaagcatcagtgggctaaaagagccccattaacaactccctcctagagggtaggtccagtcnccaagttaggaacaacttctacaactcttaaaatgtaaaaaacaagtgttgggctgtattctttanaaaatcaactaaaatctaattcc

SEQ ID NO: 128825 - DNA, 685 bp, Homo Sapiens
  misc_feature (594)..(629): n is a, c, g, or t
agagatttttaaatagaaattttattgaaagaattttgatacagttcatgattctttttaaatacatatgaagtttaacaaaatatatacatgaatgtgttcaagtagaaaatgtgaaatatacattatagatttgttgtattgcacttgggcaaatcataattgctcacttcagcatattcaaaccgaatcacaacatagtctttgaaagttgacattataacttagccttgtactcaaacattttaagaaatgttttgatgccttaatcttcaccaaaggaatcaaacccaaatactaacttggccatatgtttaaataccactaaaggcagggaggtaaagtgttgtagggtgcttaaaatatactaagaagggatttggcaattttccattcacagtatttccaatataaaagactcatcctatttatcaaactcacaaaagttgggggaaaatatcacttgggaaaaaatttcactgaattgctatcaaaggaagcaatgaagttacttgacaaactattgacaggatgtctagttcaaaatagaatcttcattgaggctaactgtagcacagtatgtgatacataaannnnnnnnnnnnnnnnnnnnnnnnnnnnnnnnnnnnttccccgctagtataaagtagaagttctatagtggaaataacaatgaaaacagatg

SEQ ID NO: 128826 - DNA, 1272 bp, Homo Sapiens
  misc_feature (1151)..(1185): n is a, c, g, or t
ttttgacagttgcagacaaaaagtggtttatttagcacccactatgtaccaggcacttgggaggtattttctcacactttcgctttccatcctcacaatatcccttatgaggtagggactaccctcatttttacaggtgagggaactgaggcttagatgttgacagacccatccaaggtgacccagctggtaatggtagacttcatcctgctacacagtatttaaggggcctaaaccataaacaatttttaaaaatttgggaaagtcacacataaaggagatgtttcaataccttctctctccaggtatgaacagtattgagcaagacccacagggcagcaataatcatttatcctgatgaaaggttcctctgtgaaaggtaagggggttgggggagacctaaagccttctgcagacccacatttaaatgagctgacagtcccagcaggactacagaggaaccagctaggggaagctgccaggatcttagacgtgaaattaaaaggagatcatgcttcttacccaggaagtggggaattcagttgacccttgaaaaaactgaataaattaacatggggaaaggctaattaccatgcccagtgctggggtggagaaacagagtggccaaggttgtagcagcttgggcacctgctgaggccccattcagcgggagagcaccagttgggagtgtggacatgtatggccctacagctctaagcaggagctggtaagggacttcccaaatgcaaacctttggtgaatattctagcagtgagaggaggtgagcaccagaccactggacaagagaggtcagagtcatacatagcaatctggacaggaaatggcatgaggagctgtgagtaatctgggggctatggctagaaaaacagggcacgagctggggctgagaagaggtgagcatccatcaagctgaaaggtgggactcaagccccctcagcactgtgaccccgttcctgtacaccaagctctacgttggtgaatgaggtcacctggaccaagaggaagagaaaggcccagatgctttctcactgtctctgctatagcctaaaaacctgaacttttctatagttcccttcttgcccggccgtaatggccgaattcccgggcatatgtccggtaccgtcgactgnnnnnnnnnnnnnnnnnnnnnnnnnnnnnnnnnnncggccgcgtcctcgctcactagctcgtgcgtcgtcgtcgctatataagcgactgggggccactattaggttctactgtttggtgggt

SEQ ID NO: 128827 - DNA, 1344 bp, Homo Sapiens
gttttttttacattagattttaatctttaatatctaacattattgctttaggaaagtatttccctgaaccaagaatacaatgctaattgcataaaaacatacacatataaaaagtagttctccattttcccaggaaaaaatccaagtataacttctagaatagtcaagtttcttatttttattataattaaagtcttggtcatttcatttattagctctgcaacttacatatttaaattaaagaaacgttattagacaactgttacaatttataaatgtaaggtgccattattgagtaaatatattcctccaagagtggatgtgtcccttctcccaccaactaatgaagcagcaacattagtttaattttattagtagatgatacactgctgcaaacgctaattctcttctccatccccatgttgattttgtgtatatgtgtgagttggttagaatgcatcaacaatctaacaatcaacagcaagatgagctaggcttgggctttcggtgaagattgactgtgtctgtctgaatcaaatgatctgacctatcctcggtagcaagaactcttcgaaccgcttcctcaaaggctgctgccacatttgtggcatcttttgcacttgtttcaaaataaggatagtcgccgttgtccctgcaccaagcttgggcttcttctgtagacacctgccgttcgcttatgtcaatcttgttacccagaatcacaaaaggaaagctctcaggctctttcacatctgcataatatatgaattctttcttccagttacttaagttctggaagctttgtgaatcatcgacactaaaagtaagcaggcagcagtcagaacctctgtaaaatggtgtcctcaggcttcggaatcgctcctgacctgccgtgtcccaaatctgcatggtaacaaaatgtccatccacttccaaatctttatttaaaaattccacacctattgtatggaagagctgggtatcaaacttattagttacatatctgttcataagtgaactcttcccaactccaccatctccaaggagaattactttaaaaagtgatgattttcctgccattgttaatctcaaaagcttcaagaaccctcctagggttgttgagaagatgcactcaaacgacacgggaaaagtgtttcatcacagtgccaggctcattacaggagtgcaagagtgtctcgcggccacacgaaagacgacccgggagctctgggccggcccgtctgggcgcaatgaggacagagagagggtcggggacctgcacaacaggaggcagccgcggtagcgcagccaggcttcccgctccagctgctcccgtccagcgcg

SEQ ID NO: 128828 - DNA, 897 bp, Homo Sapiens
  misc_feature (42)..(60): n is a, c, g, or t
ccctcaactaaagggaataagcttgcggccgcctgctcaggnnnnnnnnnnnnnnnnnnnaagagcagctagtttttaatgaatcttagcccagaatacaaagcagggtgtagcagttgccttaatggtgatataattgtaaacaatagctttttcttcccctataaactcgagttataggaagcgtttcagagagaggataacacatttgaatctattttttaaaaatcatcctgaaagctagcagtattgttgtcgtttaaaaggttcctcatatactcttaccctcagccaacccaccatgtttatcaattcaaattctagaactttcttgacccaagagattttgtaggaaaaatttctcttttcagatattcagcacgcaaggatcatttttcttggttttgttgctgatcttgctgaactttccatcaatggctgagggaggaagcttgcatgattcttatgagttcttctgaggcactttgactgtgacagttttcacttcagtgtatgcctgcagcccgtactcgcccaactcccggccactccccgacatcttgtagccaccaaagggtgactgggctccaaacacatcatagcagttgacccacacagtgcccgcctggagggcctgggacaggtaattggccttgtccaaatcctttgtgaagacagctgcggccagcccgtacgtggaattgttggctctcccaacaacctcctctatggtcttgaacttcaggatctgcatcactggcccgaagatctcctccttggcgatggtcatgccatcctgcacatctccaaacacagtgggctggatgaagtaaccacggtcagcagcaatgcccccaccacagccgagatgtcgagaggagagatgggatcctctgg

SEQ ID NO: 128829 - DNA, 833 bp, Homo Sapiens
  misc_feature (763)..(763): n is a, c, g, or t
  misc_feature (787)..(788): n is a, c, g, or t
ttttaatcattatattcttttatttatagactctgagagcaaggacccaagcacagcctggtgctcttggatagagaagaaagcagctattgtccacactcagaggttgctgaggtgccctcccccactgatctggaatgatctacactgctagtgaagaggagggatggcaagctgactaaataagaaggcagggaaagaaagtccgctttagttctgagggctgtgacattagatgagagtggagccctgggcatgtcagccagccttctgtgtaacgcccgcccaggtcccattgtgtctgttctcttggtcctccactgttgcccacatcttcctccaggctgcttaagtgcccctcctggagtgcatgagtaggtcgcgttgcagcccagcctccaggctggaggtcagtctggctgtgggagggtcggtcagcagagtcaatttgttgaaaacacctctgccaaagtagtcagcaatcacagaaaagctgtcattggagcacttgagctgatgctggaattgatcatggagatctcgtttctgttcctgggcccggatcatatccatgaccttccggttttcagggaggcaggtggggcagtcagcatcactttccgagtaactctcaaagcagtgttggtggaaggagtggccacacaggaagtggactgagggcaactccaaggcactgttacagatgctgcacttggtcttttggaaaatcttaagactggccttgagctcttggatctcctgncggatacgggtggtctcctctcgnngtacggcgcaccgcagctcatcctgtgcaatctgctggctctgtt

SEQ ID NO: 128830 - DNA, 1376 bp, Homo Sapiens
  misc_feature (1138)..(1138): n is a, c, g, or t
  misc_feature (1200)..(1200): n is a, c, g, or t
  misc_feature (1287)..(1287): n is a, c, g, or t
agtttttaggttgttaagttggatggaatacaatttccaatagtgtctaggccgacacccctccaccctcctttgcctgtcattcaagtcaataccctggagaaaagaggctgtgggggaggccatgttcgattaggaggtttaagagtccatcaaagtgtcatatgtgttaggtgtgaaatggcgacactgggaattactgttaataaggggtggctgcagcacggtgattgttatgagaacatccccaccgccccacttttgtttgaagactttcgtactgaactacatgttgtttactttcaacaacgtatacactacagttgacaaaagttattctcggtgataagaatatgccctgttaatttatctccactgtgctgaacgggtaaaaaattggttttcttcaataacaaaaggcttaacattttatttaaaaaaattagaatatcattatttcattattgtaatgggacgaatcctccctcctttctgccctggttggagagaaaggagtgcagcccacttgccctcactaccttcagcctcctcagcagcttctggcgcctccacattcagaggtttcagcttccccgccattttccaacgcggggcctgcgcgcgagcctcgcttgatgactggttaaaaaagaaaccacgtgagggtgaaaggcttttcagcacgcatgcgtgcaacccgcggttacgccagcggttaaatcaggagtcagctctgggcaggcgcagaacacactgcggccctgattgccagcacacatgctacaaccttgaggctgtaactccacaaacaagggcagaactagggtaatggccagttggggagtgagggtagtgtgcacacacacaaaaccctagggaggtctctcctgctttaggctgcttgtcttgtgcaggttgtcaaagtctgggacagacgtgcatgtgctatgtggtggtacacaatagttcgagtctgttttcgtttacaaatcctcatcaaagagttcatgagagagggttacttatctctgtttcacagatgagtaaaacgaggcttagaggctaagtgcatctcctatgtaaaaatgctggatttcagccactgtgtgcagtcaggtgctgtgtcctgggttcacangtggacactgaaggcacttctcataatgttgcagcagcagcatgagggcggtcattctgganggtaagataaaaagtcagaagggcaagatatcttgtggtctactttagctttagtagtttttctttaatactcaggcatccagcaanctggctgagtgcatccagcacccttggcacctaacactggcaattgaaccaggctgaatcacagaggaaccacgacagttgagggcatc

SEQ ID NO: 128831 - DNA, 947 bp, Homo Sapiens
  misc_feature (783)..(844): n is a, c, g, or t
ggagaaagagaaaagaaaagcctgaaaaaacagtgagtatggaatagccttccataggagtgcacgtctctattagcaaatttgtctgaaggtgaaaccctggaaaataatttcatcttttgtctatgaagacactgggcgtgaaacggtactggacaccgatcctgcaatgcaggggaattttcctccgtgggattcagaaatgagaggatcaccaccaggacaacacctgaagatggtgttagctgaaggcagacattggggacctgaagtctgtctgcatcaagaccttgagtaattggccacagctgtacccaaagagttccttcgcacaatgacactatccagacctgagaaccgccaggtctaaatgagaatggctcctcagtaggaagacaattgaagtactgtattctgcttccttctccatgtctctaggcctttagctgaagctggagaagagaaatgaagggtctccccagcccaggaactctttgggtacagctgtggccaattactcaaggtcttgatgcagacagacttcaggtccccaatgtctgccttcagctaacaccatcttcaggtgttgtcctggtggtgatcctctcatttctgaatcccacggaggaaaattcccctgcattgcaggattggtgttcagtaccgtttcacgcccagtgtcttcatacacaaaacatgaaattattttccaggctttcaccttcagacaaatttgctaatagagacgtgcactcctatggaaggctattccatactcactgnnnnnnnnnnnnnnnnnnnnnnnnnnnnnnnnnnnnnnnnnnnnnnnnnnnnnnnnnnnnnnacttgcatatcgttctctggaaggaaccgggggtggtgcctaaaccatgttccatccctggtctgagcaggctcagccgcaccagttcattgggtctgtgcta

SEQ ID NO: 128832 - DNA, 724 bp, Homo Sapiens
gggaaacataaaatgagctaaatgtctcaagtcttttattcatataaataaagtttaagggaatgggggagattaacatttcctgttttatgtttgtgaaattgtttgacacaaccttgacagtatcctttaatggcatgaggttaattgtactgttaaccaactttctatgttctggaactagtattatagtgaaaacatttacagtaagttgatgtttacaacctataagcaggtgaaatctgtgtatgtgacctgtttataagttgtattagcttagctcttgtgaacagtgtggaaaagtaagccatgaggagagcgatttaaccacctttaaaggacctaagatgtgctttttaagcacagtgtggatcacagaaactcactaagacaggacttcagcagccttttgtgtttggacaagtcagcataaataaagaatgacaaggcagcagcaagagcttcaactacagagaagtgaaggcataagatactatgatgatagtgagcaactttccaaaagctagttaaatctgcttattacaactgaaatatcgaagaaagtctagcaggaaggagctcttcgccttttggaacatcaatgagagatagttgccacagtcactaggtctagcatttagacctgcaaggaagggcaataagcattaggtaaggcttgaatttgaattttttcactaattaaagagtaattttttgtaaagca

SEQ ID NO: 128833 - DNA, 998 bp, Homo Sapiens
  misc_feature (692)..(692): n is a, c, g, or t
  misc_feature (727)..(727): n is a, c, g, or t
  misc_feature (782)..(782): n is a, c, g, or t
  misc_feature (815)..(815): n is a, c, g, or t
  misc_feature (830)..(830): n is a, c, g, or t
  misc_feature (881)..(881): n is a, c, g, or t
ttttttacagctggagaagttacttttattcttgcagttttatactaggaagtcaacatttaataagccatcatccacaattgattaaaaatgtttaatccttaaattgtgcatcaatatcctatgactccaaattttatttatcactctccttcaagtctgaagaaaatgattaatttgctaagttccacagacagtacagtcccactgacataacatttagtatgatgtcctactctcatattagaattaaggacagccagtatcaaactggcctgaaacctgattgtgttcctggttcagaatacctgtagtaaatctgtaaatccacaccaagacacaacattaaactagggtgtgtatatcttataaaaaccttttcacagtaaaaatcaacattaaaattttaccaaattccaacattatggtttttgaatccaattaagctttcaaaatgcctgattagctgtgaattaattataaataacttcatgtagtttgcccagcatttcaaaatggttatggactatcatgtttaaaatgtcaaagtatgctatacatattgcacttttctgctaggctggggctagtatcttccattggcaagatcctcaaactactggataaaatacacttttaaatcaatataggtccttgattaatttccctgaaattatcaacatcattaccanaatcttccaggattttgtaagatttgattccttanatacagttttaaagttaaacttatggagggaaaaaaccctcatagattgactgtnaattttacgtccttttttggtcctcaagaccanagagaattttaacanatatgcttatgtttcctggcttataaaaagctacattttattatcaattangaatatatactatcaaagctataatttgaaatgtctagtatgtctgtcgtagtccttagaccttcaacattaaatcagagatttatcagtattctaaatctataatgagactagttg

SEQ ID NO: 128834 - DNA, 959 bp, Homo Sapiens
  misc_feature (218)..(218): n is a, c, g, or t
  misc_feature (220)..(292): n is a, c, g, or t
cgcgggtctggggaggagccccaacaacctttccgcgggcggtataatcagccacaagttccattgacgccttggccaccattattagttgcctcttggccccgggttcacttttttccgttttttgttgggatttggcggaaccattccccccgaaacctttcccgtttggatataatcgccccccttggaaattgcctgaggccaacaaaccggtntnnnnnnnnnnnnnnnnnnnnnnnnnnnnnnnnnnnnnnnnnnnnnnnnnnnnnnnnnnnnnnnnnnnnnnnnnattgatcaaagagagaatttattcacagagattttcaaatacaaacaaaatagcacttttaaattttttacaaaatgaatatagaaataaatgtggtacagcacagtacaataatggacaaaagaaaacacgatccaatgactggaaaatgtctctcattactctcatatcttcggctgaattctctcctatagtggacagaaagttgccccttttcttcataagaatatcatagcagaagctactcagagaaatattgcatattgtggaataacatggaaatacaaaggcttaactctaaaggtctgcataaacactgaaaataagttgaggaactaaattagagtttatgcaggatatacaaaatactgatagtttggcttattggtccatttattaggcttaatgtatgttttataaagtgataatactgtattttaaatgtatattaaaaagaaaacagaggagaaatgcaccactaaacctcccagtctgtgcgataatccacgtttgtgcataggcgtgtgtggggatgcatatgtctgtatgtgcttgtgtgcttttgggagtgccgtgacctacagggaacatctttgggggtaccctgcttcccaacataacactgtttctactagccctttgattttctgagtcctcaccttaaaaa

SEQ ID NO: 128835 - DNA, 2446 bp, Homo Sapiens
  misc_feature (266)..(266): n is a, c, g, or t
  misc_feature (543)..(543): n is a, c, g, or t
  misc_feature (599)..(599): n is a, c, g, or t
  misc_feature (612)..(638): n is a, c, g, or t
  misc_feature (1572)..(1607): n is a, c, g, or t
ctaaccctcaatggtgcggggcaacataaatattttttaattttccccccgacaaagggggcgcgagacacacaagagggggttggactgtgagatattccccccgctcttggggcccgggattatctcaaggggggtgattcatttcacatatggcgccgggttttttggtgtgaaatggggggcttttcccccaattgttgccgggcccaagagaaattggcctttcaaaatggagaatttacccacacccaggtttctctgcncgaaatggagatgggccaaggggccggggggggcgtaaaattttggattatacggaggcttccgcctttggaccttccctggtttggataaggattcccaggtaaatggaacctccaggaaactcccattctgggaatttggttccaggaaccgcctcggtgtggccccccggggcggtttttttatttggtggaggaattccaaagccactaggtcatggaccacggatctccctagggaaaccagcctatggacccatgttcaccttaccctacntgggccccgcgcgcccaaacgaaatggtttagaaagcttcctcgaggggccgaggncggcccgacatgnnnnnnnnnnnnnnnnnnnnnnnnnnntttgacaggtgcaaaacagaggctttaatctgaacagcaatgagggtgcaaggggctgggagcccatagggggatgggggagccaggaaggggtgtctggccctgggagagaggtggacgctgggcctcttctgagaaactgtcactgacctttgggactcctgacccagcctctgcccagaccatcaccggatcccaggctgagcccctgtgctgtgcttctcagtgctcccccttcctgaagggtgtgtggacccagacacaggagggggcagtggagaagggcaggcctgggggacgagcctgtaagagccaggcccaggaacagccctaggagaaacctcggcggtggccctcaatgggcctgcccagcccccactgggcccattctgagtgccaaagcctgggcttgggaggctgtcacttacctcaccctataaaagcaatggacagttcagggaggtgggaggacaaggtgtgggactgccaccttctgggcccacccatcacccaggggagcagagaagcagggcccaggggcccagggtgaggctcacagcagcgcaaaggtagcagaagtggctgggcctaagactgccaagaggaatccaggctctccagatacaatgggccccaagcccctccctgagtttctgccatcccctccctgccagggaaagttctggaaagacatgcctcaccccatcatctgggccctcccaggagcccagcacctacccaaagggcagcttccattggctaggttacccttagggagcgggagagatgtggctacagtcaggaaacccagcaaagccaagggctagagaactgaagagccagggggaggcttggacacagggggcctcaggcccagggggcagggtgaaaaggagcctgggaggggcaccagccaggacagctaaggcctctnnnnnnnnnnnnnnnnnnnnnnnnnnnnnnnnnnnnagctggcggccagcctcagcttccagccctagcatagatggccaccccggcatggcctgggaaactgacccgcccctgcaaggagcagctccaacccttagaaaggcatcgactccaggaagggaaaagcaatggaagcagcaggtatctctcctcccttccctgaggtgctgcagaacagcccctgctctcaaaaccagactggacgggagtgaagggagaagaggccagaaacaggagagagtggccgagtgaccaggccccagaccctctcttctggccagtctagcacacgggaactcagaaaactggctacactttggtcacttctcccaacttgggccctgaagccttatgctctgagccccctcaagcccatctcgccaccccaccccagtaaacagcctctcatcaaacgggacgaacagagggaggggatggggaggggccactgctggggtggggaaggcaggcacaggaactgtggcctgggtggctcttcggcttggcccctcctagcccgacgtgacaggatggatgggcagcaggctcccgaacttgaagtgctggatcacagggaacttctccaggcactcggccttatacatgcggatgagaccctggttcactttggaccaggaagggacggcgctgatgttccacagctggttggagtgctctgcaaatgggccagtcttcatagacgctgcgttcctgcctctccactccccagagaatcggccttttgtaaatggctcctctgtcagtaactggggggatgggcgggggtggggaggctctgcacagcgccttcctgtcagctccttcccatcccggga

SEQ ID NO: 128836 - DNA, 1322 bp, Homo Sapiens
  misc_feature (476)..(489): n is a, c, g, or t
  misc_feature (719)..(719): n is a, c, g, or t
  misc_feature (725)..(761): n is a, c, g, or t
gtgtgtactctcctcatcctcctcctgtcgttttctcgccacgggttggagtagcgcagcgttgtgccgggttcgcccctgtgttgctgtgggcccgtctcccgagcgcagctctttttcggacacgggccaatcgccgaccgtcttgggccgtacggtgcccgcacgctgttgttgagcacagaccgccactcgtgccttgttggaccccggtggggcccaccaataggtcctaatcagcgactcgtttggcgccctctttatttatcctgcctagttcgcgcaaccagcaaaagtagacatacaggtgttttaggtgtttctcggtttacgtcccactcctgtgttccgggttcgctccgtcgacttccgggcgcagggccgggtcgggttagtacaagccggttgtgcgggagattgtatatgggttatttccccttgggtcccccacggtttgcacttggtgcaacgccctnnnnnnnnnnnnnnacatgtcggttcacgggtgtgccgtccaaggtcccccgcgaatgcccagtttccattgggtggtgcttcccccttgttgggggagagatcgttgctgcccccccgtttttcccccagtccaccggctaggggtctgaagagccagggggagggttgttctcagggtgcctcaggcccaggcggcagggtgaaaaggagcttgcgaggggcaccagccaggtcaggtaagncctctnnnnnnnnnnnnnnnnnnnnnnnnnnnnnnnnnnnnngctggcggccagcctcagcttccagccctagcatagatggccaccccggcatggcctgggaaactgacccgcccctgcaaggagcagctccaacccttagaaaggcatcgactccaggaagggaaaagcaatggaagcagcaggtatctctcctcccttccctgaggtgctgcagaacagcccctgctctcaaaaccagactggacgggagtgaagggagaagaggccagaaacaggagagagtggccgagtgaccaggccccagaccctctcttctggccagtctagcacacgggaactcagaaaactggctacactttggtcacttctcccaacttgggccctgaagccttatgctctgagccccctcaagcccatctcgccaccccaccccagtaaacagcctctcatcaaacgggacgaacagagggaggggatggggaggggccactgctggggtggggaaggcaggcacaggaactgtggcctgggtggctcttcggcttggcccctcctagcccgacgtgacctcgtgccgaattcgccacccaggcctcgctc

SEQ ID NO: 128837 - DNA, 716 bp, Homo Sapiens
  misc_feature (32)..(32): n is a, c, g, or t
caccttctccacaggtccgggttttcactttngggtctaggctcttgggcatggtgttcaacagtagaccctaggaggagtgtgcccaggagccggggtggctgcagcaagggcccatcttgccacgtggccgctggttgcagcacacgttgtgttggttctccagagcgcccaccctcttccacctcggagcagtgagcagcattttgcagtccctagttgatgaagactggcccatttgcagagcactccaaccagctgtggaacatcagcgccgtcccttcctggtccaaagttgacccaaggttctcatccgcatgtataaggccgagtgcctggagaagttccctgtgatccagcacttcaagttcgggagcctgctgcccatccatcctgtcacgtcgggctaggaggggccaagccgaagagccacccaggccacagttcctgtgcctgccttccccatcccagcagtggcccctccccatcccctccctctgttcgtcccgtttgatgagaggctgtttactggggtggggtggcgagatgggcttgagggggctcagagcataaggcttcagggcccaagttgggagaagtgaccaaagtgtagccagttttctgagttcccgtgtgctagactggccagaagagagggtctggggcctgtcactcggcactctctcctgtttctggcctcttctcccttcactccg

SEQ ID NO: 128838 - DNA, 1007 bp, Homo Sapiens
gaattccttcccatttcctcagatagctcacctgatccctctgcacgtgctgagccctcttcaaacaccctttcctggaccctctaggttgcttatggaaccacagagaacagtcccgtgacattcgcgcacttccctgaggacactgtggagcagaaggcagaaagcgtgggcagaattatgcctcacacggaggcgcggatcatgaacatggaggcagggacgctggcaaagctgaacacgcccggggagctgtgcatccgagggtactgcgtcatgctgggctactggggtgagcctcagaagacagaggaagcagtggatcaggacaagtggtattggacaggagatgtcgccacaatgaatgagcagggcttctgcaagatcgtgggccgctctaaggatatgatcatccggggtggtgagaacatctaccccgcagagctcgaggacttctttcacacacacccgaaggtgcaggaagtgcaggtggtgggagtgaaggacgatcggatgggggaagagatttgtgcctgcattcggctgaaggacggggaggagaccacggtggaggagataaaagctttctgcaaagggaagatctctcacttcaagattccgaagtacatcgtgtttgtcacaaactaccccctcaccatttcaggaaagatccagaaattcaaacttcgagagcagatggaacgacatctaaatctgtgaataaagcagcaggcctgtcctggccggttggcttgactctctcctgtcagaatgcaacctggctttatgcacctagatgtccccagcacccagttctgagccaggcacatcaaatgtcaaggaattgactgaacgaactaagagctcctggatgggtccgggaactcgcctgggcacaaggtgccaaaaggcaggcagcctgcccaggccctccctcctgtccatcccccacattcccctgtctgtccttgtgatttggcataaagagcttctgttttctttggctt

SEQ ID NO: 128839 - DNA, 601 bp, Homo Sapiens
ctgtggcccccaggaccaagaaacacacatgaacacggtgatgtctgatatttttctttggccctggaaggtgctgggaatgaaggacgatcggatgggggaagagatttgtgcctgcattcggctgaaggacggggaggagaccacggtggaggagataaaagctttctgcaaagggaaggtgggagcctccgctcaacctagctgatgctgctctgttctttgctcacccactcctctgccaaccagcccagggtggggattgctctgcccttgacgaagctggactcctggccaggccagcccctggtcccctacccaatacccctgtgagcttgcgcagcctcacgccttacctccctccctctggtctgcagatctctcacttcaagattccgaagtacatcgtgtttgtcacaaactaccccctcaccatttcaggaaagatccagaaattcaaacttcgagagcagatggaacgacatctaaatctgtgaataaagcagcaggcctgtcctggccggttggcttgactctctcctgtcagaatgcaacctggctttatgcacctagataccccagcgcccggttctgggcacaa

SEQ ID NO: 128840 - DNA, 1945 bp, Homo Sapiens
  misc_feature (30)..(30): n is a, c, g, or t
  misc_feature (62)..(62): n is a, c, g, or t
  misc_feature (75)..(75): n is a, c, g, or t
  misc_feature (83)..(168): n is a, c, g, or t
  misc_feature (173)..(575): n is a, c, g, or t
  misc_feature (1029)..(1039): n is a, c, g, or t
  misc_feature (1490)..(1510): n is a, c, g, or t
ggcgtatcgtacggcagtcgacagagacanggagactccaggggacgcttgatcttatatcnttccgttcgcacntctgactnnnnnnnnnnnnnnnnnnnnnnnnnnnnnnnnnnnnnnnnnnnnnnnnnnnnnnnnnnnnnnnnnnnnnnnnnnnnnnnnnnnnnncctannnnnnnnnnnnnnnnnnnnnnnnnnnnnnnnnnnnnnnnnnnnnnnnnnnnnnnnnnnnnnnnnnnnnnnnnnnnnnnnnnnnnnnnnnnnnnnnnnnnnnnnnnnnnnnnnnnnnnnnnnnnnnnnnnnnnnnnnnnnnnnnnnnnnnnnnnnnnnnnnnnnnnnnnnnnnnnnnnnnnnnnnnnnnnnnnnnnnnnnnnnnnnnnnnnnnnnnnnnnnnnnnnnnnnnnnnnnnnnnnnnnnnnnnnnnnnnnnnnnnnnnnnnnnnnnnnnnnnnnnnnnnnnnnnnnnnnnnnnnnnnnnnnnnnnnnnnnnnnnnnnnnnnnnnnnnnnnnnnnnnnnnnnnnnnnnnnnnnnnnnnnnnnnnnnnnnnnnnnnnnnnnnnnnnnnnnnnnnnnnnnaagaattcggcacgagggaaaagacgatttcagccccaagatgctcaaacgttcaaattatcccagaattcactgcagtcctagttataaccatgcttcatgaagtaaaggtgaacactcttggaatgagtggaaaaccagaagtacccagcagagaaataaaaaggaacctaatggaaattttaaaacttaattacagtatttgaaataaattcactgggtgagttcagtagcagaattaagacgacagaggaaaaaaaatcagtgaacttgaagacggagcaccagaaatagccaaatctgaaggacagacagaaaaaagaatgaagaaaggtgaacagagcctcagggaccagtgggaaaacatcaagaggtctaacgtctgagtcactggagtcacagaaggagaggagaaagatcagtgcaagaaaagaaaactgaagaaataatggcnnnnnnnnnnngtcctcaaatttggtgaaagacaaaaactgcccatctaggctgtggcaggcctactagggaatggacaaaaagttccggcacgttccactggctgagggagcatgggacacggacagctcagctgcacgtccgtaaaccgtcccttccacggccaccctgggcatggggaggggcgggggtgtttgtggagaaaaaccagcaccgcagaagtacaaattcaaaaatcttaatttattgtagactcttctcatttgtaattccagtgttttgaacattaataaatacacgttctgttaaaaacctccagtgtctaatctctcccataaagtcttaagtaataaaaataggtttacatttttcccatctcaataaaactgacagttgttttttggtaacagttctgatcaaattaaaaattacacctcgtgatgttggctgtggagtacgtgnnnnnnnnnnnnnnnnnnnnnttacacctcagggggcagaatcctgttaaagtcatgaaaggagactgttcgaagacttaaaaaccttttcgtacttaggaaacgccaggggcaaacgtttaaagggactagagttttttatcttcgaaagaccactcacctggtaaggcacatgtataattcattcaggtgtgaggactctgggatctcatttcatcctcctgtcctggaccattttcagatacgcttttcctctcccataggcatctgctaacagtgctcacattttcatcagggtcaagtttaaaacagtgtggacatctttgcattttacttgattttcatcctattttatggtttctcctatttggaagcagctgtgctgatcacttatttgggcacctgatttgaagaacaaagaaacgctaaatcaaacatgtctgacagttccgggac

SEQ ID NO: 128841 - DNA, 738 bp, Homo Sapiens
  misc_feature (54)..(91): n is a, c, g, or t
tatattaaagtaattacaaattaagaatttatttataagttttcatctttttannnnnnnnnnnnnnnnnnnnnnnnnnnnnnnnnnnnnntggttaagtagttttgttatatcctaattgcttaggtgtgctctgtaaattccaaataagtaaaataatataaaaatacattttcatatctttatagaacaaaaacaaaacattaaatgcttttggattttctttactcctcccacagatgagttcacaaatacaaaaactggtgtacatttatactcaagtacaaatctccaacagccaagtaattatagtttcttctgttatgtgcaaagtagattatttcatatttacttggtatggaaagcagagtacaggctcaatggacaataatcattaaacacagattatgtttaagaaaatgctgttgtaaaaatgtacaatagtacatacaattttggtaattatgcacttcttttaaagtaaatacagcttttagatataaatctttcaaaggttttctttgaagagctgtgaggtgactatttcagatttgataaacagtaatttgtcagtaaacttctcaaaaaaccaagccaagaaagaattgttttctttttccctccatgtggtcggtttcattcttaaggaaggtctgatgcagtaagaagatgcatttcacaaacctttacacaagtttgtgaactgtcaactaaagacacacctctgatgtggatggt

SEQ ID NO: 128842 - DNA, 714 bp, Homo Sapiens
  misc_feature (701)..(701): n is a, c, g, or t
gaagggacaccgatttattgagtagcagagctgagggaaggcgtaggatggctccagcttccggtcagtggctacatggtcagttccatgatggcgttgacgatgtcactgtggttgtctctcaaagcccgcacggccttggccctggacacattggcctgcgccatcaccagctcaatgtcacgcagttccagccccgcctcgtccacccggggcctgggtgctgactcagggaccaaggctgagggctttgagggcaccttaaacttctcagctgcggttttgtgcacttgctgggacaggtcctcaatcttggcctcgccaaagaccacataagtgtctgaggctgggctcttgaagacatcaggcttggcgatgacaaagaggatgttcttggacttctggatggtgatcctggtgactccctgaatctgccgcaagcccagctttgacattgcctttcgggccttcttctcactgcgactctgcttggctttggcgatggtctcctcactgccgcctgctggggcctgggctggacactgcacggtctgaggagccaagatgtcctgctcgtccagctcggctgatgactccccgtggctatccgaatgctggcccgagcccagggcccgaggcgagtcttcctccaggctgtcctcatcctcttgctgctcgggggctgagagccttgagggcanctgggctctgggg

SEQ ID NO: 128843 - DNA, 343 bp, Homo Sapiens
tataaaaatgtgttttattgttttaaaacaagtctataaaagtagaaatcacatacaaaaatacagattactctgacatgttggcaaaatagcttatggctggacttgagtttggaagttctgtatgtttgagggcatccgatgtcagagtccaaccggatcctaaccccagctcttgtcactaatctgtaaacaataatttcaagtagtatttagcactttttaactattaagaaattgaagcatcatcatttcctgtgcaacccaactttaaaatcttccttaggtctaagcagataaaggcacttcatagtatgtttctaacattaacaatttttgattt

SEQ ID NO: 128844 - DNA, 1641 bp, Homo Sapiens
  misc_feature (1432)..(1483): n is a, c, g, or t
ggttgaagaactgattgcagcccaagcagacgtgggggccagagataaatgggggaaaactgcgctgcactgggctgctgccgtgaacaacgcccgagccgcccgctcgcttctccaggccggagccgataaagatgcccaggacaacagggttagatgggacagagggcttcccacaaaacattcaggcgcacgagagatggaaattgcggtaacccgcaaagcctgaagggataggggccagtggtcgcgcaattgaaggcagaaaggcccagtcctgtgggcgtggccttccctgatatcggccctggctcttctgtacaggagcagacgccgctattcctggcggggcgggaaggagcggtggaagtagcccagctactgctggggctgggggcagcccgagagctgcgggaccaggctgggctagcgccggcggacgtcgctcaccaacgtaaccactgggatctgctgacgctgctggaaggggctgggccaccagaggcccgtcacaaagccacgccgggccgcgaggctgggcccttcccgcgcgcacggacggtgtcagtaagcgttgcccccgcatgggggcggggctctgccgcgctgccggacgctgtcagcccggagcaggccctcgtggggggcggagcttgtctgcaggctcggacttggtccgtagacttggcttgcgcgggggggcggggcctattctcattgccggagcctctcgggagtaggagcaggaggaggcccgagccctcgcgggcgtaggttttactgcaggcatgtgcgggcctcgggccaaccctgcgatacttgcgaggaagatacggagttggctgccgggcgcggaggcagggtcttcaacggatgacttggccttgtgattggggtgggcctgggagcttgcggttctgcctccaacattccgatcccgcctccttgccttactccgtccccggagcggggatcacctcaacttgactgtggtcccccagccctccaagaaatgcccataaaccaaggaggagagggtaaaaaatagaagaatacatggtagggaggaattccaaaaatgattacccattaaaaggcaggctggaaggccttcctggttttaagatggatcccccaaaatgaagggttgtgagtttagtttctctcctaaaatgaatgtatgcccaccagagcagacatcttccacgtggagaagctgcagctctggaaagagggtttaagatgctaggatgaggcaggcccagtcctcctccagaaaataagacaggccacaggagggcagagtggagtggaaatacccctaagttggaaccaagaattgcaggcatatgggatgtaagatgttctttcctatatatggtttccaaagggtgcccctatgatccattgtccccactgcccacaaatggcnnnnnnnnnnnnnnnnnnnnnnnnnnnnnnnnnnnnnnnnnnnnnnnnnnnnaaaagtggccaagggccacccccgctgatgactccttgcattccctcccctcacaacaaagaactccactgtggggatgaagcgcttcttctagccactgctatcgctatttaagaaccctaaatctgtcacccataataaagctgatttgaagtgtt

SEQ ID NO: 128845 - DNA, 425 bp, Homo Sapiens
  misc_feature (174)..(174): n is a, c, g, or t
aaacacttcaaatcagctttattatgggtgacagatttagggttcttaaatagcgatagcagtggctagaagaagcgcttcatccccacagtggagttctttgttgtgaggggagggaatgcaaggagtcatcagcgggggtggcccttggccacttttcagcacctacacaangcctggcacatagtaggtgcccaataaatatttgtcagccatttgtgggcagtggggacaatggatcataggggcaccctttggaaaccatatataggaaagaacatcttacatcccatatgcctgcaattcttggttccaacttaggggtatttccactccactctgccctcctgtggcctgtcttattttctggaggaggactgggcctgcctcatcctagcatcttaaaccctctttccagagctgca

SEQ ID NO: 128846 - DNA, 618 bp, Homo Sapiens
  misc_feature (268)..(281): n is a, c, g, or t
ttttctttttcaaatgcgatttattgtacataaaataaattaattacagtttaagccaaagcatgagtggctttttaaagtgcatctgtggaggggatgtggcaggtagcccctgttcacttgctgtaagataagtgttttagtatttcagccacccttaggcacaactcagccaggcctaggaagcaacccaacgtcattgccatgaaccatttacacaagtcacaccaaaatcaactgacacatttttttcctgatggaacagttnnnnnnnnnnnnnnctatacagtcaaagtctggggttgaagagcgtgaagttcacagctcctccacacacgcccaactgagcatgctcatcctgtgagggggaaccagagccttcctgtaaaccatgagagcttaccaatgtctggtatacaaaatattctggcccataaactcaacctgtttttgaggggtaggggattttccatcttgtacataaagaaagaaatctgggtatccttcaggttagaaaggcattctgtaagaatagtgttccagagttacaaatcatactggtaagagaaaagcaattcttcctcttggggaaaaagaggaaaagaaagaagaaaagag

SEQ ID NO: 128847 - DNA, 2973 bp, Homo Sapiens
  misc_feature (16)..(16): n is a, c, g, or t
  misc_feature (2797)..(2876): n is a, c, g, or t
aagctcactggagctncagggggctgacctgctgcatttacaccactgctaggaagcaggatttgaactccagctaccacggtctgtccctggagttcctgcgttgacctcagatgatgtaaagcttgtgtaagatgctgcgggaattccagatcgtttcagtgactatggccccagaacacagacagaggtcccctccccaccatggcaggatctgagtgcaacaggaggctcccacccactcccagggccccacaggcacagccacagccacttctgaccctttattggggcactgtcggccccaaataaatataatacattaaacccagagctgagggaatcgtgcaccccaggaggcgccccccacaacctcagccgggcaaaataagttagtggggggcctgccagaggccgggccagctccctggtctaaagtgcatctcggttccgtggtccccacgtctgcacagcccctggttgggccgtcgggaggggcgggtgggagatgcctggcgctcacaccgtgccagcagtggccgccgaggctctgtgtgtccatctgtccatgtgggggaacagctgcgtggccggggtcctcaggaaaagctgtcatcgggccggggctgggtgtcaaagggagggtctgagactgtgatgccttggtgcagcttctccagcgagaacttcatctcatccaggagctccacggaggcccgcaggatctgcctccacttgtgcacctccacgctgtggaattgcttctgcagcgccaggatctcggcccactctgtggccgtctgggggaacttgcccttggccagggccaggctgtgccaggactcaaaggtgtgggctgtcctttccagggaccagaggcggtagaagagcaggacgttgagggcgatgaggatgataaggaccaatgctgatgagaaccagggcactggggatgcctgccccggggccctggtccacagatggttcggagaagcgggagctgagggagcccgaggtgtgaatgccggcccgggcacaggggtcaggatctgggtgctggggcccgtccccgtgagcccgccagctcaggggccgcttccgccgccgcaggccggatagcaagccccgggcatccttcccgccttcctccagagacagcttctcagccttggcgagctctcgctccagatggtggaaatagtcttcaatgccgctccacgagttcttctcaatgagcgacttcaccaggctccacggctgctttcggtagcggatctcagaagacactcggagccgcgccttgttccgggccagacccaggatgcagtagacggtgggcagtgtagaagtagtcctggtaggggatgccctgcgtcagcacctcggagtccaccacacacccgccggcctgggggccgcgccggaacagcgtctgtgtctccaccacggaggcgctcttggggcccagtgggttgctgatggggatgggtgatacgtcagcacccggcgctggtggcacttgctgtccccactccaggggctcagcgtcacgtctgtgaacttgcactgctgtaggaagccctggaggaagggcgagtccgagaagagcatctgctggagccgctcagcgcccacatggaagacagagttgatgaggaggcggccggagaggtcgggaagcagggcagccaagtcttcctccccagtggatgaagaggagttacttgtgtctgtcaatagctcctcactgggcagcagatccaaggggcccagggtggtgggcccgtcaggctgggtgggctctgtgctcgggggttcagccaccggggtcactgtctggctggaggaggcgtctggctggctgttttccctgctcctcccttgtcctcctttgcccccatgttctgcttcgctgctggttcgggaaaggttgggcgtgacatggcccggggcgcgaacccccttgggcttggctccgggctgcggtcagctgcccccggaggagggtgatgtcgctcaggggcgatcacatctcccacttccttgggggtccccagaccgttcagctgcaagggggagacatagtcctcatcctcactggtgaggcccagctctgagccgtagcactgatgcaccaggtgccagagctcgcggggactcagcgtcttttcaagcagtgcattctgccagaggcggaagatgaggaggaagcagcggtcacgggccccaaaggaagtgaagaaatgcttctcgctctccgtgcagatctggatggcgttggggatcagcttggccgtcttttccttcttcagacatgtcacttccttcagctggatggagatcgtggtctcccagcggaagatgttgctgtagaagcagatccagttctcagagaggtagaggcggccctggagcaggatctcacgctgcagggcgcaggagtaatccacaatgaggcgttctgcttcggggagtttgctgaacagtttccggaagtcctcattacgctgcttataagtggggctcagcatactgtaccagctctgcatcttcttgctgttgcggatgaagttccggctgcctaggctctgggtgctgggggtcccaggcaccccacccttctctgaggagctatctgatcccttctccaccatggtgcctggttctggctcaggtgggggccggcttgggggcaggagctgcagccgtttccggagcgatggggagctgcttggcgtgctccggccagagtggggtgtggtgtcgaacatggatgcggcgcggtgggcgcgccccnnnnnnnnnnnnnnnnnnnnnnnnnnnnnnnnnnnnnnnnnnnnnnnnnnnnnnnnnnnnnnnnnnnnnnnnnnnnnnnnccggcctggccttccgcggccgccgcccccacccgacccaacagcccgcacaaaaggccgcctcgtgcggaattcgccacccaggcctcgcgtcctt

SEQ ID NO: 128848 - DNA, 1786 bp, Homo Sapiens
  misc_feature (110)..(110): n is a, c, g, or t
  misc_feature (195)..(195): n is a, c, g, or t
  misc_feature (252)..(252): n is a, c, g, or t
  misc_feature (254)..(258): n is a, c, g, or t
  misc_feature (302)..(339): n is a, c, g, or t
  misc_feature (353)..(362): n is a, c, g, or t
  misc_feature (366)..(374): n is a, c, g, or t
  misc_feature (376)..(376): n is a, c, g, or t
  misc_feature (381)..(381): n is a, c, g, or t
  misc_feature (386)..(386): n is a, c, g, or t
  misc_feature (439)..(447): n is a, c, g, or t
  misc_feature (468)..(468): n is a, c, g, or t
  misc_feature (478)..(495): n is a, c, g, or t
  misc_feature (533)..(571): n is a, c, g, or t
  misc_feature (610)..(610): n is a, c, g, or t
  misc_feature (670)..(670): n is a, c, g, or t
  misc_feature (750)..(750): n is a, c, g, or t
  misc_feature (784)..(784): n is a, c, g, or t
  misc_feature (787)..(787): n is a, c, g, or t
  misc_feature (800)..(800): n is a, c, g, or t
  misc_feature (1502)..(1503): n is a, c, g, or t
  misc_feature (1526)..(1526): n is a, c, g, or t
  misc_feature (1580)..(1580): n is a, c, g, or t
  misc_feature (1590)..(1591): n is a, c, g, or t
  misc_feature (1597)..(1597): n is a, c, g, or t
  misc_feature (1607)..(1607): n is a, c, g, or t
  misc_feature (1609)..(1609): n is a, c, g, or t
  misc_feature (1634)..(1634): n is a, c, g, or t
  misc_feature (1636)..(1636): n is a, c, g, or t
  misc_feature (1657)..(1657): n is a, c, g, or t
  misc_feature (1760)..(1760): n is a, c, g, or t
aggagtcacccgcccccatgggggcgaggagaaacaagggtgggggtgtcaatgtgcgggcgcgaaacgggatgaggttgtcttccgctctcggccctcttgcggggggnaatttcgtccgccgctgccggggagtttcccacacgatacgtctcggcgggtaggggcattgccgagtgggtggattgttggggntatggggtttagaatgtaatagggggtagaaaggcacagtgttttccccgcctcctntnnnnngtgttttggtggggtagggggaatgactatcttcgccctctaannnnnnnnnnnnnnnnnnnnnnnnnnnnnnnnnnnnnnggtacttttccggnnnnnnnnnnatannnnnnnnnanagganggagnaaaaggaggcccgggggccgggcgcgggggcggcccgtggttttttttaaagnnnnnnnnntgtcctgaaggccgggggggnggccccgtgnnnnnnnnnnnnnnnnnngaacaaacctaggttttttgggcgccgccccccgcccnnnnnnnnnnnnnnnnnnnnnnnnnnnnnnnnnnnnnnnaggaaaccaaccaccccccctttaaaattctgtgtggcngcgggggttttccttgaagaggaaaaacacgggttatgccccattttgccgtttactttngggggcccggggggcccaaacggaatggttcttagaaaaaggttttttggatgggtccgaggccgggcccggcaaaaggnaccaaattttttctagggtttgttcccttccaanccngccccaccatggngaagctattatataagggttttatttttaataagatgaatagtttaagcttcgtgtctagccctgcaccctcttagcctaacagcacacctcgagcgctgtgccctgggctgctgacgtggcggcaggccgctagcagcagtcggccacctcctgaggcgggcagcacaggcctgctgtggacactctaggtctggccttgtattttgtggtctcagaagcctttgtggggacttctagtgtagggaaggcagtctctctgggagctcctgcaatgccaaactcttagcccaggttcactcctccgatccaagcctggcaggggtggggcatcatggtgtgtaggtatcaggcaggacttgtaagccatcccatcaagtcaaattctggcttaatgtgtctttaggtagatgacctctgagccacagtttcctattctatgaattggggtttagtaaatctctcgggactgagagccaatgaggccatgtgtgcacacaaaatgctgggcacaaatgaggggctcagcggggctgagaagtacatcccatccagtgccgacatccgcttgcatggtgccctggtaaccttgcctctgccctccccaggccacctcaccgatcagcacctggccgagttcctgcggcgctgcaagggcagcctccgccccaacggatcatcgtcatcaaagacacatggccanngaggcgtgattctggcgacgtgnacacaacgtgtgccggaccttgacgtgtcgcaggaccactgcatgcaggctcanctctggcganngaagangaaactcccntnagtctacatgtcatacttgccctananagcggggtggaggagaatgangacacatctggtgggggaactggactgggaaatcagcgcacctgggtctgaggttcagacacaataaattctgcgctctgcgatctggcccaggcatcctaangggcgtaatctacagaaacgtctggg

SEQ ID NO: 128849 - DNA, 1078 bp, Homo Sapiens
accccgcccccccgcattgtgctatagaacagtggttcaaaaagcaggctgtaccggtccggaattcccgggatatcgtcgaccacgcgtgcgcgagctgtcgcgtctggtcgtggtctggcggagctgcggttggcttgtggcgtctccgccgccgccgccctcccttcctcttccccatcttcttctctcggtcccgggagcccccgcccggagagagtcgcggttgctgatcgtggtgcttgagtagagccgtggttggtgacagcatgacgagcgaggtgatagaagacgagaagcaattctattccaaggccaagacctactggaaacaaatcccacccacggtggacggcatgcttggggggtatggccacatctccagcatcgacatcaacagctcccggaagtttctgcagaggtttttgagggaaggcccgaacaagacaggaacgtcctgtgccctggactgtggagctggcattgggaggatcaccaagcggctgctcctgccgctgttcagagaggtggatatggtcgacataacggaggacttcctggttcaagccaagacctacctgggggaggagggcaagagggtgaggaactacttctgttgtgggctccaggacttcaccccggagccggactcttacgacgtgatctggatccagtgggtgataggccacctcaccgatcagcacctggccgagttcctgcggcgctgcaagggcagcctccgccccaacggcatcatcgtcatcaaagacaacatggcccaggagggcgtgattctggacgacgtggacagcagcgtgtgccgggaccttgacgtggtccgcaggatcatctgcagtgcaggcctcagcctcctggccgaggagaggcaggagaacctccccgatgagatctaccatgtctatagctttgccctgagatgagccggggctggcaggagaaactgaggaaccacagtcctggtggggggagctggcagctgggcaagatccaggcgccacgctggcggttcgtgagtgtcgaggcaccactaaatatagctgtctgccgtccactcaaa

SEQ ID NO: 128850 - DNA, 658 bp, Homo Sapiens
tttacatgcaaagaaacagatatttatttaaaaaggaaattccagggaaagtaccctgctttaccttaggagctgcatccggccaaattacttatagcatcggcatctgcaaccatatgatccctgatgtttagaaatcgtgatcctgaagccctaaatgatccccaatcaaaaagcagttaagttatatctaccatactgtgctaagaaagtctattttatcatggttttcaaccagaattaaaataggaaaaaagggggttttctggttaaccagaaaactctgttccctgagcatcccaacaaactgagcctgtgtaataaagagactgctctctctaaacaatcagtctagcataactcatcaagtataaaccaaaccaatcaccaaccaaaggaaaagatccaccccttctaacttaaaacattgaagatattaaatgagtgttcttcacttttggaaacaatgtgaaatgtctgtattatacacagttgcagacacatcagaaaaaacaaattaattttctatgaaattgctagctgctctttgtttcaattaaatatgaaaataataaagactgctttagcacaggaagagataatatgtggttgaactaatacagcaggatgtttcaatactgttagactgtgggctttc

SEQ ID NO: 128851 - DNA, 683 bp, Homo Sapiens
  misc_feature (121)..(134): n is a, c, g, or t
  misc_feature (286)..(329): n is a, c, g, or t
tataatgcgaatactttattatcgagtgactggtattagctttttgtatgggcattaatatctcaaaaaccatacaccaaacccaggcttttccacctagctctgctgtatcattttcttnnnnnnnnnnnnnnaaaagtaaggaagaggaaggaggaagagaaagaaaatatatctgtattgaaagaattataagccaaagtgcgtctttcttgttttgtccatatacacacattgcaccatacataaataattacattgtaaaaatgactccataattacaagnnnnnnnnnnnnnnnnnnnnnnnnnnnnnnnnnnnnnnnnnnnnctaggtagatgatatctggggggttttgtccgtgggggctgtgtctctgggcatcggcccctctcgaggccggcaggtggcggtggccgcggcctcccacccgcccctcccgccggggccgccactatctggggttgttgaggaggatctccagccagcaggggcaggaggtgatgaactgccgggagtagcagggcccccagcccttggcgaagctgatgcggacgctgttggggtcgtaggggccgtcggcggcgtcgggctcgggcgcgtgctgcaggcccgagcgctcgaagtcgaacaccttgatggagtagccggggggcaccttgcgcacgaccagggcgcggccgc

SEQ ID NO: 128852 - DNA, 514 bp, Homo Sapiens
  misc_feature (117)..(155): n is a, c, g, or t
atatatctgtattgaaagaattataagccaaagtgcgtctttcttgttttgtccatatacacacattgcaccatacataaataattacattgtaaaaatgactccataattacaagnnnnnnnnnnnnnnnnnnnnnnnnnnnnnnnnnnnnnnntaaatctaggtagatgatatctggggggttttgtccgtggggtctgtgtctctgggcatcggcccctctcgaggccggcaggtgtcggtggccgcggcctcccacccgcccctcccgccggggccgccactatctggggttgttgaggaggatctccagccagcaggggcaggaggtgatgaactgccgggagtagcagggcccccagcccttggcgaagctgatgcggacgctgttggggtcgtaggggccgtcggcggcgtcgggctcgggcgcgtgctgcaggcccgagcgctcgaagtcgaacaccttgatggagtagccggggggcaccatgcgcacgaccagggcgcggccgc

SEQ ID NO: 128853 - DNA, 526 bp, Homo Sapiens
  misc_feature (131)..(173): n is a, c, g, or t
ggaagagaaagaaaatatatctgtattgaaagaattataagccaaagtgcgtctttcttgttttgtccatatacacacattgcaccatacataaataattacattgtaaaaatgactccataattacaagnnnnnnnnnnnnnnnnnnnnnnnnnnnnnnnnnnnnnnnnnnntctaggtagatgatatctggggggttttgtccgtgggggctgtgtctctgtgcattcgcccctctcgaggccggcaggtggcggtgccgcggcctcccaacccgcccctcccgccggggccgccactatctggggttgttgaggaggatctccagccagcaggggcaggaggtgatgaactgccgggagtagcaggcccccagccttggcgaagctgatgcggacgctgttggggtcgtagggcgcgtcggcggcgtcgggtcgggcgcgtgctgcaggcccgagcgctcgaagtcgaacaccttgatggagtagccggggggcaccttgcgcacgacacagggcgcggcccc

SEQ ID NO: 128854 - DNA, 807 bp, Homo Sapiens
catatacacacattgcaccatacataaataattacattgtaaaaatgacttccaataattacaagtataatatatatttccatataatatataaaactttatattaaatctaggtagatgatatctggggggttttgtccgtgggggctgtgtctctgggcatcggcccctctcgaggccggcaggtggcggtggccgcggcctcccacccgcccctcccgccggggccgccactatctggggttgttgaggaggatctccagccagcaggggcaggaggtgatgaactgccgggagtagcagggcccccagcccttggcgaagctgatgcggacgctgttggggtcgtaggggccgtcggcggcgtcgggctcgggcgcgtgctgcaggcccgagcgctcgaagtcgaacaccttgatggagtagccggggggcaccttgcgcacgaccagggcgcggccgccgggcgcgtccagcgtcggggagttgacgaagatggggtgctcgccgcggttgtaggcccacacgccgtcgggctccttgctgagcaggatgccgaagccgatcttgctgcgcgttcgccgcaccgactcgctgcgctgctccaggttgagctggcccaggcagaagccgctgccctgaggtaggtcgtagaagatgctgacggcctggtcgtacaccgcatagaggcggcccacgcgcgtccggtgctcccagtacgccacgctgcaccagtggctcggcttggtggcgtccggagacatgctggcgtcaggtctttgaatccagttttctccatgccttcca

SEQ ID NO: 128855 - DNA, 478 bp, Homo Sapiens
  misc_feature (81)..(124): n is a, c, g, or t
gtctttcttgttttgtccatatacacacattgcaccatacataaataattacattgtagaaatgactccataattacaagnnnnnnnnnnnnnnnnnnnnnnnnnnnnnnnnnnnnnnnnnnnnctaggtagatgatatctggggggttttgtccgtgggggctgtgtctctgggcatcggcccctctcgaggccggcaggtggcggtggccgcggcctccacccgcccctcccgccggggccgccactatctggggttgttgaggaggatctccagccagcaggggcaggaggtgatgaactgccgggagtagcagggcccccagcccttggcgaagctgatgcggacgctgttggggtcgtaggggccgtcggcggcgtcgggctcgggcgcgtgctgcaggcccgagcgctcgaagtcgaacaccttgatggagtagccggggggcaccttgcgcacgaccagggcgcggccgca

SEQ ID NO: 128856 - DNA, 1025 bp, Homo Sapiens
cggagcgagacccagaaaaacgcttccgggcgtgcgatcttatcaatgcagcaggttcggactgaagcggcatgaaccaagcaatatgtgagtagacatcatagcacccagagtgcactttgattccgctggtatgtgtgtgaatgtgacggatacaattcacacagaaacagtatgacatgatacgaattataacactcactatagggatttggccctcgagaacagaaataggcaggaggttcttctgtgacgtcataatcatttattgtaaatcactcacagtttacacattaccagtggcaaaataacactgttaaacacctactggatgaagaacttcattgtgactatttccaattgccatcatatctttttctaaaatttaaaatttaacttttaaatcctacatcttttctgaaaatatctatcttcaaagtgctccaatactaacactataagccctttcttttgctctaacatctaacacaaagggcacactgtcccattaattccacatgcactttacaaagcaacttcacacacaaatttttttaatccagaaactacataatgatcactttatattttgctacaaaattaatgaaggctgcatgcaggtgaaacattagtagacacggaattctagataactgttggttctcaagatctgatggcctgatgtggaaaattaatatgcttatttagcagaagtagctaaagtacatgcatcagtggctgggatcaattagaatataaattaggtgtttaaacatttaaacgagagcttaatttgagcttaatttgatgtctggcatgtcagagttatacacctttaagataacaatagcaaacagaacaaaatcaaacatctaaacaggcatgatttataaggtgggctgggcatagggctcaggacacaaaacgagctgggcagtgaacaatctctcttgaaacaaagacagtagagcattaacaagctgtaaacacagcaaaaaaataaacaagagcctacagccgcggcc

SEQ ID NO: 128857 - DNA, 741 bp, Homo Sapiens
  misc_feature (682)..(682): n is a, c, g, or t
agatatataaaagagggtttatgagttagaaagggctcacatgattacagaggctgagaagtcccacagcagattgtctgcaagctggagacccagggatactggtagcatggctcagtccaagtcccaaagcctcagaatcaggaaagctgatgatataattcttagcccaaaggccttagaaccccagcggtgacggaaaggctgatgtaggtcctggagtcctgagacccaacagcctgggatcctgaaatccaagggcaggaatggaagcgtgtattccagctccaagagagtaagaccaatttgcctttcttccgtttttgtttcaagccacctgcacattgagggcggatggttccctcttagtccattcagtcatatatcaatctcttctggaaataccctcacagacacactaacaaataatgcctttccagttctctaggtattctttaatccagtcaagctgacacctaaaattaaccatcacaaaagttaaggagaaagaagacaacttgtaggggaggctgctatgcaagacagtgtgtgaaggaagggctctctgaagaggttaatatctgagcagagacttgaatgaagtgaagaagtgagccatgtgggtatggggaatacaacttccaggtagagaagacagtgtggtgtgtatcagggtcagcanagaagcatgtgacagagaagggtgggccagggagagacggataagtgatctaactcctg

SEQ ID NO: 128858 - DNA, 732 bp, Homo Sapiens
accctttaagcctgtttattcccttctgtcatactcacaagcattttttatcctctgtgaagaggttaagttacccacccaccaagtctttgctccagcagcttgtagtgacccactgaaataaaacagaacatgggaggttttaggtgttgcaaaggatataaatacaagggcagtgattagtagccttctgttattagctaataatgcagactttttcttggataaaatggagtccagggtcccacattaaaggaaaagggccctgatttcaagggtgatgtgatacgatactatgttggtcagtcagttcaggaagggagatgggctggatatccctcagagacagaagaaattttgtatgcagaatcaaagcatgacagaggatgtcagagctgttacgcattgttagctaaatcattgggaacataagcagtggaactggaggcttcaagttcatgtagatctgaaacctgcttaatctttttggatatgttattgcagaatttctcctcttaatctttatataagctcggtttttgtttgagctatttttggtaataagacttaggagcctgacaccttacctgaagactttggtactatgatcaggtcccatgttgctgtggtgtaatcctttatccttatttctactaaaacctgcctggttttgtgcttaatgaaatggtaatagtttgatcacctttctaatgtcaagatatctctttattt

SEQ ID NO: 128859 - DNA, 629 bp, Homo Sapiens
  misc_feature (585)..(585): n is a, c, g, or t
cttacagtaccatgggaacaacagtgattgacttgcaaagttttctgtctctatggaaaatgcaaaacagtactacagaaatacacaatgcactgtaagcagcggtttgctgtagtggtccaacaggtacaagcaaacattttggctcagctaggcagtaatccacttaaaccacatcccggggctacggccgacccaaccacagctcctgtgggatcaaaaagaatgggtctgtttaaaaataaaaattgttatgttttgtgctgctgtccaaaggactcaaaggacagagtcatgaggcagaagtttcccaaccagatctagaatcactgggaccacttccttcctttcccttctaccaacctagagacttggactatggtttcaaagtgaaattggcatttctaacaatgaatacccacagccctcacttctttaaatatcaacagagaggttccttccaccaaggctcattgcctcctccccagtttggcaaagggcaaccatgggcttctactaaaagggaggggggcatgctttccaaattggggatcttacgtcttcctcacaccaggcacactgtcnccccattccatctactattcagcctccaatcagacgagacaaca

SEQ ID NO: 128860 - DNA, 632 bp, Homo Sapiens
  misc_feature (188)..(226): n is a, c, g, or t
gaaatcaaaatgatttgttgtggtaacaagtcagaggcgatctgaggacccgacataaccgaaacgtcttggatgctggacagtctataactggcacatgccagggagacaagcaatgacaaagctcaaacactaaaggtgggaccatcactggattaatccagaaaggcttccagataaggaagcannnnnnnnnnnnnnnnnnnnnnnnnnnnnnnnnnnnnnnaagtctttaccgcacaaattctaccccttcacacacattctttcaatcccaggacgtctgaagtcttatctagacataacttcagaccgtacctaactcccagtgctggtcgtctcaggtaataagatggcatttccctgctgttaatttctaacctaaaaaaaggaacagtgactcctctgagttcagagtcctttccactaggtatacaaatgaggatccttgagcaggaaggatccagtttaccctaagtatcctcaagaggaaagagaaggctgggagccagccacaaagagaggacgaggactgaagcacgtctgggaccaggtggtgaatgagggctgctctctactcgctctgcctctttttgtctcctttaattgatgtgtgtttttttccctcgtgc

SEQ ID NO: 128861 - DNA, 732 bp, Homo Sapiens
gtcagttttgatccatgtttaatgaaaaagaagttacctgaatagaaatggacatttaacaaagagttcattttgagaaaatgtggtgataggtagaccaaggagaaattgtttcaattctgaatttactcgcatattcctattagctgttactgatctaaaacatctccttaaatccaaaacaaaacaatagttacaagttcactgatgttttcatgggcactcacccaagtaatgtccaaacaatatttttccatgtcccccctcccccagaacacacacaggcaaaggcagagatgtttactgtgaggtcacatggcatgaagcaaatgcagccttatctgtttattattacaacagccagttagcattggcaaatgtgctttggttacaaacatggtttctgctaataatttcatgaagaagcttttaggatatgtgaccatttattcttagtataatcaatcattgaaggataaaaatcagagtataaaagtttatactctggcaaatataaatacatgcagagaagtttctgacagtttaaatttgagcatatttgaaatattaaaggcatgaaatttaaaaatacacatacgtgaaactatggtgaacatgttatgggtttgtcccatggtttaactctgctcagcccacgattcttagctgggtcagtcaatagtctatttttatcattttctaccctgttgtacagcatgatcatatcttcct

SEQ ID NO: 128862 - DNA, 475 bp, Homo Sapiens
  misc_feature (1)..(1): n is a, c, g, or t
ncgtgccaccacgcttggctcaagtctgtatttttagtttgttctaccactcgggcaccaattcttccagtactttctgaaccttgttccatggcacacttccaggagattttaacagccccgaattgaaactgactttgttgggaaattcattcctacaccaagtatttcttgaatgccaagttgcattgatttgccaagtggcaaatgagatgagcccttaccgagctcactgtctacctcgaagcttctcgccaggttccaagtggcaggagaacccgaaatctgaaagtcggatctgcatattgtcatctaggagaatattctcgggcttcagatctcgatgcacaatgttgttggcatggagaaagctcactgcttccagcagagaccgcatgatggacctggtttcctttcagagagggcaccttctctgtgagatagtcaaacagctcttcctttcgcatcaggtcaa

SEQ ID NO: 128863 - DNA, 1889 bp, Homo Sapiens
  misc_feature (1222)..(1252): n is a, c, g, or t
ttttttttccctggcgtgtagcagattttatttcatatgcagtgcatgcagcactgaccgggccaggcgtggcgttcagaatggctcccttccaccccagctctgatctcagagtcctggccagtggggagagaggtaccgggctggtcttcaagagggtagcaggatcattagtgggcctgaggccagagcccagaggagctggaatgatcaaaacccttcttctggagagttctgcttcctgggaatccctggggttgaggtcctagcccagcacaagcacggcctcatcctcagttatagcagcagagtctccctcctcttcagggcccatgatgggaaaaggcccagggggccggtgctgaaagagagccgcccggttctgctgctcccctttctttacccagtgcccgtagagccggaaggcacagttgtcgatgaggtgccgcactgaccgcagcgcataagggtccctcaacagtgcattcttggtcagtggccgtacacgatgggtgcttagggccactcgtccagcagccagcactgtccacactgccacccggaaccgctggcggggggtgaggttccagggttggctgccttcacaacgctcaaagaaggggtgctgtagggcctgctcagctgtcaggcgtgcctcaggatccacctgcagcagcctggagatcaggtctttgacagtgctggaacggtcatcccactcgggggaactgaactggtactggccctccatgatcatgcgtaacatcaggatctgccgccggtgccagaagggtggcgagccagccaggagtgtgaacaagatcaccccacaggcccagaggtcgacctccttgccatagcctgggtgggtttcatccatggagcatttaaggatctctggcgctagataccctggggtcccacacaactctcgaagcttctcgccaggttccaagtggcaggagaacccgaaatctgaaagtcggatctgcatattgtcatctaggagaatatttctcgggcttcagatctcgatgcacaatgttgttggcatggagaaagctcactgcttccagcagagaccgcatgatggacctggtttccttttcagagagggccaccttctctgtgagatagtcaaacagctctcccttccgcatcaggtcaaacaccaggaacatgaagctagaagactcgtaggaatcgatgagggtgactaggnnnnnnnnnnnnnnnnnnnnnnnnnnnnnnnggaaaggagtggatgcacattaacggggcttggccaccctgggacagcagcgggctgttactgggaagaaaggagaaccagaggaggcagtgggcgcccaacggatggccactctttagtggaatgaagggaggagaggtgtggaggcaatgttggcggaagtgggctatgggcagggccagcaggaggtgggaggtcgtctgctaacaggagcaaggaagacagcctcactgatgtgggggtggccggcgacctggcgaaggatgtgtgtctctcgccgtgtggcttcccgcacctcctccagctgctcaggactcagccgctcagctgtcacttccataatcttcaccgcaaactcgtggccagtagctcgatgaacacaacggcggaccacagagctcactcctctgccgatgacgtccttagggtcgtacttctggtaaaactctttggcggcggcccagtcgggcagctcatcctccggccccacgtccagcgtcatcctgaaggaggcgggggcctgagggggcaggcagaggagccagggtcgacgcgagctgcgctgtcgccgggtttgcctgcagtcgctcaccttaacccccggcggcggatcccgggaattccggaccggtaccag

SEQ ID NO: 128864 - DNA, 1286 bp, Homo Sapiens
atccactggggactgaactggacctggcctcccatgatcaatgcgtaacatcaggatcttccgccggtgccagaagggtgcgagccaagtcaggagtgttgaccaagatcacccccacaggcccagaggtcgacctccttgccatagcctgggtgggtttcatccatggagcatttaaggatctctggcgctagataccctggggtcccacacaactctcgaagcttctcgccaggttccaagtggcaggagaacccgaaatctgaaagtcggatctgcatattgtcatctaggagaatattctcgggcttcagatctcgatgcacaatgttgttggcatggagaaagctcactgcttccagcagagaccgcatgatggacctggtttccttttcagagagggccaccttctctgtgagatagtcaaacagctctcccttccgcatcaggtcaaacaccaggaacatgaagctagaagactcgtaggaatcgatgagggtgatgatgtgggggtggccggcgacctggcgaaggatgtgtgtctctcgccgtgtggcttcccgcacctcctccagctgctcaggactcagccgctcagctgtcacttccataatcttcaccgcaaactcgtggccagtagctcgatgaacacaacggcggaccacagagctcactcctctgccgatgacgtccttagggtcgtacttctggtaaaactctttggcggcggcccagtcgggcagctcatcctccggccccacgtccagcgtcatcctgaaggaggcgggggcctgagggggcaggcagaggagccagggtcgacgcgagctgcgctgtcgccgggtttgcctgcagtcgctcaccttaacccccggcggcgggcgacgacccaaggctccgcctccattcctgcccgccaatggtcagcgccgcccgaagactgaggctcagaagcccttccaattggaaaccggccgcccaattggggctggggcgtgagtcggcgctcggctggacctaaggctgcaacgcgacgccggggcgcggcttcagacacggccaatcaccgagtggcatcttgatggcaaacaccagagccatgactcccaggcaagagcagccacagataatgctagtagctgccaagcagcggaggcggagccagcagcagcggatgggggatggaggatgagcagcttccgtgttgcccaagatctccactgccttctcctcgtcctccatcacctggctataggccttgaaggactctgagtttcggctcctgc

SEQ ID NO: 128865 - DNA, 120 bp, Homo Sapiens
ttcaccactaaaaaaggcttttattacaaaatgaattctaataaaaccaggcctggtcttcaacccctcccgctgggtagaggccctagggtgggctagggtaggggagatgggggtggg

SEQ ID NO: 128866 - DNA, 955 bp, Homo Sapiens
tggacccgatgccctgcctgtctcctcctgttgcaccggacttaatgcctccggtttttgcttcttgttcgtggttttctggccctagggcgaaggtggcttttatttcctctcttggggaaggagggggagggagctttcccaagcacatcaacctaaggaaggggtggttgcgcccccagcagcgaggggctggaactgctgatcattcggaaggaagggttcgttcttgtccacttcctggcccttggctgcagggtgtgctggcaggggtcactccccttggggtggcagctcctgcatcagtggaggcacaaggaggtatctgctggtgttcacgaagaggagggggcaggtgccctgagtgagggagaaagggctggggtgtccgaccccacgccaacgcctgcccagtatgatcactttcataaggcctggctggtgggactcctcccaggaaggccctgaggggccccttggtagtgctccacacgatggctggtgctttaaatgtccatctcaaactgtgactcttcaccgcccgcccgcttatcttctgggctattgcgcaggtggctctggctggcttccatggggggctcatcactggaagggctggtgacccccggaatggtgggcagatcccttgggggtgttttggtcacaggtgagttccgacactccatcaggaatttccggtcatagatgatcctggtacctcccggggtggtgctgaagagcgtgccgccgggggtcgtgctgtagtccccgggcgggagctgcacgccgtcgccgagcaccacccggcgagtggcggggatggcccggcttggggtctggctgcagctgctgcccccggacatggtctcctgtgcgctgcacccgcgaacctctcgctgccctcccgcgcctccctcgtgccgaatttaacacccagcctcgtacctagcctaag

SEQ ID NO: 128867 - DNA, 1029 bp, Homo Sapiens
ttttttttactttattgcaatgtctttattgcattactggagcaagttggccagactgtcccctcttggggaaggtattaaacaaaaagaccaataagtatctcctctcgcctttccccctaccctccccaacaattgcacagcaatgtctgaacacatctggtgacaagaacaatttgtaaagtggtctagcaactacattatgaactgtcccatcacaagacatacagttggctttcttgtgagtcagatatttttacgtaaactacacgaattttcttggacacatcaaagacaacagaatagatttttcacaagtaacggcaccaaagtcacatgctggaatttgtaaggaaacgaggttgtttgccacaagtggctggagctaaagcaggtttgagcagttggcagcagagggcccaagcaggccccctatctggaccctctggtttctgaggccactgaagcctcacagaggcctactctgggttgttaaatagcagcagagaccaccttagaaaacaggaattgcccaggtgcaattctcagtttaagagaacacatggggctgattacttgtagcaaaaaagagacccgtggaagacacattggctctcaaagcttcttcaaagcacatgaggcctaaataagtggaggtctcatcaaggcttggagagggagtgaaagtgttgggagggcctcattcttggccagatcagtggtaaggacgcaggcagtctatccaggcccgaatcatggcgtgccatctaaggccaggtggagacaacactgttctgtgatgaaagcttcacctggaaacaatgggcctagtacctgtgtccagccagccccaagctgcttgcatgtcagtagctgggttctctagccaggggtataatgaacccctctgatcttggtctctctttgccctctgcctcattgaaactgcagttaagatgccaagacagtcccagggtccagatcatgggacaggacatggcactagactctcatgaaggaggccaagac

SEQ ID NO: 128868 - DNA, 672 bp, Homo Sapiens
gaaagtttaaataaagaatttatttccaaattcagcagaacttctttctttcttaaaaagccaactgggttaaaaaaatccaagtttgtgttttttggtggtgcaataattataaatgttgccagtcaatgccaaccagtgtctgattggcttcctgtgcatgtccaatttcctctgtgacactgtgttggtgccagagcttctgaatcttcttgaatcgctctttgcataaatgtaaaggatttccccgtctagaaagagaagacacatgtcactcagaatgtgttctgtttattcctctattataacccaacccttcctgatttaggcaaggttacaagttattggttttagactccctgcaacatttctgtctggcaggtgactgtggctattaacaaaaacatcagctctgaccctttgccaagagcaggtaaaagggaataagtgctgaaatgaggaaggaaaggtacacaaaccagacttacccggagtgaggtgagggaatagaggttgcgggggataaggagggtctgggttgagaggctaaaactaccaattcattgcccattttgttggtaacgtgtaaaaagggaagagggcagaggagaacacaaaagaagaattataggagtaaaaatattcctcacagattttactaagagtgcaaag

SEQ ID NO: 128869 - DNA, 805 bp, Homo Sapiens
ttttttaaagtttaaataaagaatttatttccaaattcagcagaacttctttctttcttaaaaagccaactgggttaaaaaaatccaagtttgtgttttttggtggtgcaataattataaatgttgccagtcaatgccaaccagtgtctgattggcttcctgtgcatgtccaatttcctctgtgacactgtgttggtgccagagcttctgaatcttcttgaatcgctctttgcataaatgtaaaggatttccccgtctgagtccctggtcggtctccccatagtcatcaaggtaaggaggagaataaaaacagcctttggttttgccagctaaaaatagcacctgacattcccgtactctcaggaagatgcccactccagagccacaggagtaggtgtgagctgtgcaggctcctacatcctccccttccagttcagtctggcagcagtaactctgggagcacagcagagatccgcacacaaggcacagagttggggctctgctcttatcaccacctgatttcgggcacgagaaattggatgcttgattaatgaggctgctgtaatcctctggaaggtttattaatttgttagattctcttggatatcttatagcatctctttcaccttctagatatcttttaacttcactgttacggcaccaactttcaatcagtgaattcattatctcactattttcttgaaaaaggcaaatgaggttgtttggtagggaaagatagctacataaatgttcaaaatggcttgttccaggaacttgaatgtcgggtggggaaggaactccattt

SEQ ID NO: 128870 - DNA, 967 bp, Homo Sapiens
  misc_feature (813)..(813): n is a, c, g, or t
  misc_feature (880)..(880): n is a, c, g, or t
ccctataccattacctcgaaatgtacgtattttttaatgaggagatggagatagaaaagaaaatcctatataaagagttgaatttcagttttaaagtgcaaaacatcagtgagcatcctgcatacagctttctgcatgaaaatttcctcttgtctgaattttgacgatgtctgcactgcaggggaatagcccagcaaacggtcagaagatgaacaagtgtgccccaacgtgctgctgagagacataggaagggaggtggtcttaataatacatgttcttatcccaccagcttccagggtagagcctgatgaagagcttccgcacctcatcatacacccagatcaggatggcgtgcggcacagccacaaaccagtactgagccctaagcatggtgaaactcaaggctgtgacacttccgaggccataggagaggatcagaccaatgatgatctgtgaggtgatccccacccagatgactttatttctgaagagaccctgctggaagatggaattcctccgggttttcctgatgatcagatctgctatttgctggactaggatgccaacaaagaaagccgtgtagcccgtccattctaggtattccctctggtaccttgtccattcctgcccatagctgtctttcaagtcattcacgtagtccttctcccattctacccgcaggttaatgagagtgcggggcagaaagcctcttgtgcatagacggtgaaatacacaaggaaagctcccagggcttgcatgagggcaatgtgcaggtatgagtacacagcgagcggctgggtcaacagctgtccnttatctgtggcgaggctcctgtcatgatgcacttcagcttctcgtacgccaggcatggaggctcgtngcgatctgggctcgagggcaatcctaatgagcgtataattcgtacatgcaaactgttctgtgtgaatgtatcgccacatcaaacaaa

SEQ ID NO: 128871 - DNA, 768 bp, Homo Sapiens
ttttttggtaaagactttggcatttatatcttttatttaaatattcatttcactattttgaaagtttcccttccaaatcacagctgtaactaaaatccaaccattccaggaaatagaaatatcaacttgggggcttcctgagaatgtcagattgtggattgcaagagtcaaaaagagattttccagtccaacctacccactggacagatgaggaaactgtggctgaagcgagggtgggtgtctgggagtaggaagggggtgtgggccctggcggatggtgctggagccaccttgcagccaccacctgggcaccccctggccctgccctggtcctccctatcatggctgctgttggtactggctctctgtggccgtgtagaagtcatccagcacactctggatgtattcgaaggtcggccgctcctccggacggtttttccagcagcgcatcatgatgttgtagagctcctctgggcagttctctgggcgaggcatccggtatccacgctccagagctcggatcacttcagggtttgacatccctgggtaagggatccggccgtaggtgacgatctccatcagcaggataccaaaggaccagacgtctgacttgatggtgaaggagccaaagttgatggcttcaggagctgtccacttgatggggaacttggccccttcccgagccgtgtactcgttgtcctcaatgacccgggccaggccaaagtcagccgtctggtcctttggtattctgatgttggagcggccgca

SEQ ID NO: 128872 - DNA, 729 bp, Homo Sapiens
ggcaaaatcaaaggcaagttttatttctacaaattaaaatgtcaaagtcccattggacctgtggattaattcatctcaaagtttctctccccataaacagacagactcatggttcaggacaatcaattttagttgcttaatccacccgatggcctggctctgatcccagtgaggtgctctggtgttctgggtagaaggtcccaagaggttccgttctcaaggatcttccttcctcagttaaaaaataatcatcagctgtcactcctggctttgctcttctcagtccatgtctggcagggacctggcttacttaccaagcccagaaatattcccctggcctcctctctccacccgctactcttttctctggcacgccgttgttagttatccttcagatctcggcttaaacatcattgccactaagtcaggggccttgcacgtattactgcatcttaccacattgcgggccaggagctatttccgtgtcagatggggtgttctgtaaggatagggactgagtctccttaattgccatttccccagggcctagcataaagcctggctgtttgctgaatgaatgaagggttctgcaggatgtggttgatcttggcgaggtgaagatacctttatcttcaaagcctcttcattcttcctcagatctgtcatcagggaatcacatagcctttacaagcgatttcttctcgcctccactcattctcttgttgatgt

SEQ ID NO: 128873 - DNA, 1401 bp, Homo Sapiens
  misc_feature (51)..(64): n is a, c, g, or t
  misc_feature (94)..(102): n is a, c, g, or t
  misc_feature (1246)..(1246): n is a, c, g, or t
  misc_feature (1277)..(1277): n is a, c, g, or t
  misc_feature (1305)..(1305): n is a, c, g, or t
  misc_feature (1339)..(1339): n is a, c, g, or t
gtgacggcattgattgaacattttttactagtagtcttatgacttttgtannnnnnnnnnnnnngtaatttataccaacaacacttttatcacnnnnnnnnngttgggcttctgcaaaatacaagctcatttttaaaccaaatgaacagaccatgagctggcttcaggggaagtgctattcacaggaccatatccaccaccctcttaaattcctaaacaatatcatctaggacttctatttaagttatttaaaataaatcttccttgagagccttgggaggtgatgtcagggttataaatggcacagtgcatttgctgtaggaatgtggtttggcattgttttatacacacagtattttttataccttaatgcttattcttgatggcatctgtcagatattagaattgaaaataagaatcttcccaaaatcctttaatttacctgatgccctcatcaggtcgttaaaaattcaaatggttttaatagctaaaaaactacaaattaagctctaaaacaaacaaactacagaaatgtaaaccttcatttgccaaaggtccttggtggcctgtcccctgccctgggagcagatggccctgaagcccttccctcactgtgcaggccaccgggtgaggctggacggtcacccatggtggcttcactgcaaggagcaggactgccgagctcaagcacggggccttcagcttcccctgtcctctggccacaccgccagcccttggtccttatctgtgtgaggtttacaaataaagcttctgatgtcaaatgtttaaatcgtgccctcagtggacgaggccatgtcctgatgcagaaggctgagcccaggctctctgtggcgccgctgagagcagagggctgtcttggggtcttcgagctctggagccaaggatggcctggtcctacttctctgcccccaccaatgggggacttgaatgtggccagagaatacagtcagtcagggccagccagggtgtctgtcagggtgggcacagggtcctctccaaacctgcttctccctccctggtcaggccttcatccccaccacccgcacctgtaccctggacgctggctcagaggcctacaggtgtgtggacacctgggcagtcactgtgtcctactgtgcccctcctctgcaggccagcttggtgtctgagctcctacagcagttactgcaggctgcacagctgcggaggacatgctggcggagggatgaggcgtcaaatcatcttnagccagggccgacatggcacaacaggataangtgcaaggattgtgggaaaaaaggacancatggctcctgcaatctggcccaggcaatctaangagccataatccgacagtcaacttctggggaattttcgccaatccaaaaaagacggaaaatg

SEQ ID NO: 128874 - DNA, 908 bp, Homo Sapiens
gacatcagaagctttatttgtaaacctcacacagataaggaccaagggctggcggtgtggccagaggacaggggaagctgaaggcttttgtgcgttttccacaactgtaattagtttttcccccctgaaagggtgggccatgcatagtttcactgtctgtcttctctacagcagcttcttcttggcacaatcctgaactgggcagaacgtccttcccaaactcgcggaagacaaatggctcctgtgacaccctgagcttacgtttctttacaaacgatgcttctctgacactctttctgtagaatttctctccaatatgctgcttctggtgctgatgaaggtatgcagtgtcatccaagttttttccacatgctccactcctgttcagcttctgcttgtgatgagtttcctggtggtcagcaaagtgaaaaacatcctccaagatgaggccacacatttcacaggggtgagccttcttaggagaaacacctgccctaggagtcctgctctgagactctctttgtacagaaattctctgcttacaaggtgcctcctcatcttttgatccacaccaacaacccagcgaggatatgagagccaggttctctagcatcacatcacggtacaagcacctctgagcctcactaagaagacaccactcctcctgggaaaagttcacagccacatcttcaaaggtcacagtgccctgagtcgggcgcctcggcgcagccgctgccatcggactacttggggaagcacggcccgggagcagtggtcgccgtcacggggctgcagagccgcctctgggcaccgaggacgattcctctccaccttctaggttcagtcaccgcggtccccccccagcactcaggggccacaaactggggaaacacccgcgtcaccgatac

SEQ ID NO: 128875 - DNA, 1158 bp, Homo Sapiens
ttttttgttagaatgaaaaattttatcatcactcctgttcaccccgcagagtctgcggagtgctaaagggcacaccaataaggatccgagggagggggtctacatctgctttttcagcccccaaagccatatattggggtggcccaatataaagctactcattagtttggttcctgagcagacctgctaataaacctcaaaaacacaaaagtctacttcactagccagaaatgaaagcaggatctagatctgagtgggaagggcagagggcagcatgggttgactctagttggaattgtgccagtcttctctggaggccgactcactcgtggagtggggaaaggggtggccaggccccagtctagaaaccccaggcctatgggaagtgatgccaggggaagggaagcagataagctggtggctagttcccaggaaggcaccaacctccaaaatcacctaggcaaggacagatgcccaggggtgccatctgtgaaaggggggaaaaggcaagagagcccagaaagaaacttggatgctatagggggttccagaaaggtgctccttgctacccccatttgggggctctgacatgggaaagactccgagtcacccagggaggagctgggcatgctgggcaggaaccaccctgctagcctctcccaaaagcaggggtctcaggccaaatgcccctcctgttcccttccactgtcaaccctctccagggaggcccaggctagccaacaggccactgggtaaaggccctgctgccctctggggtggtccagccctgcctcagatatcccggcggggctgggcagaagagagtgttgctggagtgtgctgggcccaggttttcaagggctgggaatgatttttttagacgaaagggaacaggcggtgtcaggaaccgaatgggacgacctccacaaagcaggctgggcaaagtcccatgatggcaggtcgctaggaagaggttccaggggcggcaggccgctgctgctcccaacccacacctgacacttgtgaggccgctcagaagtgtgcacctgcttgatatgtccgttcaagtgatcaggcctggaaaagagagaaccaagagggactttagaaacttggccagaccccaccacacaggcacatatgcatacgtgtgtacac

SEQ ID NO: 128876 - DNA, 654 bp, Homo Sapiens
tttgagatcctctgcatttattccattcatttctctcctccctccttccattgcccacccaaccctgccctcctcctgcagtcctccaaggctaggccagctccagctggcagcttttgagtggactcagggtgctatttgtggtacgtgtgaaggtgtccacctcaggcacgaacctctcagcaggcacggtcagcttgcgccgcgtgtccatgcacttggtgtccagcagcatggagttggccttgcaggcaatgtcagcctgcagccgggccaggtgcttgcacagggcgtccagtgcgtcctgtgcttgcgccagcttctgcttcagggcagcgatggttgcctctagctggtgaacctcgtcggtgaggccgtactgtgcctggtcccggcagagttccacgttgggccggtaggttctggcctctagccgggtatgggacagcttcaggctcaggagctttgtgcgcagatcctcctccaggtgccggatgtcctcctgcagctcagcgatctcctccaaggtattcttctcttgccacttgagctcactgtacactttctccatctcccgcagccgcttcctgaaggcaaattccgttgcaactctctgggcttcaagctcgttgttggtctcagcaatagttagag

SEQ ID NO: 128877 - DNA, 1136 bp, Homo Sapiens
ctctaatgagataaataacaaacgatattttatttttattttataaaacatgcagtttacaacaaatttttaaaaaatggaacaaaacttgggacaggcaagtgggatggaagacagatgcttctcagccatcagcaggaataaatgaagccggcagccaagctttgtccaggatccaaaggcccttttggcaatggtattggcaacactggtttgcttgggccaccaacactctacttgctggcccctccaggtatccctgaagcagttggtgacttgtgctaagtcttgaactactgtggtatcctctgtcactgtccaggacttcaatccctagccagctaggaacttacagttatggttccaggagcttctctgcctggatattagtcacccaggatattaagaataccaattactttccatctgggtcaattctagactccatgtctgtaccactgttttgcaaagaatgaagaaggaatgaatctggctcctagaacctttgcaacaattctgctgtgttccagttcaattaatagcaccatctgtgaccctagaccctgagcacgtccagtactggaagtggacaaggtatagccaacttaggaagccatctcccagttctggggctatagaacagtaaagggagagggccgtggttctttgggaagggtagtcagagcgccagcactgaggagaagacagctgcatccagaaagtaccaagcaaggaatcgcagggaaatcattcgttttcggggcatatggaacaggtagacagtgtcaaggacttggtccttgggcacctggcaaggataaaagagggggagacttaaggtaggggacctataattccccattctctaaaggcacaatgtataccctgaggggcccactctcacaagaagactcttaaaagagccctgccaaaccatcaggttgatgacccggaagtccttctgcaggccatgacccacaaacttgactccaatgtcaatgagaaaacgaagctttaagtaggtagacttgagagttgttaggtgcttggaggaaattttggcatcgaggtcaccaggctttatacccgagtatgagtcaagtaatccaccacctgcttctgggtcaatgttgccg

SEQ ID NO: 128878 - DNA, 1156 bp, Homo Sapiens
attacttgtgacattttattggcgtatgacaatttacaagggtccctgttgcatcattatacatcacactgagtaagaatcgtttagccatctacattcaatgttactgggtaatatttttctcaaattataattcccaacactgattttacctgtgacaaaaggaacaatagtaattccttgaagaagactaactggaaaaaacattttgcttttagtataaaaattcctaggatgctgaaaggtacacatacacacctaaagagtcatggccttcttaaacagctttcttaatcctttctggaaatatcctttggttcatttttattgcccctctctaggcaaaacaaagtatgttaacgcaggtatcagtgagttatttcctagcacttgtaagcaaatatccttaccaagaggaaccattcaacttttataatatcgtaaagcgtggagttaagatgtgtttttaaaaaatatacaggctttttatatgcttggatctgaaaaaggtaacatccacaatgacattctattacagagttcttacaatcaccctagcctactacactctggtataatactctttcttcaattctgtttaacagaataaaagtaaccaaaggttaaagcaatgcatttgaacttaaaatataacctgcccacaggaattaagtagttttattcccactccctattacataatttctcagatccccttttacctattgtcttaagtggataagcacatagtcatgcacacagatttgatgtctaaccaagtaactgttatggtatttatttgtatacaataaaagggtcatgaaaattctgtgttgggaatcacatccatgttgctttcacacgtaaataagtattattctgaacaggagaatattagttatgccctgattaatgcaatacatacttcctttggcaggtatttcctctgctttaatagacaattttagaaagacatgttaacgggggaaaatcacacaatactaaggatctgagggccataaacatcacatatgttgagtttgcttttagttttgtttccaacagttcttaaccaatgttcctggctgtaatcttggtgctagacgcactgcaaatcctctaaagtgtttaagatgaaagagcaatacacttaaga

SEQ ID NO: 128879 - DNA, 1300 bp, Homo Sapiens
  misc_feature (57)..(87): n is a, c, g, or t
gacggttcctatataacgtttatttctggaagttaaagtagatacagcaatataccnnnnnnnnnnnnnnnnnnnnnnnnnnnnnnncctcacaataatataaatttttacactatgaagtacacattggaatttgaatgcagtggccaggacagcagcttataaaccaccttataggtaggtaagcaacccacgggattccctcggctgggctggggatggggagggggcagtggacaggaagcgggcagggcctgaggaccctgttctttaatgggccacaacagggctcagctcctctcagaacttttgctacaatcagagttaagaccagatacatgctacctaaggccatgaacttgacaatatctgctccagagaagccctgaaccctcgccctaggtccctatgatttaaacccaatggtaagcccaagtctcacctttctaaatattctgtttatcagttaagcttattatgtactgaagagtgttgctggagaagtaagagctctgcatgacacatcaactgtctccaggcaggaggactggggcgaaccctgttcatcttagagaaggtcgtctcccccttaattcagagaccagctaatttgatttaacaaacagaattccacagaaactctgatcagctgaggcaaggtggttttgagttgccaaatccggccatgcctctgagtcagaggcagcccatccagcacgtgctaggtgttcccatacgcacaggagaggcaagctagccagccaaggcgggcaggcggggaggccctctagctgttctgcctcacctgtggggccccagcagggaggagtcaccagcctcagagggaggccaggtatacaccctcatacgagggcagactcaagtttatcagtaagcctttgccctgcatgaactgaatgaagacgccattacaagtgccactggatatcaccaagaaactggctaagaaccatattccctgagctcaaccagacacgtcgctggggccccatagtgtgcatcatgtccaacctgtaactctctccccctcttcttccatgaggtcctgagaccaggattcctaaaacaaacaggatgagggacctttagacacgcaaggagacatgcctctagcaggatcagggggactggggtcgggagggtggggcaggaaggaagccagaatcagaagtatcccagccctgataaggcacccacagaaacaacctagcctctgaaacagcagatcaagtccagggagaaagggagtcaaggttgtaagcaccctctgcccagcccc

SEQ ID NO: 128880 - DNA, 2852 bp, Homo Sapiens
  misc_feature (472)..(535): n is a, c, g, or t
ttttaactttaaaactgccgtcttctgctttattgacaggtaaattgttcaaaaatgttctcacaattcaataattaattacaaagactgagacttacattaaaaaagtaaaaaccagaaccccccaggtgcccatccagcagaaggcccaggagggcagtggggtggcagggctaggcggtgctgggccactcagtgccgacttggggaagtgcacgtcctgaacagccttgccaagcagccgaccggtgggaggacaggggaagcctggcccaagctgtggacaagctgtgtctgccgccacagttaatcacaagcctctgacgacacagggccacagagctggtcactcaacatctggtacaaagggtgaggtgaaatccacgcgcaggggattgctgtgccgtgggccggggccagtgtgcaggagtgtgttgggtgggtctacgtgatcatacgggctactaatcannnnnnnnnnnnnnnnnnnnnnnnnnnnnnnnnnnnnnnnnnnnnnnnnnnnnnnnnnnnnnnntatcccagtggctgcttcgtggcgccctggggctctgacttccctcagcccagcaggccacagggcctgcctgcaccacgacactcgctggttttatggcaggaggcagaagccgtggaagcgaatggaaaacagcacagctgacttcacagtagtagatactggtgacacttcatggctgcgacccagaatgaacttaatgcacacagggacgcagggtgtcactggtcctgggcctttgtccatgactaggtggtcagcaggacttctgcagctgactgtgcaatggctaaatgaaaaaaaggccacagactaacctccactttcctgtcttcaaaattctagtgacactgggaatgctataggacctcctactattctcttaaggtcctaggaaagtttcaggaactagggaaaagactgggtactgaggctgtgtccccagatgtctgcttccgaagcagccgcgtcatgacgggtttctgctgaggaagtggtgttggcagggccccatatgccctctcgggttgtcaggggtgggagacaggctgtatgggggtccttcatgtgcagatggaacagcatcgcctcacagctgtgcagacgaacagatgtggtctactgccacgaacaatgcggcataaaactgatcaatattataataaagatttgtcttcttcatctccatatctacaaagtgattctacatttccttggacaacactggagggcccgctcagtcttggcactgacgctggaggccatctccagctccctggcccctgtggcgagctggcggcttcaggtgtcacaggccggctgctccaggccttcgagggggagctggctcctgtggggggagttggggctcggtgggcccgctgggggttggagctattcgaatggagttgagtgtttggtggagtccgaaatcagggctctttgtcaaaagtcctggtctggatcagacatacttctcagaggcacagtcacgctaggctccgatccacctgatgagggccacgagatgtagggctttttcctggatggaggctggcgagccaggttggtgggagcggggcccggcctttcctcctgggaggggggcacagcactcagaggcaggtccatgagcacctgcatgccgtcgcctgggcccatgtgggccacgtggttgaagttggttgggttggatatcattttggatctcaattctgggtctctaagcatctctcgcctctgctgcagtctctcttcctctgggaccttgaagacgaaccgccttttgctcctggtgcgcagcatctgcttcttgctgttgtcggaggtgtccggcacgttgagaaccgctcccgagaacttgctcttgaagttgatcaagcgtggaggctcgcatttgaggaggttgagggtgccttcagagttcaggggccttatcctccgcaggccgatggtctgcacccactccatggtgcgcacatcaaagacgtccacgccatactcgctgtacaccgtgacgtgggtggggctgcaactacaggcgacaggagccgcaggccacatgagctcctgcgcgcgtgccctccggccttgcgggtccacgtacagtcccatgtggctgaagcaaagcaggtactcctcgctttcgagctccacagcacaaagggcatcaaaagactgttgtgagaggaacgcaagcgaggggtcattgggatttaccaggtttagaggctgcccgtccccctggatgctcagcaggcagaacccagaagggtagcccacacagagcctgtccctgagcaccgccaggcactgcacgctgccgggagccacaatctcattgaactttctgtggaatggcttcgttctctggatctcatagcaaaggatcagccgtttcacggccacaaacaggcaggtgccagagttcctcttgagtgtggccgtggccatgagctggcagcctttggtttccggaagcttgatgtcaaagctgccttccgctccatcaagggacgaccacggatagaggtgcacatggtggttccggccacagaggaggattacgatcttctccctgggagcaagctcgatctggtgtaccttcttacagtcagcggcacggacgatcacatctcgggtgacctctatgacatagagcccttcttctaggccgactgcaatcctgtctgcatccacgatggcagctgtcaggatggccttgatgagaggcagcgagctgtcgtaggcttccaagggaacatgcacgacctgattcctcagccggtttttatgaaggatggactggagtccttct

SEQ ID NO: 128881 - DNA, 1028 bp, Homo Sapiens
  misc_feature (476)..(516): n is a, c, g, or t
  misc_feature (773)..(773): n is a, c, g, or t
  misc_feature (788)..(788): n is a, c, g, or t
tttttttaactttaaaactgccgtcttctgctttattgacaggtaaattgttcaaaaatgttctcacaattcaataattaattacaaagactgagacttacattaaaaaagtaaaaaccagaaccccccaggtgcccatccagcagaaggcccaggagggcagtggggtggcagggctaggtggtgctgggccactcagtgccgacttggggaagtgcacgtcctgaacagccttgccaagcagccgaccggtgggaggacaggggaagcctggcccaagctgtggacaagctgtgtctgccgccacagttaatcacaagcctctgacgacacagggccacagagctggtcactcaacatctggtacaaagggtgaggtgaaatccacgcgcaggggattgctgtgccgtgggccggggccagtgtgcaggagtgtgttgggtgggtctacgtgatcatacgggctactaatcacnnnnnnnnnnnnnnnnnnnnnnnnnnnnnnnnnnnnnnnnnccggccaaggcgggcgggttttgggttatccatgtggctgcttcgtggcgccctggggctctgacttccctcagcccagcaggccacagggcctgcctgcaccacgacactcgctggttttatggcaagaggcagacgccgtggaagcgaatggaaaacagcacagctgacttcacagtagtagatactggtgacacttcatggctgcgacccagatgaacttacgcacaacggacgcagggtgtcactggtcctgngctttgtcatgacangtgggcaacaggactctgcagcctcgtggcgaattctggctcgagggcaattcctaagtgagtcgtataattcgtatcagtcaagtgttccgtgtgaatgtatcgctcaatcaacacatacacggagataatgtagctgggtgctatgagtgacatcaataatgctgcccatgcgcttcatcggaacgtctgcatgatatgacgcaccggaaaggggtgcattgggctcgctccgccgac

SEQ ID NO: 128882 - DNA, 426 bp, Homo Sapiens
tgcggccctttccaccagtcctgcccccgcatggattcttcgtgattagtagcccgtatgatcacgtagacccacccaacacactcctgcacactggccccggcccacggcacagcaatcccctgcgcgtggatttcacctcaccctttgtaccagatgttgagtgaccagctctgtggccctgtgtcgtcagaggcttgtgattaactgtggcggcagacacagcttgtccacagcttgggccaggcttcccctgtcctcccaccggtcggctgcttggcaaggctgttcaggacgtgcacttccccaagtcggcactgagtggcccagcaccacctagccctgccaccccactgccctcctgggccttctgctggatgggcacctggggggttctggtttttacttttttaatgtaagtctcag

SEQ ID NO: 128883 - DNA, 367 bp, Homo Sapiens
ttttttgactgttcatctttttattgaatattctggtaaatatttcacattaatacaggctacattacgtagagccactatatgacaagaaatttactcaactttttccttttaagtatgtaaacaattatacatgtatttatcaccctaaaaggttgaaacatgtaatcaactaattctcttctgcatacaagtagtattctgtatgtttagccaaaagcactaaggtcatatgatcttaagttcaaaatggctaaactaaccagagaacataatcaggtggataggaaatcaatttgttcttatacaatgggcaatcaaatttccattgctaaagcctcagagaaaatttccttaagggcacatt

SEQ ID NO: 128884 - DNA, 1416 bp, Homo Sapiens
attaacaaatgtttattatgcagaaagagaaacaatttaaatggagagtcgacgggatggcatcactatattgtactaggctcctgggttgctgggttcttaacacaatgggggagtcagggggaagagtctcacaggatgtcctgatatgagcagtgcttcttaaaccataacacaaggactattagaatcaccaagggcactatcactaccaaggcaatccaattcatggaaaagtggtgtccccagtagaggatgatgtcctggcctcctagactgctgtgtctcactcgacaagacaggccagcaggctcctcagttgccagctccaggatcacctgaagataccatgtcccatcagcattaggaagaatatcaccatgtttagtgcccagttgctcctgttcattccgcatccatgtcacccaaacaggctttgggtagaagccggaggcatgacaaaccagcaacagctggccagacccaaggctggggcgactggacagccaggcttctggcctcacttgcctgtgtacatacatcttccctgcatccaggagacccaagagaaatcgggggcaagtgcttcttatgagattatacactgtttctgtgacgccttcatactgatgattgagtagatgacagacactttgggccaaacttccacagcctggagatggcacccatgttgtattctggaaactcagtaaatctaatccgttgaaagctacctgaaagaagccttctgggctctttccagaatgcagctcacagcccgctttcacctgtacttcaaagggatatttcgagtaatcttgacttgcatggtcttgaatctcccgagttaatccacaagaggtagaaacgaaataacaactctaggtctgacaactcttcattgctgaagttgcccttggaccagttatgcaggaaaattattgtgcctgattcactgtcccagccatgagtctgcaactcgtccagccatcctgagccctgacctcgtgcccaggattggttgacaaatgagaagatctggatgacatggaaggagacgtgttcctgggatgcgtctgcattgtcaccacctgggagaagaagagctagcagcagaaactgcagaaacagcatgtcatttcgcagatgtttctttctctcagaaaagctgtttgctgatctctgttcttagcaaacttatccctctgtacctatattctgacttccttctaccaacagtcttccccatcagccgctgacagcaactaagaagatctgcttccctcaaccttggtcctcctactcaatctctcatttccccacctgctctgaacctaaagttattctcttctctcaggattccagctgctctgccactaagctccattatatctacttcccttcctcagactgcct

SEQ ID NO: 128885 - DNA, 921 bp, Homo Sapiens
  misc_feature (807)..(831): n is a, c, g, or t
  misc_feature (859)..(869): n is a, c, g, or t
cagttttactaataactttatttaaataagacacaggaacttctatactgaaaaaatacaaaacaaaagccacacatttccttgtgtaaagccatattatatggtaactcaaatactgttcagcgcaatggctagaattaaacagtacaattatatacaaaatttaaacaatttctgacaaatttctacagctggatgtaggatacatttgagctcaacaacttctgggaaatttacatggcaaagcgtaagctttaacacatttggttcaaaactttaatatatgctaagaacaaatgtacaacacaattaatatttagtatctcatgagaaaataaaagcacatcactataaatatcgtacatgagatttcatcaccaaaaaagcatattcagtccatttttctgaaattgatattgatactattgcattttatttggacaaaagcagagtgtaagatccacatattatgtaatgctaaaccagacatcagaagtcaaatggagctcatatttatcttacggaactagtaattttccccctttaaccataatctacaaaatatagtattttcatcaaggcctgagattattagggttaaaggtatctgctgctgaaaagattgttttaaaaggttcccctgtgaaaatgacgaaagtaaactgagtccttttttccatgacagtctcctacaatataacactgactaatttaaaggagccagaatgcaccttcaggagaaaatattacgacaaactttggtggaaagaagagaattgagatcatgacaaaataatgcacagaatnnnnnnnnnnnnnnnnnnnnnnnnnaacatatacatatatatatcatttcttnnnnnnnnnnntcaatggtgttgctttcttctctatcactcatccttcttcagcgcttcttag

SEQ ID NO: 128886 - DNA, 888 bp, Homo Sapiens
ttttgagagaagcaagactttaatgaagaatgctacaagtatggacaataattagttctcaccttttaaaaaaagattacagaaaacactttactgaaattttttgctaaaaagacagtctttaagggtgtccgggagagacagcaagcacaacacagtacaaaaggagaagggaatgttgaattccagtgcaagacacgaacacagcacaattagggaatcaggaggaagcaaccatttcacaaagaatgaaattaggcatttatattcaatcggattttttttaagctttaaaagtccagcataaggaagggaattgggaaaagaggcaggggacagggggcaggggatcagggaactaatcttatctacaatcaccattttaccaaaaaacacactggttcaaccacatgagaagtgggaggattaacctgcctacatagcccagcagatgttgacagcaaatgccaaggcagacaggtctagggttgatgtcacgactggctaaagagtttttaaagggaatcttattccacaaggactggtctgtcatcaacctgggttcataacagactaagttcctttgcatttgcatcagaaggccagaacttgacgtggaacaaatttactccaaataatactcacattgctggttttaacaggtcatggagtcacaagtggctcctaatagacttcaccatttcctaggagaaggttctacagattaccagggatttaaatttaagcaaaccactaaagaagggaaacgctaatgatattctggcactgcacaagctgtgtgcctgtcatctctgccaaggacatgggtggacttggctctgcttcttagctccatgatctccaacagtgatgaagtggaaatgggac

SEQ ID NO: 128887 - DNA, 707 bp, Homo Sapiens
ttttttgtgcttacaagtagttttattattaattttagagtaaacatcaccaacttgggcacaattccaaaatagagctcttgttggattctggtcataaaattcttttttaagcttgttaagatcttataaaataagaaagttttcccaatactttagaaaaattactaatcattaataagtcgattttatactcaaagtaatggcctaacattttgaaagatgaaacaacgctcctcttttgaacatctaatgtattaagtaagctcagtgtcccaggcttcagaggagacagagaagtcctcatattgcaacctgaccagatgactctgggagtgaattaaatgcttaaaagaggtcagtcttgcaaattcgatgaagcacagaatacaggggaactgatactgattctgataaaagataacattactctcagaaaggggtgaagctaaaaatcttgcagttctggggcaggaggagtgcaacaagcaggcaacaaacagcatgaaaggaaaagctgagtgaatttcaaagttctattgggagatggagtttgtggttctttctgccccacccaggtcaaaggctcatgtccagaaaaggatttctcccagtgatagggtggaagtgtgtggcaggaagttgctgtttggtcctggaagtgtaaaggaaagcttttcaagtacgtgaagtagactgaagtgacc

SEQ ID NO: 128888 - DNA, 1046 bp, Homo Sapiens
  misc_feature (476)..(497): n is a, c, g, or t
  misc_feature (955)..(955): n is a, c, g, or t
  misc_feature (990)..(990): n is a, c, g, or t
ggaacaaagggaacagggccaagagccccttccttccaaagccaaagggggcccaacaccattccccagaccgaaggtttttcgggaccggaagtccagggtggagactggggtcccccgaagcccagagcggcagtgaggccagaactccaaagcccctgcagccccggctgacaggaagcgccagctgtcaccccagtccaagagctccagcaaggtcacgagcgtgcccggcaaagcctcggatcccggcgccgccagcaccaaatcagggaaggccagcacgctgtctcggcgggaggagctgctgaaacagctgaaggccgtggaggatgctattgcacgcaagcgggccaagatccccgggaaagcataggccgtgccccgaccggactggacgcatttttatacatagggtaagcgcagccattttggattttgcagttaatgtcttattttggctgtgattctttttnnnnnnnnnnnnnnnnnnnnnngtttctcagctggaaaagaagccacacaggaaatgacaacgacgctgaatcccagcctccctccccagagcagaagtcccgcaggacagacagacacagacagcgctagtgaccagcacggttctcatgtaaattacaagccccagccgccagccccgccttctcttcctcctcctccgtcttcttccctggccctggtcaggcctgtggagccccagctctgggtccctagcccgggtccaggcagccaggctccctcctgagctgagaaacggaacctcgcgaaccactggtggcacatccttctcctcccccgcccctgatcacccgcccccggatcagaaatatatctatattctcgactaaagtctcatcaggaaatatttcctgtcttttattttaagcatcaaattgttttagttgatttaaaaaggaaaaaatacagaaaagaccaaaanaaaggcccaagggtgttgttggggcgtctgtctanatgtggtgggtctttttttgaggggtctcctaaaataaaatattttgataagcagc

SEQ ID NO: 128889 - DNA, 1287 bp, Homo Sapiens
ccaaaataagacattaactgcaaaatccaaaatgctgcgcgtaccctatgtataaaaatgcgtccagtccggtcgggggcacggcctatgctttcccggggatcttggcccgcttgcgtgcaatagcatcctccacggcctttcagctgtttcagcagctcctcccgccgagacagcgtgctggccttccctgatttggtgctggcggcgccgggatccgaggctttgccgggcacgctcgtgaccttgctggagctcttggactggggtgacagctggcgcttcctgtcagccggggctgcaggggctttggagttctggcctctctgccgctctggcttcggggagcccagtctcccacctgacttccggtcccgagaacctcggtctggggatgtgttgggccgcttggctggaggagggctctgcctgtccttgtctgatggttcatagcgcttcctgcttcctttatcagccgccttattcaacagtgtcaacttgatctccttgtgggccacaaatgtgccctgctggggctgcccggggggtgcctgctggggtgtcgagggctgctgggaggacttccccccctgctgggggttttgcagatttgggtggttgtgtggacgaatcccttttccgcttttcctctttaacaccgtcttctttcttagattttcctttctccttcctggtctgggctggggccggggaccgagagctggctgaggacacggggctagccaggtctgcgtacatgtcctccgagtccacgctgtgtgcagagctgctgctcgacgtagcactggacactgaggagacgctgctcacgctcagggacctggatcgggagctggaaccactatagctgctaccactgccactgccgctgccgcttagcgtccgcctcctggggggggtcctggctggccgctccttcctcctggcttcccgagggtctcctggcttggtgggctcggggacaggagcagtggttttggtggcctgtggtggggctggaggcggggccggcttcttcactgacttctctcctgctttcccgggcggcggggccggctctcccttggttctgatggaaggtctatgtggggaaggtgttggggacggggacggggacgaagagaaggaccgggacctggaccggcttcctgagaacgagctgtgtctggaagagcggctggagtaggagctgtaggatgaagaccgggatcgcgaccgggaggagccggagccagagtaggacgatgaccgcgaagacgacctgga

SEQ ID NO: 128890 - DNA, 2190 bp, Homo Sapiens
tttttaatttacacttttttttaatctggtaagaacagcatcagaaaacaaacttcaatctagaggagaaccaagagcagggagattggcagccaactattcccaaggccaaccttgtcacagaggaacctttgggtcataccacccctagggctataaatgtatctcttaaaaggtttctgggagtgcaactctcaacaccacaatcagaaaataacactcgagatcagcaccccaaggagttgacatctgtagtttagaaacaaaaacaaatggagctccagaaatgaaattacaaatcaatcacatgaatgacagccggccatcagttggccgacccctgctgggtctaaagggaaatctgtcattggggccgcctcgccctggcaagatggggttaggtcctggaagtgggccaactggatcaaagcgtggtctcagtggaggaaactggctgggcgtctccccaggaccaggaatgagtgaactgattgggtctccaacatagggaagtgttggtctttggtcatattcacccccgataattcctggaggaaggcgggagctaggaaatggcctagggtgcaaggggttgggatagaatggaatggtgtgagttgacgatggcaggagcatcacaaaccgccctttcggggattcttttctttgtatgtgcctcttcctgtacagttctttccaatctgtgtcttgaactctgacagtattgtctcgaaaatcacgcagatataaaaacctccacaggagtgggtcatttgaagcagtaaagaggtcacgacaaaccgcagacaaagacaagacggaacgaacatccagaagtcggaagatccgtagtttcagttccaatgggaggacgaccaacccaaatacatctggtagggttcagtgcttgtcgggtaaaagcccaaagaaggatacaccagctggtctttaaagaggcgagagagtttctgaagatctttgtatatgttggctacattttcccctagtttttcttggcaaataaaagattctggtagcagctgcaatcttttcacacttctaatctcattgttgatttttagtgtagcatttacatcgatcaggtttcccgaaggcacacaggtgagagtagcggagctgccctcgcagagaggatgcatgtactgcagcttatacaccccgctcaacttccacttctccggcatggacagtgctttggcttcggtgccctgaggtatgtaacctgactccaacatgagaagatgtatcaacactatcaaggcatcattggcatcagaacagtcagctgattgatacaaggtctctaatgaatgtggcacttgcccttccaccgattcactacagagcatgggttctgagggatagaaacctgtgccctctgccatatgcgcattatcttgaattgactcagcttcaaaattttgactaggccctaacatactgtcgtcattccaaacaccagactgggctgcctgtccttggaatgaatcacttggttgttcatcctgtatgctagtctgattggagctggtggccaaagagggttgctcattattctggagtgaagaatgctctgaatctgtggatgaaggtatattaggcgctggaatgtcatcttgaagaatcaaacatatcaagtccccagaaacaatcccatatgaagccaaggtctcttcatctccagtgaggggatccttgtagttcaatgtaattgtaaatcgggtattagaactgtacccccaggtgcacagcagggactgcctcaggtgcgagcgcaaatgccccagcgtcggctccgtctcgggcacctccagcggccaggtccgcttcagaagccgcacccgcagcctcatgacggcggcaggcggcccgaggggcctggacccggaagcggcgacggggacggcggcggggccgagcagctcccgccccaaacggcgacgaccccggactggcgactaccggagctgaggggtagctgaggcgaaacggggaaagagccccgccacagtggccgccctgccactcggtctctggaatagagcgcccgcccctctcctgagggcgcctcctggagccgaccccgagagctggaggcgggcaggcggcttaaaggaaccggcctctcgggtcgccctcgtgccgattacacacccaggcctctcctgt

SEQ ID NO: 128891 - DNA, 337 bp, Homo Sapiens
gaggatccccagttaccgcgttcgggggaaaagcagaagaggatacaccagctggtctttaaagaggcgagagagtttctgaagatcttggtatatgtgggctacattttcccctagtttctctttgcaaataaaagattctggtagcagctgcaatcttttcacacttctaatctcatggttgatttttagtgtagcatttacaacaatcaggtttcccaaaggcacacaggtgagagtagcggagttgccctcgcagagaggatgcatgtactgcagcttatacaccccgctcaacttccacttctccggcatggacagtgcttcggcttcggtg

SEQ ID NO: 128892 - DNA, 786 bp, Homo Sapiens
taccctatgtctcgatcgttatttctgagtatcttttattcgtctctctcctctatgtatggactccttgaagacaagaaatatcccaatatttttatatcctaatttctaggtcagtgcatggcatgctgcaggtgtgcactgatcaccgaactactctgtatctttgtaacttataacatggctcacagaccagcaacattggtattatgcaggagtatgaagaagttcacggtccattctacagttactaaatcagaatctgcattttaataaggtccccaggtattccaaagcgcattaaagtttgagaagcaatattctaaatgttctcctccatgaattcctggcatcctatatatgagtatgtttctcccagaacttcaccaatatagcacagtgctttatatttttgtctctctctgccactctcagactacgggcaacttgagagcaggaaccatccacatgtatgagcaatcataagatgtctgtgttttgcttgcagtacttacctgaggtatgtaacctgactccaacatgagaagatgtatcaacactatcaaggcatcattggcatcagaacagtcagctgattgatacaaggtctctaatgaatgtggcacttgcccttccaccgattcactacagagcatgggttctgagggatagaaacctgtgccctctgccatatgcgcattatcttgaattgactcagcttcaaaattttgactaggccctaactgaaaaaggtaaacaaaccatgcattaacccaataccgacgt

SEQ ID NO: 128893 - DNA, 1164 bp, Homo Sapiens
aataaatacaattccggatttattaaaaatcagggctcccctgctgtgccctcctggcactaaggaaataaataaccagagggggcacagctaggtaaagggggaaaaaatcagatctcaagacagactctttgaactaccctttctccctccccaattcccacccccttatggctcttgggacatagcacctgagcaggcacctcagtccgtgtagagtgtgaccggcaccaaggcatgtctgccctacccaagaagggagacaggccctggggtcacttgtttccagcccttcatgaccccaagacctgttccccacaggggccagggctgaagcaccaattggaggcacctgagggtggtggctgggggagggaggatggggtaacagaacctaggcagcagaagcagctgacgggggtccggccccctctccaagttcagccagtgcctgactgaggtcatgccccatcgtcctttcccctcgaaccccacctgcactcagctgaggatcttccggggcagttcaacagcagcacggatgaagactgcatcatcccgcacatagtttcgctttcgaatgtcctggtgggagatgaacttgggataaccaaagcccagagaactctcatccagggagccccgccacgtgcctggcttctggaaattcttccagtttgggtcggggtggaaggtctcagtgacgtgctgtggtttagccagcccagggtcgctctgatccagcagggagaaggtgacacggcgggcaaaggtccactcaaggagattgtcaaaggcaccaggcagcacacgaatgtacagtgagaggtgtgtgccctcaccactgccattgccattgaggaatgcagacacctgcagcttgtaaccatacttatgtgtgtagaaggctgggaatgacattgaagctgcaggtattcaggtggccgcaggtggaaacctgcacaggctcgcgcatgggcttcccgcacagtgggcacagcagccgtcgcttgggcttctccaggaacttgtagtcgaagccaggcatggcgggcgagcggccggcacgggcgagcggggccaggcacgcggcggccccacagcccgcgcctcgctggagcggcgctcccggctccggcctcgtccgaattcgccacccaggcc

SEQ ID NO: 128894 - DNA, 1160 bp, Homo Sapiens
aggggggttggggcctgttggcctcctccgttaaagcccccccctctccaaaggggggcccaaatttttcccggagaaagcccccccctttcattggcccctataaatagtttcttctccaaatttttggggagagggcccgggaagttttctggcgttgtcgggtttacccgggggcaccacttaatggcccaaaagggggtttcacacttttcccttccccaatgccggtgcccatgcccagtttagggccaccttgtgctttccaaccgggagtttttgaaatgggcagagccacccgagggggtgtaccagctgtcctttcagatggcctggcaggtcctcccgaagccacagtgcccaccccacattggttggggcaggcaacaggcagccttgggcactggtactggtggctctggatggtttcaaagacgaactccttagtgcagtaggtgcagggctgagtgcgcttggggcactcagaggtggcatgctgggccagcagccgccgcatcatgcgggcaccacacttattctcacagtagacactctcctgggggcacataccctcatggctctcataggcctccccactgaagtcacagccacaaaactcgcacttgaggcgccgcttggggcagtcatgctgcaagtgtgcaggtagatcacggcggctcagcttcatggggcagcgattagggcagggaatgacattgaagctgcaggtattcaggtggccctgtagatgacgtagtggcccactccagcggcagccctcctcactgtggatgcagcggataggcaggcccaatacttgtacttccagctccgggtctgggtagatcttggcatagtccagaggaagctggtcctcagggcacttgaagactccttcactgaggaactcctgcaggcaggtatcgcagaaacggtggccgcaggtggaaacctgcacaggctcgcgcatgggcttcccgcacagtgggcacagcagccgtcgcttgggcttctccaggaacttgtagtcgaagccaggcatggcgggcgagcggccggcacgggcgagcggggccaggcacgcggcggccccacagcccgcgcctcgctggagcggcgctcccggctccgggccctcgtgccgaattcgccacccaggc

SEQ ID NO: 128895 - DNA, 565 bp, Homo Sapiens
ttttaaagaaatatgtttatttaaaacttacactgagacaattagtagctttaacagagaacaagatagcttcaggaacataaaacaagctattttacaatgtcatgtctcaaggtgttctaaatgctacatctcctctgacttaaggggagatagtgaagattatattttcagtagagtagggacctggatactactagtccaaaaaacttactgcatcaactcaaactaaatgtttattttacaaataactcaacgagcccaagcacacggatcataaaatcttcaaacacctagcaagcactacttttcacgagtgcattatgcaggaggactaagttaacaagtgctctgcagtctgtgcttcaatgtaagacattcgtagtgatggtcactgagtaagacaaaaagccctacaagtgtaataaacaaaccgcagtgattttgctatctaattaaattacttgaagcaaaatgactactaggttatattactgttattatattacatcacccaactatgagctgttctgtttccaatgaccagaacatacggtataataac

SEQ ID NO: 128896 - DNA, 918 bp, Homo Sapiens
  misc_feature (38)..(38): n is a, c, g, or t
  misc_feature (742)..(757): n is a, c, g, or t
gagggcgatgaagaggaggatgactatgatgatgactntgaagacgattttattcctcttcctccagctaagcgcttgaggttaatagttggaaaagactctatagatattgacatttcttcaaggagaagagaagatcagtctttaaggcttaatgcctaagctcttggtcttaacttgacctgggataactactttaaagaaataaaaaattccagtcaattattcctcaactgaaagtttagtggcagcacttctattgtcccttcacttatcagcatactattgtagaaagtgtacagcatactgactcaattcttaagtctgatttgtgcaaatttttatcgtactttttaaatagccttcttacgtgcaattctgagttagaggtaaagccctgttgtaaaataaaggctcaagcaaaattgtacagtgatagcaactttccacacaggacgttgaaaacagtaatgtggctacacagtttttttaactgtaagagcatcagctggctctttaatatatgactaaacaataatttaaaacaaatcatagtagcagcatattaagggtttctagtatgctaatatcaccagcaatgatctttggctttttgatttatttgctagatgtttcccccttggagttttgtcagtttcacactgtttgctggcccaggtgtactgtttgtggcctttgttaatatcgcaaaccattggttgggagtcagattggtttcttnnnnnnnnnnnnnnnncgacatacgtgacagctcacttttcagttcattatatgtacgagggtaacagtgtgtgggattaggttccattcagcggttttattgcctgttcagttaaattaaaaccctggatttaacccctttccatccctttaaaataaaattattcttgccaagaa

SEQ ID NO: 128897 - DNA, 828 bp, Homo Sapiens
tttttagagttcatgaaaatataaagtgttttatttattctaatccaacaagatatatgcccaaatatatagtcatcaaacataaaattcaggggcactggagatatatataatattagatgattataccaatagctagactttgaactccagttattattaacataaaaattacagtatgactactaaataattagtacagtcaatgtggtaaatacattaaattacaaatatttacatttgaacatagctcattttacaaataaatgttttaagccccaactgtccaactttcactgaaacactaaatgttgctgaacaaaaagtctgcaataaatactccctccagtgagtgggggaaatgattttacatacactctgtgttacaatgaatgtctgagtatatatttaaaactttaaactcctcatgtgattattgaaaccttgtattctggaaaaactcatattgtaaacaaaatttagttatttatttaaaaagtaaatgttctcattatgctaatattattcatggttaggttactcccgaaatcataaatagatttttcactgcccccttaagtttacctaatagttaattttttaagtgaacctttgataattacaattaggtatttttctttgcttatttatgaatatattcctatcataactcaatgaacaacttatatgaaaaagaaacatgtagcccttttctaagcaatatagctgaatgtccagtaaaacgtttttagccagtttgcaactttaaagtcaaactgctgcatattttgaataaaagtagcatagattgaaatgtaatgatcaccc

SEQ ID NO: 128898 - DNA, 1327 bp, Homo Sapiens
tttccgaataaagactacaggaaaacatttatttacatgccctctacaaaatggatttacaaaacatagtaactattagggtacatgaccttgctcctatcttccccattgtgcttcttctctatagaaaatccaatatgaaatgacaaagagtactgtactcagaataagaacttcatctatcataaatgtacacataaatatcagtgaattgtcatactcaagactcagattcaggaacttcttcatcagggcagcagtaatattccacaaaacatatttgtccatcttcatttctaatcatatactgtaatgaaaggaagcctctgttatctgtccgaatagataccttacaagataggactaatgcctttgtagagggtttcagtaaggaaatcttgtatctgttgacttgggtctgattacaatgaaatgcttccatcaaatcagaatctttgggatagtcaaggtgggaacttcctgcatttccaaaagtagataacctgaaataaggcttgtcaggagacatggtaatttgtaggacttcactcgtcatatccaattcagaaaatgcttcacggagcccctctgactgcagaataattttattaataacattggtgctgcagaaatcaaagtccagggtctcctcaggttcctgtgtattgattttgcagactgtcaccactcctccttcttccaggaacagcatcaaagggtaaccataaccttggtaacacattcgaagtgcagttaaagtccctggcataggacttgatccaaaaatagataaacagtctaaaaggacagttaaattaattcgaaaagtaacagactgcttcctgaactttaaactcctgaaatattccagcctgaagtaaaagcatgttgcttgcacacactttgcattttccactgttactttgataccatttttagttgcgaaacacgtggcatgttctcggaaatgaatagctttcaagatagtggagagattcctaacgttgtcaaggctggccacaaggctgtactgatcatcctcgtcttggatctgttgggtcagaaggggcatcgtccactgcgcattcggccccgagggatgctcctggggccaacaacttctcggcggatcgccaaacacctttgcggtggggtctggacgcccgagagcccttctcagcaaagtccctgaagaggagcgaggcggctccgaggaaccgcggaggaagtgaagccagtcccgccactcttcagaccggccctccacctcggccacccccggccgtaatggccgaattcccgggcatatgtccggtaccgtcgactg

SEQ ID NO: 128899 - DNA, 898 bp, Homo Sapiens
  misc_feature (20)..(20): n is a, c, g, or t
  misc_feature (51)..(51): n is a, c, g, or t
tcggaagaatgaaagggaanaaagtcagggtcttaatatcaaagatctttnactttagaggggtgtgtcaacacaatattccatttgtgctatgtgttgcgaagcgtagcagcacgagagaactcggggtctctgatcatgatcattagtgctgaggcatcccaggcccactctaggccgcacagggttcgcgccacctccggcccaggacagctctcagacgctgccagcgtggagctcgacccggctcacaatgcgctgggccccgcagcgtgagcgcaggcgcccgagaggcggcgggggtcgggcggtcggcgcgctccagccgagccgcctccctctctcggcccacacccgcgcggccgcccttcgcctgccggggagctgcgggtggctggagggcgggaagcgaccggccagtctgcacctgcatgacccggtccctcgtgccgaattcggcacgaggggtggctggaggcccatgggaactgggagagccatgggatggggtggctgggctgggcagggaggaggaggtggctggcagggtggcagggctgggagccttgtcgctgactgactcacactcggacgccccgctggtgttggtgccctcggagggggtgggcaccgtggctagggtgagccgcttgcaggctggctggacacggtacttgagggggagaggcccgttccgccgccaggggtagatgtaggcgatgtccatgagggtgtagtattccttcagtggctcgtcctcgtacagaacctccaccttgtacttgctgggcacatccatcttgttgcggagaaacttggcaagatgcatgacggtcatggctgctgggcatcgcaggaagcgcacccctgttttctctttgtccccatccccattctc

SEQ ID NO: 128900 - DNA, 3009 bp, Homo Sapiens
  misc_feature (1035)..(1057): n is a, c, g, or t
  misc_feature (1695)..(1707): n is a, c, g, or t
  misc_feature (2244)..(2266): n is a, c, g, or t
ccccgctgcttggcgcgtctgggggcgtcccggccccgcacacagtgacgctcagtcctactctcgccgcaaccataagacgctatcccgccacgagcgcgcttgtgaaaggaatacgggcggccgggccgcgcgctcatgtgggcgcctcatccaggccccgtccccggcgccggggccccagcaaaatatcggtagggcttctagcagcaactcgtccagttcggtgcgctggccccacacacccccggaggctactccaccgcgtctccacgaagtgggcgggcgccagacaccccctaattttatttctgtgcgccggcacgcgccgggggcgatcgactccacaggcgcggctcgggtcgcggggtgacaccctacagccggccgcggggggtgggcaaataaagttacgtcgacgcgcgtcgggcccccacacccccattagtgcggggcgggggtgttctctcgcgcgggccggacgcgcccctctagacctcgccacagcctccccccctgtcgccccagagggagataaggggggcgcgcgcgcccaccacaagggcccggtcttcccacctcccgccgaaagcgcatcgcctcccccacccaggcgggcttccgcccccgtcggtcgcgcggccagccccgctttacattcgcggcacctactgcgggcggcggccgctggtggtggggataccccggcgggggggtgacagctgctccggtggcgcatttcgcgtctgagagggcctccccctttgaggaggtcctccgatgcggcacccgcccctggggttcggtcccggggaccactctccatgttcgccgtcccagcgcccacccttatgcgcccgaacccccgggcgcgctgggggaaaagccgacccccccctggcaggcggcccacgggggggtcccaggccgcccggcggccccggaccccctctgagggggggagaagcctgccacaggccggtcgccggccgcccacgttttttcccctgtctccccccccgcctcctttcgtcnnnnnnnnnnnnnnnnnnnnnnncggcggcgaaagtatgcagcatttattacaaagccaagagatacagatgtcccagggcaaaggagggtacagtcacaggacctcagacacaggacaaggtgcaaacacagacaagcccatcagggggctcccaaccccacacacctacgctatgatggaatctcgagtctcgactcccgactcctctcagatctatgcacacttgaggaaatctcggtgggcagcgacctgccagggtctgtccctaaggaggtggtccgctgacctctcaaggggtgggggtggggtcagagcttacaggtttctgtcttcttgtgcttttagatgcagttgctctgtcctgaccaggtgaccgggcctcagctgggggtggaggggcaattggaaggctgtttgcctctggcaaagtctgggatctgtgcttgtgtgaggttaacccacccccacttccactctaggccccaggtgagactccaccaccagtcctgctagtgagggttccccggtgagggtaaggttggtgggggtgcagcgcttcacaatgctaaagccttagccctcctccaagagctgagacctctcagggcctgaatcttcttttccacaagataaatgatgcaaaggccacacacacaggnnnnnnnnnnnnngaggcagaactatctattctttgcacaaagtttccactgcaagaggaggaggtgatgcaggtgccacctccaccctgcacttgctcctcagaaccagggataaactgcatttgtaaaaggcactgttcttagcaatttctggacattcaacaacgtggggggcggccactggtcagaggcaggacagcagccaagatggggagagaaacggggagagaaagaaacaattctaactgactcctatatgcagccagttggaatcatgcctaaagctttgggtctgaaggggcccccaacacaccacctgccttgggaaacagcgaggatggtgcagagctttattgagactccagtggcccatccagttcatctccaggcacccccaaaaacagcaaattacacaagaccccccccaaaaaaaatgaacaccattttccacacatacacacacacataaagtttgtttcctgtggcatttaaattaatctggttggtccatagaaaataagtatgtatatttggtttttcctatgtacnnnnnnnnnnnnnnnnnnnnnnnaaacccgccccccacccccaaggtgggaagagctggggaaagtagaagaggtggaaaaaagggcccagaaaaagtggaaggagtggagaggcttggctggaagaagggagagggtccctggcctcaagttaaggggggcacgggagcgccgttgacagtcatcttgcgccccctgctggtggaggatggtgtctgcaggcagttcaagctacccccgttggcagctgtggtggccccactggctgtcgaagggggagtgggggaggtagggtgggtggctggaggcccatgggaactgggagagccatgggatggggtggctgggctgggcagggaggaggaggtggctggcagggtggcagggctgggagccttgtcgctgactgactcacactcggacgccccgctggtgttggtgccctcggagggggtgggcaccgtggctagggtgagccgcttgcaggctggctggacacggtacttgagggggagaggtccgttccgccgccaggggtagatgtaggcgatgtccatgagggtgtagtattccttcagtggctcgtcctcgtacagaacctccaccttgtacttgctgggcacatccatcttgttgcggagaaacttggcaagatgcatgacggtcatggctgctgggcatcgcaggaagcgcacccctgttttctctttgtccccatccccattctccagggggcccttcttctcgtcccggtccctggcacccc

SEQ ID NO: 128901 - DNA, 664 bp, Homo Sapiens
  misc_feature (421)..(421): n is a, c, g, or t
  misc_feature (620)..(620): n is a, c, g, or t
cattttaaacaatattcaagtttattaaacaaataaaaaaagtattataaaatgtttaactttcatcagcttcaaggtttatgttgctcccgaattttgcatacaactgaactttcaaatctgctaacactcgctgaattgattccactctggattctaaggcgtcaatttcttcttgcaaatttttctggaaaaaaaatattttaaattaattctattcaataggatgatttctgagcatctgtgtctgaaataatatttgggaagaattttaggtcaagaaccttctaaacttggacaggcagctaagtaacactgataattagatctaaatgtctgaatgtgggcatttttaattcatggtccatatctgcttatcacagaataaatcaagtttgttttctcagtttctgctgatctnaaaaaatagtaaaaaattactgtctaaattatttcctaacaaagaaccaaatacaaagacttctataaatagtttatcctgggcctgctggcttctaacccagctttttccaacaacaaaaataactatgagactacaggaaatgatagaaactcacaccaccaaccaccaataattaagaagaaaacttatgatccanatctggcagaattttcactaactttgaggcctctggagctaaac

SEQ ID NO: 128902 - DNA, 1199 bp, Homo Sapiens
  misc_feature (234)..(252): n is a, c, g, or t
  misc_feature (266)..(276): n is a, c, g, or t
  misc_feature (377)..(434): n is a, c, g, or t
  misc_feature (500)..(514): n is a, c, g, or t
tgattctccctcccctcttgtattttgttaacgggcgcgccggaagaaataagaacaagtatctttgttctccccccccttgtgttctccctgggggaaaaatatttttatttccctatccggcccaaaacgggcggggatgtcaccctcgcgcgcgtttttgagttctatacccccgcccccatagagagagccccctctcctccgcccggcccgagttctctacaaaaggtnnnnnnnnnnnnnnnnnnnaaaaacgcgcccannnnnnnnnnncccaattatataataaaagtcctcccgcacgccccccttgtgaatggactccccaaataggcgccccaaaaaccctcccctcagtggttgttcttttacannnnnnnnnnnnnnnnnnnnnnnnnnnnnnnnnnnnnnnnnnnnnnnnnnnnnnnnnntttccctgcggcatggttttccctggaaaacacataaaagcccctctcccttttctttaggggggnnnnnnnnnnnnnnnaaaaggttttttaaactgattttaatggcgtggcgtgggggccctagccttgatattttcgttatgcatcattctttggtgaggttcttttttctttttgggctctctcgtccatatgcattgttttgaaaatggtcaagtttccattaaatgagtgccgatttttgccgaagcatgttttgctttccatgtcatttgaagaaggaaaattctcattttaaacaatattcaagtttattaaacaaataaaaaaagtattataaaatgtttaactttcatcagcttcaaggtttatgttgctcccgaattttgcatacaactgaactttcaaatctgctaacactcgctgaattgattccactctggattctaaggcgtcaatttcttcttgcaaatttttctttgcttcttctaacatttcttgcgtttcttcttgagaatggctaatgaagacatcaccaatttgataaggtatcattaagcaatcatcatctgcaagcatgatgtcatcacaagcatcttctaggttttggagttgtttcttttttacttctatttcttccttcagctctgtgattctacttgtattccgtgcaaatttgtttatcttttgttgatcttcgaaagtaacattgacatcttctgcagccgccttcttcatggtggccgccatcttgggactccc

SEQ ID NO: 128903 - DNA, 728 bp, Homo Sapiens
  misc_feature (668)..(668): n is a, c, g, or t
gcagacgtcaaccatcgctttattaaggctgcgagtcggggggctgagtcatgcactccacagacacccccactgctcccaaggtccacttttggatgaccctgaaggcagagactcctgagatctgggccacaatctagggtgagccacccacagtgccctgctggacaggggggtatgcggactgcacgggggggccctcagcaggggtcttcctgcctagggtggggctggctccagtgggtcctgggctcaggcagggggggtggcagggaggcagggacatccccccgccctctggcctatggctttgttgccctattgccaccagcgcagaagcaatgtgctataccgtgaggtgatgaagaagagccccgggagggagcaggcagctctgtgcctggggcctggccagacctcaggggtgctgtggccctgctcctgttccccctcagctcctcccagcaatgggtctcctccagtggaggtcagtcactcagaagtggacccgcagcacgtcttggctagcaaccggccgctggcaggctgtgcacgtcatgggcagggagcgttgcttctcacccaggcagggtcggcacaggaggtggccgcagggcagctggtacaccggctcctttttgaagtagggagaaaatactcttttgcangaggcacattcggggcccaggatgctcccaggctgctctgtcgagcagtccatatgtgtc

SEQ ID NO: 128904 - DNA, 1958 bp, Homo Sapiens
gacaagagaaaaacaaacataaatttattagcgggtatatgtaatatatatgtgggaaatacaggggaatgagcaaatctcaaagagctggcgtcttagaactccctggcttatatagcatcgacaaagaacagtaaatttttagagaaacaacaaaacaaagaaaaagagctttgagtctgtaggggcagcaatttgggggaagcaaatatatgggagtttgccttgtagattcctctggtgctggtctccaggctgacaaggattcaaagttgtctctgaaactcctctttgtcatactgcacatataaaacgtcttttgtttccaacaagaggattttctttttcattctagaattatctccttgataacttgatcagatataggacatgacactgaatagagtccaacagtacaaaaaaaattcagtatgttctagctacttcacaccatgtgtacgcgacagttatttttacagtaaggtattttcgagaaaaatgcattacgtgttttggaaaatagagtaatttcaaaaatatatttgaaatgaaaatctccaacacattagaagatgatgatgttagatgcccatcgtgtgccacaagtggttttttcattatgtaaagcacccgttgaattaaaagaatttgtttttgttcaacctcttcctgaggcccaagagcatatgggcaattcggatttcctgctggaccacaaggttctgttgatattacatagaacgggtattccagacacttcttatgatgaaagtccaaaagtggcatccaatttaaggccccatctttcgttgccattcttcattccgtacaaaggacgaacttggattacatcaactttggacccattggttttgtcgctgtcgtcaactgacagtgattcatcactggtgatgataaaaatgatggaagaagagttgaaagtcacttttttctttggcctgtccccatctttctgtgacatcacaatgggtctgatctgcatttcacttccagctgctggtaggtctttagccggcctctggcacctcagcagtcggaggcacagaagctgcaaaagggatcttcgaaactttctgatcatgaagacataaatcactggattgtatacagtgttcgatttagcaaagaggtacgaaaccaatagatattgttggagtgaccaggtgaccatgaccattaaccaccaagaagcagatcacgatataaggcatccaacagaccaggaaggtgaatatcatttaaaagcacattttggccagtttcttttcatacttgttaaaatcttgatcacttgaattgtctgaagatcttccacacaacgaagcattcgaatggaatatagaatatggccatagcaatgggctatgacacccaggggcaccaccaggcagccaagaaataagaaaagcacaaaggaggaatcgttggcatccttggatttccagtccacagtgcagcctagtccgtgtacgtccaggatgtacctgttccatcccaggagaggtgctcctgcccacgccagtgagtagagccagatgtaggtaatggccctccaggcccaggaaaaattgatcactctggcatggaccacgcgaatgtaacgttcataggccagcacggttagggtggcaatggaaacaatcccgaagaggctgccgctaaacccgtcccacacgcagcccacggtgtcccacacccagccgttcctcaggcaggacacgaaggtaaaggtgaccccgaagagggacaccagcaggtcgctgaggctgatgttgaccaggaggaggtgagtgggagtgcggagccgctggaacttgtagtagaggacgagcaccagcaggttgttgccgacgcccagcagcccaatggagcccagcagcagcgccaggcgctcgtaggtgccggggctgaagaggggcgcggggctcagtgtcccc

SEQ ID NO: 128905 - DNA, 1041 bp, Homo Sapiens
  misc_feature (343)..(429): n is a, c, g, or t
  misc_feature (750)..(750): n is a, c, g, or t
  misc_feature (769)..(769): n is a, c, g, or t
  misc_feature (809)..(809): n is a, c, g, or t
  misc_feature (817)..(817): n is a, c, g, or t
  misc_feature (819)..(819): n is a, c, g, or t
  misc_feature (863)..(863): n is a, c, g, or t
  misc_feature (875)..(875): n is a, c, g, or t
  misc_feature (949)..(950): n is a, c, g, or t
  misc_feature (957)..(957): n is a, c, g, or t
atagaaatacaaagccattactttattcaatttcagaccctcagaagcaatttactaatttattcttcgactacatactgcagcagaaccagcaatacacttgatttttaaaagcacatttagtgaaatgttttctttggttcatccttctttaacaggctgctgagtcactcagaaatccttcaaacatgattaattatgaagatgaaacactagagtcatataagaaataaaaattgggcaataaaataaaatgattcagtgtttcttttctatattgtcaatgaaaaccttgagttctaataatccatgttcagtttgtagggaaagaaaaaataatttnnnnnnnnnnnnnnnnnnnnnnnnnnnnnnnnnnnnnnnnnnnnnnnnnnnnnnnnnnnnnnnnnnnnnnnnnnnnnnnnnnnnnnncgggtatatgtaatatatatgtgggaaatacaggggaatgagcaaatctcaaagagctggcgtcttagaactccctggcttatatagcatcgacaaagaacagtaaattttttagagaaacaacaaaacaaagaaaaagagctttgagtctgtaggggcagcaatttgggggaagcaaatatatgggagtttgccttgtagattcctctggtgctggtctccaggctgacaaggattcaaagttgtctctgaaactcctctttgtcatactgcacatataaaacgtcttttgtttccaacaagaggattttctttttcatntctagattatctccttgantacttgatcagatataggacatgacactgaatagagtaancagtacananaattcagtatgttctagctactcacacatgtgtacgcgacagtnattttacagtanggtatttcgagaaaatgcatacgtgttttgaaataaagtatttaaaatatattgaatgaaatctccaccattannagatatnatgtttatgccacgtgtgcccaagtggttttcattaagtaagacccgtgactcctgcgaatctggctccagggcaatctaaatg

SEQ ID NO: 128906 - DNA, 169 bp, Homo Sapiens
tctttttaaatcaggcatttataaacaagaaagcatacattaattacataaaaatagtttccgagtagcagagtaagcatcatactgtcgttagcagcagcgtggggcacgggcaggggcgggggtctgggtgatgttaaaggtagagatggagctttttccttaattg

SEQ ID NO: 128907 - DNA, 461 bp, Homo Sapiens
  misc_feature (1)..(1): n is a, c, g, or t
ngcagtatactacattttaattacagaacagtctactgtccaaaaggcactaatccagaataggagatacaatgatacaggactcatttgaactattttattcaaaacaatagagcgcttgtttctttgaccatttacatctagaaacaagggctttttgctacagccattacacattgttataaatatgagtcctacgggtgaaggtgcagtatcactctccctagaggaggttcccattagtgggaccactgtggagctcagaggcggatggcgcagtgggtggggcctgggacctgccacatggttggcccgtcagcccctggacacccggagcttgtctttcagcctggcctctggtggttggtttctggccattactggcagccactttcaccccctcttgtgttttagcaccggcaaagtgggttctgagaagctccaggtaactggggctggag

SEQ ID NO: 128908 - DNA, 1356 bp, Homo Sapiens
  misc_feature (61)..(84): n is a, c, g, or t
gtgccaagcttaaaattaaccctcaactaaagggaataagcttgcggccgcctgctcaggnnnnnnnnnnnnnnnnnnnnnnnncatagtcatcttagctttattgagtaaggcatcccaatctctgctaagattcttctaaatgaacggctgatttttctgccaaactatgcattggtcaaagagaaatcaccacctggccaccccattctgtccccctacaggacactaagggttcttacagataaagggacgatgcattcatgcctggagaactaatcacacctgatttctctgggatctaaaataatgtcaaatttgattcactttatgtaaagaaaatcttttttttctgcaaaccccttcagaacaatgctgccatccatgcaagatgtgtgtaaggccacctctgtatactaagaatggtgccccagcaggtggaaggatggcacacctgctgagcgtgggcacacgctgcgttctacatctttgagaccaccggtgggttccgggcatcagaatccagccacttaatgaggatctgattcacctcggttggcttgtccatctgtgtccagtgcccacagtcctcaatgtgtccccttttcaggtggggaatccagtcctccatgtgctgggacatctgaggaacgagcacgaagtccttctccgccgtgaccatcagggccggaatcaggatcttccgtcccaagcttttgcaagcccacttccagttcctttccatgtttcggtaccagtttagaggacctctgaaaccagacttcttgaactgctgcacatagaactggatttcctcctcagtgaccatcctgctgaggctgggctcttctgggctatttacaaaaagtcctcccgcttcacagactttatgcatggataaaacactctcatcgcttgctctgaagaggcttttgaaagtccgactcaggttctgttccagttcagcctcagccactcctggttcttggaagtagagctggtaatccaatactgggttggctttgatactctccaaaggggacatgttgggatttgctggtatgaagggagtattcaaactggccaccgccctcactctctcggggtagaagagagccatgtaccacaccagcatgccaccccagtcatggccaatgaacactgcttgagagaggcccagtttatccaggaaggttaccatctccttacataacgacttccatgcaatattcttctatttcgggaggagcagatgactctccatagcctttcatgtccatagctaggacccggtaacctgcctgggccagagcagggatctggtacctccaagaataccaactctcgggaaatcca

SEQ ID NO: 128909 - DNA, 764 bp, Homo Sapiens
  misc_feature (307)..(337): n is a, c, g, or t
tttaacttttaattgtattgttttgttttaatgcccagatagcacagcattcctcctttacttgccttttcacaagcccgtaatcaatatctgtaaaagttaaaattagtttccacagaaacattgatttcaaagcaaacactatcttaatgagcctaactctggtaaattaaaaatataaatggcactattaagagaggccaaggaaacaatacgtaatatttagcaggatctctaatattctaatttcagaagtgttaaactgtgtaacagttacaggacctatctttcataggcaaaaacagannnnnnnnnnnnnnnnnnnnnnnnnnnnnnntgcctgaaaaattattttaagatcattgtagttctctaattcacttaatttttatgtcattaagatggagtaaaaagaggatttggggcattattaggtttcctcttttgtggggaggcattatttggtgagaatcaccatttaaaaatgcaaaatgttgtgtcactggcttaagctgcagattcctaggccagaggcaatcaatacatcatgatgtaatgtagtcatatagactaggacacttagattagcccccgtgacgcaaggcgtgttctgagtaacagtctcaaattaagtggagactttgtgatcactgcacaaaaggtgttggaaattttaagatatcattagcatcacacttgacttaaagtagtactgagatagcattcacagaaaagattctagacttttccagatttatattttg

SEQ ID NO: 128910 - DNA, 391 bp, Homo Sapiens
ttttaataggaacttacacagtcttttatgtttttttatagccctcaatgtcactgatgtggattctcccaaactcgatactttgtttgtttttatgtccccataataagtctttaagaaaacagggcaagtgagctgaaaatcaaaagaaaacccaccaacagtgaatgcattcagggctatttccaggtctttcttttgaagaaagataagactcagtccagagagcacatctgtgacacaccgtgcctcttgcctttggtgcgtggcagtcatctttggctcatgctgtacattattctacattagaaaactcactgtatgttgctaaataattttttgaaaacaggcagattaataaatggacatcttaatatttgaaacaaaaaaa

SEQ ID NO: 128911 - DNA, 787 bp, Homo Sapiens
ttcccctgtgacctttcctagcctcagacccatctcctgtagctgtccatcacactgacagcttcttcctgagatatcctcagttttctcagccagagagctgcctttagagtccaactgttgtacgtatgtcaccttcactagaaatgtcccatcatcgtgggaggggagcagggcacaggggatggtgtgcattcagagcattgggttgggggcttccctgttccctcagccccagtcgagaggaaagagaatcgggccactgccagaaagagagtcaagcaaacctggaagggcaaatctgagagtgggaaggccaaaggccgaggcccagatttagtattcactagcagcgccttcgggtagcaggatgattccttttcctgcctgtctgctgctggctctcttccctaaggtacaggttggcaggaccacctccgcctacttctccaccatccctagcatgccagcccgttcccagatcaacctgccagtggagtcaggcagtgcactcctggagccaagagggaagggcagggtagagagggtatgtccagtagcctggagctccatggtggcttcatgcctcccttctcccagctcaggtggccctgagggctccctcggaacagtgcctcaaatcctgacccaagggccagcatggggaagagatggttgcaggcaaaatgcactttatagagattttctattgctgggaaggtgtgtttctcccacaatttgtttgtgaatattcacttgttttataaatgtctgacctgtcttgagt

SEQ ID NO: 128912 - DNA, 381 bp, Homo Sapiens
gctatgaggctgattcctgtttggatttttgtcctcacgtgtatcattaagctggcctttgggccttttcctttctacctcccctgtgacctttcctagcctcagatctgttaattcttttggccccagccctgtccctcactgtcctctgtccttggaccagaaccctggggtcagacccatctcctgtagctgtccatcacactgacaggcttcttcctgagatatcctcaggttttctcagccagagagctgcctttagagtccaactgttgtacgtatgtcaccttcactagaaatgtcccatcatcgtgggaggggagcagggcacaggggatggtgtgcattcagagcattgggttgggggcttccctgttccct

SEQ ID NO: 128913 - DNA, 692 bp, Homo Sapiens
ctaatagtattaggatgtaagcaatattaagatggtttgtattattttttatacactgtgtgcttttactttttatgtaaactacagcaaaaaactgattttttaactaaaattgaatggcgtttatcttaatgaccagttattgaccaaagtgtactcagaagatgttattatgtcccaatctaaggaatcctttaatttggggattaattttacttacacatgccatttcagtttcagttgcctcattctattacatcattcttgtcaagtctaagctttatcatgtctgaattcttttaacactgaatctgtgatgtaaaaatgtatgatgtgccataaattttattcataataaactaagttatagcctattgtaatctgtaaaacatttcttgtaaattacctaatttattttttcatttatgtacagtatcttatgtaaatttgaaaaatgtttgccatggcgcattctgtaaacattcccgtattcttttccttaatgcttatttgcatgaaggtaacttgggttttgcttgtttgtattggataaccattaagccaacttcagtttctctgcctttttttctgtagtttaaccatttctaattttgttcatattctaaatagatgttagaatcatactttttattttctactttctaaataaattatctaagttgtttactaaa

SEQ ID NO: 128914 - DNA, 1840 bp, Homo Sapiens
  misc_feature (53)..(62): n is a, c, g, or t
  misc_feature (93)..(101): n is a, c, g, or t
  misc_feature (182)..(191): n is a, c, g, or t
  misc_feature (221)..(261): n is a, c, g, or t
  misc_feature (298)..(308): n is a, c, g, or t
  misc_feature (417)..(430): n is a, c, g, or t
  misc_feature (443)..(576): n is a, c, g, or t
  misc_feature (1685)..(1694): n is a, c, g, or t
gccccccttttttcccctggggggaaaagttatttattcggagaggcgccaannnnnnnnnncggccccgcggcggatttcgggtatttcttnnnnnnnnntttgggaaggggttctccacttttgcgcccggaaactttttagtaaaatttcacccccccttttctcataaaagggccccnnnnnnnnnnttcaattatatttggaggcccgtggggggnnnnnnnnnnnnnnnnnnnnnnnnnnnnnnnnnnnnnnnnnttgggttttttccaagcctctgggttccccggggggnnnnnnnnnnnggggaattccacaccttttttttcccccggtttctcttgaaaaaaatttggcccctttcccttcccttttgggccccgccccccaaaaaaaggttttaaaaaatttttnnnnnnnnnnnnnncgccccaaaatcnnnnnnnnnnnnnnnnnnnnnnnnnnnnnnnnnnnnnnnnnnnnnnnnnnnnnnnnnnnnnnnnnnnnnnnnnnnnnnnnnnnnnnnnnnnnnnnnnnnnnnnnnnnnnnnnnnnnnnnnnnnnnnnnnnnnnngaagtttttgctataaaacatttaatgttaacctacaatacaatgtaaacttttatgaaaaaaatttaaagtacactagatttcttcagtaaattatcacatgactattcaggcgcagtacaagttggggcactgcatcctttgtggatggatttccgttgctgtgttcctcacaagtcctaaaaaaaccagttgtagagcggagctccttgttcaagcaccggataatgatgcccctgattttgcattctgggggttatcgctccttctcagtcattttctgaaactctttgcttggccttggcaccattagcaattttcacaactgctcaattgaaggttctaggttctttttagcttagtttttaagagacaagtgttatcctctggccatctcttattcaaatatcatggtggaggcaagcaaggagaaagaagtatttgctagaggaaattctgcagaagtggaagaaaagaccagaagggctccactgagggtacaaatattcaactgactccaatcgagtgtctttgcttggtcacttcccatggttattcggctcaatctacaacttcagtcgtgggagtgcagaacaaaacttgaaacaagtgcttttagttgatgatttgccatttggaaacaacagctgaaatatcccagaggtgatgtggaaacaagagcaaatgcttgcagatcactggcttctcagtgtcttctccctcgcaggtctcatcaaaatcccaaaagtccttaggagtaacacagattgtactggcattaagtgacaaaatgtgcagcctgtatttgactgaggaggaaaggaaatggcacctaggcagcagcgctagggtcagcaaggagaccggcctagggtctcagtaaagcagaactgtttcaaatgggactagaccggggcatgtgcttccggtgaatcctcttgaaacctaaattaaatgggaaggcccgccctaacagtttgtacttgacataaagggagaccccttcttaatattctggcagctgacttccttcactgaacaactattatcaaaaggcgagaggcataaagtgcacactgtagaataagaagagactgaattatgatggnnnnnnnnnntcgtaacttccccaaagaggtgtggacagtgtacctagcctcacaaaggtccttaataccctcctgtgtgctgccagggaacagctgtgaattccagatggggaggaaggctctgacttaagtggaaaaattcctctgcatggttg

SEQ ID NO: 128915 - DNA, 863 bp, Homo Sapiens
ctactttaccaaaatctgtctttattaaagtgaacaaaccattgagagcactacccaaaacttaatgaatgatggctgcagttggctcggcttgcctactttaaatgaggcaaacatcagctcctagtgccattccccaccctcatgaccgcgtgccagaagtcatcatcttcacatttgtagacgttgttctagcggaagacaggctttgcagatttcggtgcttttagtgaactggtgttttccgtaaactttttctgagcagcaagggataagaattttttttcagaaatcttagaattggatataaatgttggcagtagacacaaccaataaatatcatacaatttctcaaatgaaaaagatttcccattatgaattcctttgctatagacattcaaacaccccaagccaagattgagcctcagtcccatagtcacgagattacagctggccaatatgagggtgtcaggcaatgtgcaagggggcgaggtgagaagcaagaaagcaaagtggatcacgtctaatctatgctgaaggagaacttcaagtaagggagctccgtggcccgggacctggctgtgaacaccctccgctgggagcctcagtggtcagcagtggccacagcagtgcgagccactgcaaaagcggcatctactcccccatcctcaccctgcctggcatcctctgcgtgagatgagcgctgagagaggggttttcttctgctgtctagaaacctctttgcaaaaggtctgtgactttgcacacttcgtacccaaatagatgaaaacaataaataaggaccccgtggcaccctccggacgcgtgggtcgacgatatcccggaaattccggaccggtacc

SEQ ID NO: 128916 - DNA, 1263 bp, Homo Sapiens
  misc_feature (1115)..(1135): n is a, c, g, or t
ttttttgttagaaaattaatttttaattgtgccgctttcaaactatactgaattttacatttctaaagatgtaaaaactcaactaatagaaaatatacatgaccattctgtctacatagataacagaatctatgaatcttgaaactaagtacatcaatttcaaaaagtattggtcatttaaacagaatcaacaattcggattgacaagaactgttcaaattaatttgacctgtagattctgagccatgtttttattaaagtcagatctattcctaaatacaaaatattttgaagatttattaaaactgaatattacaatgcaaggtaaattaagactaaaggcacataaactttggtcccacctggttgtcagttttagaaaactgccacaaaattaatcttcctgcatattttcgcagtacactttctttatctttgaaaaatacatgcaccagttcctgaactagctagaccagtctgcacatgctcagaaatccacaaccatattccaaatcttaattacaaactaaggatggcaatatatatttaaatgcacgtaagtcatgtcaacttcaaaaacatctacgaaaaatattcagccacaaacaagacattacttagtgctgacatttatatgatacgtcccacaagagtgtgtacgaaaaggttaagattccacaatgctttccacatagggctcaaacttacagaaatcactttgttgtcttaagaaattatactctgcatcttgttaattttaactaaatgcctacattcataactgaatctagaccagaattgtgagatacaaaaggccaatgttgttttcaaagcaataaagcctaaggtagtaaaaactaaaaatgctgctttattctttcaatatcatgtatcttatttgattaaatagaaaaaaaggtgacaagccagtaattcaaaataagttccaagcaggagaaacaaaaacttaacctttttacacacccctgcctaaacatattttaattcccatataacagtgtgccctaaacaaccaattccttttttctagtaaatgcacaatagcaacactagttttcctttttaaggcacgtatgtcaactaagttgaaaggnnnnnnnnnnnnnnnnnnnnngcaaaattaaactgaaattttaaacagacaaaatggcttccctatagaacagatgaaatatagcagttaacaactctgcctttacatatgccatttcattttataaccaaggaatgataacagcatgg

SEQ ID NO: 128917 - DNA, 602 bp, Homo Sapiens
tataacaactgaatttattatagcataaactaaatacaaagctctgaataaataatcgtttttttcagtcatcacatctgcaggtgtgtatgtgaacatttccataagcacataaggatacagatgtcacagacatatttagtgagggaagcccagagtcacggttctctgtgggtaagagctagatgccttgagatgaacatacagggcaccgtctcaaatgatttggactatgtgactgtgttcgtttctccttcagactctgctcaagaaagtgtattgataacaggttgctccgccctcaagtttagggcactctcccacgctctttcatgcaaagttttttaacacctctctttaagaaaattcacaaatcagaagtattaccccagcttcaatctgacaatcaggacccctactctgcccctctttcctaggatcttatctccattaggggtcccctttcaaggtacagggcaattgagtctatatgtccacacaatcggatctgacaaggctgggagccctccctccagagcccatcctcccatgagtgtctgtctggtattctgtgtgggtagtagtagaaaatagttcacatc

SEQ ID NO: 128918 - DNA, 1273 bp, Homo Sapiens
  misc_feature (78)..(78): n is a, c, g, or t
  misc_feature (81)..(81): n is a, c, g, or t
  misc_feature (104)..(104): n is a, c, g, or t
  misc_feature (130)..(130): n is a, c, g, or t
  misc_feature (208)..(208): n is a, c, g, or t
  misc_feature (230)..(659): n is a, c, g, or t
  misc_feature (677)..(699): n is a, c, g, or t
cacgttacgtagcacgtggtacgggtgtcaaaaccactgacgagctacccgatggtctacgctggttggagcccacgntcngaggagagcgacagttcgtagcngcagtcggacagaggccagaggagtnccaggggaaccttgttcttatgtctgtcggttcgcacctctgactgaggtcgatttgtgtgtcgtcagggggcgagcntaggaaacgccagcacgcgccnnnnnnnnnnnnnnnnnnnnnnnnnnnnnnnnnnnnnnnnnnnnnnnnnnnnnnnnnnnnnnnnnnnnnnnnnnnnnnnnnnnnnnnnnnnnnnnnnnnnnnnnnnnnnnnnnnnnnnnnnnnnnnnnnnnnnnnnnnnnnnnnnnnnnnnnnnnnnnnnnnnnnnnnnnnnnnnnnnnnnnnnnnnnnnnnnnnnnnnnnnnnnnnnnnnnnnnnnnnnnnnnnnnnnnnnnnnnnnnnnnnnnnnnnnnnnnnnnnnnnnnnnnnnnnnnnnnnnnnnnnnnnnnnnnnnnnnnnnnnnnnnnnnnnnnnnnnnnnnnnnnnnnnnnnnnnnnnnnnnnnnnnnnnnnnnnnnnnnnnnnnnnnnnnnnnnnnnnnnnnnnnnnnnnnnnnnnnnnnnnnnnnnnnnnnnnnnnnnnnnnnnnnnnnnaagaattcggaacgaggnnnnnnnnnnnnnnnnnnnnnnnacgaaaccaggtttattaaaatttctctacaagtcagaaacggccatctcactgttcacatatatacacgtatgtacaggaagaacctagtgtttctagctttcccggcagaaggccctgccagcccagagtccttagtcggataatgtatcacagatacaacagtcgagcaaccacgagagcgttagtgcgacagaggcctctgtcctccctcttctcaaagtcccatgattctgtcaaggtaatattgccaataatcattcacatttcacgtggttttagacacgcaggttattcagacagacacagacaacaaaacaagcctcaaagccagaacaaaacagaacaaaacaaaatcgaacataggtataaaaggtaaaatatatgtacaaagtacacagtacgtgaggtatacacggcattctcacaatgcatgttagtagtttgcctaggcatagcccttaaagatgactgcctgtttttgtgccatttctcaaaatacagtatattttgtttacccgtttaaccacctgatttcagcactgtccaagacagttactgatatttcatctga

SEQ ID NO: 128919 - DNA, 1267 bp, Homo Sapiens
  misc_feature (107)..(126): n is a, c, g, or t
  misc_feature (132)..(162): n is a, c, g, or t
  misc_feature (222)..(231): n is a, c, g, or t
  misc_feature (616)..(624): n is a, c, g, or t
  misc_feature (953)..(953): n is a, c, g, or t
  misc_feature (1206)..(1206): n is a, c, g, or t
cagtcgacggtaccggacatatgcccgggaattcggccattacggccgggggacatggttgtggagggttgtgggtgtcgctagtacagcaaaattaaatacataannnnnnnnnnnnnnnnnnnntttagnnnnnnnnnnnnnnnnnnnnnnnnnnnnnnncccaccccagttgacactttaatatttcccaatgaagactttatttatggaatggaatgnnnnnnnnnncagctattttgaaaatatatttatatctacgaaaagaagttgggaaaacaaatattttaatcagagaattattccttaaagatttaaaatgtatttagttgtacattttatatgggttcaaccccagcacatgaagtataatggtcagatttattttgtatttatttactattataaccactttttaggaaaaaaatagctaatttgtatttatatgtaatcaaaagaagtatcgggtttgtacataattttccaaaaattggtagttgttttcagttgtgtgtatttaagatgaaaagtctacatggaaggttactctggcaaagtgcttagcacgtttgcttttttgcagtgctactgttgagttcacaagttcaagtccagnnnnnnnnngtggataatccactctgctgactttcaagattattatattattcaattctcaggaatgttgcagagtggttgtccaatccatgagaatttacatccttattaggtggaatatttgggataagaacccagacattgctgatctattatagaaactctcctcctgccccttaatttacagaaagaataaagcagggatccatagaaataattaggaaaacgatgaacctgcaggaaagtgaatgatggtttgttgttcttctttcctaaattagtgatcccttcaaaggggctgatctggccaaagtattcaataaaacggtaagatttcnttcattattgatattgtggtcatatatatttaaaattgatatctcgtggccctcatcaagggttggaaatttatttgtgttttacctttacctcatctgagagctctttattctccaaagaacccagttttctaactttttgcccaacacgcagcaaaattatgcacatcgtgttttctgcccaccctctgttctctgacctatcaggcttgcttttctttccaaaggttgtgtgtttgaacacatttctccnaaatgttaaacctatttcagataataaatatcaaatctctggcatttcattctataaagtc

SEQ ID NO: 128920 - DNA, 1725 bp, Homo Sapiens
aggggtgcaaaagatgttgtatttagttgttaagtggaaccggggttcctcacacatccatcccacatagcacagcccccagcctgatggcctgccgtcccctagaggctgagcatggggtcagccacccctgccctggctcccaggtctcgctctcgctgctttctggtaccgcaagggctccaactttgccgggcgccaccgctgccctcacaggatggcagttccgtgcgaggccgtcagttgctaggtgccggctcctccttctccacccagctgtcagccttttccaccacccgctggatctccagctgcaggggggtcagacgcctgcggagctcctgcagcagccgctggagctggctcttctgtcgctccgccgtccgggcggtctcctcggcctccgccagccggactcgcagctcctgcatctctgccgccagcgtcttattggttacttcagtggctgagaaacggttatggctctcctccagcttcagctccagtgtgtggatcttgttctctaggtagagccggccgctgtcctgctgctccgcgcgctgcagcaggctccccacgttaatcaggctgccattgtgggacaccaaggctttgtgttctgtgggggcagcacctggcttcgtgcttttcccaggagggggcagcaggtccaggtttccgaagagcactcctcgggaaggccaccatccaggccctcctggcggctgtactgaaggctccggtactggcagatgttctgggtcaccaccctgctgaccagctgcttggcctgctctgcactgagccggatcccaagggtaaggaggatcctctctaagtctcgccggtgcaagtagccacaccaagttggcatcaaagaacacaaaagcaagcagacagtctaaggggagcacagcagagggatccagctccttgggcatgtcctgaagtgaagagaactccatctctgactggtttgaggcaacggaccggacctccgaatcctccagctttgctcctgcaaactcctcctctgccatcatccctcagaagcaacagttctgggtccagggccatctcacacaggtcctcagaagcctcgccccggggtttttcttcttcctctcccccagaagagagtggtttgggcaaaagcccatcctccttcagcggggcctctgactctgtagccgggccctcattgtgtgcctcatccttgggctccttgaccacctcctctttgatggcttcttcctccttggtggcttcttccttggccgcctcctccttctcaggttcaggtggggacacgaccttttcaggaaggctcagtagcatcttataaactctatagccaaaatccctctggagcatctccagaaacagctcggccagcaccatcacctcaaaagagatcctttcctttggcctccgatcctccacaatcccatggagggacaggtttacacagccagggcgtgcgatgacagcaggttctagggggggtggaggggcctctgggagatcagtgtccgtttcctgctgtgtggtggcctctggagtttctgcgttccgtctagaagtgtctgctgcttgctccaaggcatcaggtgcctgttcagtaggctccgtttccccttgtgcctcctgggttgggggagctgcctctgcagctttctgctggcacagggcctcccactcctccaaagtaggcatgatggtcca

SEQ ID NO: 128921 - DNA, 986 bp, Homo Sapiens
tccctctcccttttactccgcgcccccccgattgctctggttttgtcccttcttttgctttttccttgggtgtggctcgtctgtttcgtttgtttgtttctctcgggtctgttggtgttttgactcttggttttatttttatgacccagccccttttatataaataaattaaaccccaactttatatacgaagtcaaactgaaaccacggattatggaaagaggcaagaattatgggtaacaggggagaaggctgggccagagccaataccacattctgaacacaggagccacgggaaagaggtgctggtttcttctggcaagaccggggtgactggaacgcagtgttctactggcaaacccagcccaacactgagctctttctagcatggactccattcccgtgatggccaagggagacccttcccccagaagcctgtgtccggaacctagcagagcctgtgccatccggaggagggggctgcttagccccagccaggctccatgtcttgctcttcaattccgttcactgacatcagaccttgtcccacactcgaaaagcctttttctcccctgtcttattctaagctggaagaggacaggagaaagtcagcacaagactaaaagggccccaggagaaataccaaggttgagggcaaaatgacattctaggggtgcaaaagatgttgtatttagttgttaagtggaaccggggttcctcacacatccatcccacatagcacagcccccagcctgatggcctgccgtcccctagaggctgagcatggggtcagccacccctgccctggctcccaggtcttgctctcgctgctttctggtaccgcaagggctccaactttgccgggcgccaccgctgccctcacaggatggcagttccgtgcgaggccgtcagttgctaggtgccggctcctccttctccacccagctgtcagcctgtttgaaacagatgatgtacccagaatcggg

SEQ ID NO: 128922 - DNA, 640 bp, Homo Sapiens
  misc_feature (531)..(541): n is a, c, g, or t
  misc_feature (543)..(576): n is a, c, g, or t
ttttcatttctttaatatagaattttatttctggttatagaaacaaatgctaagaggagaaacaaaacttccccatccacatacaacaatttaatagataaaagaacagttaaaataaatgaaaaacaaaaagtagaaattttaaactttgttatagctttaaaacattaacgtctgatacaattagaaatcacattcagatctcaaactcttaaaaaaaagtatggctccttattaaaaaaatactgtatcccacttgaaatgaaaacacaggttgcctgctgttgacatgggtggggctgtcccttcctctggtgtcgtgcgtgccccctcccggtgctggggtgcagccacacccccccgccgggcgcccaccttcactcctccagggtgagacacgcaaggtgacatgaccagaacttcacatccaatgctctagaactgacatttccacttcataggacactgctgctttttaaagcactgattatcaaacatgttgtgaaaatactttagacaggcgccactgtnnnnnnnnnnntnnnnnnnnnnnnnnnnnnnnnnnnnnnnnnnnnncgaacaacacccgcccctccccaaattatttttacaggagaataatcgttcagattaaaacaac

SEQ ID NO: 128923 - DNA, 757 bp, Homo Sapiens
  misc_feature (21)..(21): n is a, c, g, or t
  misc_feature (24)..(24): n is a, c, g, or t
  misc_feature (716)..(717): n is a, c, g, or t
  misc_feature (734)..(735): n is a, c, g, or t
tggttgttgatggcttccatntcnggagacaaagaaactttatttatacaaaactccaccccttctgttccactctcctcagcaaacacagataacaggtgatgaaactaaaacacacagacgagcattactcaacccaaggttcccgccttccctagcacctgaggtctgggccaacatgcagggtaactggtgccttatgcctgctgtctggattgcccggcccacagggtggctgagcatatttattctgggggttccatgcatacgaggagcccccagccatacagctgggcatgggtgtttggcagcaaattgtccctgctttagtcatagcaatttttcatgtcctctgttgctccccttaactgaacaccccttgacagccgggattctgcctccagcatcaacctaaggaagctctgttaaatgaatgagcacctctaggcaatgaccaccctccctgaagttcaatttctcatcgatttcccaaggccgcccaagtcattcccttgatggctgtgttagtttctaggctcggcttctagttcagtgagacagaggcaggtgggcctccatgtgggccatgatctggtgggcaaaacatgccttgggcagttacaacagggacagtctgctgcagaagctgtggagggagcagccaacaactcgttcacaagtcgaggtgcccaagggcctcagttttcctgcagggnngctgcgtggggcacggnngaccagtgcctctactctcatg

SEQ ID NO: 128924 - DNA, 2313 bp, Homo Sapiens
  misc_feature (942)..(1036): n is a, c, g, or t
  misc_feature (1090)..(1190): n is a, c, g, or t
  misc_feature (1192)..(1209): n is a, c, g, or t
gcgcagtgagaataatgtttattgagaatggctcattacaaacaaaatatatataaaatctctgcaatgcaaaagatccctttcatccccgtggctagaatgaacaaagcccaactgtcccacatggcttcaggtgctgtgctggtccccagcatgtgaacaggctgggcagctgtcggtgtcatgtgctgtgggcaaaagtccctgatgtccaggctctctggctccattttcatgacttgtgcaagaatgcaacacagtgtgtcttacatcctgcctctgtgaccctccctaggcagatgagtcttgagaatgggcagctttctcattcatctttcaggaaggtgacctttaacttgtggcatgccctgagaagccatcctctgggaccagagactgagtgtttctaaacattttggctggactgaggtgctgttaccaccctccatgaaggccactccctagtgacagccctaacagcatgtgcactgtctaaatcacatcccaccatcctgaaaacttcatttcctcccactggtttccttcatacagctattctaacgattttaccagaacaccacctgaagatgcccacaccccacagctgctgtgcatgggtactcctgggccacctggcattaaggcaatggagatgagaccagtctagagccaacaccggtctctgaaacccagaagggctgcccaactaacagcacctccctcttggccaaaggctttgtctagggttgagaagcaatttggctgggtggtctcactgccctcctaaacagagcccacctctgcccccagagtcatctgtgctccaaagcaatgggcgggggcacagctgccaccatgccatgccttgggcattggaagagcaggacccaggagtgcagggatggtatcactgttgcccctttgaaaatgacccattttccnnnnnnnnnnnnnnnnnnnnnnnnnnnnnnnnnnnnnnnnnnnnnnnnnnnnnnnnnnnnnnnnnnnnnnnnnnnnnnnnnnnnnnnnnnnnnnnaaaaaaattagccgggcatggtggcatgtgcctgtagtcccagctggtgggggnnnnnnnnnnnnnnnnnnnnnnnnnnnnnnnnnnnnnnnnnnnnnnnnnnnnnnnnnnnnnnnnnnnnnnnnnnnnnnnnnnnnnnnnnnnnnnnnnnnnncnnnnnnnnnnnnnnnnnntccatttcctttagtttttttaggtgcagactggggttcaagacccagctccaccactgtcctgagcagactcccaagactgggccagctgcctcgtcagctgcctcgtctgagaggtgaaggggcaggtacttaaaccactggccaagtccctttctctgaaaaagaacttgagctggctaactgccctgtgcagaggtgttagtgggttccataagtaccttcactcttgcctattactggttttaccttgaaggtgattaccccctctactatggaaacttaaatctcaaagagagcaactcctgaccccaacctcccctgataagaggaaaggaaagagctctatgctacttgctgtgttgtaagatcctgggcaggaacccctcttctccatcaagatagacaagacccagtatcctgtgcaatctggtgtgaagaccaggttgggtgggcagctgcaggctgccccagcccgttgctttggagcacaggccttagcagccaaccttaaaggactaggggctccccacactcaagagggcagaccctgctgtcaggattttggctggtgtcaggaggcctcctgggtgcagggatccctctggggctagggcagctgtttattcccagagcactgctgccagccacgaggcctaccagtgggatctaggcccgagagccctccatctgacagagctggaggacctggagggctgtggggggtttaagagtctccagcggccagggctctgcatggcagggcagctgtgaggtgtgtctatgctgggtggcaggggtcagatgccctgtaatgagccacagaaacttgggcccatgggtaggcaggtggtggtggtatcatcaaccactgggcacaggggcatatgcagcacttccaggagagaggggcctggaggggtcctcagccctgggggattggggtcagctatgctgtctccagacactcacatactgtcctgacaagtggcatccgtcaagcaacttctctctccaggctcagtcctgcggtctgtggggagaccattgccatggatctcctcgtgccgaattcggcgcgccgtcgacttcatactctctccc

SEQ ID NO: 128925 - DNA, 1429 bp, Homo Sapiens
ccgagaccaccggttgcgccctcgctttccgagagggtgctgactccggggtgctgggctgggctcccgcccccgccgctgttctgtactcctcgccccagtcgatgggggcgccctcgccagcagtcgcagttggtcctgttgtgcatgaccatgctgtcccggtagagttgtgcttcctctgcaccgcggcctccttcacagcctgcaggatgtccttcatgacggtctgcagcaccacctcctcgtacgtgttttccaccaggatgaacctggcaaagtcctcgaagatcagctcctggaaccggggcagctccgacttgcaggtaggggccagcttcttgagcaggaacgggatgctgatctgcagcagcgcctcccggaagaacctcttccgcacagagctgctgtcgtagtcgtatttcttcagcacccgctccaggacccgctggatggacttgcacagctcctccttggtgggccccttccccagctcctggtgcaggagggtctcgaacgtatacacggcattgtccatttgctcccgcatgtggatctgggctcgctgcttgaacacggacgtgctggacacatcaaatcgctgctgcagcccgtccagtcgcagcgactccatcttctcatagcagctctgcatcttcagggggtggtacgccagccgggacagcttctccatgtactcgcccagcttgtcaatgccgccctcgttgatgacgttcaggttcatgtccgtgacctccttgaagaagacatctcgcacctcagtgaagccctggctggtggggaccatcagggcctccaggatggatgggatgtagggctggacatggttccgcacgcacacctctgccttggggaggatgaaggctcggatcttgctggcaaggtgctccttggaggtgataatttggtccatgtcagttcggatgacggcctgcatggccggctgcacctgctgcaccttggacagcacctcctcgaagcgcgccttggcctgctcgtacaccatgtggtacacggcgtccgagatctggatccactgccgctgccgctcctgcggtttccccttcagccgcgggccgagctctgccttcagctcagggcccagctcctccatcaccaggttgctcaggatctgcacctcgttcccacacagcatctcccaggtgccgtacagctccttggactgtcggtacatgcggatggcatctgtgaacgcagggccctctaccttggagtcctcagggattccattgttgcagtgccggatgcagtcctgcagcacagcctgccacttgtcctgctcggcttctgtcatcatgcagaagtagtagtgacgcgcataaggatgccagaggatgagcgggaactgtgcctcgtgccggattcgccacccaggcctcgctacctt

SEQ ID NO: 128926 - DNA, 1495 bp, Homo Sapiens
  misc_feature (47)..(47): n is a, c, g, or t
  misc_feature (73)..(73): n is a, c, g, or t
tccctctctccaggaaggatggcagcacccatgaggggatggagccnacagaaggacaggaagggagggcttntccagccccccagcagtgtccagcccttggcacaagcaggaaaaccccaaaaccagccccctgcatctgagatcatcccacagaagagaaaacagggagcaagaaagtgttgactgaacccaataaagtgactcaggtgggcccgctccctggcggtgccacacagccctgccccgcctccacccacaaggcacagaccagggtgccctccccagagctgagcctgcctgggtccggaagggaacggcctgtgccatgtgcagcagtcagggacccactggcctagaactcagtctgcacccctgcactgtcctcggtggtggtgtggagggcggggtggctgctggggctggacacctgctctccagtctcctggtcgctgggcttggggggcccaaggtccacaacctttccaggcaggagatgctggaggggtgaggcaggcggcgaggaggcctcgggggcggccttaggctggggactctccccagcgggggccccgttgagcagggggccggctggtggggggctctcaggccgcagaccttgggccagcaggcctcggatctcagtgacaccgtccggggacgcaggtggtggtgactcagggctagcctcaaagggcagccccacctcctcatcctggaccacagagaccacctgcttggcgcgccgtcgcttttccgagagggtggctgactccggggtgctggggctggggctgccgcccccgccgctgttgctgtactcctcgccccagtcgatgggggcgccctcggccagcaggtgcaggttggggtcgctgttgtgcatgaccatgctgtcccggtagaggttgtgcttcctctgcaccgcggcctccttcacagcctgcaggatgtccttcatgacggtctgcagcaccacctcctcgtacgtgttttccaccaggatgaacctggcaaagtcctcgaagatcagctcctggaaccggggcagctccgacttgcaggtaggggccagcttcttgagcaggaacgggatgctgatctgcagcagcgcctcccggaagaacctcttccgcacagagctgctgtcgtagtcgtatttcttcagcacccgctccaggacccgctggatggacttgcacagctcctccttggtgggccccttccccagctcctggtgcaggagggtctcgaacgtatacacggcattgtccatttgctcccgcatgtggatctgggctcgctgcttgaacacggacgtgctggacacatcaaatcgctgctgcagcccgtccagtcgcagcgactccatcttctcatagcagctctgcatcttcagggggtggtacgccagccgggacagcttctccatgtactcgcccagcttgtcaatgccgccggacgcgtggtcgacgatatcccgggaatccggacc

SEQ ID NO: 128927 - DNA, 867 bp, Homo Sapiens
agagtatgaagtcgacggcgcgccgaattcggcacgaggtgcgcgtcactactacttctgcatgatgacagaagccgagcaggacaagtggcaggctgtgctgcaggactgcatccggcactgcaacaatggaatccctgaggactccaaggtagagggccctgcgttcacagatgccatccgcatgtaccgacagtccaaggagctgtacggcacctgggagatgctgtgtgggaacgaggtgcagatcctgagcaacctggtgatggaggagctgggccctgagctgaaggcagagctcggcccgcggctgaaggggaaaccgcaggagcggcagcggcagtggatccagatctcggacgccgtgtaccacatggtgtacgagcaggccaaggcgcgcttcgaggaggtgctgtccaaggtgcatcaggtgcagccggccatgcaggccgtcatccgaactgacatggatcaaattatcacctccaaggagcatcttgccttcaagatccgagccttcatcctccccaaggcagaggtgtgcgtgcggaaccatgtccagccctacatcccatccatcctggaggccctgatggtccccaccagccagggcttcactgaggtgcgagatgtcttcttcaaggaggtcacggacatgaacctgaacgtcatcaacgagggcggcattgacagctgggcgagtacatgagagctgtccggcgggctacacccctgagatgcgagctcttgagagatgagtcctgcactgacggctgcacacgattgattgcagcagtcgtgtcacacgagcagataatgcggagcatgacagctgatactcaactctgccgactggaggcacagagg

SEQ ID NO: 128928 - DNA, 1500 bp, Homo Sapiens
  misc_feature (1375)..(1436): n is a, c, g, or t
cattggagagtttgaaatcacattctttacccatgattggtgtgtaaaagatgcgaccataatgtgtgagcctctatacaggatcattttactgcagtatcatttcaggggtgtacccaccggacagttttccagtattgcccagttgtcaagcgccctcgtgagacgttcaggttcatgtccggacttcctgaagaagacatctcgcacctcagtgaagccctggctggtggggaccatcagggcctccaggatggatgggatgtagggctggacatggttccgcacgcacacctctgccttggggaggatgaaggctcggatcttgctggcaaggtgctccttggaggtgataatttggtccatgtcagttcggatgacggcctgcatggccggctgcacctgctgcaccttggacagcacctcctcgaagcgcgccttggcctgctcgtacaccatgtggtacacggcgtccgagatctggatccactgccgctgccgctcctgcggtttccccttcagccgcgggccgagctctgccttcagctcagggcccagctcctccatcaccaggttgctcaggatctgcacctcgttcccacacagcatctcccaggtgccgtacagctccttggactgtcggtacatgcggatggcatctgtgaacgcagggccctctaccttggagtcctcagggattccattgttgcagtgccggatgcagtcctgcagcacagcctgccacttgtcctgctcggcttctgtcatcatgcagaagtagtagtgacgcgcataaggatgccagaggatgagcgggaactgtgtggggcacttgaggatgggggcactgcccgactttgccgtggtccctggtaaggagttgccaatgagctccaggtattggtccacggacgtgaggattttgtagcctgcactgttgatgacggctcgtggtgggacctgccgctcataggccgctttgttttcgtagagcaccagcccgtagttgtggggcacgaggctgaagcggtttctccacttcttgctgtcctcctggtgctggaagaggttccccgagaagacgatgtgctcgtccagtggcaccttgcgccagagcagctgggcctgcggcagccccgtgccctcaatctcatggcgcatgctgttgaagagagccacgccatactggtcttcatagaactggaggaactccgtcaggatcttcccggtttttttctgtgatgtgctggcgccgggcgtcgtccaggtgcgtggacagcacgtcccccatggccaggaggtgtcgcggcccgatccggccgacgccgccgctgttgcccgcgctgctcaggcggacgccgctggcgccatggannnnnnnnnnnnnnnnnnnnnnnnnnnnnnnnnnnnnnnnnnnnnnnnnnnnnnnnnnnnnncggctccgctcccggtcgggccccgtcccctcgtgccgaattcggcgcgccgtcgacatcatac

SEQ ID NO: 128929 - DNA, 882 bp, Homo Sapiens
tcattcaaggcatttgagaagaagtttacaacccccgaaactttccacagagtattgagtgttttttcgccagctcagcccatgaggactcaagtctccttgtggccctcccagctaagggcagaggtttgaaagttcaaagcatttccatttctccgcatgggatttgggctcgctgctgaacacggacgtgctgacacatcaatcgctgctgcagcctgtccagtcgcagcgactccatcttctcatagcagctctgcatcttcagggggtggtacgccagccgggacagcttctccatgtactcgcccagcttgtcaatgccgccctcgttgatgacgttcaggttcatgtccgtgacctccttgaagaagacatctcgcacctcagtgaagccctggctggtggggaccatcagggcctccaggatggatgggatgtagggctggacatggttccgcacgcacacctctgccttggggaggatgaaggctcggatcttgctggcaaggtgctccttggaggtgataatttggtccatgtcagttcggatgacggcctgcatggccggctgcacctgctgcaccttggacagcacctcctcgaagcgcgccttggcctgctcgtacaccatgtggtacacggcgtccgagatctggatccactgccgctgccgctcctgcggtttccccttcagccgcgggccgagctctgccttcagctcagggcccagctcctccatcaccaggttgctcaggatctgcacctcgttcccacacagcatctcccaggtgccgtacagctccttggactgtcggtacatgcggatggcatctgcctcgtgccgaattcggcgcgccgtcgacttcatactctctccca

SEQ ID NO: 128930 - DNA, 882 bp, Homo Sapiens
  misc_feature (33)..(33): n is a, c, g, or t
  misc_feature (146)..(146): n is a, c, g, or t
cagctccgagacttcgccaggtgctgttgtatntcgcaccgtcagacgctgatgatgcacagtctcttgtggccctcccagctctgtgcagaggtctcgacgatacacgcatgtccattgctccgcatgtgatctggctcgctgcntgaacacggacgtgctggacacatcaaatcgctgctgcagcccgtccagtcgcagcgactccatcttctcatagcagctctgcatcttcagggggtggtacgccagccgggacagcttctccatgtactcgcccagcttgtcaatgccgccctcgttgatgacgttcaggttcatgtccgtgacctccttgaagaagacatctcgcacctcagtgaagccctggctggtggggaccatcagggcctccaggatggatgggatgtagggctggacatggttccgcacgcacacctctgccttggggaggatgaaggctcggatcttgctggcaaggtgctccttggaggtgataatttggtccatgtcagttcggatgacggcctgcatggccggctgcacctgctgcaccttggacagcacctcctcgaagcgcgccttggcctgctcgtacaccatgtggtacacggcgtccgagatctggatccactgccgctgccgctcctgcggtttccccttcagccgcgggccgagctctgccttcagctcagggcccagctcctccatcaccaggttgctcaggatctgcacctcgttcccacacagcatctcccaggtgccgtacagctccttggactgtcggtacatgcggatggcatctgtgaacgcagggccctctaccttgagtcctcctcgtgccgaattcggcgcgccgtcgacttcatactctctccccct

SEQ ID NO: 128931 - DNA, 1565 bp, Homo Sapiens
  misc_feature (328)..(329): n is a, c, g, or t
tttggctttaaataaagcgtttattgattagtagaagcatgaacagtgtgcataatattttcaatacaatatcagggagggatgatgggaacccctcaaaaggcactagaggcgcagatcttcgggacaagagggaagagatgcgccagagaccagggctggggcagctgggggtccctgagtgccaggcgccaccacacgtcctgtgggtcaaggcccctcctctggggagcaggtctacggcacggaggatgcagggctgggaggggaccccacctcggggacccaaaaggagtccatttctgccctgccccccgcaaagcagcannggggaggggcctgggggtcctgggtgggggatcccaggcctgggcccatcctggcttgacccttgtcccaggaacaagaagctgaggagggacgacagccaggcccagagtgactcacaaggacatccaaagaagggactggattttcagagggaggtgacttggtgactgagaggcagcagaggccaaagcctgaccccagaccctcagggagggcccacccaacctgtacccctcaggagccccgtccggctccccaggcaaccactgaggacctcggggtggcctgtagaagacagaacccagccccattacaccccttgctgccgctccatccccaaccaccagagggacagggaccagagggagacctgtgggccaggcgggcaggagggaggcaggctggggccgggagaaggggatacacaggcccataaaacctcaggctccccataaccctcactcagccatctcactcactcactcactcccagcatcccccaggatgggggtcccctccttcactcaggacacttcccctccgcagacctgcacgttctgggcctttctcatttcaccccaggcctgcccaccccatgaggcaccccctaaatctcatctctccacccagcacccccagcctggctccagcctgaagaccccctccttccccttccctccagaacagtggggaaagcgaggctcggtccacccctaactgcggaaggagcagggccaggagggcagcagtgctccctctcccggtcctggcccagccagctcctgggtgagtgggcgggaacccactgggctcacaccagctttcacctccctctctccaggaaggatggcagcacccatgaggggatggaggccacagaaggacaggaagggaggggctttccagccccccagcagtgtccagcccttggcacaagcaggaaaaccccaaaaccagcccctgcatctgagatcatcccacagaagagaaaacagggagcaagaaagtgttgactgaacccaataaagtgactcaggtgggcccgctccctggcggtgccacacagccctgccccgcctccacccacaaggcacagaccagggtgccctccccagagctgagcctgcctgggtccggaagggaacggcctgtgccatgtgcagcagtcagggacccactggcctagaactcagcctcgtgccgaattcgccacccaggcctcgctacctaggacc

SEQ ID NO: 128932 - DNA, 1060 bp, Homo Sapiens
  misc_feature (59)..(78): n is a, c, g, or t
  misc_feature (791)..(791): n is a, c, g, or t
  misc_feature (853)..(854): n is a, c, g, or t
  misc_feature (862)..(862): n is a, c, g, or t
  misc_feature (875)..(875): n is a, c, g, or t
  misc_feature (893)..(894): n is a, c, g, or t
  misc_feature (944)..(944): n is a, c, g, or t
gtgccaagctaaaattaaccctcaactaaagggaataagcttgcggccgcctgctaggnnnnnnnnnnnnnnnnnnnncagagagcacgtttatttacaaagcgctttacaaacatcagcttatgcctccccacagccccctgcgaggtaggtcagtagtcatatctacagtttacagatggggaaattgaggcacggaatgggggtgtggcctgccccattttaaagagaccttcccacccacccaaccaaaaataacaaaagaaacaaaaaagcactggtcctacctcttcctctgaactccagagggtatgaccagccctgctctaacactgcccctccccacaacgggcagcctgaccaggagccacaggggcctcaaccccaggggctgttgttcagccttgcagattgtcactggcccaagctgagcaggacaggccagtgaggcctgaagattaaaggaagaggggggcgaggtgacttcattctgcaacagtgggtcaggcagggaaggagccccccatggggcacagcagtaataggcagatcctggttcagggaagctcagagcacatatcagggaagcaagtggggagggatagtgagcaaaatatctcaggggctgcagggggcagtggggaggagggcgctgcagttcccctggggaggacagtcagtgtgccccactggctattcagaattgagacctgcttccccaggaccttcaggggctgggccagatggaatcctaaatgccaagtcccagtacatcctctacccacatgcanagggggcaagctgagtgggaactttggctgggatgctctctgcagggctcactcatccctgnncaaagcangatggtgccaggngcttggctgagtccccannagcagcgtcctgagctttgtactctgcaggcagcacaggctctcagacangctgcagacctatgaggtgggctggtgcaactgctagtctccttggccacacgctcgtcgatctggctcaggcaatcctaaggatcgataatcgtacagctactgtctgggtgatg

SEQ ID NO: 128933 - DNA, 721 bp, Homo Sapiens
  misc_feature (343)..(371): n is a, c, g, or t
agtcaaaataattaacctttttaattttttaaaggaaaaatactctccataggaaggcatttctattttttgtccatcagtagccaaatggaacttgatataaacacttccagtatgccaactttggtttaatgcacaactttgaaaataactcattaaaacacacatcaagatgctactaacaaattcattaatatccaagattcattactgtatgtcaaaggtcatccaggattaacattttcattacaatgaactgtgaaattccaatgaaaaatgtttgcctgaattaaattatttaatctctcaaattggaagtctagcactcttgaaaatcaaattnnnnnnnnnnnnnnnnnnnnnnnnnnnnnttacaaactgcacattaggacatgagggcaatttaatggaaaaagaaaatagaaactgaaagggcatttgtaaaatgtaggatatcatttggacaactggatagagtaggcagaaaatcctaaaggtgtacataaaaaaatagccagtaaatgataggctacagaaaaccacactgaaacatttgatgaatttcactgcagtaaacagacttggcaaactgaaacactagaaccatgactacaagcctcacttcattccacacaaataaaatctctaaccattataagcacagatgagaatcctcatgcaacagaggaaatataattatttttaatttttaaaaataaaa

SEQ ID NO: 128934 - DNA, 1284 bp, Homo Sapiens
tttttttaatgactcataaattctttattttggctaacactgattgcattcattactaccattttatttattacagctcagaggagagtcatttactagacattcggttgttattaaacactaaaaattaggcagagactggaggggataaggataagagaacaggataaggagagcagaaagacgctcaggagagtagaaagacactcaggagagaacaagagatcctgcccattcttattatgaggatgaactggctacaggacatgagtagcccaatcagatctaacttaaataccagcctctccaaaaaagttttccaataaagatcccctaacaattatttactggacaaaaaaggttgatatttctagaagagatgatctctttgacacaaaagacccaacttaggacccaacttaatacatagatagcaccatgacagagctgggatccattaagacatgactgtagacaataccatctctaggaacacactgtcactcacacatggatgtgttgttttatggcctaaagatgttgtagacggttctcacataaatttcatcagggggaggcttcttcttgctgccaggttcaaggaatctcttaattgtagggatattacttagtttcactgtgtattcctggaggaaaggaaatgcagacaggatattaggaattttctcttctagagctaaaatggtttggagtaaaatcacatctgcaaggctcagctgattaccaacaagaaagctttgtccgtgaccccttaaaatcttttcaaacacaggaaagtatctaattatagccttctgggccatgttaaccacttccttttgctgatcatctggttttaagaaaggatgcatgataagcagttccagcagatccagtgtcccctccacgtacatgtcaatcagggttctctccttgaggttcttgccaaagagattgtgcttgtctgctatgtagtggagaatgcttcgggtctgtaccaacttcatcccgtcaatttcaaccatgggcacttgttggaacagcaggtggttaccatcctgcaacttgtacaactgttcttttgtttccagaaattcttcatcaaactcgactccggcggcagctaaaacccatctcacggactccatccggcctcttccgttgggatagtggagcttgggccttgctgccatgatagcttttcaggctttctggagtccactcggaggcctggagccgcacaaagcgccaggtcagcggtcccggctggatcccgggaattcc

SEQ ID NO: 128935 - DNA, 840 bp, Homo Sapiens
tggatccattagacatgtactgtagacattaccatctgtaggaacacactgtcactcacacatgaatgtttgttttatgcctaaagatcttgtagacggttctcacataatttcatcagggggagcttcttcttgctgccaggttcaaggaatctcttaattgtagggatattacttagtttcactgtgtattcctggaggaaaggaaatgcagacaggatattaggaattttctcttctagagctaaaatgctttggagtaaaatcacatctgcaaggctcagctgattacccacaagaaagctttgtccgtgaccccttaaaatcttttcaaacacaggaaagtatctaattatagccttctgggccatgttaaccacttccttttgctgatcatctggttttaagaaaggatgcatgataagcagttccagcagatccagtgtcccctccacgtacatgtcaatcagggttctctccttgaggttcttgccaaagagattgtgcttgtctgctatgtagtggagaatgcttcgggtctgtaccaacttcatcccgtcaatttcaaccatgggcacttgttggaacagcaggtggttaccatcctgcaacttgtacaactgttcttttgtttccagaaattcttcatcaaactcgactccggcggcagctaaaacccatctcacggactccatccggcctcttccgttgggatagtggagcttgggccttgctgccatgatagcttttcaggctttctggagtccactcggaggcctggagccgcacccccggccgtaatggccgaattcccgggcatatgtccggtaccgtcgactg

SEQ ID NO: 128936 - DNA, 1108 bp, Homo Sapiens
  misc_feature (80)..(127): n is a, c, g, or t
agctctgggattctttttggagcaatacctacaaagtcaggcaccagaatgtgctcagagctgtgacatttcaacatgannnnnnnnnnnnnnnnnnnnnnnnnnnnnnnnnnnnnnnnnnnnnnnnctgttgcaacagaaagtggcttggaagtcttaggtggtatgtaacaaattctttttaaaaattttaaagcagtatttaagtattcttaaatgtgtaaattcatttaatgttttacttctaatttcttgtatcttggctgtctggttttattgcatttttaaaaaaactgaactattatgtattgtaatgaatgatgtgaattctgaactgagacagataattgtattgctgtccaacaggggttgggaggggcattttgtagggtttgtataatttctagagttcgaaaggggtaatataaaaatgtgctcgtgtgtttagcctacgtttttctcatgcctccattaccagttgcaattgtgtatctaagacctccaagcttgtttttaaaacaaaacaaaaaacctttctctattatctcagaaatataaatactgttatttttaatattaagaaattcaatataacttttaacacacactgtggaacattaaaccgtataaaaatgtagttataactatttttaattccaaggtgttgttgcttttttcttttaaatattttcttaatattttgtccagattaactagatgaataaataaatctagtattaaccgcattatgaattaaataattttgatttaatgaaagggataatatgatttcccagtgtttactgtagtgtatcttgtacagataacatgtatttttaaaggaaaaaaaacggaattgaagctattttttcttgcatttctaattgacctgagggacattccgtttgaaatgtactgaagttacagtttctggttttttctccttatttttcttataatgcttgaaatgtctaactattaaaaaagacaattggaaaatgttatgcatggggtttttaagaaaacaaagtgttctttttatttgactgacaattcattttacactctatataataaaatctccacaaggcatcttgtgggcaaagtc

SEQ ID NO: 128937 - DNA, 2026 bp, Homo Sapiens
  misc_feature (1744)..(1744): n is a, c, g, or t
  misc_feature (1749)..(1749): n is a, c, g, or t
gtttctcccgaactcttttctcaatataaatataaagcccttaattaataaaatggcttcatttaatcttttttgtggaaaaatataggatttttgatctgtcttttgctaagaaaatacacactcttcaaacaattcttttcaactgctagttagtataattggagaaaagcataaacacagatctggttcatatctttaagggcaatgaaattccatcagtctttgaactttattaatgatattttttcagtctacatatagaccactgccacttcctcttcattaagagctcttcatagtagctgtataacaatctacagaaagttatttttccatttaaaggcagaggttaattttcattgttcatgcagcaaaatgtaagtatgctacataattctagagaaatttgaagtagttaccaaagaaacatagccttagcttctgtagtattctcaatgatattaaaatagcaataattggtgtgcactcatcagaaatgaagtgcccatttaaggaagccacattaggtcttgttccagatgcatatgcagaacaaagggatacaataactcattgcagaaagggttgggtatactatatcaggcttccaagttacacttgcatatgcagctactgccaatagtatcatctgtgaacatgagggacattttggaactgaatagaattccattcctgcaactaagcataacaactgcatattcaacccaagaaggcattagctttatgtgggcttaaagaaatggtagcacaggcataggtaaaatttttatttatgaatgtgtggacacatgactttggatccagccagccagtgacataaataaacttgagcaaaagtttcaagctagaggatatatatgtatagaaaattatatatttgtgtgtgtgtgtaaggcctcttggaacagtgccacaaacctggacaccaaccaacagaatactcccgtcctttgaaatttccattaagagcacaatgggggtaattataccaggatgctccaatcgctctttccatcttgtgcactcacatgcccgccaaacatgaaatgttcgccttctcccttccaatgtgatggttgttgaacttatctttagtgtcatttgataagcctttgtgctcacagagagacatcccactgacccagccactggtcattgtctataccagttcacatcaaagcaggcgcactttgtcaggtttccactcgaatatccatttcgcatctgaagtacagtatcgaaagtgactagatcatttgagcttttttcttcagctgctgccttcctcccccacggtgtttctgctcacgctaacataatttggcatcgtcgacgtgacacgatggtggtttttctaaaaaattataatacatacatcgtcaatgttttgtgatagcgaccctccagaagatttaatttgtaaattgaagaaaggtggtctttttcctctactgaatcataaccaaggtagagtgcccctcaaaatccaagtaatgcgcatacagtaataggtcattcaatgtcaaaaggcataaaaaagatgagcaaaatcttcacaggctgctgcttgctgttgcttttaattatattaattaaactttgaaattttaatgcaaagagagttgctggcttgtgacgctgaagagcccttggagacttgaagaaagaaaaaaccctgagcggaagctttgtggttactgcttcctttaaattaaaagcnaaacnaacttctaggtatgtttatggatattaatgctttatgcactactaaatcctaaacacaggaaaagggggaatctactagtcacagggacaagttcgcaaagcatgagtcccttgcactacactcaagatctctggctagaggccttctgtggaataacgctctattaattttcttgtcccgagtgcataatgaaagaaaggtgtcttcgaaaacctaaagggcaaaatcttgcttgctaccataccttgaggcatcttgtctacattttgtcatgcg

SEQ ID NO: 128938 - DNA, 698 bp, Homo Sapiens
  misc_feature (656)..(656): n is a, c, g, or t
taaagtaataaacttattttaatagtgcaaaatgtaatctgctttccaaccaatgaaagaaaaacttgcaaaaaatttatgaaactagtcaataccttgaacaaagaaaaacacaaataactaagtaaatattacaattgtgtactccaaacccaaaaaagcagagaccgtcattacaagccaaatcttttttagagttggttgttgcaggttactaaaatgcgtaaaacaaaatctctacttttcagacttacagaaaagaaataactccaataagaaagctaacttaagtttcatgggaaacagatcatattgatgactttaaaatgtttttcaaggagtttacggaacagaacatctatatcttgatttttatggcaaatgaggtttgtcttgacttttgaagcttatgtgtcttttgacgtatagctcagaagtaaaaaccaatcaagagggacaataacattcaggggatccacaggactttaacctgatccaaaaatataaagcaaaattttgagacaaattagcttaaaaatgcaaatgtattttggtttataattaaatataaaacaaaaattatcacaattaggatttgaatgaagtttgagtaaatttttttgtctacttcatacataatattggtcatttaatantatgtatgacaagggtatggcatcagaaaacaatacttacag

SEQ ID NO: 128939 - DNA, 726 bp, Homo Sapiens
  misc_feature (651)..(651): n is a, c, g, or t
ttttttttccagatgaagcaaacatgagaatttattaggatatttggagtatctcacagaagaattcaacaatcaagacatgaaaagggcagaggtggacctgaacatgaagaccagaagaaccaggtactggaacacaatcgggactctttcttgattttgctttcatcatggcttcattcttctctctcactgcagaccatgtttctccatgtggcagaaaacagccactcactgcacccacatttaaatatagcttgtgatgcaaaaattacacagacaaaaaagatagtcctagctttctagaagctttctagtgggaaagataaaacatgcaatgattatattatcacagtgagaaacacacgtacaggttcatatagattcaataggcattaacaaggaacaagggcatttcaattgcagatttgcaaaaacataagtgataatagaaatctcaaggaactacaagttgttcacagaggccagaaaatattgcataggaggaaaaagttttcagaaatgatagatagataggcattggtttgtacaaaagtccttacataccataaggagaatgttacactttaagtccacaataagccacacgatatttcaacatgaggcatgtgaaatcagggttgcatttanaaataatcactatgtatacatgtgaaaaatggactgaaaaatgatagcaaggtgcagaaaacatgcatgcatctg

SEQ ID NO: 128940 - DNA, 1846 bp, Homo Sapiens
tttatcagtggtgttttttactttttaaaaaaagccacaattggattttgaaaaacacagacaatggagggctgggcaaccatgaggagtgcaaagggtggcaccggcagtgccctggacacccggcttgtctggcccctgctccctgtgcttcctggacaccaaacagcatccaccgaggctgggtgaaggcaaaagtgtttattcaagactttctaccacactgtgggaagcatcgataaacagtcataataattatcattctgagtcactgcaagcgtggggttggatgctggctctcacagtagcctgtgttgggaccatgagcagccatgcgcacctccacgcacggccgagctcaacccgaagaccacgcgtgctccctggcaggagcaggaggcctgaccacagacgcagcagctccccagcctgagcctgggagtgcaccagccagctcgcagcggaggccgtttctcctcacaggctggagtgagctcagagtctagaggtcagaggacctcagactaagagctgcaacagaacgacagcaagaacattctggaaacgatgccacagtgaatcttttatactgtcactcacacttggtgagggcctcagacatgaaaccctggggagaggcgagtgtgacctccagagtttggctgggatgcggctgagacagacctgctgctggccgaggagggcagtggctggcgtggccctcatggccagcaggtgctaggactcctctggaggcccaggcgcctgtctaagctgccggctgtggaccacctgcagagctccccccgcagcctggcggagctgggcatccagggcgccacggaggtcgttcacctggacatcaggcagggggttaaggccaatgaccccatccctcggggccagctgaccctctgcatgagggccaaggtcccgccgtcgcctccggaggtcggagccagcctgcagtttcaggtcccggttgggcttggcattgtccggcctctggccccccgggacagctccgtttgagccccagctctggctctggcctctgcctgggctcctggacagcagcgtcctccccgcctctcggctgctcgtgggacacaggcacatggtcccccccgcgggcctttctcatctccaggtgaccgccatggtccagccggtggccctgctgtccaccctgctcgccatcagagatgacccgcagttccggctggcgtaacacagcctggggctgtgcagctgctccttccgccccaccgggcaggtccgctgcaaggcccaggtctcggctcacttgcttgggcttcatgcgagggtcccccgtctctgctcctggccctgccacgagccagttggcttccttcagaatgctggtgccagtggctgccacctccttcccaggttttttcctgtcttgggaaccgccagtaacgtcctgactttgcccagggaattcctctgcgaggcgctcctctgggcccccggcttccctggcggggtctggcacgggcacctgctccgggcccttggggagctccttcacagtgccagctgcctgggggcggcatccttctggccatctctcagcttgcctgggctgcccgaggctctgtgtcagggccgccgtcaggagggccagcagggtctctgcccacaggcccctcagagtgctccagggagcgctggttaaggtcctgggatggagcagggcggcccccaggagctctgaggacagggtccaaaggcaggggaggcagattctccaccgtctccctgcctgccttagggcctcctggcctctggcacatccgaaatcccggcgcgaccagctgtt

SEQ ID NO: 128941 - DNA, 859 bp, Homo Sapiens
acggccagtactatacggtcctaaggtagcgaggcctgggtggcgaattcggcacgagggctggtcacgttctgactttgtcctggtgattccttctgctagtggctcctctgggcccccggcttccctggcggggtctggcacgggcacctgctccgggcccttggggagctccttcacagtgccagctgccctgggggcggcatccttctggccatctctcagcttgccctgggctgcccgaggctctgtgtcagggccgccgtcaggagggccagcagggtctctgcccacaggcccctcagagtgctccagggagcgctggttaaggtcctgggatggagcagggcgggccccaggagctctgaggacagggtccaaaggcaggggaggcagattctccaccgtctccctggccttgccttcaggggcctcctggcctctgggcaccgctgccccgggctcttgatgcacctccactgcaaatgaagtcggtcatcaatttagccacagcactgtacacaggctgccagtggaggggctcagaagaaccagtcaacaacagcattgggaaccaaatccagactcacgctcaggtctagaggccaccgagcctcagacccagccgcatgaggacagcaggagacccctgctggcccacccatccatccgcagccggctaccctgcctgggtttatcctcctcgtctcctgctctgtggtggatctccttgttgctgctccttcgatcaccgcagcagttctcctgctggtccagcaagcgcttttgctgacctgctgttctttgatcacctgaagcaggacggcgtggtccagcatctccgccttgccagcttctg

SEQ ID NO: 128942 - DNA, 2150 bp, Homo Sapiens
aatgtgaatatttaaatttaatgtagttcttccctatttaacagttttctgtaactcctatttagcctaccaattaccctgtgaaagttatcctccccccttttttacagatgagaaagcaggctgagagatcaaataactcaaggtgactcagaaaataattcaaggtgactcctccttttaaaactaaatatgtaatggataatatgcaactgatttcttgtgaaatataacatttatgtttttagattttctttgcctttaactcaaggtaagtccagtttaaacctgtactttttgtaattagccaaatcaaatgatcataattcaaagatgctaaaacagaatgctacatagtgatgctgagaaatactgtcaattagccagcaaacagtaatctgaatttgcgcaggatgatcattctaatttagatataatagaaagattttagataaaatagaaaactttttaaagaaattcaactatatcctaaaacttgacctggtcaaacttattccatattatattcagttgctctaatatacagcaggttgatactaaaataatgacagaatttggctggtctaaacatacaaatatattttcccccttttctttctttgggaaaataagaaaaaaaacattactctgtttactcagaaagcaaggagaagcagcaccttctcctggactccgtgactgtcagccatcttgtcatcacaaaaaggtgaggggtgccaggatttcactatgctgctccttcactggaaagggaaggaaatgctccagctgttttaatcagtgacatttattaacatgcttcaaaagtgaccaaagtgtccagccagcacaatagccgaggcaatcaacgttctcttagtgtgtgatctcctccaaaacaccaaataaataggtttaggaataacctcaaataaattgtaatttaacttcgcccaaaattatacatcctctactgctcttccctgctcctgtaaagatactagcgggaggggagaaagctcaaatgactctgtaatttagaattacaaccagagaagaaatacttcaagcacaataaagacgttccattgaagagcgacattcattctggaatgtttgttttgaaaacaactcttctgggggaattcaaaaggtactgaacaaagcaacataaagtaagttttgggttgttttgcaaaataaaaatatacaattgagtggaccagatggcaaaaacataccaattacaatctgaatgctatatttaaaacccttaaattctgaaggcctgaatatcaacaaacctatttatgtttatgatcctaaaaagacattaaatattattaaacccccaacttccaaaacatagagacccagcaaactgggctagtggtatctcagtacacagtcacacatgactagactagactagactagactagagatctgagtttgcaaccaagtacaagaggtctttaggagctcaggctaagggaggcactttattcaaatgcatggcctgagagaagagggaaagtaccttgtaatcttaaactatgtggtccatcatatattctacctcaaagacaatctagactacggtatctcctcttaaactgccagttcagaacaaaatatactttatttggaagctaaatatttgcttcactcaagtgaagaataatttagcagcgacagagaacacaactcctgttttaaccatgggaaagagaagagagagtggtaagtatctcgctggggaaatcaaaagatttctgggtctgtctgggtgtatcatattatgagcttgattcttcaaccgtcactccatttggtagtcagggagaaagtaagtgtagctgcaaggggaaatggaaagaactaccctgcccttctgcacccccagccaggcccactagctgcggtgctgtgcacaactccagttccaatgcttccctccacagtggaggcatatccagggctgaaccagatgcacgcccacagtgtgtttctggctcagagcctgtcaggaaattcatgtctgggaagaaactaagtgttctggtgatggctacagtcagtagatctaccagcaatttgtccctttttttgtttcagattttaaggcagaaactccatctcagcagcta

SEQ ID NO: 128943 - DNA, 901 bp, Homo Sapiens
  misc_feature (621)..(652): n is a, c, g, or t
aatcagtgacatttattaacatgcttcaaaagtgaccaaagtgtccagccagcacaatagccgaggcaatcaacgttctcttagtgtgtgatctcctccaaaacaccaaataaataggtttaggaataacctcaaataaattgtaatttaacttcgcccaaaattatacatcctctactgctcttccctgctcctgtaaagatactagcgggaggggagaaagctcaaatgactctgtaatttagaattacaaccagagaagaaatacttcaagcacaataaagacgttccattgaagagcgacattcattctggaatgtttgttttgaaaacaactcttctgggggaattcaaaaggtactgaacaaagcaacgtaaagtaagttttgggttgttttgcaaaataaaaatatacaattgagtggaccagatggcaaaaacataccaattacaatctgaatgctatatttaaaacccttaaattctgaaggcctgaatatcaacaaacctatttatgtttatgatcctaaaaagacattaaatattattaaacccccaacttccaaaacatagagacccagcaaactgggctagtggtatctcagtacacagtcacacatnnnnnnnnnnnnnnnnnnnnnnnnnnnnnnnngatctgagtttgcaaccaagtacaagaggtctttaggagctcaggctaagggaagcactttattccaatgcatggcctgagaaaaaagggaaagtaccttgtaaatctttaaactatgtgggtccatccatataattctaacctcaaagaacatcctaaaactacgggtaatcttcctctttaaacctgccaagttccaaaaccaaaaatataacttttaatttgggaaagctaaaaaattttgccttt

SEQ ID NO: 128944 - DNA, 534 bp, Homo Sapiens
acgcttcctcatggtgcatgtcacttatgcttcctggtccctcccagatgacccccccttgggccactacacacagctgcacccggcaagagcagacaaggatggtctactcactgagcctgcaaggctggtgtgcaggacaggccagctacactccccaggtgtgtgcaagaccggggacgagtcagtcattgggaggtgaggtgctcgggcagtgtgggatggaggaggagggagggaaactgagtgtgggctcttcgtattggagaggaggggacggccatggcacaaagactcagatgggaaagtgtgagaaagcagagatttcaaaggagctacggtggagacccacagaagaggaatgctgaggcttttctgtctgaaatgctgaatagactctagcacacgcaaaacagcccaccacagcgagctgcaggattcttccgggcttttaacagtggtcttgtaaaaaaaattagccgggcatggttgtctctactcaggaggcagagaggggaggatggcttgcgccca

SEQ ID NO: 128945 - DNA, 152 bp, Homo Sapiens
acaagaccactgttaaaagcccggaagaatcctgcagctcgctgtggtgggctgttttgcgtgtgctagagtctattcagcatttcagacagaaaagcctcagcattccccttctgtcgtcttctcgcagccgtatagtagtagtagtaggc

SEQ ID NO: 128946 - DNA, 926 bp, Homo Sapiens
ttttttttgaatattcacatctgtttaatgtgcataaagccaaggaaaggacagttccgaattcaatagaaatattctgtacaattcatatggtggggttgagggggagggggacaaggctgtagaacccacacccgaacatgtacaaaaataacttacacagcaacccccacctgcaaggatgatgcagctctgcccagccaccggggctggggggcacactgcagacatggcaccgcgggagccaaccagtatgggccccagatgcaggtgggagtgaggagggcaccagtccggaggggagggcagctattaggaggccttgagacggttgctggccgagcgtgagctcagcagcttgtccaccatagtgcgggcgtagcggagccggctggccagctccttgcagcagccgtactcctccaggagactcaggcggtatgtgcggaagtcccgcttctcgtcgatgtaggtcacggctgccatcagtgggcacaagatgagcttggtgtgatcctggaagaagttgatctgcacgctgccgttgctgaggtgcaggatgatggcgctgcgggtgcggaaccaggtccgtaggtagggcagccgggcgagctcatcaccttcgcgcggcgtgatgttggcacctgccttcagcaagtgctcgctcatgtaattgcggaaatatttaaggagggtgatcttcttcatcaaggagttgggatgggaactcacggtgaggtaggactcagtgccgtcacgctctatgtactgcaggctgtcaccatcattgtagaggatgaggcgtgttgagtcattgaagagcacccccacgctgttatcacagagctgattacccaaggccgtacttgtccgaatagtccacccacttgctgacccagatacggggatgcaggcagtgtcctgcc

SEQ ID NO: 128947 - DNA, 1491 bp, Homo Sapiens
  misc_feature (739)..(739): n is a, c, g, or t
ggtcactggtttcatttttttccttgctctaaaccacctcttctctgaggttgttcatcctcagggctgggtggggtgcaagcccttgagtcccaagtgtgtcgaggctcctggtcctgggtgtgctggtggatgagtgggcacatgcccccacctggggtggtggagccgcttcagtagatgtagggcatgatgcggtaaggcacacgccggcagtactcctgccaggccaggccgtacttctgcaggcactgccgctcatcccgggcctcacggtgcaccagcagcgcggtgaagtagaggaggtagaagtagggcagcaggtgtgacacccctcatggctcatgtgggcatcggggctcagcagcaaaagcgccagggtcgcagggcaaggaccaagccagagccatgatgaggtctccaagatagttgggatggcggaccataccccaccacccagacaccagcagtttccgccctgtggctgtagagatggtctcaagcccagccactctggggtcagaaggattctttcggaaagtgtttttctgggaattcgccccacggaagatgtagtaaccaatagcattgatgaggcagatgaccagaggccatgggcaaccccaggggctgcgggtggtgcagcaggaactgggcctgcaggctgtaggtgaagggcaccaggccatgtccccaaacgccagcatgaagccaaacccgtcatgtgtggatatccatnggtgggtgaggacggcctcctgcagggacaagacccagacacactggcttagtccctatgcggccctcagacacccaccctcgtccagtccagcctcacctcgtgccagagggcatcacccacgtagagcaactggaagccattgaccagccacatggccagtgagggactgcctcgaagctctgcctccttcatcaacagggccaggttgatgaggacccagccgatgaggccgggtcgcagttcacagaaatatttgaagtcgaagaaacagatacgagggttgagctctcgtcccagaaaaaagtcgtaaatcggattgcctgagttccccccaggtgccagggccgaaactggggctacctgcgccttcatgtagagaaagaggctgaagatgaaagcggtgagggtggcgacaaacgccaagggcaggagcatttccgggagcgcccccagaggcagccccgctgacatccccagccccaccaacagggctgtcagcaccagggcctggaagcctgaaccacagcgcacagtgagcctggggctgcgcgcctccacatccccaccccgcaaacacacgcagagcccaaaactcaggggggccacagaccctgccccaagcattaggctgccacctggccttcagaggatcaccccagccactgctgtggtgcacggagtagcagtaaatgggtaaggctgtcctcgtgccgaattaacaaccggcctcgtacctaggccgtatggtt

SEQ ID NO: 128948 - DNA, 1570 bp, Homo Sapiens
ttttggtcactggtttcatttttttccttgctctaaaccacctcttctctgaggttgttcatcctcagggctgggtggggtgcaagcccttgagtcccaagtgtgtcgaggctcctggtcctgggtgtgctggtggatgagtgggcacatgcccccacctggggtggtggagccgcttcagtagatgtagggcatgatgcggtaaggcacacgccggcagtactcctgccaggccaggccgtacttctgcaggcactgccgctcatcccgggcctcacggtgcaccagcagcgcggtgaagtagaggaggtagaagtagggcagcaggtgtgacaccccgcagggcaaggaccaagccagagccatgatgaggtctccaagatagttgggatggcggaccataccccaccacccagacaccagcagtttccgccctgtggctgtagagatggtctcaagcccagccactctggggtcagaaggattctttcggaaagtgtttttctgggaattcgccccacggaagatgtagtaaccagtagcattgatgaggcagatgacagaggccatgggcaaccccaggggctgcgggtggtgcagcaggaactgggcctgcaggctgtaggtgaagggcacccaggccatgtccccaaacgccagcatgaagccaaacccgtcatgtgtgatatccatggtggtgaggacggcctcctcgtgccagagggcatcacccacgtagagcaactggaagccattgaccagccacatggccagtgagggactgcctcgaagctctgcctccgttcatcaacagggccaggttgatgaggacccagccgatgaggccgggtcgcagttcacagaaatatttgaagtcgaagaaacagatacgagggttgagctctcgtcccagaaaaaagtcgtaaatcggattgcctgagttccccccaggtgccagggccgaaactggggctacctgcgccttcatgtagagaaagaggctgaagatgaaagcggtgagggtggcgacaaacgccaagggcaggagcatttccgggagcgcccccagaggcagccccgctgacatccccagccccaccaacagggctgtcagcaccagggcctggaagccgttaataggatagcgcaggcgactcttgtccttcaattcctgcccctcggccaccttgcgcgccggcagtaggtagagcgccgcctgcaggccgagccaggcgagccacagcagcagcgcccgtgggctccacagcacctccagcccgggcagggacgcgggtggacccagcaggcgcgcggggcccgaacgggccgccaggagcaggtggaacatggtggcgggcagcagcagtagcagagccgcggcgcccaggggccctccgaattccagcggggcccgggggccctgagtgggggccatggtctccgctccgccggagagagagggcgctcacaatagtcagtcaaggaaacactgtccgccccatttcccaggagatggactcggccgcgcggaggatccggccccgcggcgcctgcacctgcctggacacgg

SEQ ID NO: 128949 - DNA, 1017 bp, Homo Sapiens
  misc_feature (825)..(825): n is a, c, g, or t
cggtccggaattcccgggatcaggcaggtgcaggcgccgcggggccggatcctccgcgcggccgagtccatctcctgggaaatggggcggacagtgtttccttgactgactattgcgccgcggctctgctactgctgctgcccgccaccatgttccacctgctcctggcggcccgttcgggccccgcgcgcctgctgggtccacccgcgtccctgcccgggctggaggtgctgtggagcccacgggcgctgctgctgtggctcgcctggctcggcctgcaggcggcgctctacctactgccggcgcgcaaggtggccgaggggcaggaattgaaggacaagagtcgcctgcgctatcctattaacggcttccaggccctggtgctgacagccctgttggtggggctggggatgtcagcggggctgcctctgggggcgctcccggaaatgctcctgcccttggcgtttgtcgccaccctcaccgctttcatcttcagcctctttctctacatgaaggcgcaggtagccccagtttcggccctggcacctggggggaactcaggcaatccgatttacgacttttttctgggacgagagctcaaccctcgtatctgtttcttcgacttcaaatatttctgtgaactgcgacccggcctcatcggctgggtcctcatcaacctggccctgttgatgaaggaggcagagcttcgaggcagtccctcactggccatgtggctggtcaatggcttccagttgctctacgtgggtgatgccctctggcacgaggagggcgtcctcaccaccatggatatcacacattgacggngttttggcttcatggcttggcgtttgggggacatggccgggggtggccctttcactacaggcctgccaggcccaagtttcctgctgcacccaccccgcaagcccccctgggggttggccccatggggcctcctggtcaatctggccctcaatcaaaaggctcacctgggtttacataacaatccttttcccc

SEQ ID NO: 128950 - DNA, 723 bp, Homo Sapiens
  misc_feature (658)..(658): n is a, c, g, or t
  misc_feature (686)..(686): n is a, c, g, or t
tacttatttattaacttatgaagataatattctaataccaacattaaagtgtttaaaataattagcaagcaagatacgtttctgatgttccatttgtcacccttacctcttcccagaaaatgttctcaggccaagttcaagatgaacaggttgaacttttaggagggttgacttttggtaatagataaagctttttgggaaggagaaaggtaatcacaaataagattgaaattggcttaagttttaggtgcacaaaaatattcaacatgccagagcatggtttaaaaaatatcaaatgggtcaaatgaactaggaaatattctgctacatcaagaaaatatttcatcttaaaatacacatttttctttttaccagaaaatactcttaaaataaattgccaccctgggggcagcccatagcaaaactcatttgaaatgtgttctgcatataagagctcattacaaatcaaggtttggaaaggaaaacatttcttataaacaaaattttaattgagtttttcttctcaattatttttaagtgcacggaaacaaagcactaaaatgagtgtcacgctcatgagaaatttctttagttttctctaaaatgcctttttcttttagatgaggaaggtgagtttcctaaaaattttttccaacanatcttttaaatttaggattagatcacanattcctagcaaacagaaaagggtcttttgctttacag

SEQ ID NO: 128951 - DNA, 1559 bp, Homo Sapiens
  misc_feature (119)..(127): n is a, c, g, or t
  misc_feature (197)..(308): n is a, c, g, or t
  misc_feature (348)..(361): n is a, c, g, or t
  misc_feature (370)..(528): n is a, c, g, or t
ccaaaggggccaaggtgtttattcccccgggggattaagggttttcacaccccttttggaagggttccccttcggcgcaatttcttttttaattcccccatttctccaaaaatggcccnnnnnnnnnttattttttattgggctcccctgggcccccttttattaatcccattaaagcccccaaaacccccttgggnnnnnnnnnnnnnnnnnnnnnnnnnnnnnnnnnnnnnnnnnnnnnnnnnnnnnnnnnnnnnnnnnnnnnnnnnnnnnnnnnnnnnnnnnnnnnnnnnnnnnnnnnnnnnnnnggggccccgcgcccaaaaaaatgtttttaaaaattttttnnnnnnnnnnnnnnccccaaagnnnnnnnnnnnnnnnnnnnnnnnnnnnnnnnnnnnnnnnnnnnnnnnnnnnnnnnnnnnnnnnnnnnnnnnnnnnnnnnnnnnnnnnnnnnnnnnnnnnnnnnnnnnnnnnnnnnnnnnnnnnnnnnnnnnnnnnnnnnnnnnnnnnnnnnnnnnnnnnaattttagaaccggatgctttattcgtaggtctaatggggatggtgagaagcaatttgtacacaatgcccattaatctctcactgtgccatgtatcaatcatagagaagatcccaggcatgggccacctgaactactatgtcgcttacttgacttctcaacagccacatgcccctttctccttttcttcacttaactgatccgtagaggcatgaccatttgatcgcaccactccttcaggaatccaggacttgtccacacaccgttccattcgcttcattatcaggtccagaagcatctcaattgcttggcttatgtttgtcccattggcagcactagtttcaaagtaggggattccatatttctctgcgagtgctatggcttccctcctctttccactactctctgttcctccagatcactcttgtttccaacacagcactatatctgggttttcaccaatatgcatgcatctgtagctggcttatccagtttctgacattgaggaaactttgctcatttgtcagatcaaaaagtagaataaaacccatagtatctctgaagaacgctgtcgttaagctacgaaacctctcctgccctgctgtgtcccataactgcaggtggattctctggcctctgccagtggctccatccggcccactggctctgtacaccactcttttttccctgaaatcaatgcccactgttgtgataaatttggagttaaatttaccatctgtatattggtaaagtacactggtcttccctacaccagagtctcccaaagctaaaaacttgatgaggtaatcataatctccatcagacataatgaagaactcagtagttcacctttacagggtagagaaccgcttgttatgattttctaaaacgttagagactggagttaccaatgcttcaacaattgacaacttccaatcacatgtcctcttcaggaaggttactttttgtctcctttgcttttctccacaaccttgcttcaaacccacttctcttcctgtgtcttgaatcccc

SEQ ID NO: 128952 - DNA, 786 bp, Homo Sapiens
ttttcaaagttttttaattgttaccaatgccattttactactttttatctttttcatgcagtttcagaagaaattagcaatatctaactctcttttcatagtcatagtgatttcaagagtttcagtctctgggatatagaatgctttggcactggtacattccaccagctcaggaagagttatcaacagcttcttctgaggagtacgaaggtcaaggattgtttcctggatatcaatttgaatatcagaagggtttgtatttggcaatttaattttagccactagttcactgcaacaacctgttgaggagtccttttttgacaaccctaaaaatatatcttcagttcccacctgctgtctgaatataatctcatactctgggatttctctaacatcccacatatcatcatattctgctccttctggaatctcttctgaattccagatgtcctcattattttcctcgctggtttcagggatgactttgagctcttctatttggggtggtccaatattcccaggacccatggctccaatagtagataaaccatttgtctgtccatagtcagaatcatcctcttcttcaggattaagtagcttagagagggcttccagagctgtaactgaagaaacactctcaaagtctacattttgagattccatattttctgtcttcatattttcagaatccatattttcagattccattatcttggtcagttttcccgtctctggctaggctccgaaaatagacttgtgcagagcgtggcgatcccggtacaccct

SEQ ID NO: 128953 - DNA, 1184 bp, Homo Sapiens
  misc_feature (1125)..(1125): n is a, c, g, or t
tttctaatttgagttactacttttattctttattgtcacattttccaagttttgcgcattcaaacttggcaaacatcatggagatttgtacaaacatacatatacatatatacacacatatttatagccccagcttcctcattaaaccttgtgctcaggctcctgttaaaagaggtaaaatggtgagaagataaaaatcagggaaaacatgaataaatgctgactgacaaatcttgttgttatgaatttgtaaggcagacattttaaagcaaaatccattaccttgctaaaatttccactaagctacagcttcagatatttacaagaaaaataaatatcttttaacagacttcaatgtggtttaacagcaagctagctgaggagttgtattttgttgttatttcaggtaactttttattaagaaacagttaatatttcagtgattacaatttcaggtgttcaaaactcaagaagggtcatcattatactctgaagcagaattcttcaggtactcatctttaaattactacccaaatctatcacagtcacattcaggctttcaatttttaaaaacatttaatgtttggtaactaaagggtagatgcgattagtgtactctaggtcgtttgattttatttttttctgtaggagctttcctcttttgtgataatccagtcccaagttccttattattctgaataaatgaaatagcttctggtagacagtaattttctacatgaggaggtgattcctgcatgagataatcagcaatgtattctgttctcaagcagtacacgttctgggcagcagcttctgctatattaactcccgagtcatctggtttcagtttattcaagtcagaaaaaagatgtgtggcctctttaaataaaggtacagaatgaccaggtagcacctttgctcctcctgactgaagaaggcgtttgaagcctgcttctcgagactgatccacatgtaaaataaccttccacccactaaatgctccctcaacaatgccagattcttgtctttgctgggattttttttctccatctcattgctgcaagtgctagtcttcgttgctgtacattgattccagtcaaaacatcaagtatggaactacttccncattcatagtcttcttcctgcacgaagtgtccagcagtcctgcaggctttcaagtacga

SEQ ID NO: 128954 - DNA, 2122 bp, Homo Sapiens
  misc_feature (291)..(312): n is a, c, g, or t
  misc_feature (439)..(534): n is a, c, g, or t
gcccccccgttttccccccgggggcaaatatttttttcccaaggcgcccaagggtcttgaatccccccggggggtctcaggtttatcacacccccttttgggaagggtttcccccttcgggcggaaaagcttaaaatggatttcccccccgttttttccgaagaaaggccacggggcggggggcgtaatttggttttgagggtccccctggggacccccgttgaaaggatccccggaaaggcccccgaacaccccttttgggattttttccaaaccttccggtttcccccnnnnnnnnnnnnnnnnnnnnnnattccaacccttgttccgtaccccggtttccttgggaaccagtattggccccgtttcctttccctttgggcacccgggcccaaaaaaaggttttaaaaagtttttagggggcggggcggcccccaannnnnnnnnnnnnnnnnnnnnnnnnnnnnnnnnnnnnnnnnnnnnnnnnnnnnnnnnnnnnnnnnnnnnnnnnnnnnnnnnnnnnnnnnnnnnnnnaccagaacatcacataagtttatttcagatgtaacagcaatgttaaaattgacaagtttaattcttaactgcaccaagtaaacttagccatttaagtatttttttaagttattccctccaaaaaactgagggagcttttcttttccaccaccacaccatggtttcccaatagttctctttttggaggacttttcaattgatgagtaaactgctttagatatttcagaacttcattccccaaatgaaagctaatctggacaaactatatattgcatagatttctctacagattctttgctttaaaacctaaatgcaactaacatagtgtaattttaacctatttgccccacagtaaaaactatctgtcctgaaaaatatgatggatatatcctgtgattttccagttaacagaattgttctacttcaaagataattattatcatatatcaaaataaccagctcaacataggacattacttcagtctttactgactcataggcatatgaacttgtgcccagctttttacctcttccacattctcctcctcctccataagtggatggaattatttaactaagtttgatgtaggacaattaaccctttacaaacatttacaattcaggttaagtcactgagtaccgtggaaaaagaaactctatatataatgatagggagcgtacacactcaattccaaatttagtattttttcctccttaaataacatgtacttgtcatgaggcagctattaggttttcaataaccacatttagggatacattcataggactgattagatagtccaggtgaaatggttatagaaatagaggcagtgtcatctcagaaagccatttatatatcaaagtctattttgatatctgggaagtttacaaaaaggttgctgcattcttcaaactacttatgccttctgtaactcaagcactcttctcttgccaagagcaagctgaagcttattcatgaagataaaggtgcttaacgctaaacttttcttctaagcttagatttggattgtttaagaaacgaatacccccaaaaaaccagcaaggtctttctacatttttaccatcttaagattagaaccctataaactcattcatcaactgtcttctttttctgtattattcttggcactcaagattgttgaagtctactgcactttgtactttcacattctcaaataaaaacttaaggttataaagtgtgcataaacattttataaaataattttgtcatttaacatatttggaaatgagactttataccgcaattttacataagaggataaatatgaatgaaacttccttttaaagtcaaatgacagaaagctcaagccctgtgcattattttaaagtctgagaacatttctaaatagtggagatgggactacaaaaggaaaacatgaatatttcagatgtctcccatcttacaaagttatcaatctgtcaaagccactccgtgtgtgccggaaaatgatctggcataaaccagtcctctcagtggaggaggtcacagtgacatttgtattattaacattttacacttctatttttccaagaatagaagcaatat

SEQ ID NO: 128955 - DNA, 647 bp, Homo Sapiens
  misc_feature (197)..(215): n is a, c, g, or t
ttttgtccttagcaccttttattgaaatatgacccttgatgacaatctggcaggcatatctatgtcagccaagaagggagtggtggaggacacaaatgcagaaacaacaagatttggaaaaagaatagcttcacatgggatagatgacccccaacagctgtacaaccaacactggttcttcatctatagaaactgtnnnnnnnnnnnnnnnnnnnaaaaagatctactaatcttcaaataatataatatgctgttgcagaaatattattggcatagacgactcctctggcaaagctccaaatgggtggaagtggccagaaatgggcccagcttcctccatctggggcttgctactggcagagcagcactgtcagggagggtcgggttcaggatgtggctctggtgtgcctgggcagctttatggcacatgaggttaaatggaaaacagaacctgaacctaaccttgaaggaggctttttatcttttcacctctccttttctttgcttccaatttcttcctttctagggctttattttcagtgtctctgtcttattctgtcagattctacttgggcatttacagctatatcctggttgagtctccagctgtgggactcaggaagattcaattatccagagccctggga

SEQ ID NO: 128956 - DNA, 769 bp, Homo Sapiens
ttgtttcccaagacattgaaatggctgacatcttttcagtaataatcagaacaatatttatttttatatttaaaattcatagaaaagtgccttacatttaataaaagtttgtttctcaaagtgatcagaggaattagatatagtcttgaacaccaatattaatttgaggaaaatacaccaaaatacattaagtaaattatttaagatcatagagcttgtaagtgaaaagataaaatttgacctcagaaactctgagcattaaaaatccactattagcaaataaattactatggacttcttgctttaattttgtgatgaatatggggtgtcactggtaaaccaacacattctgaaggatacattacttagtgatagattcttatgtactttgctagataacgtggatatgagttgacaagtttctctttcttcaatcttttaaggggcagaggaaatgaggaagaaaagaaaaggaattacagcaatactgttctttctataggaaggattagatatgtttcctttgcaaatataaaaaaaataataatgtttactactagtgaaaccaaggtattaggaaaataatgtacaagcatctcttgcaagaaagggtaagattgttatgagtgaaatcgtgccttcctcaaatttatatgttggagtttttattcccaatacctccaaatattatcttatttggaaataaggtctttgtagagcccggccgtaatggccgaattcccgggcatatgtccggtaccgtcgactg

SEQ ID NO: 128957 - DNA, 1093 bp, Homo Sapiens
  misc_feature (170)..(201): n is a, c, g, or t
aatttcaaggaaaaggagacagtcattttctctccaatgtctctcagcatctctgctttctctggcatttggaaataggcattatataaagaaggaggaatgggagaaaagaaggaagggagacagaaatcagaattaaacaaaagttggacgggattaacagggcggcnnnnnnnnnnnnnnnnnnnnnnnnnnnnnnnncttaaaaaaattaaataaagttctcattatttccccaatatacatcaaatgagttttcatgcaaagcagcagtcacagaggcagaactgtccccagctcgtgcctctcggcttgaagaaccaccttctcccggccccgggttctctggtgttctcactgaggatggacgacgcccactgtctctcccagctggaactggctatgacgaaacttggctggcgtagggagaggagtcctcccctctccccaggatggggtctcaggggacagcaagctctggggcctgatccccatcacttgtccttccatctgagactcccagtgtgacagcttggacaggtccctcttcccaggaatgcgaggctcctcctctcagctctcaatggacatggcattaatgagctgctccaccttataagccagccgctgccgccgtgcctgctcatcctgctctagggccccgatgagctcctcactatacttgctgacataggagtagatctcattgagggcactcagcatgttgaactccacggcgtgcaggcgggactgctcggcgaggtaggcattcatgtcctggtcactgatggctgggagcttggcgatgtctgcgtagtatctctccacccagctcttgtagctggggatgtccttggcatagagcagcttgttggagggggagtccttgcccagccggtgctctgacgttgaacaagagtccatgaaggtctgggccaccacagagaggcaggcgtccgtgatgctgcccttgtggatgtcaaacacgaactgggggttcttaatcacgttcacccagaagcgcagagggaggcagttgcttttccaggtgtgccgcacatctgtgtcatggatgctgtgcctgtctgcctgc

SEQ ID NO: 128958 - DNA, 1711 bp, Homo Sapiens
  misc_feature (755)..(755): n is a, c, g, or t
  misc_feature (876)..(876): n is a, c, g, or t
  misc_feature (971)..(971): n is a, c, g, or t
aatgtttttggcatttccccaacatttaatcaggaaaaaacattccatgaacaaagaaaaactcatgcaactaaagaggagagaacggggggtctgggactgtcagacagggccagattcctcagaggaggcagaagacacagagtagtaaggcacggccgccttggccccacagggcgggcactggacggagcgggcgctgaatggggcggctgaaggagtcggagcaggtgcagacaacactgaggacgtttggcagtaggctcaggaggaggagtgttctagggcccccaggcccaagtcaggccctggcacaagcctgagtccagccctccaggtgctcagagagaatagggccccgagatgcttgagggggaccctgtggtccagcgtggcacagccacaattctgaggaagctttggaggcctcaccccaagtgctgctggtaccgtgaccccgccttggaatgggtggggtcagccatggcaagggtgaggtgccagaggccagaccgaggctgataatgctacacaaaggagcccagacgggtggcagggcccaggacagctcaagaagaggcaggtgagtgagggtggcgacatccggtggggggacacatatttacagatggagacagaggcgaagttcgattcaattaataggcagagggatattaatagcagggagggtgggactgtcccaacacctgggcacagggcaggagggtgggggtattgctgctgctggggtgggnggctcgccctgtcacccctccccctgcagggcccaaagcaaggcactaatgaagggggcctgggtgtgccgggggcatcgtggccagggtgacctgccccacgatacccaatccagggctncagcccggggacccgggcttgagccagccactcccctgggatgggaggacggcacaggactgagaagcccccttcttcaacggattccaccaccnttagctgtcgctggacacgaggctgatgatctgttccagtttctgccgcaacttatgcttccgacaagaggcatctcggtccagagccgtgagaatctcctggcggtacttggtgacatagaaatacagctcgttgagcgcactcaggacgctgaattcgctgtcgtggaggctgtactgcttcaccaggtaggcatcccatgtacctggtcgctgatggatgccatctttgcaatgtctcgataatacctctccacccagctcttgtagttggggatgtccttggcgtagagcagtttgttggagggcgagtccttccccaggcggtgctcggatgtagagcaggagtccatgaaggtctgggctaccaccgacaggcaggcatccgtgatgctgttcttgtggatgtcgaacacgaactgcgggttcttgatcacattcacccagaagcgcagcggcaggcagttgctcttccaggtgtggcgcacatcggggtcgctgatctggcgctggtccgcctgctcatccaggaagtcgaacatgtacttgatggccaggggcagggccgagccccggtgggctgtgctgaacactgtctcaaagaggtcatccacgaacttctgcagtgtgcccttggtggccagcagccgtgtcaggtagatctcggagaccatcttgctgccacggtccccctcgcgatggtcggcatggtcgtggtttttcacccaggtgccacaatt

SEQ ID NO: 128959 - DNA, 1897 bp, Homo Sapiens
tggggcagctaaaatttttattctgttgtcaaggggcaagatgccagcttggaagtgccaaggagctaaagggcccagcactgccggccccagaactgtctgttcaggctgtgcagtaagcaccagagcctcgcctgtccacgaagggtgtaagcctgtgctccacaatgtgctcagctccagagaggcccaacaacctcaggagggcttggctgtgggtctgaatttctttcctttgtgcttgaagctgcgcagtgggttctgggactttgctctcttggccttcctacaagaggaagacagcttcttccgcttcttgtgagggcgtaccaggccacggagagcaggaggaaccaggtagtcaggaacatggcccaggtggggcttcaccactgcggggtgcaaaggtaggtcatgccgcagcagctggaggtccctagggttgtcttcaaagtatgtcttaagcttctcagaatgcagaagctcttccttgatctccttcaatcttgcctcccgaatggcctgcttagtcactgagcgcatggcatccctgcagcgatagcggaagccctcgatctcctccatccggaactggtaggggagcagaatggggcccctgttctctccactgagaagctcctcaatcttgcctaagtggaactgctccgtgggaagcacaaaggttaagactatgcctgggttgttagcgcgtgctgtcctgccagctcgatggatgtaggcctcaggggttgggggaagatcaaagttgagcacagcagacacatggtggaagtctatgccccgggccacacctgcttccggatcagaggccttgtcccctttgggccctcggccccgacgcttgcccttgactggggcccccaggacttcagcatcagttgctatgacacagtcgtagaagccttggttgaactgtgagatgatgtggcacctggagcgcagtggaagctctccattgagcacacaggtggggatgctgaactgttccaagaacaggcgtagccggtaactccgttctagagtgttgacaaagagcagagacttgccccgaatcaatgacagcttgagcagggcatacagcaggaggaatttgtcttcctcagtctcacagaccacctgaaactgctgtaactggtctggcccaggcagctgggactcctgtaacttaagggtaaccgggttatgtaatatcagctccttgagtgcttgtacgtcctcgttaaaagtagctgacatgagaaaagcctggtaaatccggggcaagtgacagaggagactcttgagctcttcttcaaagccaaaggaaaaaagaaggtcagcttcgtccaccaccaaaagctccagggagtcacgaagtttcaggctgtcttgctgcaagtggcttaatatgcgagatggggtccctactaccacatctggcttctccatcagcacagctctctgagagactgagtcttcagcagctgagacattggccactcggacatcccgagcacagtaggtagccagctgctgaatcatggactgtgcttgccgtgccagctccttggtaggaacaagaacaaggcctctcactgcctgttctaccaccggacctgtcgccttcctatggagcaacagctgcagcatcggaatagcataagcggccgtcttcccggagcccgtgcgggcccgagccaggaggtccttcccttctagggccagtgggatggccttctcctggatcagcgtaggtcgcgaccagcccagatcggtgacagcctgaaggagccggggatcgaggcccatgtgttcgaagcccagtgcttcagagtcctccatggcgctgctcagtagcgcagcacgcacgcgctgcaggaaaaacgccaccgacgcg

SEQ ID NO: 128960 - DNA, 902 bp, Homo Sapiens
cgatcctgaactggttccaagaacagcgtaaccggtaactccgttctaagagtgttgacaaagagcagagacttgcccgaatcaatgacagcttgacagggcatacaacaggaggaatttgtcttcctcagtctcacagaccacctggaactgctgtaactggtctggcccaggcagctgggactcctgtaactttaagggtaaccgggttaatgtaatatcagctccttgagtgcttgtacgtcctcgttaaaagtagctgacatgagaaaagcctggtaaatccggggcaagtgacagaggagactcttgagctcttcttcaaagccaaaggaaaaaagaaggtcagcttcgtccaccaccaaaagctccagggagtcacgaagtttcaggctgtcttgctgcaagtggcttaatatgcgagatggggtccctactaccacatctggcttctccatcagcacagctctctgagagactgagtcttcagcagctgagacattggccactcggacatcccgagcacagtaggtagccagctgctgaatcatggactgtgcttgccgtgccagctccttggtaggaacaagaacaaggcctctcactgcctgttctaccaccggacctgtcgccttcctatggagcaacagctgcagcatcggaatagcataagcggccgtcttcccggagcccgtgcgggcccgagccaggaggtccttcccttctagggccagtgggatggccttctcctggatcagcgtaggtcgcgaccagcccagatcggtgacagcctgaaggagccggggatcgaggcccatgtgttcgaagcccagtgcttcagcctcgtgccgaattcgccacccaggcctcgctaccttaaaccgttatagttactggccgtt

SEQ ID NO: 128961 - DNA, 1082 bp, Homo Sapiens
tttctaaggaatccttgttgtttattagtcttgtgttcacccatgtcatgcatacgaagattgaagagctgaaaacgctttgatattctccactgtaaggcactgtgtgataccccgcttaaaactattcctaccattccaccaagggactttcctttccactgacaagttgaaggaggaattcagagactgtgcattccgtatccaaattgtttcattgttcaagtatattgatagggtggttgtctaagcagaaaatgcagaattaaacgaaggaagcttgttttgagagcaggtctgtcaccatctatggtacatatgacaaggaagtaaacaggaagtgctgaattggcttggtttactccttaatataacattgcctttcctgttgttgcaggcacatcacagttgtcacatcagcaggctagaaaagccatcccattcctgcggtaggcatttgtgaatggggaaagtgggccaatcctgtggctgtagcgtcgaatggcctctctgatgtggcagggctggatggcatcgctgtgagcctcaacaccacaggctgcagtgctctcagcagagttgtgatactgaatgaaggttgcagaaatggcatggctgaaggggtcccctgccttggttaccatgtcttgcctcacaagaagagccagatccactaactgtgccacagtttcatacgctaaatatgctaagatttccattgcgacaacattgggttttatctccatactgctgcagtccaaccagtctcgaaatttggaagcttttttggagaaacttaattgtcgactttcacagaattctgcatattgagctgaatccatgattcgagtttgtctttctgctctctccattctttcttgtttaacttcatcaatttcgtcatcttcaaacattgctaaaagttctcctgtctggtcaatagagttgaggaagtcctgagcaatcttttgtcttttgttcgcattattgctgccactcattttgtcttcgagaagatcatcctcatcgatgcctttgacaatctttgatttgtagtctcgaataaacatgtattttagcag

SEQ ID NO: 128962 - DNA, 1509 bp, Homo Sapiens
tttttgatttatatccagtgctttattaaagataaatagtctcataagaggagaagtaaatgtgtttgcaggccaacagagagtccatgtatatgagaaagagatgcgtgaggtccctgatctgtgctctgagggggtggtcagtcaggcagggcttgggccaaccagtaaggcagatgagggtccctgtcctgggggactcactgctcctgggtgccccaggagatgtagtctggccgtgtggccgcatggtactcatcgatgagctgctgcacaatctccctggatgtgtccatctcatcaaagttgtccttgaacatgtcctccttgcggaactgctccaggaaggcctcccgcttacgcagcttgtcatactggcgacaggttctctcgaagagcgaggagatgctggtgtggttggccatcatgagcccgctgacccggtgggccgagggcaggtagggagacttcctcgacagggccacctggatgctggcggggccccacgggatgaagttggccaacttccgttcccggatcctctgcaagctcttgtggacctgggtggggtccacctctccctggatgatgttgaggatggcgatgtagcagtggttggtctggcggtctcggcctgtggacaccatcacgttcttgggctgcagcagccgcctcatgacatccaggaccgtggtcttcctcacgctggccactgactggtccgtagtgagaggggtgtagccggtcatgaggaagtggagccgtggggtgggaatgagcgaggcgatgaggccgatgaggtcattgttcatgtagccagggtagcgcagggtggtggtgctggctgacatgatggtagacaccagctggttgatctgggagaaggatgggttctggatgtgcaggcggtctgtggcaatccggttcagggctgtgttgtccagcaccaccacacagtctgcattctgcgtcagcctcttgagtgtgaggagtgaattgtaaggctggaccaccacatcgctcatctcgtcctggttgggaaacactgagtatgtctgcaccagcttcttaggatacctgtcattcagccgttctaagaggtaggaacccagtccagagcctgtccccccagcaatggagtgacacagcacaaagccctctagactgtcactaccatctgcctcccggtctatgatgtcaaaaatgtcctcatggatcttttctccctgggagaatccgctggcccagttgttgccagctcctcctccatgttccgacaggtagatgttctctgggttgtagagcttggcatagggggagttgaggatggagtggatcacccggggttccaagtccagcagcacggcccgggggatgtagtgctcatcgtctgcctggtagaaaaagacgtccttgcggtcagtgccctcggtggcgaactcctccacgatgcccaacggggctggataccacctcgtgccgattaaacaccaggcctccttacctaga

SEQ ID NO: 128963 - DNA, 874 bp, Homo Sapiens
tttttatactgacaaccaagctttattactttattagagctgaacaagcatattaaaagttagggcatggaagggaggaagcaggaccagctcacgggctggagatgaaccaagaagggttgtccatgaggtgaagctgggtcagagggagcaggcatggtcgaggctgtggttaccatctagaaggagaaggagtagtggggagggaaatcactgctcctgggtgccccaggaaatgtagtctggctgggtggccgcatggtactcatcaatgagctcctgaacaacctccctagacctgtccatctcatcaaagttgtccttgaacatgtcctccttacggaactgctcgaggaaggcatcccgcttccgcagcttgtcaaactgctggcaggaactttcaaagagcgaggagatgctggtgtggttggccatcatgagcccgctgacccggtgggccgagggcaggtagggagacttcctcgacagggccacctggatgctggcggggccccacgggatgaagttggccaacttccgttcccggatcctctgcaggctcttgtggacctgggtggggtcacctctccctggatgatgttgaggatggcgatgtagcagtggttggtctggcggtctcggcctgtggacaccatcacgttcttgggctgcagcagccgcctcatgacatccaggaccgtggtcttcctcacgctggccactgactggtctgtagtgagcggggtgtagccggtcatgaggaagtggagccgtggggtgggaatgagcgaggcgatgaggccgatgaggtcattgttcatgtagccggggtagcgcagggtggtggtgctggccgacatgatggtggacacca

SEQ ID NO: 128964 - DNA, 945 bp, Homo Sapiens
aacacggtgcggcgtcccgggaccaacagtggcccacgcgctcaaacccgggccggtccccccccggggccccgaggccggaaggaagggtaccgtcagagaagggagcctgggtggaatgacgagcgatgagccgatgagtcatggttcatgtaccaggtagcgcagggtgtgtgctggctgacatgatggtagacacccagctggttgatctgggagaaggatgggttctggatgtgcagcggtctgtggcaatccggttcagggctgtgttgtccagcaccaccacacagtctgcattctgcgtcagcctcttgagtgtgaggagtgaattgtaaggctggaccaccacatcgctcatctcgtcctggttgggaaacactgagtatgtctgcaccagcttcttaggatacctgtcattcagccgttctaagaggtaggaacccagtccagagcctgtccccccagcaatggagtgacacagcacaaagccctctagactgtcactaccatctgcctcccggtctatgatgtcaaaaatgtcctcatggatcttttctccctgggagaatccgctggcccagttgttgccagctcctcctccatgttccgacaggtagatgttctctgggttgtagagcttggcatagggggagttgaggatggagtggatcacccggggttccaagtccagcagcacggcccgggggatgtagtgctcatcgtctgcctggtagaaaaagacgtccttgcggtcagtgccctcggtggcgaactcctccacgatgccctcggggctgataccatgctcggcgcacagctgtttccagaactcgaacccaatctgattgccgcactggcccaactgtagggtgatgatttccctcggcatcgctcctccctcgtgccgaattctacaacccaggcctcgtacctagccgtaag

SEQ ID NO: 128965 - DNA, 866 bp, Homo Sapiens
  misc_feature (149)..(161): n is a, c, g, or t
gttcatgtagccccagggtagccccagggttggtggttcttggctgcccatgatggtaggcccccaggctggttgatctgggagaagggatgggttctggatgtgcaggcggtctgtggcaatccggtttcagggctgtgttgtccagnnnnnnnnnnnnngtttgcatctgcgtcagcctcttgagtgtgaggagtgaattgtaaggctggaccaccacatcgctcatctcgtcctggttgggaaacactgagtatgtctgcaccagcttcttaggatacttgtcattcagccgttctaagaggtaggaacccagtccagagcctgtccccccagcaatggagtgacacagcacaaagccctttagactgtcactaccatctgcctcccggtctatgatgtcaaaaatgtcctcatggatcttttctccctgggagaatccgctggcccagttgttgccagctcctcctccatgttccgacaggtagatgttctctgggttgtagagcttggcatagggggagttgaggatggagtggatcacccggggttccaagtccagcagcacggcccgggggatgtagtgctcatcgtctgcctggtagaaaaagacgtccttgcggtcagtgccctcggtggcgaactcctccacgatgccctcggggctgataccatgctcggcgcacagctgtttccagaactcgaacccaatctgattgccgcactggcccaactgtagggtgatgatttccctcggcatcgctcctcaggcaccggcgttgcagccgctcccgcccgcaacggcgccgcacgccagcccgctcctcgtgccgaattcgccacccaggcctcgctacctagcctta

SEQ ID NO: 128966 - DNA, 1250 bp, Homo Sapiens
aacggcagtaactatacggtcctaaggtagcgaggcctgggtggcgaattcggcacgagggcgccgttgcgggcgggagcggctgcaacgccggtgcctgaggagcgatgccgagggaaatcatcaccctacagttgggccagtgcggcaatcagattgggttcgagttctggaaacagctgtgcgccgagcatggtatcagccccgagggcatcgtggaggagttcgccaccgagggcactgaccgcaaggacgtctttttctaccaggcagacgatgagcactacatcccccgggccgtgctgctggacttggaaccccgggtgatccactccatcctcaactccccctatgccaagctctacaacccagagaacatctacctgtcggaacatggaggaggagctggcaacaactgggccagcggattctcccagggagaaaagatccatgaggacatttttgacatcatagaccgggaggcagatggtagtgacagtctagagggctttgtgctgtgtcactccattgctggggggacaggctctggactgggttcctacctcttagaacggctgaatgacaggtatcctaagaagctggtgcagacatactcagtgtttcccaaccaggacgagatgagcgatgtggtggtccagccttacaattcactcctcacactcaagaggctgacgcagaatgcagactgtgtggtggtgctggacaacacagccctgaaccggattgccacagaccgcctgcacatccagaacccatccttctcccaggatcaaccagctggttgtctaccatcatgttcagccagcaccaccaaccttgcgctaccctggctacattgaacaatgacctcattcggcctcatcgcctccgttcattcccaaccccaaggttccacttcctcattgaccggtacacccctctcactacggaccagtcagtgggcagcgtgaagaagaccccggtcccggatgtctgaaggcggttggtgcaaccaagaacgtgactgggtgtcccacggccgaaaccggcgagcaccctgggttagtctggcgatccttacatcttcgcgggcggtgtttgcccccccggtggctcacagactttgcaggtcctcggacgcagcgtgtcgctctatcccccggggcgccgcgtccaggggccccagaagaattctctcgtgtccgcccacgtcggcttatgtgcgcccccttctgctcactaaagagcct

SEQ ID NO: 128967 - DNA, 967 bp, Homo Sapiens
acccgggtgtgatcggcgagggaggagcgatgccgagggaaatcatcaccctacagttgggccagtgcggcaatcagattgggttcgagttctggaaacaggctgtgcgccgagcatggtatcagccccgagggcatcgtggaggagttcgccaccgagggcactgaccgcaaggacgtctttttctaccaggcagacgatgagcactacatcccccgggccgtgctgctggacttggaaccccgggtgatccactccatcctcaactccccctatgccaagctctacaacccagagaacatctacctgtcggaacatggaggaggagctggcaacaactgggccagcggattctcccaggtcgtttcctattccctggcagggcccacaactcgctggggagaaaagatccatgaggacatttttgacatcatagaccgggaggcagatggtagtgacagtctagagggctttgtgctgtgtcactccattgctggggggacaggctctggactgggttcctacctcttagaacggctgaatgacaggtatcctaagaagctggtgcagacatactcagtgtttcccaaccaggacgagatgagcgatgtggtggtccagccttacaattcactcctcacactcaagaggctgacgcagaatgcagactgtgtggtggtgctggacaacacagccctgaaccggattgccacagaccggctgcacatccagaacccatccttctcccagatcaaccagttggtgtctaccatcatgtcagcagcaccaccacctgggctacctggttcatgaacaatgacttcttcggctcatcggctcgtcattcccaacccaggtccattctcatgaacggtaaccctctcataggaccgtcgggcccggggaaacccggctggttttaaggggtggggacaaaggggggtcacggccgaaccaaacctgtatc

SEQ ID NO: 128968 - DNA, 983 bp, Homo Sapiens
gggggcgcctgtgcggaattccagctgcgactgctgagggagaaaatgatgcccaggttgggctccccggcccaccggccgaggagaggctgcgctgcacacgcgcagaccgagcatccgcgtcaagaggcgaagagagcgcgcgctccccacgtcctgcgctcctggctgccgggcattcgtctcagccgtgactctcgccaggccggggctggcgcgcccacgtctgaagagcgatgccccgggagatcatcaccctgcagctgggccagtgcggcaaccagattgggttcgagttctggaaacagctgtgcgccgagcatggtatcagccccgagggcatcgtggaggaattcgccaccgagggcactgaccgcaaggacgtctttttctaccaggcagacgatgagcactacatcccccgggccgtgctgctggacttggaaccccgggtgatccactccatcctcaactccccctatgccaagctctacaacccagagaacatctacctgtcggaacatggaggaggagctggcaacaactgggccagcggattctcccagggtgagaaaattcatgaagacatctttgacatcatagaccgagaagcagatggaagtgacagtttggagggcttcgtgctgtgtcactccatcgctgggggtacgggttctggcctggggctcctacctcctggagcgactgaatgacaggtaccccaagaagctagtgcagacttattcagtgtttccctaccaggacgagatgagcgacgtagtggttcagccctcacaattcactcctgacgactcaagaggctgaccgcgagaacgcacgattgtgtgcgtggttgctggacaatgactagcaccttgtaaccggattgccactggatcgcctgccacatacagaacccggccttgctaccagatccaaccggttggtgttcacatcgatggtcggcagtcgcatcacctgcg

SEQ ID NO: 128969 - DNA, 1043 bp, Homo Sapiens
  misc_feature (701)..(737): n is a, c, g, or t
gctgctattctctttataagcagtttacaactacttggcatctctagctcagaagcacaaaatgtatatacaaagaaatgattagaatttatcttaactgaaagcactagtttaaacagcctagagtcttgtagaaattgttattccaaaacatgcagaggcagcaagagttgcccaaaaccacattttattctataacctttatattgcttttctgttaaagattgaagcaatgtgaagtggatggaaatattttgttaaaagaacaaaatgaattaatcacagcatagatgactaataaaaaccttgggtttatgccatacacttcaaacacaaggcaaagtccagtagtggctcatgttctgggtttttagaaagcaaatgaaaatatttggaaagatcaatatatttcaacagaagagccataaatgccctgaaagcagaaagttgacacaattttaaatagaattcatatatatatattttaaaatcaaacacaattaaatataatatggtttaagtacatgaatacttcagctttaaaagaataacagaggtggtacatagtaccaaaaacttacacaaagcctttttgcttcttctgtcgatgaaacagtgtgcctctatacaatcaaatattgcaatggaataaattctctgttcattcaagactttctcaaggacaaaagtgattaataatnnnnnnnnnnnnnnnnnnnnnnnnnnnnnnnnnnnnngcaaagtctgagcaaaagcagtaacatctaagagaactttctttcctctcaatcatgtgcattgaggaagcgctggcgccacgtggtcaatggagtgtgctcaccaactgggcagtcctgctgatggctgtgtgatcccgatgcagaagccaactgagcagaagtgcagtgagtgagtctcttactatcctaaagaaaggagaagaaagacgaccaactgcacactttccagctcacagcaaagaatgggggaggcagtcaaagtcaaatgtttctctctccccagtcatcctgctcaccttattt

SEQ ID NO: 128970 - DNA, 719 bp, Homo Sapiens
  misc_feature (633)..(633): n is a, c, g, or t
ttttgcccacctatgccctttccagggcagtttaattggtatcatttgtaaaaggtcttttccatcacccccaaagcctttgcattccctttccaagaaggtggctgtttactggttttggccccatgtgcaacagtaggccttggtatgatgctgccataacactcccatgtgacactccaggtgacatccaagtgcaagtctatgttcagctctggacagcaggggggaaggtgaggagagtcaggtctgtaaattgaagctgggcagggccctggctggctggagatgtgtgggcaaggtgagcaggccccatgtgcaccccagctccagtgcccactgatgtggctgaagcccaggttggttgtggtcaaattagaggtcctgagagagaagcccttaggccaaagaagtgtgtgctgggaagcaggccagggcagaggcccagggaagatctcagcaggggcagtgtgagcatgagcgagtgtgtgcacctgtgacagtgcagacagcccaagatcagagatacaatgtgcaggggggcctttggtgagtgtgtagctgtgcccctcccttctgagatacaggcccagcccccgcctccggaggctaagggggcacacctgggggtangaggagtctgggaaggaaactcagctggaaatggtttaggcctcagagcccacatcctgtgggaggggctgtcaaggggcctgctg

SEQ ID NO: 128971 - DNA, 915 bp, Homo Sapiens
gattgaagattgagtgaaatattttcttggcagatattccgtatctggtggaaagctacaatgcaatgtcgttgtagttttgcatggcttgctttataaacaagattttttctccctccttttgggccagttttcattacgagtaactcacactttttgattaaagaacttgaaattacgttatcacttagtataattgacattatatagagactatgtaacatgcaatcattagaatcaaaattagtactttggtcaaaatatttacaacattcacatacttgtcaaatattcatgtaattaactgaatttaaaaccttcaactattatgaagtgctcgtctgtacaatcgctaatttactcagtttagagtagctacaactcttcgatactatcatcaatatttgacatcttttccaatttgtgtatgaaaagtaaatctattcctgtagcaactggggagtcatatatgaggtcaaagacatataccttgttattataatatgtatactataataatagctggttatcctgagcaggggaaaaggttatttttaggaaaaccacttcaaatagaaagctgaagtacttctaatatactgagggaagtataatatgtggaacaaactctcaacaaaatgtttattgatgttgatgaaacagatcagtttttccatccggattattattggttcatgattttatatgtgaatatgtaagatatgttctgcaattttataaatgttcatgtctttttttaaaaaaggtgctattgaaattctgtgtctccagcaggcaagaatacttgactaactctttttgtctctttatggtattttcagaataaagtctgacttgtgtttttgagattattggtgcctcattaattcagcaataaaggaaaatatgcatctc

SEQ ID NO: 128972 - DNA, 890 bp, Homo Sapiens
cgggaagctagccctggaggaaagtggggtactcggcgtggttcctgttgcgggaagattctcattgtctcacgtcctttaaccctgtcaacaccggccttcaccttagcgttctcccaacaacaagatcccaatggccacgctgcccccggtccacaacccttgagaactccgtagggagacagttgagagcctggggatggagatgtcaagttcacacactgggcgtggctcaggaaactggtacacaaagacaaaagaaaagaccccaactctccttggaaaaaccaggacctgcctagggctgctccccaccccagatgagtggcaggaaaaggccctgcaggggacggggcaggggacagagtgtcaggagcacttccagacgcacacagccagggtgcccccgaagtacaggtagaggaggttcttcacctcgtgggtgatctcaaacccaaagccctcgccgatcaccacgtgccaggaggagccgaacttcttgtccattgtctctttgatcatcttggcggcgctctcgttgttgttggagaatttctcacaggctgtgacacatagctccatggtctccacgcgcatctcctctggcatgtccgagtgcctgaccagagggaaggtctgcagtcgcttatagtcagcctcatctttcttcccttctgtttctcccatgatccttccactgtgaccactggaggagagtggggctttcaggaggtgctgggactggcagttaagacacacccaggagattcaggaagcaggccctgccaactcggtgggagcagaaaatgtctttccccggggggtgctgctcctgcgggggccggagccggggccgcagccagcgaacccccgccagggttgtcaaggag

SEQ ID NO: 128973 - DNA, 694 bp, Homo Sapiens
aagaggtttccaccgcaatttattgttcattatttttacatcttcttcgtgaagacaatgcatgtatttaaaacatcctcaaacatttaaaagacattttcgggcattaccactttaaataactgacactgtactagcaaacttattagtataaacatcactgaaattctttcctcttacttttttttaaataacactgatgaactagtgggagcaattttccttctttgtgaagcctatgagtgtcagttgcacctccaataaaagtaccattgacaaatattcttggaacagttctttcaccagtcattttgtaaagagcatcttggaactggtttccatattcaagcaggtccagttccaccactttatagttaacattcatgtcatggaaaagcttttttgccattgtacagtaagaacaggatgtttttgagaaaatcaccacacaattatcagaaattgtttcttggatctggttcacaggcgccgtcgctaaattctccaaagatgatgatgtattgctctccatcccagaggccgcagctgccgcagctcccgcagctcccgccgccctgtcaagccagcctgccgagccgctcctgctccaaaccagccgcgtccccgccagcgccgcgcggcgccaaatcatggtcagagcccggatctgcagcgagctctactgccggacccc

SEQ ID NO: 128974 - DNA, 1595 bp, Homo Sapiens
  misc_feature (44)..(64): n is a, c, g, or t
taccctcaactaaagggaataagcttgcggccgcctgctcaggnnnnnnnnnnnnnnnnnnnnnatttacagaagtatttattttaaaagtagacttaaaaaagaaaagtaatttagattaaaagatccaaggtgtattgtttcatgtaggtgttactgctacctatactttcaccccatttattaagcccaaaacacttcaagcaacttcaggttcataaattaataaggaggtacagaagcccaaccaggatgggaaagaatgtgtttcaggttagaaggggacagcatggctcctcaatgatgtcttgtatggaacatttgtgctccactgtaatgaagattttcttcctgaaaatctgaatgtgacattttagatcctctggttgttggtttagtctcccgattgtaatggtgtgctgaagtcaggtggttgactagaaggtcaatccaagctcctaggctcccctctcttgtaggcctcaattatccacctgtgaggctcaggagggctgaccaacctgaaggttgggaaaacttgcttaaatgaggaattgccatttcagcataaactgtccttaagtctactgtagaaattgttttcattctggagatggtgagtcccagaagatcatggccaagatgatgtcctaagtagcttcctctgagattttatgcccaagagggagccatctggccacttgcttcttcttacatttctaatagctgctccatttccttaagggctgttgttaaatcatttacttgattgttacataaggtttgctgttctaggaatcggactctttcctctttcatctccagctttacctttaaggcctgtaactcctccatctgctttttggctgtttcgttaaaaagcttcagctcctcttgcaaagtttctaacagcaacatagagtccatgtgatcagtagtggattcttgtcgtgatgccagggtctcactgcctaaagctggatcaaggcccttgctctccaaaattgccaaacagttgtcccgaaacttctccagcagctctaccttctgggtgaggtccttcagctctccctgagtttcagtcaacttctggtgcaactgcttgttgacggcttctaacagctggttcttgtccttgagctcttcctctgatttttgcttactcagtggtttgtagccttttctgacattccttctggtggcagtgtcagtagctttcatttgcccattctctcgtctcagtttggtgatttttgtaacatcattctctggacctcctgaatgaagctgtttggaaacatcgacttctttggacctaacaggtaagagactcttagaagtggcccgagtttgtgtgtctgccggctggccgccgctcagcgcagaggggggctgcaggctatacactgtcttaaccacactggtcatcgtaacgaggcggcacggctgaaccccaggagcccgccggtcctgcccgcagtccttctcgctctcgtttaaaagattccctgcagcaactgtcgtgccaccggctaagtcggccgcctgcctcgtgccgaattcaacacccaggcctcgtacctagcctatgttta

SEQ ID NO: 128975 - DNA, 818 bp, Homo Sapiens
tttaataggcggctcccctttccctttaaagggcccgttgttaaatccatgtaccttgattgttccataaaggtttgctgttttaggaatcgggacctccttccctctttcagtctcccagctttaccgtttaagggcctgtaactcgcttccatctgctttgttggctgtttcgttaaaaagcttcagcttcttcttgcaaagtttctaacagcaacatagagtccatgtgatcagtagtggattcttgtcgtgatgccagggtctcactgcctaaagctgggatcaagggcccttgctctccaaaattgccaaacagttgtcccgaaacttctccagcagctctaccttctgggtcaggtccttcagctctgcctgagtttcagtcaacttctggtgcaactgcttgttgacggcttctaacagctggttcttgtccttgagctcttcctctgatttttgcttactcagtggtttgtagccttttgctgacattccttctggtggcagtgtcagtagctttcatttgcccattctctcgtctcagtttggtgatttttgtaacatcattctctggacctcctgaatgaagctgtttggaaacatcgacttctttggacctaacaggtaagagactcttagaagtggcccgagtttgtgtgtctgccggctggccgccgctcagcgcagaggggggctgcaggctatacactgtcttaaccacactggtcatcgtaacgaggcggcacggctgaaccccaggagcccgccggtcctgcccgcagtccttctcgctctcgtttaaaagattccctccc

SEQ ID NO: 128976 - DNA, 657 bp, Homo Sapiens
tttttatataaattaacttttatttctgtaacatataaaaggtataaataggacttatgtaaaaaccaatcacctgcacacacaaattatgtgaaattagtttatatatctctttaaaccagagggaggaagaagcaggatgaggtccacctggcccaccataagtccttccccacatgctgtcgtgtattaatagcttctgtggccaaccagggttatctgccaggcagtgcctcaggatggggtggggggtggtggtggtgacgaggtgtgaggcttctgggcatggctgtgagggaggcacttggtgggatacatgcctgagatggaaacagtctcgtcctcacccagcaggtgggacttgtcggtgggggacaagccaagggtcccgcagctgccagttggccctccttcacatgcttatctgatgtggtgcaggaacaacaggcggaggtgagaggtcagtccacagaagggaggtctgagggagcagccgccacgggtgtcccacccaacgctggcaaacagttctgtgcacaagggatgcagctgaatggtgctgacggtggagctcacagagctcctgcattctcaaggtttggatacattctgggaagggtgaactggtgtaagagtcacataatacgtggaggggtg

SEQ ID NO: 128977 - DNA, 1145 bp, Homo Sapiens
  misc_feature (17)..(17): n is a, c, g, or t
  misc_feature (1026)..(1060): n is a, c, g, or t
  misc_feature (1064)..(1102): n is a, c, g, or t
gcaggaattctacaatnggcaagtaagacattttatttctgtaattgaacataagcaattccaaatgcttttctaggcaagacatgccagcgattagaaaatgagacagcttaaagacagaggtacatttaacagagaaaacacgcctggaagctcggccggccccgcccatgctggctcagttcctgcccctggagggaaggggccgaggggcttcccgtcccagggaactcccaccacaggagtctgcagacgggctggcctggcagtcagtcccaggaacactgaccatccccttagggaggcaccacgccctggggagcacagttccaggccagggccatgggtcttgccctgaagaccctccctcagggaccacgcgccctgaccctcattgcctcaccatattataaaacactaaaaccgcttaagttcttccccacagagttggggaactaattgtaaacagaatacacgtctacatatcagccctgagacagctggccccgctgcacacgcagcctgctggccccagcaagacacggtcagagctggtaagtgctctacagcattcagaaatctgaccacagcgtacacacagctcacaagtcagtgcaaacagaagctaatgacatcctccaagaaaattccatacagttatgacaatggaaaacctgttatacattgtaaccatacatcattagcaatgtttaatacatcttactataaacactgaatttctaagtacatgatactcctagcagcttaatccagaaaataacgatgtgaatccctccaatactgttaacacaagaccaagtgctgcccatgagagtgcccccgtgccacccgcgggcaccaccggcctctgaggacccctgagccacacactgctgctgcttcagggaagcatccatgtcacaggacttccccaggggcctgatttctgccacagctgcaccaactacccagagacccggccgtaatggccgaattcccgggcatatgtccggtaccgtcgactgnnnnnnnnnnnnnnnnnnnnnnnnnnnnnnnnnnncggnnnnnnnnnnnnnnnnnnnnnnnnnnnnnnnnnnnnnnnctctggcccggaatccttagccgccccccttataattgatttt

SEQ ID NO: 128978 - DNA, 631 bp, Homo Sapiens
  misc_feature (399)..(415): n is a, c, g, or t
aaagaatattgatcttatttatttgttttttgggttgataaataaagctaaatttaaaaatccgtaggtaatacactgtagtggcataaatatttaagatcagtaaaggaaatcatcaaactattgtcattcatacatgaaacgtacaaagcaaatagttatgatttaaagattttaatacataattaaaaatcaacaattattacatagttatataacattgatactgttagatatgtggatgtatatatttttctttccagtaaaatagtttcatgcttataaaagtcaccctaggtcaacttgggacaaagaaaacaatgtacagtagaaataaaccaagtattaaatagaatatataggtaaggaaaaaatattataaagcagttacatttttgnnnnnnnnnnnnnnnnnaataaatacacttttctattatttgaaggcaattcacaatcatttccaggaattccgtgagaatttaaggccatttgttctaaagaaatgctttaatttagacacaacttcacaaaactgtaattcttgtaaaaactgtacatgcaaaaaccctttacaattattcgtggacaggcaggtcagtatataggagtaggttatttcacaaatgtgttg

SEQ ID NO: 128979 - DNA, 974 bp, Homo Sapiens
  misc_feature (866)..(900): n is a, c, g, or t
tttactgacttgcttccggagtttattgtgcaggatgaagcccgagtgggcaggggtgctttggcggggagccggggcaggggctcggggaaggaacagagcagagacatccagagcgtgggggtcacctggctggccgggatcccagcttcagccctggggagtcctattgttccgtcatgcacttatcggtttggggcaggaagacaatggtatcctctgtgaagccctgggccttgcagaaggcggtgaatttctcctttaactcagccctgggggtctgggttcggctgtagagggtggccatgcggaagtcctcgccagggcccttgctgccctggctgtacagcagcgcgtactggtcgtagtcggtctccaccactgacacggagtaggtgctgccccagtggggactccggtagctgtaggagccgagggaccccgcgggctgcagcagcatggttcgggtctcacactggtttttcctgaggaaggtggaggtcaggttgaggccaccatccgtggcaggggccaccacagacttgcacatggacaacgccgccttcttctcccggagccagctcgagttggaggcgaggcccgcgctgaaccagcgccccaggaacttgtcctgctggaagttgggctgcacggagacctgggcctccggtgctgcctgcaggtcgcccagcacccccagcagggccagtcccatccacagcgtgtgatgagtagccattctcctgcagcagagcgggtgtccggggcctggtgccagtggtgtgggagagcgagggaggtgtgcaggaggagcccccggccgtaatggccgaattcccgggcatatgtccggtaccgtcgactgnnnnnnnnnnnnnnnnnnnnnnnnnnnnnnnnnnncgccgcttcctcgctcactactcgctgcgctcgtcgttcgtataccgagtagccctatagtgatctatacagtc

SEQ ID NO: 128980 - DNA, 1719 bp, Homo Sapiens
  misc_feature (21)..(21): n is a, c, g, or t
atggaggcccatggatcccancccgttggggccgggaggcttgggcacccaggtggagggggcaaggcctttcggttcttgtcagggcagttgcagaggcccagggccttcacccagccaaccttgttggaccctggggggcctagtagttcacgagttgagctgggtagatgccatcctttttgtcaagctggtggtcctgtctgggggccacgctgggcttctgggccaggggtggtttcttggtggttacacttcggggggcagtgctgggccggatggccacctcctctccagggctgcctgatgccccagccagcacgtagtgttgcttccgcaactcccccagccgcatgcgttcagcctccagcgtcttctccagctccaggacacgcacctgcgtctccatctcctgcttcttcagcttgatgagggacaggccggagaaatccatggtgtctctgtcctcaatctgctcctggcctgacttggtggaggccaccacattggcagccctctcattgactgtgcgagaacattcctgcaggcggctcaggtgggggctgtgcttgttggccttcaccttggaggccgccaccagctgggccgtgctggctgcgatctcgtgggagcagacgatgagctcctcatacttgcccgtgtgaagcaccaccttgtcagctgcctccaccagctgtgtggctccccagcccacagccttggaggccgagatgaggccttcggtccagcgcgagttcttggcgtaaaattcctgctgcgtggctgcccccctgccgctctccacgatctccttctgcaggctagtggatgtcgtcaccaggagccggatagccttcatcaggtctgtgcaggagttgaggatcctctcgttcacctccagcttcacccccgagctggcgtggcgtgcctggttcatcatgtcctcaatcctccgcacagcatcttcaatggctgcggatgtggccgccatctccttgtcgaccatggcccccagctcctcctgccgcacatctacggctcttgggtttcagttcctggcccagctgaaggatgccctgcaggggtgtccgcaccaggctggcctgcatgtgccgcagagcctgctggtcctgcagctgccccatgagctccagagcccgggccccgcactccctgcaggtgtctatgaggcggtcggcagggtcggtgggagccaggtgcgaggtggcaccgccattgatgatggtatccgcagccaggtgggagaagcgggtcagagctgccaccagggcggaggcgtctgccaaggaggtcaggtactgggcgtggccctcctccagggtgctcacggcatccaaggcctcctgggccctgctcaccaggtagtctggggagctggtacagcgcaggtgcagggggtcgtccagcttgctcacggcatcctgcaggatgcccgcggcctcggcagcagcgccccgcaacactgcgaactgctcgtccagcagcctctgccgcagcccctgctcctgagactccttgtcctgctggaagttgggctgcacggagacctgggcctccggtgctgcctgcaggtcgcccagcacccccagcagggccagtcccatccacagcgtgtgatgagtagccattctcctgcagcagagcgggtgtccgggctctggtgccagtggtggggagagcgagggaggtatccggata

SEQ ID NO: 128981 - DNA, 1177 bp, Homo Sapiens
  misc_feature (187)..(249): n is a, c, g, or t
  misc_feature (485)..(568): n is a, c, g, or t
  misc_feature (609)..(706): n is a, c, g, or t
gcggacgggggtggcgaggaggtgtggcgggggggagaggtatcggtgacgcggctagcgagcgctgtctgcggtccgatctcccatcgtatgtatgggtcccgtgagcggcggggctagtctggctgggagaggggggtggcattggggcgatttggctgcgggatagccttgctggcggagcccnnnnnnnnnnnnnnnnnnnnnnnnnnnnnnnnnnnnnnnnnnnnnnnnnnnnnnnnnnnnnnntctgtgttgggaaatgtgcgtgccaaggaaaaatgatggtggcatgacgcctatctgaacgggagcacattaggtgctaatgggatggagggttctgtggaatgtgggagttgcggagtgatagggcggggagggggtgggaggcccgcgtgtaggaggagagcgggaggtgcttgggggggcggcgagattgtgggtggtgggcaatcggggtgtgacggtttttatgagccgcnnnnnnnnnnnnnnnnnnnnnnnnnnnnnnnnnnnnnnnnnnnnnnnnnnnnnnnnnnnnnnnnnnnnnnnnnnnnnnnnnnnntgtgtggggctgctggtgctggcggtggtggcgaggtgttnnnnnnnnnnnnnnnnnnnnnnnnnnnnnnnnnnnnnnnnnnnnnnnnnnnnnnnnnnnnnnnnnnnnnnnnnnnnnnnnnnnnnnnnnnnnnnnnnnagtgtggcccacttttaccttggcccatcaggggagacgggacgcggtgccccagggggggcttctcgcgggcagcctcgtggggcgggtagccagcgtctttcttgcgcggcccgctcagtccctggccggcactgcccggcactgcgggacttcgctcactcctcccagggggaagacccagccggaaagtgcccttcccttgacagggtcctgtagcccttggggatgacgcaggaaagcccctcaccttgtcctggtggaagttgggctgcacggagacctgggcctccggtgctgcctgcaggtcgcccagcacccccagcagggccagtcccatccacagcgtgtgatgagtagccattctcgtgcagcagagcgggtgtccggggcgtggtgccagtggtgtgggagagcgagggaggtgatcccgggaattccggacgcggtaccagcgtctttttggtgggc

SEQ ID NO: 128982 - DNA, 376 bp, Homo Sapiens
tttttcacttaaaagaaagtttttattaacaaaagttttccttaattcacatttcaactttattaaatagtccaagggtttcatttatgaacacttattccagtttagttctcttaaattcatttgcttgttgtgcatttatgtttaaaaaggtaactaactgcactggaaaatgaaaatttatagttttatcaataggtcagtttttaaaaaatcaaaggataaggatttaaaaatattagggcattacacctttttcagaacaaggataatttacagaaattatacaaagcagattttcatcaaatatcaattatttagcgatgttttatttagctgaaatgttatttcacttgtaaaaactatctccggttac

SEQ ID NO: 128983 - DNA, 608 bp, Homo Sapiens
aatgaaatgaaaaactttatttttgtatatctgatcacataagcagcaagtctccccaattcctcaagcactttaaataattttgccatatatcactgatcaacttttaatgactcagcctaagaaataaaaaatcaagtatgaaaccaaattattgtactttgtacatttgattagaaaccacataaattgaaccatactaaattgctgatattcaacggtttttgacctccaaaaatggcaatttttacatggctcacactaaatatatttagcaataaataatgtgttttaagaaatattacaatagggcttctaaagcctcccaattctctcttttactcttatcatctcctgtctgttaggggtgtggcaggtatttttggaaaatttcacaatcttatatctctcctacataacacaggcaacttgtagttttaaaagagtataaattagtagttttgttttggtaactatcctaaggggctagtaagaataatcaaacattttattgagagaatatactgttaagttccttaatgttcctcaattgtttaagtcagtggttcacaacctttaaagttcatgacaatcaacagagaactcgt

SEQ ID NO: 128984 - DNA, 1605 bp, Homo Sapiens
  misc_feature (425)..(493): n is a, c, g, or t
ccttgtgttatccttcccgctcgcattgtgccccgcgggcacggtttttctctgggcgcggtgctgtggtcgtgtttgtgtgtgcccgccgtataggatctccgttgtcttgttttttgctctgtgtggggcgtctatttgcctgtgtgtgggggctgctcggcccgcgttgttggtttgctcgcgcccgcaggtgtgtggggcttgcccttcgcatcaactgcttactcacttcgccgtgtttcttcgcgcgtatgtggcggtgttgtttgtctcgtggccccctgcctctctcgtgctgtcgttagctgcgtcgtcctttttgcgtgggccgctgttttcttgtctgccagatacacgggctgctctccttcgttctttcgtcggggccccccctgctggggtgttttggggcgccccccccnnnnnnnnnnnnnnnnnnnnnnnnnnnnnnnnnnnnnnnnnnnnnnnnnnnnnnnnnnnnnnnnnnnnngttgtttgtaaagagtcataaaagtttattatatgaaagaaataacatggcttctgtacatctatttacagaacagagacttatttacagtgagatggaggccttggtgttggtgagggacagacagagagtgaggaggcgtgagcagcctgcctcccatggctcgaaaacagggaaccccagcaggaaggggagcagcaaaagctggtgggggaaccggcgttcctgttcttcctcaatggagacctggtgagcatgtagcaggtgggatggaacccagagtccacgcaggaccctggaggtgcaagggagatgcttgagttgaacccagaacattctcgggttgatcacagtgtccttggggtgctctggggaaagttgtgtgcccctctgcccctgacgctgtccgcagctgcagaggggaaatgtccctggggtcacagctcgctggagcggacagcaggttccagcttgtgggacagggcagtgaggaccttgtcgaacttctcatagcgccgggcctggctgctgctggcaccctgactgccccagagaaggcgcatctggaactccgtgctgaacacctccaggagctccggccgggcctggaacccctgcagcttgacttcagcattggtgtggtacaggcctccgtggtgtgccactgtgcgggcgtgcctccaggtgagccagcaccgaacgtcctacgccgtgctccgtgctgccccagggctcagggccctctggtggggccgagtcacactccagcagggtgatgagtgggcaggacatgaggaaacgtggtgttgctcaggcggtgggaccttcttaaggcccctcgatggagagctcctcgagaaaaaggcttgtagcttcttcctcagtacaaggatggcacaccctcagtagtgtcagctcgcaggaagggatcaacccattgtattgctccagtcggagaaaatcttgggccaagttccagggccaccagatgaaccgccgggatagtgcaccatagtttgacacatgttccaccgaaagttcggcgccaacggaagtggcttgttcgaaccaggacatgccagtacacccgaaaagacggtgagacggggagc

SEQ ID NO: 128985 - DNA, 689 bp, Homo Sapiens
  misc_feature (544)..(591): n is a, c, g, or t
gaagggagcagagggcaggcacgcgagccacggccacgctttattgcttaagacgcacacagaacacagaggaacaaacaaggaggaaagggcgccacacacagcccagaccaggcaggagcggcccagccgccggaagagacgttccttgcaaggcagggcccctgctggacagcacgccccctgggcgacagggtcagggaccccaggactgcacagctgcagacttgctgggaacctgggacaggtgacacgcccactctcgcctgtggcccagggccttccacctctgcatccagccatgcacccaccatttccccacagggtacaggggcagccttccttgatccacagccaacccttctcctgctgtctctggctgtcagtgagacccctctggaaagggcagaagcaggcaagccaggcagaagggggcccggggtcccactacctgggtaggaatgagcagagggcgggcagagcccttgctccttgtgggaggtagacaggtctcactgcatacatgggacagatgtgtgcaccnnnnnnnnnnnnnnnnnnnnnnnnnnnnnnnnnnnnnnnnnnnnnnnngccctttgaacccagcactggcctgaggaaggtggccccggaggaaccctgaaggcacatgtccaccaggctataatgcccctgccaccctggggctc

SEQ ID NO: 128986 - DNA, 683 bp, Homo Sapiens
cctgtttcataactctggtcactattttcatccgcatctgtcacttctgatgcgtctctaacatttataagatttctctggggagggatttgacgtatccatgccccacctctttctacatttatgggattgagctctccaccagccacccatgggctgatgtctttggaatatggatctagtaccaacagagtcagaaaaagagatggggtccaatgggctacagttgggtggtggtcctgggatacacagcacagtggcctctactgggggatggcagctttccaggagaagagtcgcaagcttgcctgtgggacttgtgtcttgtggagaggacagggctgcctcagcttggggagacagacagagtgttccgggtcccctctttccgccgcagcatgaagtctctgggggcgactggactcatggcatagaagacgttggcattgtcaggaatcaggagcacccggtccccaggaaggacttgaaagagctgatagtcacaggcccagggctggggcacattgtgcttctgcaaggctcgccggaccacgctgggggctttgtcctgactggtcagcaagatgcttcgatacaggttcccgtggtcattgtcgatgctgacgcggatgacacgggcctccgagctctgctgcgccgggagggggattcgagggctgccc

SEQ ID NO: 128987 - DNA, 1097 bp, Homo Sapiens
  misc_feature (54)..(54): n is a, c, g, or t
  misc_feature (85)..(85): n is a, c, g, or t
  misc_feature (109)..(110): n is a, c, g, or t
  misc_feature (130)..(130): n is a, c, g, or t
  misc_feature (149)..(149): n is a, c, g, or t
  misc_feature (233)..(233): n is a, c, g, or t
  misc_feature (247)..(247): n is a, c, g, or t
  misc_feature (880)..(997): n is a, c, g, or t
  misc_feature (1001)..(1019): n is a, c, g, or t
atgttgcttataggagtcaaactcagatcagaatggacacgctatgacccctgnttattgtctttatatatatagcccagtactntgatctgagtgattactcatgtcnntgaaacagaaactctactcntgtatccatagatgcttcncagtgatggaacatagagatgtacacattatttatctaatatctttaccctgtagctatcttgtgtttcctcaacttataatanccagtgatgcattntagcatccagttgtaagatgaatatattaaacagctaccagtgttggtgatacctcatccttgaaaggcttagttcatttgtgttttatacttcagtttttccagcatagcagaaaatgccgcttataatttttgtgcacacaaacccttggattcccctgtaaagttgctattgtttcatagcatgcggcactggccttttttcatcctactcattacaggcaaaactcatgtcttatttatgaggattttatagatcattttctgtaacaggtgacaaaagcagaaaagaatgaagaggctgaagtatgaactacccttggagcccatatacatgatataggcaatttcttttgtatgttaattcagtcaaaaatactacccacttgatgttttctaatctgatgtgagctcatgttacacagacttttagtaagtaacccgtgactagaaaataaactggatgcttaggagagagtgtcagatgtataagatgctaataaaacctgtttaatattattgttagctgtaagtttttgggaaatactgaacaaattagtccacaatcaagtgtctacttttcccttcactgtagggcctctccctgcacagagcagtctgtttagctgtgannnnnnnnnnnnnnnnnnnnnnnnnnnnnnnnnnnnnnnnnnnnnnnnnnnnnnnnnnnnnnnnnnnnnnnnnnnnnnnnnnnnnnnnnnnnnnnnnnnnnnnnnnnnnnnnnnnnnntgtnnnnnnnnnnnnnnnnnnncctgagcaggcggccgcaagctttttccctttagtgagggttaattttggctatggcacttggcccgtcgttttacca

SEQ ID NO: 128988 - DNA, 1218 bp, Homo Sapiens
  misc_feature (47)..(61): n is a, c, g, or t
  misc_feature (109)..(161): n is a, c, g, or t
  misc_feature (1116)..(1169): n is a, c, g, or t
cctcagtctcctgagtagctgggaccacagtgcgtgccaccatgccnnnnnnnnnnnnnnnaatgagacagggcctcactatgttacctaggctagtctcaagcaaccnnnnnnnnnnnnnnnnnnnnnnnnnnnnnnnnnnnnnnnnnnnnnnnnnnnnncagctccaactcctttctttatgcaaatacaaaaggcaaaccttggtgcgacacttagtccttagtagcaaccctggctcatcctcctagtctttccctagtatttgcatcaatggctaactaagctgatggcagacctcatcctggggtaatactcattcagggaagcagcaacaaaggagggtggggaaagaggtcaggtcagatttacctaacatgatatgtagcataataggtgcccattaaatctcagctactagtaaagttggtgaggaagaggtatggaggcattaagacctgaagcactgagttggtccataaccctgggctttagaacaaggtctggttttattttctggcagaatcttttaaaatataaaacagataaaacacatctcaaccctgcaatctgccagcatgccttgtttctacaagatgcatgctagaccatgagactacatagcaaagggtctttaagaggatttggttgggagaaatagaaaaagcagatcttagggaagcctgggctagcccaaaagctgagctacatccctcaacactagagcagtccttgtcttttcagatcctcgtatgtcttcttattcacaacattcccacttgagtcttcatattcttcctcagtgtcaggctgccatcgttctgaagccttctgcaatttcagtttggcccacaaggagacagcatcttcaatctgtgtcacattagcaaagtgagcagtgtttgggatgcccaaacacctcatgccatgagcatgacgccattcagcaaagtgtcgctggaaggctttgggccctcggtaggtgtagtttccacaaatctcacagttgtagttgatatttaggccatgaagcttatacagccagtagggaataggtttgccatcccagccaagtggcaggtttttggggttgtaaatgatctcgttctcttcatnnnnnnnnnnnnnnnnnnnnnnnnnnnnnnnnnnnnnnnnnnnnnnnnnnnnnnctgtcctggcttgcttgcgctgtacattttcatgagtgagatgtcgctg

SEQ ID NO: 128989 - DNA, 1726 bp, Homo Sapiens
  misc_feature (74)..(74): n is a, c, g, or t
  misc_feature (527)..(582): n is a, c, g, or t
tgcattgctaggcccatgaggcctacatagcaaagggtcttaaaggaggatttggttgggagaaatagaaaaangccgttcttagggaagcctggggctagcccaaaaagctgaggtacatgccctcaccactagagcagtcccttgtcttttcagatcctcgtaggtcttcttattcacaacattcccacttgagtcttcatattcttcctcagtgtcaggctgccatcgttctgaagccttctgcaatttcagtttggcccacaaggagacagcatcttcaatctgtgtcacattagcaaagtgagcagtgtttgggatgcccaaacacctcatgccatgagcatgacgccattcagcaaagtgtcgctggaaggctttgggccctcggtaggtgtagtttccacaaatctcacagttgtagttgatatttaggccatgaagcttatacagccagtagggaataggtttgccatcccagccaagtggcaggtttttggggttgtaaatgatctcgttctcttcannnnnnnnnnnnnnnnnnnnnnnnnnnnnnnnnnnnnnnnnnnnnnnnnnnnnnnntgtcctggcttgcttgcgctgtacattttcatgagtgagatgtcgctgttccccgagaatctctacatattcatagatctgggcttctagaaaagcaatgtctttgttcctttcagtgtctcgcttggtgccctttgacttgggatttttggcaaacaaagaggtatcaagtgactccagggactttcctttggtactgaatagtctctgggctcgctcttctagggtcccgccacatttcaagcctaaagctaagagagcagatttcaatctgtccaaacccagagaagccaactcctcccaggaggagaatgcagagaggtcaagatgggctccagcatgggtcagggcactgcttgtctctttcggccatccaggaaaggtcccattctcccatttcttctcaaactcagcctgaatcttcccaaaaagttcattctgatcttggagaggcttcactctatctgtgtaatcctgaaggtactcaagcagcatctctaggtatctcttatactctgcattcttcctttctttaggaatgtcaaataattggtcaaagatggacaggtatgtgatataatccagcttctcagatgccttcaggttaatgtacttgaggtaacagtcatggagatcgagataacgaccatatccctcttcatctgtgaactccaccaagttttgtgcctcttcacttggattctctcgagccttcaggagttcctcaaattccactgacattggcacacagatctcatttgggtgcttccggtggaattcctttatttgcttgagtctattatagaattcagcaaactcattgggtcctgaaatggcattgagctcctcctttcgtaatccatccttatcatcatacaaatccctcaggttcccactgacctccatatacctatcttgcatggcccgagtgcggtgatcagaattgatctggtcccggagcgtggacttcttggtgagcatctctttagccatgacgtccatgagccgttccttctcctcatgatagcgccgctgctgctccagtattgtctccatcttcccttagtcgcggcttctcaattcagaccaccaaccctcgtgccgaattcacacacacagcctcgtacctagccgttatattcac

SEQ ID NO: 128990 - DNA, 553 bp, Homo Sapiens
gaatcacagaatagcggtaccatgatagaatactgcaattgtggtcagaattacagtatgcacaaagaattaattagcattattaaagagtcctcactaaacatttcatatgatcacactgaagaactgtaacattccatagagtgaagtggttcaaatttctcttggaatttttacttttgttggccttattttatgatccttttcatatttcttttgacttagagtattaatacatggccaaaataatttagttactacctcatacaaacaatataatggttactacacatcacaggaacttagttttggtttaagtcatttttgattgcttttttccaatggaatatgtatataccaggttttagcaaaatgcacacttttggctctttttggtatatgttctttatattttaatgtgagtatatacactaagaacaaactaaattgtgatttatgatcttcatttattttaatggtaatggttttaaaatatgttcctgattgtacatattgtaaaataaacatgttttttaacatgctgttgtatagt

SEQ ID NO: 128991 - DNA, 683 bp, Homo Sapiens
tgtttttgaagtttttaataattcaagcctatcaccaacacatcaatatgttttctgttttacattgaaattatatgagaatacagagaattgctctgaggattcctgtttctaaatacattatgggctttcttattttctattaggtcttgaaaaaaagcaaatgtcagttaatgtcacccaaaagaacaagggattttactcaaatatttcttggatgatatagtactttttaggaaaaacatctgccacaaaaatgtttgtctcaaaatgatgttttgctggcatagatcactactgcaagtgccttgctctcctgtgcagaagggcatgctttgcacagtgcatggctgttatcggtactatgtaattgtccatcatcacagcactatgatattagtgctcagagtctatcagtcagttgggagatattttggcttaaatgatgttgtttcactgagttgtgtaatgtcaagagattctgctgttactaaaatagaacacacaatgctatattaaatatctaatttcttaaaatgggactctctggttttctaattccagaggaattcaatgatctaatggtttcactatcaatccatcagcaatccttctttaagagtgtctattggagtcttgaggaccagaccagctgaatatcttaccaggtaagcttttgttga

SEQ ID NO: 128992 - DNA, 1219 bp, Homo Sapiens
  misc_feature (43)..(63): n is a, c, g, or t
  misc_feature (573)..(585): n is a, c, g, or t
ccctcaactaaagggaataagcttgcggccgcggctgtaggcnnnnnnnnnnnnnnnnnnnnngataaagtccttttaatggaaaatgtaaaacccctttcaactttaatgtacaaagccatatgtaacacttgcactttaacaaaagcaagccaatgttttaaaaaaatacatcattaaatgtatatatgtatatatttacatagcatattaagtttaatatttagctttaaaagttcacataaattttaccaaaatgagacaattttaaataaattacaccttttgaaaatgtttaattgtacagtcaatagcttcaacaaaatattgaagtgtctgtatttagtatctactttatatactttatactttacaaattttacaattatttggcagtaattttctgattatgacatgactgctgtgcgattcagcaatttcccagatgcaggcaatagctggtgtttgtgtcctattctcacagtaactgtctcaatgtagtgaaaaatatcagtaattttagtaaactgtacaaggtcacatttacacttgatcaacaatatagcatagaannnnnnnnnnnnnaccaaaaataaatacatcattttaaatctggcattttcacaaacatcatatacactataatacaaaacagctatatagtgctgcttttaaaattctgcttgttttataacattgaatcacaggagctgtgacatatgctatactgctgtggtgtcagtaacaagtaattactacaaagagaatttcttggcactgatggttttatgaagcttaaagtcagtgtgcatacatatcatcattcaaggttaagtaatcccagttcaacaacctaaaaatatcaaactggatcacacttaattttcttccatatcgtctacttcatcctcgtgtatcttcaaggctctcaccatttctttgactgcatgatacaaaatatttttaacctgtagtttatcatcataattgatttcttccttcaaaagtctcagttcctgtgttaaatgaaatgactctacaagatgttctggagacacaaatcttcagttacctgaatacagctgtgaaaattctgaacctgatgaagtgctcccgctggcaaacatagcatcaccaaggaactgaataagagtacaggttctgactcccccggccgtaatggccgaattcccgggcatatgtccggtaccgtcgactg

SEQ ID NO: 128993 - DNA, 1050 bp, Homo Sapiens
  misc_feature (535)..(547): n is a, c, g, or t
  misc_feature (891)..(954): n is a, c, g, or t
gactgaaaactactttatttgaagacattttcttctatagttctaaacacaaaaggaatgctgttatagtgggtatttcataggcattcttgtattcaaatgaatcacataatgtttacacttttaagctagacttgaaattgaagacttaatacaaccttttaacaaagaaagtatcagtcatatcaaaacataactattcattctacagattatcactttccctaaaatgactactagatatgaaaacattgcagggacagctcaagtgccccattcttaagggttttttttaataggaaaaatgacaacgtaaatcacattttccttttctttactagtaatgaactatggcaatccatttgagaaagcaccagccaaccgtacaagtcatttcagcaccctttgctcttcaaaactgaccatcttttatatttaatgcttcctgtatgaataaaaatggttatgtcaagtacagacgtcagcaacgtgtcagttggtgtgaatttatgatgtgttcctaagtcaacagagnnnnnnnnnnnnntctctcatgtgaataaaatctaaggatgaaaaactatcctttgataattatcacaaggcaaaatcaaccaccttttcatcagtactagtgtggaatggaaatttctttattaatactttttatgggaatgttttaaaggcataggtataaatgcacatgcaatcagcttgcccctcttagatactaacttccccagcttcactcctccttttcactggaacaagctgctgaatccctaactccaaagtctgcagtgcttggtgagcatttttaaataaagattatatgtgattttcactttttcacaaaaatgaagtacagagaagactgaaaagcagtgagannnnnnnnnnnnnnnnnnnnnnnnnnnnnnnnnnnnnnnnnnnnnnnnnnnnnnnnnnnnnnnnactggttcgtgatgattgatagtaaatcacaaaaacaaaggacagatagggccaagaccgaagggaccaccagaccaccgagccccaatgtgcccc

SEQ ID NO: 128994 - DNA, 1104 bp, Homo Sapiens
  misc_feature (192)..(200): n is a, c, g, or t
  misc_feature (1005)..(1005): n is a, c, g, or t
aaggctccctctcccaaagaagtcccagaggtggagcgattttttccccagtcaggcggttgtaaaaaagaaccgggcccggggccccaggttttataaaccgcgtcccttagtaaggggcccccttttttcaccaaaaaacggggttagcggaaaagctagggcccccttgggggggacttttaagagcgnnnnnnnnnggagtactagatggcatggggctttcagggctcggtgagggacggcgaagccaagcgaggcccgcccagtagccgggggtaggtattggggcgctgccaaaaactcatttttcattaaacacggggtggggtccccagggttcaggctccccggggcccgatcatggccccagtccgcacaggagcgcccgggccctggccgcccgcagctccaccgctcagccagtgatgcgcacatccgtgcggcggcggatccgccgggccccgagccgcctcgggcaggatggcgagcagctgctcttgcaccagcatctccacgatctgctccttggtgcggatgtcaggccgcagccactggcgggacagctcccgcagctgccggaaagcctcccggggacccgccgcatcctggtagcggaactgccggaaacgctggcggaacgtctcgggaccgagtctagagccggcggggcctggtgtggagcgcgcttcagcttcggcctgaggcgctacgctcacgggtgcgggcccgagaggcagctccagggccgcggaggccgcagctcggggcgtagggatggcttcagggaccgcggcgttgggactggaaggctcaggggcaggcggtgaggcctctggcagcgaggagcccacacagttacgctcaggggctgagctcgaaccggctccttccagtttctccggtggcaccgccgcgggactcccagtggccgccaagatcggctccgtagccgccataactccagctccgggcgtcactctttgtccggtagctgtttgctcnagcactgcgtctgcaccagcgaagcgcctgcggcagccggaagcgaaagtctccggacgcgtgggtcgacgatatcccgggaattccggaccggtccac

SEQ ID NO: 128995 - DNA, 777 bp, Homo Sapiens
tgtttttttgccaaaactcatttttcattaacacggggtggggtcccaggctcaggcccccgggcccgatcatggccccagtccgcacagagcgcccggccctggccgcccgcagctccaccgctcagccagtgatgcgcacatccgtgcggcggcggatccgccgggcccgagccgcctcgggcaggatggcgagcagctgctcttgcaccagcatctccacgatctgctccttggtgcggatgtcaggccgcagccactggcgggacagctcccgcagctgccggaaagcctcccggggacccgccgcatcctggtagcggaactgccggaaacgctggcggaacgtctcgggaccgagtctagagccggcggggcctggtgtggagcgcgcttcagcttcggcctgaggcgctacgctcacgggtgcgggcccgagaggcagctccagggccgcggaggccgcagctcggggcgtagggatggcttcagggaccgcggcgttgggactggaaggctcaggggcaggcggtgaggcctctggcagcgaggagcccacacagttacgctcaggggctgagctcgaaccggctccttccagtttctccggtggcaccgccgcgggactcccagtggccgccaagatcggctccgtagccgccataactccagctccgggcgtcactctttgtccggtagctgtgtgctcagcactgcgtctgcaccagcgaagcgcctgcgcagcccctcgtccgataacaccgcctcgacctagag

SEQ ID NO: 128996 - DNA, 550 bp, Homo Sapiens
tttttttaagatgtaaattttaatacattatttcttttttgaacttgaacgggaaccagaatgggatgatccagatgatgacctgtggcgtctgggtaaagtagtggtgttccgtaggggttggccctgggctcagggttgtttagtgttttcaccaatcacctggctttcgggtgaccgtgatcttgttcgtctttttttgcgatcaccagatgaagaagatctagaacgacttctctttctgttcctctcaggagaagatgatgaacttgaataagatctttttcgtggggaagaagagcccctgtgggacctggagctggatcttgatttcgacccacgagatctcgaacgttctctggaactggcacgagatcttgactgcgaactggaagaacttcttgaacgggacctggacctagaccttgaacttgagggggaggatgagcgtgatgaagatcgtgaatgtgaagatcgagactttgagcgacttcgtctattagatttctttttattactagcttcttcttcactggcaacaagccagtag

SEQ ID NO: 128997 - DNA, 648 bp, Homo Sapiens
ttttaatttgttaattttaatacattatttcttttttgaacttgaacgggaaccagaatgggatgatccagatgatgacctgtggcgtctttcgggtgaccgtgatcttgttcgtctttttttgcgatcaccagatgaagaagatctagaacgacttctctttctgttcctctcaggagaagatgatgaacttgaataagatctttttcgtggggaagaagagcccctgtgggacctggagctggatcttgatttcgacccacgagatctcgaacgttctctggaactggaacgagatcttgactgcgaactggaagaacttcttgaacgggacctggacctagaccttgaacttgagggggaggatgagcgtgatgaagatcgtgaatgtgaagatcgagactttgagcgacttcgtctattagatttctttttattactatcttcttcttcactggcatcaagattatattttgagagatcagcgtcatcttcatcctcatcctcatgtaacttatatttagaaagatctttgtcctggtcctctgtctttccgctctgattcttgtgatgagcttgcttttatatggatgcggggccaactgcttttccttctgtatttatcgtttgaccgccagcctcgtcgta

SEQ ID NO: 128998 - DNA, 1312 bp, Homo Sapiens
gtaattttacacatttttgcaaggcttttctttgatatcttaacataattgagaggtggctatattttgaaatgagattcttttgaaattgtagagaattttttattgtatttatatgataactgggctcatatccaaagtctaaacatcagataattttatgtgtgtaagttcctatctcaatttttaatttttttgctagcatcatggtactgaattttgtatactttcacagtcttaagaatgaatgctgagatttagctctagcttactagaatgcctactctctccattatgtcttacagacgccacaggtcatcatctggatcatcccattctggttcccgttcaagttcaaaaaagaaataatgtattaaaatttacatcttaaaaaaatccagtacagtgcatgaagcatatttttaaagaagttggtgtcttacttggtcagaagtgctaaatctgctagtagaggtgcatgcctttcattgcttttcaaaacaatacagctgtgtttatttgtgaagttaaaagtaaatagcattttaagccataatgtcccaaaatagatgttctgtcattcattatttacaaccatttgcttcatttaaaagccatttcagctataacaaagtactttgcttcctaatttaaacccatttttgtcatttccaaatacatcctgtccattggctaagacaggattacctaggcttgcctgaactttgggcatggaagaaagactggaaactagttggaaacaacatacttatggaaaagaaagtcagcctttttatgctgttaacagatgtcagagtgattctcaccaaaaaaagttaaactatgttgtaagcagccaactgtaaatgtctattttgaagattccctatgctaagggtgccttagaatcattgtgtctcttttatccagctttacttttttgctccacatttaatgcaaaagaatcttgtgatgtctacaaggagagaagtgggatatattttcctttctgacacataattgtggggcaaaaaagaaagtcttaagagtttatcttttctctgctgatacggttgcttgataaagacatctcaaaatgtttaccaatgtgttaagaagctttgtgtgatattcttccaaatgtagttaccaaatactatatggtagaaacaggctaaatcatacttaatgaggcaaattgaagtaagcttttaaagtatatttctcttatggtgaaagggccaatggcagacattgtgaatttagtgaacatttgcctcacggatgttaactataaacacactgcgtacat

SEQ ID NO: 128999 - DNA, 1921 bp, Homo Sapiens
  misc_feature (55)..(55): n is a, c, g, or t
  misc_feature (1343)..(1351): n is a, c, g, or t
ctgccagcagctaggcctatgggtctagaaaggctgattaggataagggactgangtaattactcccaggtccttttaggtgagggatactttcaggactgggttgggtcagccagtcagaaagtagccttcctaggagctttacattggacagctgctgccccaccgatacatcttggcacacaagagttaggccactgtatctgtcctgtcccacacacttgctccagatgatctttaccacatgacacgtgaacatacactgtgtacacctggagcccacctgacatggagctttggactgctccacaagtctccagcatgcctttggaagcccttctttattgggaaataaatacagagttaaacaggtgggccggccaacatctgtggctttggaggccaaaaggaaggagtctgacttgctcagaactcagatctccatgagctggtcattccccacgatcacctcattcactcgtttagctttggcttcaatcctctggccacttccaatcaagcagtccttgatgtctgcacccttctcgatcacagcattgttgcagatgacactgccttggatattgcttccttcctccacagtgactgagttcatgagaaggcaattggtaatagtcactctatcttttatgagacaggatgagccaatgactgagcgcttaatggatgacttctctccaatctgtgtctctggcccaatgaggctgtcaactccaaccaggtgtttgctgacaatctgggctgacgaatggactggtggtttttctggacagagagcagacagcaatttgggcacctgtctgtttgcttccatgtagagtcccagtgtgctcactcgagagcagagcccctctttcatgatgtggacatagcagcgcacctgtgatctggacaagtcttcccacctgtctcctcgacaggcattccagcaggcatcatagggagccaggttcagtgtattggcttcttttataaaactgtagatatctaaggacttcagctcctttttctttagatcctcctctttttcttcttgtccctgttgtgaggaagctgaggaaaactgttttctcactaaatatggaatcagttcactccggatagaagttattgacccattttccattaggaaatccacgatgtattttttcaaacagtagaggtgggcatccacaagacccgtgtggaaacgtattctaggatgcttctgtaggatggatcccttaatgaccagctcttcatccaagtctgcttcattagccatgaagagcagcctctttcctgtgctgtccactccaatgaagtcacgctgctccactgcnnnnnnnnnccccttttgaccgggaacaggttctatgctatcttggccttttctcatcaacatagcaagtgatgcatcataagctctaaacaggtccacaacctcatgtaaggcaacgtctgttatcagatcacagctcagcaccagcacatctgtcttaagttttggatatatgtagcgcaaagaatctgcagttcccatgtcagcgtcatcaggaatacacacaatatctggcttcattttcatcttgaattctgcacatagagccttttgaacatccctggttgtaaccacaatgacttcttcaaatccaacacgctcaagcaggttcaatgggtaccaaattaaaggtttgttcccaactggaagcagaggtttgggaatgctggaagttaggtctgtcatccgagatcctccacctactgccatcactactgcttgaaattccatttttacaaaccgggtcagccagcttgtgtgcggcctggcagggcagaagtcacagctataactcagctcccggcacgccgcaaccgctcccagcgatctccacgccgcctctgacatcccgggaattcc

SEQ ID NO: 129000 - DNA, 937 bp, Homo Sapiens
aataataaaaatatcaatttaaagttttattcatgatcgtcttattaaaataaatttaattgcaaaaacaacctgtcttagaatacagtatcagatgttttaagtacatgtgatcaacagtacaaataattatagcagtcaaaccttagtatcacacatacttaatatattagatatacacaataataaaatcactccctaccttgaaaactttacagaagcatttttaattttacaacacaaagctcaaacgaacctacaataagtctagtagtctgtttacgtgccaagggataaggctgaacaataaattaaccctttaaaaatgtctatgaacaagtacaattttctttttgagttctgcagagcaatgaccactaagaaatatttttaaaggctgaacagaatccagcggcaatgaagttaattaaataagaagactaagagaaaaataaacagttcaatattaacaatacagtatatttgccagcacaatcaaatcagtataaacacctttaaaacatgaatactgaacttagtaaaatgttatattgtatctaattatgtcagatatctgatgagagtgctttttattatagaaatagtttcttctctcttacacaagactttaaagcaaatccaaacagacaatttaactgttttggaaaatgtattcactgcagaaatgcccacaataagccatgctatctgatggtatggtaatgtgaaatggcatggttacgtgaaataaaaaaattttactagatattttttacttcaaacctgaagcaaaagtacagaatgctgagttcattactttatgtatctattgtaactaggaattactacattaaaaatattcattcttacaatgtttgtttttagttgcctagatatgtaatgggccaggtgctatatgaacactgaagaataaaac

SEQ ID NO: 129001 - DNA, 672 bp, Homo Sapiens
ccatccacgtgtgtttattttagatgctttctgtgtgggagctggggagacaggtcagtaggaccccacgcctgtgcctgaggggccccagtctgggcaagtggtcccagcccttcacaaggctgcacacactccctgtgcactcgcagaggcttctctgaggaggaggctgtgaaggaggccacgaatgcaaggacatttccaggcaggcatcctaggtgcagggacctgccgcccaaagccagagaggtgaggtcacagcatcagtagctcccagggcagcctcttcctcatgtgtccagtggcgcgttcctcattcagccctgggagaggtgttggggtagtgtcacaagtgctcggtctgattgggcgtgcacacgggacccctacatctggacccccaggtgtgatctggggcctacgtggtccagcttgggaggacgccggggccagcttctggagaaggccaggctcccatgaggcctgacataatgaacagggggtgatgatggcctggctgagagggcacagcaggtgtggccgggagacaggtcaataattttgagcagagaggatgcccgccaggagccttaggatgctggcagggaatggggtgagggatgaggatcgggggtgcagctgcagggctggccaacgcccggacaggccaca

SEQ ID NO: 129002 - DNA, 703 bp, Homo Sapiens
ttttttttctaatcagaatacatttctttcttaatctttgtgagtacataccaccatactggtggcaatggcggtgagagcctctgtggaccagggaagctgtggtgtgagttccatgctagctctataagccaggctctggggcagcatccaagacgctctgtattagatactgaccagtctcatgtgccactggtgaggaggaagacaacgtgcttttcccaaagggcgatgatctccccagatgatgacccttctcaggaggcaggagcgctttcccggaataaccttttggctccttattcagctgctgcagcagatactcattagttaccaccagggatctctgactttcatggagaatggcaactgtcttctccagctttttcagctgggcaagctcctggttcaggcaagccacctgcatgggtcagctgttggtttttgtgcagaagatcatcataagtatgtgactgttgcccactcacaattgagatggcagcaccttcctccaactgttgaattttttctgacaaaatgaggttttcctccagcactttgaccagtttttgcttcaaactttccgagaacttcttgttgaggaggagggagccggagcattccagtgcttatccacaagctccaggagctgtctgaggacagtggccacatggggggttctggcagagatggggggactgtg

SEQ ID NO: 129003 - DNA, 1592 bp, Homo Sapiens
caggagcagagatggggctgaggcataggggaggcccctagcgctgccctgaggaggagggggtgagaggctgaggcactcagtctcccttctgcttgggtgcttgcacagtcccattggccagagcagtggggttgcctggggatgaggcatttggtgtctgggaggtgcctcgagaggtgtgtggggggcgcaggtaggtgctgaagagtttcccatagagtgggtcatggagggagaagttctggaactgacagagggagaggccttggctggatcctgcctggcacagctcagcatgcaaagctgtggcagcagggtggggtgaacccagcagcaggtgcaggatggtgctgaagccgtctttgtacagcaggcggttgggaccctctgcttgctcttcagcaaagagctcaaaggccagacgagttagctcttccaggctcctgcccccatccagagctgctagtgcaagggccacatctcggaagtccaccaaacccttggtatcctgctggaagtagccaaaggcaccagccaccgtctgaggatcagagagctgtagctgcctggcaaactcttcctggctgatcattcgactccggcctggctctgccccagcgtccacatagccagcggacagcccagccttccgaagcacttttcccagttcccagagctgtggttccaacgccaccttcagccggcccaccacaatcacaggtaagctccctacaaactcacattcggtggctggaatgcccagagcctgtgccatgaccctctgaacattgttggcatagagggtggggtccctgctctcctcagggctggggtgatacacaggaaggaactccacatccacaatgctgcagggctgagaggctgtgagccagaggactttgagtactccaggacccctccatgcccagctggtggtgtccagactgttggggtagcggatgaggacaggctgcacaggcacccctgcgatgaaggctcctggtttgaacttaagcaaagccttcttgttggaacaggtgccctcaggaaagaatagcacctgcggccacttgcctcctgaggtggcccgccttcggacctcctccaccactctgcgtcgagaagccgggtcatgccgggataccaggatggcttggttgaatcgaagaagggctccaatgacaggaacggaaaggttctcagctcgggacacaactttgggcaggtcacagggcagcagaacaatggggtcaaagaaagtggagtgtggggcagcaacaaggacaggggcttgaaggcgagaggctcgctggccacgaacgcgaatccggaggaagcccagcaggaaaaacagcaggcggctcaggcctagcaccccgttgtggcacacagtcttcctccatcctgtaattggctcctgaagctgctcctcactaagaccggccacttgaagccaggcaaagggccagaggagaaagaggacgataaaggccagaagcactcggatgggggccagcaatgcccccaggaggcagaacttaacccggacgcgtgggtcgacgatatcccgggaattccggaccggtacc

SEQ ID NO: 129004 - DNA, 509 bp, Homo Sapiens
ccttttggaagaggaggagcctgtcaggccagtctgtggggcagggtgaggccatggcatgaggagagaacttgactcttatccctttctctcccaagctctttgctgaagagcaagcagagggtcccaaccgcctgctgtacaaagacggcttcagcaccatcctgcacctgctgctgggttcaccccaccctgctgccacagctttgcatgctgagctgtgccaggcaggatccagccaaggcctctccctctgtcagttccagaacttctccctccatgacccactctatgggaaactcttcagcacctacctgcgccccccacacacctctcgaggcacctcccagacaccaaatgcctcatccccaggcaaccccactgctctggccaatgggactgtgcaagcacccaagcagaagggagactgagtgcctcagcctctcaccccctcctcctcagggcagcgctaggggcctcccctatgcctcagccccatctctgctcct

SEQ ID NO: 129005 - DNA, 1673 bp, Homo Sapiens
ttttccaggacaaaaaataaaatatttattgatctatcacagcgagacacaaaaagatgggcggggcaggaatgggaactgctctgaagttcagtggaccgagggagggatggggggtatacagtactgcatgtggggacaccccgggtggggaggagatgcctggcaccccagtctgcacagccccgcacgccctgggggagtgtaggatgggggtggaggcagggcacaggcggccatgacaggtcaaccaggttgatggtgggtgcacccagccagctagtggtgccgggcggtcaactggggacatggatggacggaccgatggatgaatggacggatgggcggatggattctacaagggcaaggtggctattcccagtgtggggtggttttccaacccaaaagcgccccagatgtggggaacagcgatcggtggggaggagacggccaagtggacccaggagaggagggatgctagagcgaatccagctttgaggcttcaggtgcttgggtaccaactggatggcagccaacggtgggtcctggtgggcagggggagctgggactgcccaggaagtgtctgcaccatctttagaggagccccaggtagggggttccccgatgggccacccttccctcctccctccccccaggaagataagagcaccagcgtgtagcaccaagttcccctggagatggaggctgtgtggagggggagctcctaggtgggaagggatggcgcgtggggggccaggaccacatggcccttgcctctgaagtagggggcctcctggtcggggcacttggccgctcccctcttgtttccttgccctgtggatctgcaaggccgcccggcctgcccgttccctcctggggtggggagtcggaggggcatgggatggggttacaaagggtttacattctccaccaagcagtagcaccaacgttgatgaggtcgtgagtcaggggtcctaggaagctcattttctcttccggccacaagctttccccaggcaggccccacctgggaaaatgggagacaatccgaagccaggtcttgctgccactaccgtatttagctgctttagcggctgcagctggaggtatacctccaaggcccccaacacctggaactccaagccctccgactccgagtcctccgagcccagcggctcccactaggccaaactgggcggctttggcagcagctttggctgcggcagcggcggcggcgggtccggctcccaccacaccgcctgggatgcctactccaccgagagccccgagccctccaaggaccccaggcactgctgctccatatttggctgctttagcggcagccagggctccaggtactgccccgaagccaggaacaccagcaccaactccaagtccaggaacaccagcaccaactccaagtccagggacgccgacaccaactccaagtccagggatgccagcaccaagcccagctgcagctcggagctgggctttggcagccaccttggcagcggatttgctgcagctgcaactccaccagggccaatgccgggagccacgccaacgccaggagccacaccaactccaggagccacgccaactccaggagccaagccaactccaggagccacaccgacaccaggagccacgccaactccaggagccacgcc

SEQ ID NO: 129006 - DNA, 1110 bp, Homo Sapiens
  misc_feature (299)..(351): n is a, c, g, or t
tttccaggacaaaaaataaaatatttattgatctatcacagcgagacacaaaaagatgggcggggcaggaatgggaactgctctgaagttcagtggaccgagggagggatggggggtatacagtactgcatgtggggacacccgggtggggaggagatgcctggcaccccagtctgcacagccccgcacgccctgggggagtgtaggatgggggtggaggcagggcacaggcggccatgacaggtcaaccaggttgatggtgggtgcaccagccagctagtggtgccgggcggtcaacnnnnnnnnnnnnnnnnnnnnnnnnnnnnnnnnnnnnnnnnnnnnnnnnnnnnntctacaagggcaaggtggctattccgagccgctcccctcttgtttccttgccctgtggatctgcaaggccgcccggcctgcccgttccctcctggggtggggagtcggaggggcatgggatggggttacaaagggtttacattctccaccaagcagtagcaccaacgttgatgaggtcgtgagtcaggggtcctaggaagctcattttctcttccggccacaagctttccccaggcaggccccacctgggaaaatgggagacaatccgaagccaggtcttgctgccactcctccaagtgggaactgcccggcaccccctaggacacctccaaggccagcagcaccgtatttagctgctttagcggctgcagctggaggtatacctccaaggcccccaacacctggaactccaagccctccgactccgagtcctccgagcccagcggctcccactaggccaaactgggcggctttggcagcagctttgactacggcagcagcggcgccgggtccggctcccaccacaccgcctgggatgcctactccaccgagagccccgagccctccaaggaccccaggcactgctgatccatatttggctgctttagcggcagccagggctccaggtactgccccgaagccaggaacaccagcaccaactccaagtccaggaacaccagcaccaactccaagtccagggacgccgacaccaactcccaagtctagggatgccagcaccaagcccatccccatcatcgg

SEQ ID NO: 129007 - DNA, 1191 bp, Homo Sapiens
  misc_feature (54)..(66): n is a, c, g, or t
atgtattgatttcatgatttatttatatatctccccaccccttccaatacttgnnnnnnnnnnnnngaatggcagtaccagaaggcattggttaagtgtcccaggaaccacacaagcagtgactcctaaagaagttcagaggaaggagagaacccatggggagggggtgcagtgggggtgggtcagggtgggctccctggaggggagaaatggtctaggcaaggatgcagactggccagtaaggtgggtccatgcaggaagctgagggaggtggaaggcccgtgggtctcgagcgcatctgcccgccctagtcggggaagagcaggaagccggagaagacgctgtcagagccctggatgcccaccatgtcgtagtagtcattgacagccagccacacctcctcgcccacctgcaacctcagcagcacaccgcccgagttgacctgattggttttggacgtgtggccacagaaggtgaccactttgacgccgctgcggtacagcagcacgcacaggttggctgtatgcgacgcgtggtagacaaagtagtagaggccggggactttgcaggtgaacttgccagtgctcgtgtcataatctccctgcgggttggtgaggaccgcgttgaatctgatcaggctgttgggtgcagggggctggtgggtctgccgagtgaccgtgaacactgactggaatttctgcttgtatctgccctcctcacctggctctccagggatgcccatggggccgggcacccctggcatcccagggggtcccatggggccatttttcccaggatggccgggtaagccgggttctcccttctgccctttgggtcctcggatcccgggaatggctgggattcctggctcccccttgggccccggcagtccgtcgtacccatccttccctggtgccccgggcaggccgggcatccctgggatcccgtagcagcctgtgttggcttggcccctgagggcagcagcagcatggagcagcagcagcttcagcccaaggtggggcagggagctgggccccacgtccatcccggagaaggaactgcaggtgggcggtttctggcctggcacagagatgtcctcagatctgcttcccctctcccaggcaagaggacacggtgtctccccggccgtaatggccgaattcccgggcatatgtccggtaccgtcgactg

SEQ ID NO: 129008 - DNA, 592 bp, Homo Sapiens
agtttgaaatgtgtaagctttgatttaaaccatcgtttacttcagtatgttaatgatgtagtaaaaatatttattgaaaggtgaattcgagtattttaatgttatacctgccattttttttcttaaagcatattctttgcatctaactgccagtgccattgtcaaaacttattttttaaatcgttgtacatttcttattaaactaagtgcttaattttaaagtattatgttgccatcatatagtgtataaaaatgtataattgccaattgattgtaactattatttatttttaaatgaaagtgtaagaatgctttctgattcaacaaatttgttatcaaactgtttccttatcctcttttctgatgtagcataaaaattgtcccggtttgagttataactgccagtagatgaccagtcacaagtgaaccacttctcagttgccaatctttgctcatattaaaaacaacttacaaatacttagtttttgtatctaatctctgattattaaaatgtttataaagtttatttttaccaaagagatgcaattcattatgagaaagtattgcataataaattttgttttataacaaa

SEQ ID NO: 129009 - DNA, 1477 bp, Homo Sapiens
gccgaacgaaatttttacctcacgttcatctcaccaaagtctcttcagaggagcctggtttacagggtgatgaagctgatgatgatacagtagtgtacacactgctaacgtgaatcagactggaaagcaagtcagtacttcagagtagccccgcagaaaaagagcgatactaagccttcttagtgtttcgtttgttagtagtgatgaagagaaaactgcttggaagcttccatgggtcactagttagggacagagcagcacaggtgatcagacagggctgagcaaacacctgactgaccaacagaaccagtctcctcagcagcttacattgcagtcaatacagagggttatggaatttattgatttctgcttgaaataaacaagataagcaaataggagcttacaacacaggtcccagcaggaggggtcacgctctgcatcaggccggtgtccacgccgctgccgtgtgtgacggatcctgataggcctggctgctgtagggcacctctcgatttctctctgggtccttaaccttccagtagcctctctgcagtccctcatcggctggcctaaccgtcctgccatagctcccaggtctcctgggctaagcagctcatggcattgttggggggcaggagtttatgtcgatctgtaactacaccattcctgcagttctgaaatgagtggcccccattttcaatctgcaggcattttaatatcgcaaatattgtagcacttctgtagtatattttgggaaaaacggttcttccttcagtctaaaacaaatcaagccccattttataactggctattttgtaaagactcaaaacagattagagatcttaatgaaatgatctcttaaatgaaatgatgttctttatttcacgaaatcatcaatcttaagcacgagcaggaataaacaactcccagaagaagcttaattcattcttcctggattttcactgtgtgttattaaatcacaaaaatgacagtccccacactgccctttcccactgacaccaagtccaaccgtgagcacagtgcctctgcgaagcatcctggcacccatggtgagcgctggcgaccaggcagtctctggccagcaacagggactgctcaagttaccgacgttggtaggagctgggctcgcatggccagaatggaaccccctagactttccacacgtcacctgcctgaacgctaactacaaagaggaaaggcaacttaaaggtgttttctagatgcagcatcagttagtccctctctttgtgctttaaggaagatgctttgtgcttaacacattcatctgctgatgggacaagccattctaaagggcagaaatgatcatctttagaattaacactgactttgtaacacctggatgttaactgtccaaatggcaaattattcatcatttctagggatacagttagctagctgtagcatctaatttttacttactttgatgactgattgt

SEQ ID NO: 129010 - DNA, 854 bp, Homo Sapiens
  misc_feature (791)..(791): n is a, c, g, or t
tttttcactcatccaacagttatttattgaacgccatggaccaggtaccgtgcccagcagctgggatgcagcactgaacacgagacaagcccctgccctggaggggcttacatcccggcagggtaaacagccagtaacttcagaaaccaaacatccagtacgtcagagtgccatgggaaaggtacgctgagcaagggcgggcagtgccagggctggggtgccactgtacagggtgatggggaggccctcctccctggagagggcggcatgatcctagtgggccgaggtcaaccgccagggtcaaacggaacacaacccactctcaggaagacatccctaacacaaatccagggactttgtttcttaaccttaaaattggaaacacttcttgctaccagggatggggggtggggctcagcgtttggggaaccggagtgggagtcttttgctgaacagacttttgttttcttaagttttgaactacatgaatgtatttccttttttgaaaggaaaattgaaataggaaaaaattttaagtcttttggaaagaattaatcattttcatggaactgcttccctataggggcctgttttcgtatctgccaacttccactgaaacacgcagatggagaacctccagtgctctcgagaagggagacagtcttaacccagaggacagcatccaccagcctgcaagcacgggactccgttgctgggtgtggatgcagcacacactgggctaacccatcacacagtgagactggcacccttctgggggtggtagacctcangaagtgaaaattacgatgctggcacgagctgacaaatcctcttcggactctattactcagagg

SEQ ID NO: 129011 - DNA, 805 bp, Homo Sapiens
tttttggcattaaaagtttttatttagtatttgatccacaatctatacaagttatttacaaggcatgaaaatggaaaacagcacaaaatacaattgaggtataagctcagagcacagtatgtcatgtttcaataaatataattcaaaatttgtaaactaggtgaccagatacatgagtcttatttttagtaaaaccatataaaatatttatttcacgtgaggtagaggacagttttctgtgtcatgtaatgcaaccaaccacagcaactttaaccataaaactgtacatcattggcaaaattttaactttaattatggtcaatgtagccaattatttgtttcaacagttgcagaacagatatttcatttactgccttcacagattagaaattcaaaagtaatttaagactactatgttggcttaaaattatcaggataaacaaatacttctaacaggatagtaaaaacaagtaaaattttatttctcataaactaattcctcaaaagatgtcctacatttagcaactgttttctaggacatgtttactagaactactttaagtatgctgtgctttcttttcaagtgaggtatctatattgaggaaaaaaatcttataaattccttttacattaaactaatttaatacactattttgttttctgggctgaatttttaaatttttttcttacatttgatcactttctaattcaaaaattgtagcactacataggacatttaattctattactaaataggctccaaattacattatacagtttagaaaccatttcaatgaatggattt

SEQ ID NO: 129012 - DNA, 690 bp, Homo Sapiens
caaaatccaaaaggactttattttctggcactgggaggcgccctgaggccacagccttttcccagggctgctggcagggtcccagggctgctggcaggggttgtggtcctgttgagcagaggagcgacgccgctgccctggcccccgctgtccctatgatcctgcactctggggtgggagctacatatcatccttggacaccaggcagtagaagtctgtgcgggcactgtagtttcgcgagccgagatccgagacgtccacttcgctgctccggctctctcccagcgagaccccactggtgtgcggtggagctgatggctctccaaaaacaggcccccggacacctggggtggggagaccgagacgcctgaggtggccacccacagccttggcccagacccactgccaggggctgcccctgctcaccccctgctgtgatggcctgtgaggcccaggaagttcccaggcagaccgagggccgagcacctccagggcagaggccgtgcaggggctcccggtgccgggaagagtcctcaacacctggagcccctccaggccctgtgccctgtgcctgcccccactccgccctgtgctgagcttctccagttggggagtggggctgggcgggcatacccaggtcgccctcagggtccgggtcacctctgagtccaggcccggcctcagggactc

SEQ ID NO: 129013 - DNA, 1289 bp, Homo Sapiens
cagaatccaaaaggactttattttctggcactgggaggcgccctgaggccacagccttttcccagggctgctggcagggtcccagggctgctggcaggggttgtggtcctgttgagcagaggagcgacgccgctgccctggcccccgctgtccctatgatcctgcactctggggtgggagctacatatcatccttggacaccaggcagtagaagtctgtgcgggcactgtagtttcgcgagccgagatccgagacgtccacttcgctgctccggctctctcccagcgagaccccactggtgtgcggtggagctgatggctctccaaagacaggcccccggacaccccctgctgtgatggcctgtgaggcccaggaagttcccaggcagaccgagggccgagcacctccagggcagaggccgtgcaggggctcccggtgccgggaagagtcctcaacacctggagcccctccaggccctgtgccctgtgcctgcccccactccgccctgtgctgagcttctccagttggggagtggggctgggcgggcatacccaggtcgccctcagggtccgggtccacctctgagtccagggcccggccctcagggactcggcctcgaagaatcagcatggggtccttgtcgtccctgcagctgcgtctgggggtctcctttccaccgctctgtaccgcaccttccgcggcagcgccagctgcacttctttccctactcggaggaaggagtctggggccaggtcgggcggtttgcaggtgtgacacctcggaagcccctggcgtcctggcccccaagagcacacctgcggctgcccacgggttccacgccctgcgacagctattccgtggctccgggggcctcaagggcggctccccgcatcggggccccaggcagcggaacctccccccagggcccattcacaaagcgtgtgccgcagagctccccacggaggggtcccagcctggagcccgggcaccgcccatctctaacccgccgctagccccggaccctcccgcgcctgctccgcaccacggagccgggcctccagagcagcaaggtcaccaggtggcggtgctggcgcagcaggcggagcgccgggtgcgcggggtcgcgcctctggccctcgaaggtgatgaagatgggtctgcgggtgagctccagcagccggcacaggccctcccggaagctgtggctgcaccaggcccggctcaggaaggcgtccgaaagcaccacgatgaggcgtcgcagcggctcaggttcaccagaggtcggcgag

SEQ ID NO: 129014 - DNA, 1114 bp, Homo Sapiens
tcgaaagcaccccgatgaggctcgcaccgctcagttcaccaagagtcgcgaggctcagcgccggcaggagtcccgttcgtccaggaagagctttttagccccgaacgtccgctccagctgcggctcttaggatgaagttcacgaacttgcggtcctcgggtcagtcgctgtaggagacgtaggcgtcgtagagcttcccgtcgtttatctccacctcccccatacgcgtcctggtaccagagcagcacgttgagacggcacttgacatagagcagggcggccagcagcagggccagcaggaccaggagggaggccagcaccgcagccacgtggcttgtagggccagctctctgaagagtgaaggaggagaagctgatgttctggatggagcaggtgaaggccccatagacttcagtgctggtcacgttgacccccaggacactggacacaagcacctctgacaggttggccttgacccaggagtactcgtggaggctgtagtggcccccaattcccaatggaagcccgtctttcagccactggactgaaggcagggagcagtggggcccagagactacccaagccgtgcagttcagagccactgagctgcccaaggcaggcctcagcacctggtcttcagacggggagaggaagtcaggggccctatcacagacacctggcatggctctgagccggggcctcctcggggcaggctgggctccagggtcaccctggctccaccgggctcctcggccagcagactgatccaagagctgggcaggactcctctctgtccttgcagtcagctggacagggcacctggacaggtcagaggctggttccagttctttcctccggggggcaaatgttggtcattggtgcgcctttgggagcaaactctccccttcgctgggccccagggagtgtccacagcaccaaggctgctatggatgcatcgccagcgcggtggggacctggcttgtgtctttgtgtattcttgatcagaactttccctgtagcttcctggccttgcacgacgcgtgggtcgacgatatcccggaaatccgaccgtaccagcctgcttttttaaccagcggttataggtctcatagct

SEQ ID NO: 129015 - DNA, 1318 bp, Homo Sapiens
ccagaatccaaaaggactttattttctggcactgggaggcgccctgaggccacagccttttcccagggctgctggcagggtcccagggctgctggcaggggttgtggtcctgttgagcagaggagcgacgccgctgccctggcccccgctgtccctatgatcctgcactctggggtgggagctacatatcatccttggacaccaggcagtagaagtctgtgcgggcactgtagtttcgcgagccgagatccgagacgtccacttcgctgctccggctctctcccagcgagaccccactggtgtgcggtggagctgatggctctccaaaaacaggcccccggacacccaggtcgccctcagggtccgggtccacctctgagtccagggcccggccctcagggactcggcctcgaagaatcagcatggggtccttgtcgtcctgcagctgcgtctgggggtctccttccaccggcctgtaccgcaccttccgcggcagcgccagctgcacttctttccaaaaatcggaggaaggagtcacggagccgggcctccagagcagcaaggtcaccaggtggcggtgctggcgcagcaggcggagcgccgggtgcgcggggtcgcgcctctggccctcgaaggtgatgaagatgggtctgcgggtgagctccagcagccggcacaggccctcccggaagctgtggctgcaccaggcccggctcaggaaggcgtccgaaagcaccacgatgaggcgtcggcagcggctcaggttcaccaagaggtcggcggagggctcagcgcgcggcaggaggtcgcggtcgtccaggaagagcttgtagccccgacgccgctccagctgcggctttaggatgaagttcacgaacttgcggtcctcggggcagtcgctgtaggagacgtaggcgtcgtagagcttcccgtcgtttatctccacctccccatacgcgtcctggtaccagagcagcacgttgagacggcacttgacatagagcagggcggccagcagcagggccagcaggaccaggagggaggccagcaccgcagccacgtggcttgtagggccagctctctgaagagtgaaggaggagaagctgatgttctggatggagcaggtgaaggccccatagacttcagtgctggtcacgttgacccccaggacacatggacacaagcacctctgacaggttggccttgaccatggttccagttctttcctccggggggcaaatgttggtcattggtgcgcctttgggagcaaactctccccttcgctgggccccagggagtgtccacagcaccaaggctg

SEQ ID NO: 129016 - DNA, 689 bp, Homo Sapiens
tgaggctgcctaaaactttattagccacctactgtgtacagacactgggccacagcaataagcacagaacaggagtaggggcaggggaggagtctgcaagcttctgggaggaggggatcttgggagtgatcccaacagctgagctccctgaatccctgtcccagcaggtgcatcccggccccacgccccaggcacccctgcaggccgagtccgcccggaactcaagaccaagcagcagatcctgaagcagcggcgccgggcccagaagctgcacttcctgcagcgtggtggcctcaagcagctctctgcccgcaaccgccgccgcgtccaggagctgcagcagggcgccttcggccggggtgcccgctccaagaagggcaagatgcggaagaggatgtgaggaccaggacccagccccgtggctccttgattggccttagggtgggcatcagcagacgttcccgtgcaccactgtgtgcctggccctgtgctgggcactgggggcactccctgcaggagccatcatctgtgaaaaggagcactgtatggccacagaagggcagcagctgcgtcagcctgtgtcagggctaggaggcaggggctgcaggctcagcctgacccaggccggccagcatggcagagaggtcctgcatgaacagcttcacgtgctctagctgtccctccgtgtc

SEQ ID NO: 129017 - DNA, 671 bp, Homo Sapiens
cattggaaatgtggcccctcctatctcagggtctctcaggggttccctctcccgctgctcacctgtgtcagggctaggaggcaggggctgcaggctcagcctgacccaggccggccagcatggcagagaggtcctgcatgaacagcttcacctgggggggcccagcacgaagtcacatcccagccccagagtcactgtccagcccccacccctcaacacgcgggggaggccaaaaggtagggcggggactggagatcccctcattaaaagaacagtgatgatggtggttcccagaggtggtgactgagatcctaaaccgttctgggttttgaaagcctcaggccaaccttcccaactgctgcgtgagcagacaccttcacagcttcctcgctgctgtcacctgcactatccaattagtattttcatttacatcaatcagctttattttcttgtaactggatcagtcatattcattggtttgtgacctactcttatctccgtgggtggctctccttttgttttaattaacttctttatgaatatgaacttaataaataccatggatccattgtaaaaactagaacttgagggtgaacttacaaccatctgtgggctccccctcatattcatcaccgtatcaacagctgagaaggaaactttttatctccacc

SEQ ID NO: 129018 - DNA, 3088 bp, Homo Sapiens
  misc_feature (19)..(19): n is a, c, g, or t
  misc_feature (1116)..(1150): n is a, c, g, or t
attcggcacgagttttttntcagtgctcaataaagatttattacattaaaaattccattgccaaaccctgaggcactcagggctctgaccggtgcagccatgacctctgaacccagaacacatggaagcagcagcagctgagttgccaactcaagtcttggcctgcctggctttgctggcgaactcctgcacacccttcaaggccctgttcaaatgtctctgtcttaggctgacgcagctgctgcccttctgtggccatacagtgctccttttcacagatgatggctcctgcagggagtgcccccagtgcccagcacagggccaggcacacagtggtgcacgggaacgtctgctgatgcccaccctaaggccaatcaaggagccacggggctgggtcctggtcctcacatcctcttccgcatcttgcccttcttggagcgggcaccccggccgaaggcgccctgctgcagctcctggacgcggcggcggttgcgggcagagagctgcttgaggccaccacgctgcaggaagtgcagcttctgggcccggcgccgctgcttcaggatctgctgcttggtcttgagttccgggcggactcggcctgcaggggtgcctggggcgtggggccgggatgcacctgcttggccacggtctcgcttcccacctcttcgctctgggcctcgccggtcagatgccccttcttcgtccgagtcacgatcatcaattttctgtttctgtttccacttctgatagaggtctcgcttgtaggagctgctgatgtagcggccgctctctgtcttaatcttcttcttgtcttcctgtcctgactgtcccacaaaccgcttcttcttacggtcccacttgagctgctgccggcccctcgtcaggttctgggcttcatcccccatcaagtccaggacagcgccagctgcctgctgctcaaaggctcccccttccccgctgatgctcaggccccgctcgctgtcaaagtccttgggccggtaggggatgtagaattcctggtcccgctgccgggcctcctccctccgcctcttggctcccctgttgggtcctgaccgctgccgcttccggcccacgacctctgagaaaatgtcnnnnnnnnnnnnnnnnnnnnnnnnnnnnnnnnnnntctcaggctgcttctcctgcagtgctgggcggctcggggctgggcccactgggccctcctgctgctcctgccgcccctgctgtccctgctggaagcgggcgatggccttgcggtccttctgccgcttggcgcgcatcacctggctgcacaggtctcggctggaggcgttgatctcaaagatagtcgcccgggagcggtagttctttatgctgtccaccagcctcagccgctgcagctcctcctcctcaaaacgcgagctgaagagggggtgcaggcccagccccacaaggtccatctccttggccctcttgatggactcaggcgagggcgccgggcgtgagcgcacatactgctgctgggcgttatcagcaacgcgggccaggccccgtagctccagcgatgcctccagggtgctctgcagaccactgtcctcctcgtccaccacactctgtggcacccgacccagcatgccatccacaccggccacacctgagggctccttgaggggtcgggcgagggtgagggagcggcccaggaacaggtgcagatccagcaggtaggggatttcatcaggggccaccaaggagtaggctgtgccacttcggccagcccgagccacacggcccacgcggtgcaggaagagtttgcccttggcggggaagctgtagttgatgacattgtccagcagcgggatgtccaggcctcgggcggccaggtcagtcacaatgagagtggagcacttgccaagcgtgaatttggcgagattgatcttgcgggctgtcgggtctagggcactgtagatgtgggcgcagctcacccgctgggtcgtcagcagctcagtgaggtactcggcgtggtgcttcgtggccacaaacaccacggtctggtcctggggccgcaccacgttgtgcagcaggtggagcagcacggcagccttggtgtcctcccgcacgaggaagaaggaggtcttcagctgctcgttgagcttggtatccacgtcaagccggatgagcacgggctccgtgaggccagcccgggcaaattccaccagcagtttgggcagcgtggcggagaacagcaccgtctggtggcccccggggaggcgggcgatgatctcctgcagctgctctgcgaaacccatttcaaaaagccggtcagcttcatcgaacaccacgtattccacactctgcagcttcaggctcatttccacagccacatgcaccaaccgtccgggcgtggcaataattatgtcgggattttcgtgcagggctgcaaactggtcttccatcctgtctccacccaggatcagggcagtcttgaggccagtgaacttgcctagctccttagtgaacttcagggtctgcagggccagctctcgggtcggcgagaggatgagggcgcgggccccggtctgggcactgtgggtcttgagccgctcgaacattgggaggaggaagcaggctgtcttgccactgcccgtccgggccatggccaccacgtccttgccatccaagatcaccgggatggtcttcctctggatgggtgttggcaccttgtaccccttcttcatgatgcctttgaacaccgggtagctcaggcccatggactggaagcctccagacttcttcttcttcttgttctgggcacgcaccatctcccgggtgtccggctccacatccgaggtgcattccgaggtggggaaggtgggcaggggtcttccaggtcccagcttccgggcccgggcgtcatcttccgcctggatctcaaactcgccgtcctccgagtcgctgccgcgggcctgggaggccgcgcctcggcgcttccggagccctttcttcttcctccactgggccatggcagctcgcgaccgaggtccagccgccgggcccttgtcggccgccattcgggccgcgcgctgatcccgggaattccggaccg

SEQ ID NO: 129019 - DNA, 960 bp, Homo Sapiens
gtttgagctttggtatcccaccgtccaaggccgggaaatgagcacggggctcccgtgagggccagccccggggcaaaattcccacccaccccatttgggcagcgtggcggagaaccagccccgttttgggtgccccccggggaggggggcgatgatctcctgcagctgctctgcgaaacccattcaaaaaagccggtcagcttcatcgaacaccacgtattccacactctgcagcttcaggctcatttccacagccacatgcaccaaccgtccgggcgtggcaataattatgtcgggattttcgtgcagggctgcaaactggtcttccatcctgtctccacccaggatcagggcagtcttgaggccagtgaacttgcctagctccttagtgaacttcagggtctgcagggccagctctcgggtcggcgagaggatgagggcgcgggccccggtctgggcactgtgggtcttgagccgctcgaacattgggaggaggaagcaggctgtcttgccactgcccgtccgggccatggccaccacgtccttgccatccaagatcaccgggatggtcttcctctggatgggtgttggcaccttgtaccccttcttcatgatgcctttgaacaccgggtagctcaggcccatggactggaagcctccagacttcttcttcttcttgttctgggcacgcaccatctcccgggtgtccggctccacatccgaggtgcattccgaggtggggaaggtgggcaggggtcttccaggtcccagcttccgggcccgggcgtcatcttccgcctggatctcaaactcgccgtcctccgagtcgctgccgcgggcctgggaggccgcgcctcggcgcttccggagccctttcttcttcctccactgggccatggcagctcgcgaccgaggtccagccgccgggcccttgtcggccatcccgggaattccggaccc

SEQ ID NO: 129020 - DNA, 590 bp, Homo Sapiens
acgagactgtatccagcaggctttattggctttttaggggagctgtgccgaggctggggggctgggggcaggggattaactctttccctggggcagcgctcctggctctgaacccatcaggggattttcttgggcaggggattaatgatcccactctcgatgtattcgaagactgtgtatgggtcctggtccccattgagggtgatggccgacccatacaactgctccaagtcagctgagttcctgtagaacaggtccattttcagcttgacctgctcttcagcatcctttgggttctgcaggaggcgagcctggatctccatggtgggaggtggcttgtacatgaggtggtacctttccccagtgactggatcaattcttctcagagtcagccgctccatgatggaatcaaatggcacattcaggaaaaacaccctgttgggattgtagcccaggcggttcagcaggtgtgcctggtcgaggtcccgcgggacgccgtgtagcacccagcctttctggatgcagtcctgctggtccaggcgctggctcagcacttcatgaggaggctgtcaggaactgccatctccttt

SEQ ID NO: 129021 - DNA, 1098 bp, Homo Sapiens
  misc_feature (139)..(147): n is a, c, g, or t
  misc_feature (898)..(975): n is a, c, g, or t
tttttgagggagctgtaattatttttattggttcgttcagcaatatttcttaacttctggggaaaatacatggtattgccatttcttaattatcacagacactgaactcaaaaattaaaggaagttcgttgcagatgcnnnnnnnnnagagacaggacaattcttgagtgccgtccttggccttcaccctgattcctgtgagcagatgacttcctctgaagcagcctgattttgtgtatcctttcaccaatcaaggatcagggtgtgtgctccttggttgctgaaacctccctcttctttcttatagctccagcttcagcagtcccaaacgcggggagggagacccatcctggtcttcctcccgttcctggctgaggctcaaggaagaaaaatacccttcagagatggcctctttggcacttggattatttccctcctgatagcacagcggttctctttctagaaaggatgaccctttgtttttgtaaaataactgttttttcttcttcctggggattccaaaagataaggagctcttgccaagggtttcacatcaaaactacagtcattaaaattcactttcacctttaaccttctccttctacacaattcactttctatgtatcttgtaggcagtttcagccactcgtttggagttataaagtgccttgaattaggaatttgtgggaatctggaatgcagctgaaccttctcaacttctttgaattcctttattgaatatattttgccttcagaaaattggggtccttcttgctcatataaaagggatcatactcttttggatcataatgttctataaatgcatttcccttaattacagaattttctttgtataatattgattgaatagctgcctcagtatcttctttagctaaannnnnnnnnnnnnnnnnnnnnnnnnnnnnnnnnnnnnnnnnnnnnnnnnnnnnnnnnnnnnnnnnnnnnnnnnnnnnngttaaacttttaaccggatggctggagctattcctctggtcacagctggctcccagaagaagcttcaaatggcagaaaagcttggagcagctgctgagacccgccccagctctccgccctccc

SEQ ID NO: 129022 - DNA, 1271 bp, Homo Sapiens
ttccagttcactctttatttcctcatatcagctttaaacggctctggaggaagcaccgggtttcttggcctgtctattgtgaatcttctccaggtttgctctggaaaggcctggggtggccgcgtcctgtcctgccccatcctccttcactggggcagttccaggacgatcttgcctatgttcttgttggcctccatgtacttatgggcctcctggatttcggtcactgggtagattctgtccagaaccggcagcagacgttgggggccctccgtggagaagtgaggcagaatttgctccgtgaaagcattcaccagcatttgcttgtacttattgtccctagacctcagcaaactggtgatcagacttcctcgcttaaaaagtagctttgaaaacaggggcccattgatgtcacctcctcccatcagaccatagagaacccatcgaccatcaagagccaggcagttgacgttcttctcccagtaggatccgcctatgcagtctagaataagattaactccagcacctttggtgaatttcagcgttgcttcagagaaatcctcttttttgtaattgaatccagcagctgctccaagcttttctgccatttgaagcttcttctgggagccagctgtgaccagaggaatagctccagccatccgggtgagttggatagcagctgtgcccacaccactcagtcctgcatggattagcacatagtctcccagcctgaccatttcccacaagatgtaccagctggaaggcggtgagccaggcttctgggatggctgcagcctgggtcagggtcaatccctctgggataggcatgaggagcccttcggggacagtgacgtactgagcctggcccccaccggggagcagagccatggctgtgtccccgatcttccagtgtccctggcagccaggccccagctctgccacatgtccagatgcctcaagtcccaaaatgttgctggctcctggaggtgggtcatactggccttgtctctgcattaagtccgcccggttcagggcgctggccgccaccttcaggaggacttcaccctcccccgggctcggcttggccacctccttcacgtagaggttttccggtcctcccggcttgtcaaagtgcacggctaacatattgttcctggcccggctcccctcccatgcaccaggcggcgccgagtggttctggctcctgcgggtcccggtgacaaagcccgagccccagagccccaggactgcctctgcctccaccggaatgg

SEQ ID NO: 129023 - DNA, 666 bp, Homo Sapiens
tgtggaatagtgagagggtgaggagagtgcagttcaggctgggatcgtgtgggcatattcgtaggaaaccacagaatctgaagttagttaggtttggatttcatttaccacttataaactacgtgcatcagagtaagaaatttaatttctctgactgtaggttccttgattatagagatgttgtaaagattaaatgagatgacacgttggaagtgtctggcactgtgtaggggacatcacatgttccatgatggcagctgttattgttctggtacctgaagtgggaaggggagcaaggaaggaaacgtgaggattgtgatagtagggagggctctgttgattttgaaaggagagtcctttcaaagcaagcctttagaaacctcacgtctgatcatgccactcactgtctgcttagaaatcacccttggcccctcatcatgtagctagacttttaagtccttgtgaatgtgcctttcccacttgctccttgcaatccatttgtgctgtatctctggcagttcctggaacatgacatgcattttcattttcatcttaagtagtatggcatgcaccaatagttccagctactcaggaggctgaggcaggaggattgcttgagcccaggagttcaaggccagcctgggctacatagcaagaccccatctc

SEQ ID NO: 129024 - DNA, 1651 bp, Homo Sapiens
ggcagatgaatgacttttaatccagccccacaccccaaggtggcagaggagtgatgctggagcccggggcaaaatgctggggcccgggacacggctgaaagttccgtcgtgctgcttatttttgggctcctaggtgttgcgcacaaccagcgactgctccagctcctgcctgcgctgctggatcttgcagtagaagtagcgactgacggcctcctgggaccagggctggtggtagaactcagcccggcgctcctcttcagggttgccggctacatctgtcatcaccttgaggtcccggctctgggagcggagcaggtcttggacatagcctttggggtctctggagaagcttagcatgaagtccctctggatcttgagctggtttatggactcaatcgtctcatggatcttactgtccagagcactgatctcctgctggttggccgtggataggaggaagctgctcatctgcccctttaatggctcctccacctccacgtcaatgtcatagcacgccgtcttcttctggtctgaagggtccacgctgatgacatggttgatgacaattgggtcagggggcaatagcagggctgtgaggcgctggggaatctcagaaaacttcagccggggacaatcaaaaatctgctggaaatacttgtccccattgatgtattccttgtcatgggagtcctgcagcctgttggtcttcacatactgccacagggcctggacaatggctgagcggctctgtgtgtgcagccccagcagccgggctaggcggggatccagtttgaactggggaggctggtagtccagcatgaggagcagcgtgcagcgcacactcaggtccccaggccgtttcacctggaagccgtccgtctcctgggtcgtgggtgtccgatgccactcaacgaggtggttgtcagggccataaagatctttgtccagctcgatgaccaaactcttgaagaaagaagagaacttccgcttctgtttgctgggatcatccaggagcttcccctccacccgtagctcccaggaggcaatgctgccgtcggaatcctcagcatcaggcttcgcagggttaaaagtgttggagatatagagtcgcagcttccgcttttgcttcatgggcctcttcagagcctcctggatgtccacccgcttccgcatgatggtttgatccagtttcctctcaaatgccaagaggtccatgtaagcctgggactcggggaccagctcccgaatcctttgagggaggattttgtcagccatcttcctcctcttggcactgcggctccgcgcgggggcggtgggcaccggctggccctggctctgtgcctggctctgcccgggcgggggcgctgctcgcttgcgggcgggctccatgcccgcgggggccaggccgggtcgcacggcggggctgcccatgtacggggagcccggggggcccatgggcgccccctggtggggcatccgggctccagacggcatcccggggcgctgtaccacggtgggtgggtgctgaagacctggagtcatagatggcagggtcctgcacctggagagtcatccagtgccccctcggtgcctgggcccggagcccaccgcgcctgcagcaccaagggccattctgaggatctgctccccc

SEQ ID NO: 129025 - DNA, 309 bp, Homo Sapiens
catgggcctcttcagagcctcctggatgtccacccgcttccgcatgatggtttgatccagtttcctctcaaatgccaagaggtccatgtaagcctgggactcggggaccagctcccgaatcctttgagggaggattttgtcagccatcttcctcctcttggctctgtaccacggtgggtgggtgctgaagacctggagtcatagatggcagggtcctgcacctggagagtcatccagtgccccctcggtgcctgggcccggagcccaccgcgcctgcagcaccaagggccattctgaggatctgctccc

SEQ ID NO: 129026 - DNA, 1137 bp, Homo Sapiens
  misc_feature (156)..(156): n is a, c, g, or t
cacccgcatttagaatgccaggccactaaaacccccccagtaaaaccaccaagcccccatggagtttgatgatggcccaacccaatgggttttccagtgtttcgaggaaagaaaacccaccattgtcaaccacgggcgcctgtcactccgacgctnccactgaagtctcagaccagcgcccgctataagtgtgggtaaggcctaggaactcgtcaggtcgtaacccatccaagctgtggggcttgacgtcccgcactgaaacattggcaaatataattcggtctccatggaattctaggtggaagtccaaatgggtccagagtcctatcttgtggctgtgtggcaggaaaccactctcctccatgtagcccacaaagccccggattggcaagtcatctaccacaaattcaaagtagtacagttcttcaatggcctggcgcagctgctccacctgtgcagaactgagctgcatgtggcacagaattctcttctccacgttttcccgaaagcggatctcatacaaagactcagccattcggtccccatccagcacttcacccaggctaaggcttttgtgacgtatcttctcagggcagcagactggaagctgatagtagtggtaagtttcctgagggttatggtagggtcccactttgttgacatacagaataacagggtcgccggccttgtagtgtgtcacgccttccacccctggcccatggcctgtgcccagcaacagtatcaggattggcaaccactggcagctccaacttcgagggttccctacgactgtcatccttaaggcagtggaaccgcgcgggaagggctggccgaggcggcgccagcggccttcgcgcccccgtagctgcccttgggctcctgctggggtctctcccacagcggcgcggtagcggcgggttggagaggacctgccgaccgacttctacggggttgcccgttgctgcgcctgacagcggcggctgcggctacaccgcgctggacaccgctctggcttactcaagaactccccgttgcgccttctccatctggaggcccggcccagctccggggaccccgtgaggctcggcttgccccgcccgtcttcggcgaggcgggggtcctcccggcgatcgcagc

SEQ ID NO: 129027 - DNA, 365 bp, Homo Sapiens
ttttttattattttgggttctttcagttttaatctgtgtgactctgtaaattaacctagtagtggaatcctccatgacagtagttggaagcaggctggcttagtaatgtgacaacatgcatttgtctctttcttccatgcccatgccaacgttggttggttttgacatgggaggtttgatccttctgatccttcagttagtacagacataccatttccctccctctggaactaatttgactctcctgctgtgcagatgatggtgtgagcatccccggggagtacacttcctttctggctcccatctcttcctccaagctgtacaatgaggtccgagcctgtagggagaaggaccgtgaccctgag

SEQ ID NO: 129028 - DNA, 1451 bp, Homo Sapiens
ggcagtaaagggctataactttatttgtatttcctcttacacaaaaccatcaaaacaagaacagaaaaaggctgaaaatccgttcaaaccccatgttctcagggatattccagggagttcttgaggctgagtgcgtagcttcaaatccagcactaattcctcaccccctggcctgaggtcttcatagattggtggcttgagcccttctgtactacaggagcagaacctgaagctgcttccaaggctctggacacttggcacgcagggctagaggccaatggtatatgagcggcctgtggggttatgaatagcagaacagactggtgctgtcacagcccactcataccacaccttcttggaattgctgcatcgccagaaacgcacacagatggtttggccttcacgtaccgttatgggctgcttaatagggaagaggatgggaaaccatgagaacatcccaggagagtgagtctctggacggatactcagagtgatgtcctgataaagcacagtctcaaagtagccggcaaagccatgtagtactgtgttcacctccacaggaaattccaaggtgcaatagcggttgttgtcaatcataggatctctgttgggatggctgaaggtgaaacagggctggggtgcagagagctggtggaagttgtgcagccgtaccacataaggcatctcaaactgggcctcagggtcacggtccttctccctacaggctcggacctcattgtacagcttggaggaagagatgggagccagaaaggaagtgtactccccggggatgctcacaccatcatcttttaggaagtgctgggctccatccaggcactcaggcgacaattcattgtcagcaaatgagcccagaagctcactgacaatgatgtctgctttctctggagccacccattccctcatgtctgatgagactacggtcacttggcttccccattcttcaaactgccagttctctagcgtcaccacggcatttgggtttttctccacagcatacagctttatccgccggtcggcctgcttggctgcccgcagggaagcgttcaccaggggtccccgtcctgctcccagcaccatcagtacctggacattggtatccttctcctcttctggtactcggtctagcagacatttatagatggcctgctggtactgagagtatttgatggggtccttttcaaacacttcatatgtctgagattccagattgtccatcagtggctgaagcggggactgcagatagtcttcatagcccttggcaaagagttcataggcattaggtggaggacggttctggcttaagtattccaggtattggaggtaggagcagaactccttctctgagtggtggcgacgcgtgggtcgacgatatcccgggaattccgaccgtaccagcctgctttttgtaacactgttcatagttcacaatg

SEQ ID NO: 129029 - DNA, 852 bp, Homo Sapiens
tggcggtcgggggtgctggtgggagccgcgtgtccagcgggagggacctgaattgcgtccccgaaatagctgacacactaggggctgtggccaagcaggggtgagggccggacctccacgagcggaatgcggggtttgatttcctctgcatgcctgtcttccatccgcgtttcaagagggagttcattcaggaacctgctaagaatcggcccggtccccagacacgatcagacctactgctgtcaggaagggactggaatacgctaattgtgggaaagctttctccatggattcgtccagactcaaaagtggagaagattcgcaggaactccgaggcggccatgttacaggagctgaattttggtgcatatttgggtcttccagctttcctgctgccccttaatcaggaacgataacaccaacctggccagagttttgaccaagcacatccacactggccatcactcttccatgttctggatgcgggtacccttggtggcaccagaggacctgagagatgatataattgagaatgcaccaactacacacacagaggagtacagtggggaggagaaaacgtggatgtggtggcacaacttccggactttgtgtgactatagtaagaggattgcagtggctcttgaaattggggctgacctcccatctaatcatgtcattgatcgctgtgcttggggagcccatcaaagcagccattctcgccagtagcattttcgtggccaataagaagggatttcctgttctttctaagatgcaccaagaggctcatcttccggctcctcaagttggaggtgcagtcaatcatcacggcacaaacaccatcagagaaggagt

SEQ ID NO: 129030 - DNA, 1644 bp, Homo Sapiens
  misc_feature (224)..(224): n is a, c, g, or t
tcttttgtggggatggctgaaagtgaaaccaggggccgggggtgcagagagctggtgggaagtttgtgcagcccgtacccacataagggctctcaaacctgggccctcagggttcacggtcctttctcccttccaggctcggccctcattgtacagcttggaggaagagatgggagccagaaagggaagtgtactccccgggggatgctcacaccatcatcttntagggaagtgctgggctccatccaggcactcaggcgacaattcattgtcagcaaatgagcccagaagctcactgacaatgatgtctgctttctctggagccacccattccctcatgtctgatgagactacggtcacttggcttccccattcttcaaactgccagttctctagcgtcaccacggcatttgggtttttctccacagcatacagctttatccgccggtcggcctgcttggctgcccgcagggaagcgttcaccaggggtccccgtcctgctcccagcaccatcagtacctggacattggtatccttctcctcttctggtactcggtctagcagacatttatagatggcctgctggtactgagagtatttgatggggtccttttcaaacacttcatatgtctgagattccagattgtccatcagtggctgaagcggggactgcagatagtcttcatagcccttggcaaagagttcataggcattaggtggaggacggttctggcttaagtattccaggtattggaggtaggagcagaactccttctctgagtggtggttggtgcctgtgatgatgaactgcacctccaacttgaggagccggaagatgagcctctggtgcatcttagaaagaacaggaaatcccttcttattggtcaggaaaatgctagtggggagaatggctgctttgatgggctccccaagccagcgatcaatgacatgattagatgggaggtcagccccaatttcaagagccactgcaatcctcttactatagtcacacaaagtccggaagttgtgccaccacatccacgttttctcctccccactgtactcctctgtgtgtgtagttggtgcattctcaattatatcatctctcaggtcctctggtgccaccaagggtacccgcatccagaacatggaagagtgatggccagtgtggatgtggttggtcaaaactctggccaggttggtgttatcttcctgattaaggggcagcaggaaagctggaagacccaaatatgcaccaaaattcagctcctgtaacatggccgcctcggagttcctgcgaatcttctccacttttgagtctggacgaatccatggagaaagctttcccacaattagcgtattccagtcccttcctgacagcagtaggtctgatcgtgtctggggaccgggccgattcttagcaggttcctgaatgaactccctcttgaaacgcggatggaagacaggcatgcagaggaaatcaaacccctgcttggccacagcccctagtgtgtcagctatttcggggacgcaattcaggtccctcccgctggacacgcggctcccaccagcacccccgaccgccatcgccgccatctttctcctcgcgcctcgtgccgattagccacccagcctgtacctaga

SEQ ID NO: 129031 - DNA, 1290 bp, Homo Sapiens
tttttcttaataaattttattttggtaattgtaaaaagaaaaatcaggaccaaaactaaaggcaacttaaaaagttcaaatatataatccttatgtgatagagatttataatttccaggccctctctggggaaggaatgcccaaagggcaaaagggaaggcaacaatgccatcacacaattcagtcaatcagaagagaagctggtaggagagttcaacagggcatgaagaaagggagagaacagcaatagttctgccatacagaactcagtccatcttgaggttaacatagatataccggatgaactttagggaagaaaaaaaggagatggtgcccagcatgaggaagaagacataaccagtgagtaaggagtagccgaagaactctactgtctgtactgccccagacatgttggagcgccgggcataatagaaaactgagtagaggaagatgaagaggccggtggagccaacactcagcacagatcgccaccaccagcggtaatcctccccagacaactggaagtaggtgagtgcaatggagatgcaagcccccacactcagcaggatggcgaagacaaagaagaggatgccgtacaaagtgtactgctcccgaccccatactgtggcaaagatgtagtacagctccacagagatggcactgaaaggcaggaagcctccaacagtcatgtggatgacagtagacttgtaccagggctggggtggaatctcccgggcgatgttcttggtgcgacagggtgcatcaaaggggctggcgttgttcttcccaaagatgcctccaatgacagtgaggggaaagcccaccagcagccaaaccgtcagaagcagcaggatggttgtggctggcagagcctgtgtcgaaccattggcccaatgcactgagttcaccacactccacgtcaggaagaaaggcacagagaagagactggtggtgagaatgatgttccacacccaacgctcgcctccaatctgccggtagaagtggctggacacgtagccagagatgcagcaggtcagggcatacaacaagatggctgctgagttaatggccccatgacggtgcacattgaacatgcccagcagtgccatgacaataatgccagtgccaagggccaggaactgggcacccacgccaagcacagcacagagcagaccacggtatggggggaagcggaagacatctgtatggatcgacgcgtgggtcgacgatatcccgggaattccgaccgtaccagcctgctttttgtaacactgttcatattcacatgcc

SEQ ID NO: 129032 - DNA, 1103 bp, Homo Sapiens
tggggagaagagtgttctttagagaacccccgtggccaaaagaggggcttcagcggccgttagggcgggaaggcgggtttcagggctaaagatacttcccggggttatgagaggggagggggccagaacttccttccttaaaggggtggggtggggcccccttgaaaaaaagacatgcccccctcccaccttaggggaacccggaagaagaaccccttgggggcattttaggaaaggaaccaggaaattccgtttctttattggttcaggaaaaaggttaggtgggaagaatggctgctttggaaggggttccccaaagccagggaatcaatgccatgattagatgggaggtcaaccccaatttcaaagagccactgccatcccttttattatagtcacacaaagtcgggaagttgtgccaccacatccacgttttctcttccccactgtactcctctgtgtgtgtagttggtgcattctcaattatatcatctctcaggtcctctggtgccaccaagggtacccgcatccagaaacatggaagacgtgatggccagtgtggatgtggttggtcaaaactctggcccaggttggtgttatcttcctgattaaggggcagcaggaaagctggaagacccaaatatgcaccaaaattcagctcctgtaacatggccgcctcggagttcctgcgaatcttctccacttttgagtctggacgaatccatggagaaagctttcccacaattagcgtattccagtcccttcctgacagcagtaggtctgatcgtgtctggggaccgggccgattcttagcaggttcctgaatgaactccctcttgaaacgcggatggaagacaggcatgcagaggaaatcaaacccctgcttctccgggatgactagtctgcccttctccgtccccgagttcggaccccgcattccgctcgtggaggtccggccctcacccctgcttggccacagcccctagtgtgtcagctatttcggggacgcaattcaggtccctcccgctggacacgcggctcccaccagcacccccgaccgccatcgccgccatctttcatcccgggaattccggaccggtcca

SEQ ID NO: 129033 - DNA, 812 bp, Homo Sapiens
tttctctggaccacccattccctcatgtctgatgagactacggtcacttggcttccccattcttcaaactgccagttctctagcgtcaccacggcatttgggtttttctccacagcatacagctttatccgccggtcggcctgcttggctgcccgcagggaagcgttcaccaggggtccccgtcctgctcccagcaccatcagtacctggacattggtatccttctcctcttctggtactcggtctagcagacatttatagatggcctgctggtactgagagtatttgatggggtccttttcaaacacttcatatgtctgagattccagattgtccatcagtggctgaagcggggactgcagatagtcttcatagcccttggcaaagagttcataggcattaggtggaggacggttctggcttaagtattccaggtattggaggtaggagcagaactccttctctgagtggtggttggtgcctgtgatgatgaactgcacctccaacgcctcggagttcctgcgaatcttctccacttttgagtctggacgaatccatggagaaagctttcccacaattagcgtattccagtcccttcctgacagcagtaggtctgatcgtgtctggggaccgggccgattcttagcaggttcctgaatgaactccctcttgaaacgcggatggaagacaggcatgcagaggaaatcaaacccctgcttggccacagcccctagtgtgtcagctatttcggggacgcattcaggtccctcccgctgacacgcggctcccaccagcacccccgaccgccatcg

SEQ ID NO: 129034 - DNA, 1551 bp, Homo Sapiens
  misc_feature (1373)..(1373): n is a, c, g, or t
  misc_feature (1440)..(1440): n is a, c, g, or t
  misc_feature (1483)..(1483): n is a, c, g, or t
  misc_feature (1510)..(1510): n is a, c, g, or t
agcgctacacactacaaggccggcgaccctgtaattgtgtatgtcaacaaagtggcacccaacaataaccttcagagaactaacccgtactatcagcttccagtctgttgccttgagaagatacgtcacaaaagccttagcctgggtgaagtgctggatggggaccgaatggctgagtctttgtatgagatccgctttcgggaaaacgtggagaagagaattctgtgccacatgcagctcagttctgcacaggtggagcagctgcgccaggccattgaagaactgtactactttgaatttgtggtagatgacttgccaatccggggctttgtgggctacatggaggagagtggtttcctgccacacagccacaagataggactctggacccatttggacttccacctagaattccatggagaccgaattatatttgccaatgtttcagtgcgggacgtcaagccccacagcttggatgggttacgacctgacgagttcctaggccttacccacacttatagcgtgcgctggtctgagacttcagtggagcgtcggagtgacaggcgccgtggtgacgatggtggtttctttcctcgaacactggaaatccattggttgtccatcatcaactccatggtgcttgtgtttttactggtgggttttgtggctgtcattctaatgcgtgtgcttcggaatgacctggctcggtacaacttagatgaggagaccacctctgcaggttctggtgatgactttgaccagggtgacaatggctggaaaattatccatacagatgtcttccgcttccccccataccgtggtctgctctgtgctgtgcttggcgtgggtgcccagttcctggcccttggcactggcattattgtcatggcactgctgggcatgttcaatgtgcaccgtcatggggccattaactcagcagccatcttgttgtatgccctgacctgctgcatctctggctacgtgtccagccacttctaccggcagattggaggcgagcgttgggtgtggaacatcattctcaccaccagtctcttctctgtgcctttcttcctgacgtggagtgtggtgaactcagtgcattgggccaatggttcgacacaggctctgccagccacaaccatcctgctgcttctgacggtttggctgctggtgggctttcccctcactgtcattggaggcatctttgggaagaacaacgccagcccctttgatgcaccctgtcgcaccaagaacatcgcccgggagattccaccccagccctggtacaagtctactgtcatccacatgactgttggaggcttcctgcctttcagtgccatctctgtggagctgtactacatctttgccacagnaatgggggtcggggagcagtacactttgtacggcatcctcttctttgtcttcgccatcctgctgaantgtggggggcttgcatctccattgcactcaccctacttccagntggtcctggggaagattaaccgctggngggtgccgaatctgtggcctgaatggtgggcctccccccgc

SEQ ID NO: 129035 - DNA, 688 bp, Homo Sapiens
  misc_feature (672)..(672): n is a, c, g, or t
gtcgtgcagtaaagggctataactttatttgtatttcctcttacacaaaaccatcaaaacaagaacagaaaaaggctgaaaatccgttcaaaccccatgttctcagggatattccagggagttcttgaggctgagtgcgtagcttcaaatccagcactaattcctcaccccctggcctgaggtcttcatagattggtggcttgagccctgcaattaattataatcccttgcccaccttgatgtaaggcaggaaagcagattgaaatgctcctctctgatgggcaaggggaatcacagcccatagatgtactgcaccttctgtactacaggagcagaacctgaagctgcttccaaggctctggacacttggcacgcagggctagaggccaatggtatatgagcggcctgtggggttatgaatagcagaacagactggtgctgtcacagcccactcataccacaccttcttggaattgctgcatcgccagaaacgcacacagatggtttggccttcacgtaccgttatgggctgcttaatagggaagaggatgggaaaccatgagaacatcccaggagagtgagtctctggacggatactcagagtgatgtgctgatagagcacgagctcgaagtagccagcatagccatgtagtactgagtgcacctgcacangaaattgcaaggtgca

SEQ ID NO: 129036 - DNA, 595 bp, Homo Sapiens
  misc_feature (158)..(167): n is a, c, g, or t
tttggtcagttaatatttaattttaataatacttgttatgtttgaacagtcagcaatgcacaaagaaaaaatcttcagtgaatgtttacacacagtgtgaacacatgctttaaatatgcagtggaggaggaggggtgaattcacagttaacaaagctnnnnnnnnnntccttgttataaattacacaaagcatataaaaatatttctctgaatgcatagattaagactttaaactcacctaccagcaactgtgcagtcttattccactgcgatacgcagtagtcagttgaccacagaggattttataaaggagaagagagaccagcataggacagagatacatcaaacccacctctcaccagagacaccagtcccttgcttgcctctgtcgctaagcccagaacgtgccctgcagctgctcctctggaggccatctcccagccaggggctccactgctccactttaattaatctgggtggctgaaagtgttttaacccaagtaacttaagacatgaattaatagtgaatttatttcctctaggacagaaccagacttaactttattagtaaactgtaacttttttagaagtaaag

SEQ ID NO: 129037 - DNA, 1014 bp, Homo Sapiens
  misc_feature (190)..(198): n is a, c, g, or t
tctcaactaacatcataaatgtcttaatgttaaaatccatgggatattctatttaaaattttagctttatcacctttgtgctatcagagaatgtgctttgaactggtaaaatgagttaaagtattggaaaacacttatgtcagcagaggctcttaaaaatcattttcatccttcctcttctagtgatgannnnnnnnnaacccatgttttcaccagtctaccaatccaatggcataaatgctcctacataggcaacttaagtgtttcttaagttgatgcaaggtattttgcatgaggctgaattcttgttgtcggagcagaggatttttgttccaactactgaattggcaaaatgttaaatataaaaacacctcaaaaagtcaaaggtagtctgaatgaaaaatttattttaaacacctcaagtaatctttacatttctacaaaatcataacatagttcttttccagaaacatttattcttaaaatctacttaagtgtttcatagaaactttagtaataaccagaataattcatgacagtttagcaaactcttagcagcaagcagaaagaacttattaaaatatcctttctttacacaattagattagtattttgcttcatgtcttcattgcttgttagctttgcttttacacaggaatcttcagactactctctgtaacactcaacccctattccttttttaaccagtttctcaagaaggatatggagagctcataaaggaatatcctcaaatatcctaaatatccaacttttaaaataccttttttatccttaaaagctgataaacaatagatgtcacttaacaaatgtctcacagtatatggaaggagctttttccccccccagagtgtttctaagcatttctatcaagagcaagtctgcatttcttatcgtttgcaaactgatgaaatttccaccttacagacaggcaggtaaatgctttcttttctaaaaagagtcttgctacacctcactgttcactttattttttat

SEQ ID NO: 129038 - DNA, 928 bp, Homo Sapiens
  misc_feature (695)..(695): n is a, c, g, or t
  misc_feature (709)..(709): n is a, c, g, or t
  misc_feature (836)..(836): n is a, c, g, or t
  misc_feature (870)..(871): n is a, c, g, or t
tttggcaggagaaggcgtttattgcagtggtcctgcagggcggcctgggcaagtgcctgggctcagcggggagacagaggcatgtggtgcattcaggagtggggcaagggcaggcgcaggcgaaggcggggctgcagggccagcatgcggtccacctccctggctggccgcagggggtgccgctgggcaatgggccgccgggcgtgggccagcatgtctgcccagtgctgcaggggctgccccgaggcccgggcacccaggtgcaccttgcctacgggctcagttcggagcggcaggctgcggtcccagacagccagcaccaggtccacattctggacctggctgaagggcaccaggaaggtgaaggcctcattgaagtagggggccgccgtgccctttttggtggctgtctttctcttcttccacttcctctggttcagcatgagctggaccttcacgtagggctctgcaagtcctggacgcaggcctcgagcctccagcaccaccacggtcagccggcctgagctgggcacgtaccggagagagaagcacagctccccgacctgctcgggctgagtggcagccggcgggcccagcaggtaccagtgctccagaacatggctgcagatccacggtgcccagtggcagacggagctcacccaggggctcattgcccgagaagcgctgaagttganaagctgcactgcanggtggccctggcactccgctgcgggattggagcacacgctcgtcaacacgggcaaggtgctcggtgactttgctcatgtcgtgtcggctggtggaacctgaccgggcaagggtcacggcccagctcnagcggtgctgctcaggcacctgattcctgctcanntcactcaaggaactgcaggcccatgtgacacccggctgctcagctcaacagtgacat

SEQ ID NO: 129039 - DNA, 716 bp, Homo Sapiens
  misc_feature (705)..(705): n is a, c, g, or t
ggatcaggagttttattctctctttggaatgactcccagaacagccacttatgcccagaaaatccatgatcccatctcctccatgatggaggaagctgaggaccagagaggggaagggagtagactaagggagtagccagtgcatcccaggagcaggacagaatctctgacccctgacccctagcccagtgctccttccaccacccctggctgctccttcatggaccaatgaggtgacagaggcagggcctagttcacaggctgacaagaatctgcggatgtcctcagatgtcccacaaggtctcctcctgcagacgcccaacccagaccttgtctgctgcaatatcactaccagtgcttgcagacctccagagacaggagtctcaccacctcgcaaggcagctactccatcctgaccctgtggaaggtgtgcaaatgtgggggtgggtggggacgaggagaggtgcctcgcgagctgcggttccttctgggggatccacctgcttccttgcccactcaggctggcagtggggcagaggcggccacatttcctgttcccctgccaaggaatttccctccaggggctcccctgggcctgtgtgagggggtgagaagtgtttcctgttagtggactcctcctccaggccaggcctccctggagacagagctggctgcccgggtactggaagtcagctctactctgantatacttctgc

SEQ ID NO: 129040 - DNA, 1595 bp, Homo Sapiens
gataggtagtcagattttttattttcaaacgtgccaggtacatttcccacttttgaataacagcaaaaccggaagaggatgctttcacacataataaatattctccatcctttctgaaatgcaccaaagcaaaaagcctctgaagtcaaaacatgagacataattccttgctcattgcaggagacatgcaggtgccccctcctttacccaataccaagagacagacggccgggcaggtgtaaggcgggtggcgctgcagctgacatggagaagagtctaaatctgaagacacttttccacacttaggacaagttcttcactttcatgctttattgaaagtagaatatgaatcaaagacaggcattggtaagcaggttatgtctctaaaattacttttcgttcagagcagaatgttgtcccatctacttgatacaatcctttatggaccaacgcatctggtatgaaactcgagcaaggaaatataacagaactttattcccctcccacgactataaatctcatatgtaaacatgatttactattactgctactaaacttgttccgtctttacttgccctctcccacccaccaccccccttaaatataaaattggaaacatttccttcaagtctgatgtccatcagtgcaatctgctttatttgacataaggcatttgggacagtcacgtttgaatggatttctgccttttggaaggggcatgtaatggtttaattcttaaatccacctttgctttaatgccctaacatgtcaaactcctcttcccctctggtcatttcttagcagtcagcaagtattcaaagattaatgtccaagaagaccagtacctttaaacccttcttctggcatacaaacttgcatgacatcatccattgcagcataatctgcaattggttcatcagccttcaataaaatgacagattcaggaatgacgccaagggtgcctagggtggcacagtcatcacttaaaatctttccatcaattgacaaattctggtcaaaaggagcaactgaaaatgcatgcatgatctgaattttcaattcttttaacgtctgattagcagaaacgagaagtgctttctcaccacgaacttttctatgtcgcatacttcggcgaataacttgcttttgataggctatataattttgatgggatatcttttgccgctttgttccacatttgcttgattaaaatctggatctttttctccatctggtttagcttcatccttgtcctcctctgttccagaactactcacattcagttccggagccgaatccttcatcactttttaatcatcaatttttatggcatatatggtggcttgagtgtatcacccagggtcctctgctgctgaacaaaaagcttctctgaattctggacagatttgggctcagaataaacgggtgtccgaagggttaaacctccacttcaatttccctccgtgcgaatctggtctcatggccaattcccataggacccgaataattcgaatcagtaaagcgtttccgtttgaatgtatcctcaatccacaaacatagccggaaaataggatactgggggcagaatagtaccg

SEQ ID NO: 129041 - DNA, 2026 bp, Homo Sapiens
  misc_feature (845)..(845): n is a, c, g, or t
tgctccgcgttaacatcggcatcacgcggtgcggttgtaccgagtccgagtgattgcctagccttactgttgggtggccgatgccccgccggggtgggtctctcaaggcccgcggccgtgtcccgcgcgggtggttacgcgcgcccgccttgcttatatacgcctccattggccccctttgaccaaaaagcgggggtgggcaagcttggccccccggggaaatttttttgcggcccccccttttgttgtgggggttgagtcttgtgtttttatttttagttgtctttatttaaaaaatgaaacacattagttacaaaaaccgttgctccaaatagataccgtgtatcttacaaatgttttttgcttggttttgagtgtttactgtagaaattttcaatatcataaataaatgattatttctttctcagaaagctgatttttgtagtgtagtatttacaaataccgtaagtgaaaaatgatagtttataaatttgtaccatttaggaaaaaatgttttatgtagtgttgtttgtgtaacagcaaataaaaccatttaagattatagtttttacaagggtggtaaaacctttaaaacagagcataatgtgcatcgtatgcctttctgacattagcatgcaaaaaccaagctatttgttaaaatagacttatttttgctccaactaagtaaacatgtaaaattatttttaataagctcaatagcttagaaggcatcttgtttaaaatgaaaataatttaaaacaatatctagcactgcaacccaaagctaacagacaactgcaatgccactgtgacatatttcagcaaaatataaaaaatgaaaactntccaagttgtagaacattggtttttcaaatgtaagactgttcacatgtgtattcacatgttcacaagttttccaaagggaaaatactaattttttattggcatcatccatatccaggcaggctgtagttgagtcaccaatagctactcctaaatggagctgctattttttctatgttttctataaagttatttacatctgtaacaaggattccattattttcaaagacttctctggggatagtaggcttgtctgttaggaggacagcaaacctggcatcaatatgctgaatttgcaggtttagcaaacatttcagaatttctgcttttgttgatgatcgagagtcacactggtgataatgaagcaattcaatgatatttgcactctgaaatgacttcaacattatgttcttcttatgtgcagttgaatccactctttcatcttcttttagctttttattttccctgtagtgaagcaaccacttccatcttccatttccatttagtttttccaggattttgataatttccttcagttgaactaatgttacagcttctagtatcttgtcatctgatatcacaaagcctcctgcacgaaacagttcttggtaggtgtgatcaagaacatctccagggctgtctactccagcaaagatgacactggggaaatgcttcagcttcagcaaagaaggaatctgatgcaaatgtgatgatatatcttcatttctgatgatgatgattagtgtatcattctctctgtggaaagcttgacagaagtgctgaggttcaatttctgtatggcctcctttcctcagaaggttctttgttcttacaaagaatgatttgtcttctgtttcgacaaggtagaacaggaaggtacttttacaagcctctttcacaacacttcttagtttgacgtgcaaattggtgcacacgtctatgattatgtcttcataggaggctgaccgtcctgggaaaggcagatacatctcttgagcagtggcttctccagaaacatcatttagctctttgtcttggaaaatgaattggttgctattcttcatcaccttgttgaattcagcatactcattgagaataagtgaaatatcattccgagattccttcacagtactgttgtatttcagtttgttgaggtggaatgaaacagtgtgatttctttgcc

SEQ ID NO: 129042 - DNA, 1958 bp, Homo Sapiens
  misc_feature (502)..(579): n is a, c, g, or t
ccccgggggaaaaattgcgtgctgtcctaagataacgatatctcgctcgtagtgggcgcgcgaaagtgtttgttcctcaccaggagcgaatactaatatctagccggccgggttgtggttgtaccaccccgctgattagtcggccgtcgttgtaaaactctgttttatattatgtccgcctcccgtggggcggcgtctttaaaattcttcttgggggggtgagagtgtgtgtgtccgcccacaatttggtgtctcgctgccccccccgcgagagaataataggggtcgtcgtctccccgcagaaggtgcggccccagcaggtaccagcggtttttctccccgctctacacagctttttaaaagacgccgccgccgcctgtcgactaaggttttaataaaagccgctgtcccctaatttggggccccctttggtccacaaaaaactgtggggaggcgccgtataaatgtggcgcgcccctccggggggaattcttattgctgnnnnnnnnnnnnnnnnnnnnnnnnnnnnnnnnnnnnnnnnnnnnnnnnnnnnnnnnnnnnnnnnnnnnnnnnnnnnnngagagttgaccatcaggtatattggggaagggagagatggaggcaccttcatgagtgcctcccaagggcagtagcctctgcaacttgctgggggttcaggggaagcagggagttcatggggctcctccagcaaagatgagctccagggctgcttggatgtccccaccggtggcctgcagggcccgcaggctcagctcatcgtcctggatgcccatgtcacgtagctgctgcagctggggctgccactggctctgaaggctgggctgcccagaggcctgaagggcatgctgtagggcttggctgaagagatcattggtgatgggcgtccctgactggacaccagaggacattggtgaggtccctgaggaatgaccctgggtgccaggagtcggtgtgtgagagctgctctccggagtgctggccagggccaaggcggtggccagctcactctgggtgatgggccggggcccagcagctccactgtaccccagggaggctgggcgggagctgggagtactgctagagggtgtggacctggtgtttgggtgaaagtcatcctcatcatctgagagcccttcaaacaggaagccacctggcatatcccggtatgagctggagggcatgctccgggaagaggagtcagtcccaggcattggggcactgcctgctacggagtgcagaaccaggacaatggcattgacgagggctgggtgagcaggcaccaacgtatcaagcatattgggatcagcgaagacagagaagaggtccttgtcctggagaaccccaagagcaatagggtcactgctgaggcctggggtggccacaatgatctgatccagagactccttattgctgagcatcttaaagaccgcctccctgtaagaggagctgctgtgcagggcagtgtgcaacacccggaactctctcatggcagccactttgtccacaggttccggtttctgatcaggttcaggccaggactttcgcagaacatggacagtggacccaggttgaatgccatagaagtcaagtgtctggtcatcttttagcttccgaccacagtagatcagatcaatcagctcagggtctggaacagactcctggagtttgccagcaataagctgcttcagaaatgaaatactatagccccctagcgagtattctcccagttctgtctctggcaaccgaagaatagactttggagtaagtggctggtcagccagcttcaccgccaggtgccagtctgagagagacatcctctctctttcgcgctctctctttctccccgtcccgcggaaggaacccggccgcactgccgccggtgtaaacactcactcctcgtgccgattcacaccacccaggcctcgtacctagccgtt

SEQ ID NO: 129043 - DNA, 678 bp, Homo Sapiens
  misc_feature (110)..(133): n is a, c, g, or t
aagtgttagaaacatttatttgtcaaaaaatttttttaaaaaagggaggagtggagtaaaacaagggtaaatttcagctaatgctgtaccacgatcacaggtcggacatnnnnnnnnnnnnnnnnnnnnnnnnccccaatggtcctagcaatttcagaagagtaacttaagtgttaagagtccagagctaacagaagagtaaaaggctgcttgccactacatggtcattttaaagggaaaggagatgctgcaggtaggcagggagaaggattcaactcctagggaaagcaagataagaggggttccactgcacaggaaaaaggggatgccagcataatccttacctagggctgctcagaggctgagaatataaggaacagagtgaaaggctacagagactagtttcaggaggaaagaaaagtcaacttagaagaattaagaaagaaaacatagttggtcacaaactccttttgtttactgaaacatgaagcaatggaaacatcccggcaaaggggaccgcgcggagcaagttctcatatatgaccgcagcccgagggttcagtccgcaattatcctacctgaaagagagcacaacacaagaggcttacacaatgcctggagagcagcctggctccgcgtacaagcgccctgggtcctgtcctgtattccggggggaaa

SEQ ID NO: 129044 - DNA, 1118 bp, Homo Sapiens
  misc_feature (50)..(69): n is a, c, g, or t
  misc_feature (179)..(202): n is a, c, g, or t
  misc_feature (874)..(874): n is a, c, g, or t
  misc_feature (876)..(876): n is a, c, g, or t
ttacgggtctaaggtagcgaggcctgggtggcgatattcggcacgagggnnnnnnnnnnnnnnnnnnnnaagtgttagaaacatttatttgtcaaaaaatttttttaaaaaagggaggagtggagtaaaacaagggtaaatttcagctaatgctgtaccacgatcacaggtcggacatnnnnnnnnnnnnnnnnnnnnnnnnccccaatggtcctagcaatttcagaagagtaacttaagtgttaagagtccagagctaacagaagagtaaaaggctgcttgccactacatggtcattttaaagggaaaggagatgctgcaggtaggcagggagaaggattcaactcctagggaaagcaagataagaggggttccactgcacaggaaaaaggggatgccagcataatccttacctagggctgctcagaggctgagaatataaggaacagagtgaaaggctacagagactagtttcaggaggaaagaaaagtcaacttagaagaattaagaaagaaaacatagttggtcacaaactccttttgtttactgaaacatgaagcaatggaaacatcccggcaaaggggaccgcgcggaggaagttctcatatatgaccgcagcccgagggttcagtccgcaattatcctacctccagtttttaaaaggctgagtaccgggctcggtccacatactgctcccgttcataccgggccatgtcatacagagaattccgtgtagctgcggaagcctgagataattcactctctggcccataaccgtagccctctccaactgtggggagcatggctgcagcacgacgcagtgggctcctgtcccttccatagtaggaggaagtggttgcttcagcagcacatnantgcagctgaagtggcagcagcgccagagtttggcaataggtgtctgtcatagggatcaacagaagtagagttgaggtggctggtcacagttgtgctttggacttgaggcagatgggacatggtctgctctgcgtagttgtatgcagaagccgcttgcgccgctgctactgcctcataagagcggacccggtatcgcttatagtagtcgagtgctcatatgcatcgttgtaatacatggattc

SEQ ID NO: 129045 - DNA, 817 bp, Homo Sapiens
  misc_feature (712)..(712): n is a, c, g, or t
  misc_feature (758)..(758): n is a, c, g, or t
  misc_feature (786)..(786): n is a, c, g, or t
  misc_feature (792)..(792): n is a, c, g, or t
  misc_feature (804)..(804): n is a, c, g, or t
gctggggtcagagttttaatcctgggaaaaagaatctggccgctgggccatgccctgggactagcccgctggtccctggtgtgtccgaatcagtgctccagtgcccgcctcttctccagcttcttctgtagctctgccgtcatgtctgccagcccggctgtggggaagagaggctgggctgaactgactggcagcttcctgcccaagccaccattaaagactttgggctctggcttgggtccaacgggtggctttggaagcttggcaggaggctttggcaacttctttggcttcaggatgactggccaactagaggaagccacatcttggttctcatagtcaacagctgggccatctccaatgggggtcacgtagttctcttcctggttcggtagtgggggcagtgggggcagcttgtcctggctagacgcaggtgacagcggcttggggccacctgtgcagggtgcaggacctgggcccggagcggagggcgccacccacacattctcgccattctccttatcggcttccacgtagcctagcaccttctcgtagtcctcgtctaacaggaatggcaccagcgcctttttggtatgcgacacgaaatagttgaccacggcgtccagggaggtgcaagagaacggctgttccacatcgatcacgtacttggggcccctccgcttcacctttgtatgcccggaccacgtgcgtncccgtgtgcatcttgccgcgtgtgaccgacacgccgtcggcgcgtncccgctgggccgcaccagcagttcccgnactcgngtagcgctccangaacattgtgcct

SEQ ID NO: 129046 - DNA, 508 bp, Homo Sapiens
  misc_feature (403)..(413): n is a, c, g, or t
cctttgtttggtttttttcaagggttctgcatctcgtttattagcacagaaataacaggtttagagtatattacaaaaagagctcaaactgttcagatacagcaactgggcttactaggggacagaaggggaaatacgtcagactactgtacagggacacaaagactcctcatcctaaacaaagtattaaggtacatagacaagtttcttgtaagacagaaaacagagaaatccacagtaactctaacacatcccttaaggaataagcatgtatttgtaggaagcaaacaaagctttccatagagaaaccactttcacaggatgattaggtggacctgcaatgaagaaaatacatttcaaaagatgggttcagacttacaccaagttttcactgaaatacttnnnnnnnnnnngacccttctctgtatcaaaagaattaaaaaaaatacatcacggataaaataaatctcaggaaaggtccacgtcctactcagtgacatacatttgc

SEQ ID NO: 129047 - DNA, 1425 bp, Homo Sapiens
caagggttctgcatctcgtttattagcacagaaataacaggtttagagtatattacaaaaagagctcaaactgttcagatacagcaactgggcttactaggggacagaaggggaaatacgtcagactactgtacagggacacaaagactcctcatcctaaacaaagtattaaggtacatagacaagtttcttgtaagacagaaaacagagaaatccacagtaactctaacacatcccttaaggaataagcatgtatttgtaggaagcaaacaaagctttccatagagaaaccactttcacaggatgattaggtggacttgggttttgtttctgcatctgtcacttggcgaatgaagataccatcttcaggatgttctgtgtcatccatttcatacatatatgatgacgctattgcaagcgtagtcccatcattactgaaggcaagtgatgcgatgctcgtggggtaccgatggaattggcacagtcgctttttgttaaatggatcccaaatatttacaaagccatcagaaccacctgtggcaaatgtattgtggatattgtgaaaagaaatggcattgactgggtaaatctgctcaatattattttcttttagtctgtgacatttgaaggcatacttcttcttctgtacctcagggcttgggtccaaatactcaactgccactcggccttcaatagagcttaatacataaccctgcttgtttggaaacgctcgtatgcagcgagtctggtatttcaggctggactccctgcgctgctgcacgtaacccatgttccgtaagtcccacaccaacactctgcggcctgctgttcccacaatcagccggtctccagacactgagagggtatataccttttcaggctgagagaaggtcccagcattacaaggagttctgggatcccacagtttaactgtctgatcccaacttccagtgaccatcacattcacttctggacagtattcaacacatctgataggggcatcatgggtcccaacaagattttcttgatcagtgttcaaatcatgcattttcaattgatgatctagtcctccactccaggcatgcgttggatcgtagaaggcgcagtccaggacggcgccggtgtgctggtacttgagccgcatggagttggccggcacatcgtagagacgcacggacgtgtcccaggaggagacaagcaggaactgggaggtgttggggctgaacttcacggaggagatgccatcctcgggtggctggttcagcttgaactcgttagaaccggtcatcttgggctcccctcagaagcaacgtttccactactcgccactcgctgcggccgccgccgcctccttgcttccctcagaacactcgcccccggccgtaatggccgaattcccgggcatatgtccggtaccgtcgactg

SEQ ID NO: 129048 - DNA, 1903 bp, Homo Sapiens
  misc_feature (752)..(753): n is a, c, g, or t
tttactaacacgttttttcatcggaaggatggtgggcggcgttatatgggggaacaaaacctgggtgccattttcctccttaaaagagggttcattttcaacagagtatggctctttggttgttaacagccccaataccccctgggtgagagtttttcaccccggggtttgagatcttataaagcggggcgcccaaagtgcgggcagccggcttttgtgtccgccccccgctgtttttgccccaccaggggcgcaaaataatttatacaccgcaaagtggggagccaaaggggtactcggtatggcgcgctggagcgagattgtaggggtttcagttctagttccccgttttgtgtaaagagagtgttcccacaaggttgcgggcagggaaataggcgtttaaacggaaagttcgccccccggttaattgcggaatgaaggtggcaaggggcggggcgggttaaagttggaatttggggagcctgggtttggaggttcgcggtgtataggatccacgtaaaggcccgtcagaaacttccatttggatgtgttcagaaacgcttgggttgccgccggggcgtgttttatgggggaggatccaagcggtagtcatggcccagggtctcctgggaaacaggtatgaccatgttcacttacctactgggcccgcgagccaaacggaatggtctaggaagcttctggagggccgaggcggccgacaagggatgttgtagatcggagcgggtagtggnnggcggatgagtcttttaatagaaaaacacacgtgcaacagtatcaacacacatctctcgcaatcctgacagcgctgaacttcagttcttcaccttggggggtggcctgtacactcccacgaccacggcatggtctctttcatatggctcaagggtcaactgctcctgcggcttcatgttctcctgttgcatctttttcacttcggaggcaaacacggcctcggctgaggctgtggagtcaatgcagttggccttaatggaaatcacaaagtgtcctccattacgcaggaaggtgtgggcattcagggccacaatccgggtctggtctggctgggccacatcagcaaagatcacatccaccattgcgatgagcatgcggtatttgtgtgggtgtcgagcatcctcgatcacaggaatgatgttggtcctcttcttggccaagttaatgaggtcacggccagagcggtgggagaactcgactgcatagactagaccatccggaccaacgatgtcagagacatgggagaccgtggtgcccgaggcagccccgaggtagagaaccttagcccccggtttgatgtggatctggtccacaccacccaggattgctgctgctagcttggagcggaaggggttccaggctcggtactcaattttgtcatctccttccgaaatcgagactctcttctctccataaactgattccccagggaccaggttcttggtgaccagtgcatcttcctttcctcgacaaatgaagacaccctcatgccgatgcggctccaccatcacattcttccccgactggtttcctctttttcctccccgaccacgaccccggttgccaccagaatggaagcctccaccacctcttcctcctcctccaccgccgccgccgcctccacctcctcctcgtccacgacctctaaagcctccgcctcgacctcggcccccgccaaagccccctcggcctccacgaccaccacggtcaccaaagccccctcggccgccaaagccacccccacggggactgaatcctggcttcatggcgagccctggtttgtgcggctccggagtccgcggcgttcacaactccacgagtccggggccggacgcgtggtcgacgatatcccgggaatccggaccggacc

SEQ ID NO: 129049 - DNA, 778 bp, Homo Sapiens
  misc_feature (49)..(49): n is a, c, g, or t
  misc_feature (69)..(69): n is a, c, g, or t
  misc_feature (527)..(586): n is a, c, g, or t
  misc_feature (741)..(741): n is a, c, g, or t
  misc_feature (752)..(752): n is a, c, g, or t
gccacatcagcaaagatcacatccaccattgcgatgagcatgcggtatntgtgtgggtgtcgagcatcntcgatcacaggaatgatgttggtcctcttgttggccaaagttagtgaggtcacggccagagcggtgggagaactggactgcaatagagtagaccatccggaccaacgatgtcagagacatgggaggccgtggtgcccgaggcagccccgagttagagaaccttagcccccggtttgatgtggatctggtccacaccacccaggattgctgctgctagcttggagcggaaggggttccaggctcggtactcaattttgtcatctccttccgaaatcgagactctcttctctccataaactgattccccagggaccaggttcttggtgaccagtgcatcttcctttcctcgacaaatgaagacaccctcatgccgatgcggctccaccatcacattcttccccgactggtttcctctttttcctccccgaccacgaccccggttgccaccagaatggaannnnnnnnnnnnnnnnnnnnnnnnnnnnnnnnnnnnnnnnnnnnnnnnnnnnnnnnnnnnacgacctctaaagcctccgcctcgacctcggcccccgccaaagccccctcggcctccacgaccaccacggtcaccaaagccccctcggccgccaaagccacccccacggggactgaatcctggcttcatggcgagccctggtttgtgcggctccnggagtccgcgngcgttcacaactccacgagtccgggg

SEQ ID NO: 129050 - DNA, 1048 bp, Homo Sapiens
agatggggtgtcccagatatattttttcaaaagccccttccgggaccccaccttgggggccaaaatgttattggtgggatatttgtggaaaaaggaaaatggccattgaactggggtagaatctgcttccaatagtaattttccttttaagtctgggaacattggaaaggcatacttcttttttcggtccctccagggctttgggtccaaaatacttcaaatggccacttggcctttcaatagaggtttaatacataaccctgcttgtttggaaacgctcgtatgcagcgagtctggtatttcaggctggactccctgcgctgctgcacgtaacccatgttccgtaagtcccacaccaacactctgcggcctgctgttcccacaatcagccggtctccagacactgagagggtatataccttttcaggctgagagaaggtcccagcattacaaggagttctgggatcccacagtttaactgtctgatcccaacttccagtgaccatcacattcacttctggacagtattcaacacatctgataggggcatcatgggtcccaacaagattttcttgatcagtgttcaaatcatgcattttcaattgatgatctagtcctccactccaggcatgcgttggatcgtagaaggcgcagtccaggacggcgccggtgtgctggtacttgagccgcatggagttggccggcacatcgtagagacgcacggacgtgtcccaggaggagacaagcaggaactgggaggtgttggggctgaacttcacggaggagatgccatcctcgggtggctggttcagcttgaactcgttagaaccggtcatcttgggctcccctcagaagcaacgtttccactactcgccactcgctgcggccgccgccgcctccttgcttccctcagaacactcgcaggctaggcgaaggaggcggagaggaagctccagtgtagacctgccattggctgatttcaaacgccaacgtctcagtctagggggccgattggtccgctcagctgcccagcatcggtcaacccccc

SEQ ID NO: 129051 - DNA, 563 bp, Homo Sapiens
ggggtggggagtaggaatgtgtattatcatcaacatggcacttaagtaaatgaaatcttgtcaagtacatggtgacttgggttttgtttctgcatctgtcacttggcgaatgaagataccatcttcaggatgttctgtgtcatccatttcatacatatatgatgacgctattgcaagcgtagtcccatcattactgaaggcaagtgatgcgatgctcgtggggtaccgatggaattggcacagtcgctttttgttaaatggatcccaaatatttacaaagccatcagaaccacctgtggcaaatgtattgtggatattgtgaaaagaaatggcattgactgggtaaatctgctcaatattattttcttttagtctgtgacatttgaaggcatacttcttcttctgtacctcagggcttgggtccaaatactcaactgccactcggccttcaatagagcttaatacataaccctgcttgtttggaaacgctcgtatgcagcgagtctgttatttcaggctggactacctgtgctggtgcacgtagacccatagtgccgtacgcg

SEQ ID NO: 129052 - DNA, 2072 bp, Homo Sapiens
  misc_feature (172)..(201): n is a, c, g, or t
atttgggtgaagaaattctcaagccactaaggtccaatgagcccaggaatttttcctaagggaaaaccaaggttatgggcccatgttccaccttacccttactggggcccgccgcgcccaaaaggaatggtttaggaaaggtttctcgaggggccgaggcgggccgacatgnnnnnnnnnnnnnnnnnnnnnnnnnnnnnncgtgcctttcccatattttattaaattcgtgttttattttaaaaaattacagcaacattatcaaagacaacatatgtacaaacattttacaaaaaagaacattaccaatatcagtggcagtaagggcaagctgaagaataaatagactgagtttccgggcaatgtctgtcctcaaagacatccaaactgcgttcaggcagctgaaacaggcttctttcccagtgacaagcatatgtggtcagtaatacaaacgatggtaaatgaggctactacataggcccagttaacaaactcctcttctcctcgggtaggccatgatacaagtggaactcatcaaataatttaaacccaaggcgataacaacgctatttcccatctaaactcatttaagccttcacaatgtcgcaatggattcagttacttgcaaacgatcccgggttgtcatacagatacttgttttttacacataacgctatgccatcccttccttcactgccccagtcaggtttcctgttgttggaccgaaaggggatacattttagaaatgcttccttcaagacagaagtgagaaagaaaggagaccctgaggccaggatctattaaacctggtgtgtgcgcaaaagggagggggaaggcaggaatttgaaaggataaacgtctcctttgcgccgaggaatcaggaagcgtgactcacttgggtctgggacgataccgaaatccggtaccccaccccatcccctgcccgccgggtacctacaagctcggttcctttctcaactcccccagttccttgatctccaccttcttgtacttccccgactttctccggttggtgatcaccaggacggccatgccggcgacgagggccaccacgaccaccacgatgacggcgatgaggccggcggtgaggcgcttcatggagaacttcgggggaatctcgtccaggtaatagatgagcgtgcgctccacctgcaggggttctccgcgcacgcgcaagtcacaggccagccgcggccctggaatagagactcgcccttgatgtccctctcgaatgtagtaggcggcatcgccgatatccacgtcaccggcggccttctgagacgtgttctgccgcagctcgatctggatggtgggctgctcgtagtgcacggccgccacgaacttggggtgcagccgatagcgctcgcggaagagccgcctcagctcggcgtccaggtctgagtggttgaaggcgccggcggtggggcggtggcgcaggtcaatgaggatgtggtgggtgcgcaccagctcatcgcagcgtaggctcaggtcgcccttgtccgtgcggcggacgcccaccgagttcacgcaccagcacaccgacgtctggttgcactggcgcgccttgaagcggccctcggggtcgcagtcggggtcgtagaggccatcgttgtccacgagcgcgtgctcactcggccgcaccagcgtgcgggcgttcttgggggcgctcatgcgcgccttgagcagcagacacttggaggtcagcgtggagcagtcgaccgccatgcccgagcccagcgcgcggcactggcagcggccgccggggccgtcggggctgcacacggtcatcttgttggtgggacacgtgcagttgtcctgcgcggccgtgtggccggtcaccgccgccagcaccagcagcagcagcggcagccgcagcggtggcggcgcgaggccggggccccgagccatggtggggcggaggaacgcggaccggacgcgggcggatgaggcgcggggactcgtcggggctcgggctccggcgtctgggatggtctgcaggcgtgatccgcccggccgctccctctgtttgaaaaccacccaggcctcgctac

SEQ ID NO: 129053 - DNA, 945 bp, Homo Sapiens
ggctagagctacttgcagttgcctgagttagagaacatctctacaaggtgtaagtgacttctcatctgctcaacagctcaaattatttattgtcaaaccatgctgtctatgcttaggcctttaggactactagggtcgtgggagcctcaaagtgtattctgcttggtccaggccttcttgggcttgatgttcatgcgtttccagacttcagctgtggtgcggtctgctttggtgaccccactgaagtcgaacgtggtgatacgggacagggtgcacagcacatattgcctataccctttctcttcctccatggggttcccatggagtgtcaggctacggagccgaggaaggacagccagcttattcacctcccccaggcgctggatgctgttgccgtgaagatagaggacactcaggttgaagaaagttgttaggacagggtcaatggaagtcaggtcattaaaggacaggtcgatccaggccaggttctctgggtgctccaacagctgtgaagccacctggttgaagtctctcagatcattgagaacattgttattcagccacagggactgggtcagtgattttcccgactttgaacgcttcagtggtcgtagtcctgtccttggctcctcatttaccagatcttggatgacgtggatgcttctgaaggagtagtcaagagggggctcctgtacggaagtgttcatatagtcccgtttgttcatagttcaggccatcattcatcaggtggaagcatgtgccctgggagtctgggttcagcctgtcactgatggctgaaactccaccattaggcattcattcctgtgggttcagggattgtttccggttaaaatggaaatactccccgcagtcgcttcctctccagtcttggcgtcccactgcctcagggttactcagagcaactccatggcaactgctttcccc

SEQ ID NO: 129054 - DNA, 377 bp, Homo Sapiens
tcaagcagaagattctttttatcaaatgaaatcttaagcagaatcccagcatataaaacagaatggaattactttgatctgattgaagtgggggctggtttcagagatcataggccatcttcttggcctgtcatggaggcctgtgaggcatctctacagaccctggtactctgtgaagagtttggaaattactgatctactttaacccccaaatctctaagctgaaaagtacaaaggggcccagagagttagataaatttcccaaggctgtgtggtaaacccacgtctccagtgtcccaggccagcaggcctttccctcaattgcctccctttttcagcaaaataagactagagctggccaggtgcagtggcttatc

SEQ ID NO: 129055 - DNA, 865 bp, Homo Sapiens
  misc_feature (589)..(589): n is a, c, g, or t
  misc_feature (651)..(651): n is a, c, g, or t
  misc_feature (829)..(829): n is a, c, g, or t
aaggtgcccggtagctttaatgagcaccttttcctcactttgtccctccctctctactcttccccttcccgtcttgacaggtccagcctgccctagggctcttaaaccgcaggtatcaatccttctgtccccttagccgctccaggcgcctgcgaaggtccgggggcaccttggccccagctgccagcagctcgcgcagcctctgtttgggagtcttggtgagcacgaaattgcaggggaaggggccctcttcaaaggtgacccgacagttccgtgtcactgaatggtagccctcggcactggcagtcaccatgtagtcccctggggtcagcagacgccaataatccccgccccacgccgtggtcacgtcatggttaatcccatccacggcaatgacagcgtcagcaatcccaagctccgtgtccttgtccctcaccactcctgcaatgcccatgcgcacctgctccaggtaggtgaggagggcgtctttgttgttcttcccactccttggggcaaattcattctcgtgagggaacttgtcacaggacagctccacagtgacctcaaagcagttggtgtgtaggtagcntgaagtcattcatgctcccggggaccgtgtgccagtcagccccgttgatgatgttgccgtgnacggagaagtcctggctgtggcagggtcggcggctggtgtcctgcatggccagattactgccagcatagacagtgctgagccagcgaaacacagcatcatctggtgtgggcgtgagctcgcgggcaagccacggggtgcgagtcatgtcgaatgggtaggacaccacgagctcacccncgtggaggttggcacttagcacaaaggggatccgct

SEQ ID NO: 129056 - DNA, 1682 bp, Homo Sapiens
  misc_feature (689)..(708): n is a, c, g, or t
  misc_feature (1659)..(1659): n is a, c, g, or t
cccaacacaaaactggtcatttattttttttgttgtcattgttattaggaagcaaaaaaatgtacagttacaagaatcattttccaaacagaggttaaatatgagctgaaaagtgtaaaaaaggaagaggaacatcactttacaaatcattaaattaaacaaataaacaaacagaacccaaagaaccaaccccccatgctgagttctctccttgtgcaactctgcaaaatgagaacagaaaatgaagtgggccgtggaggtgggggccctggggaggggcgggagctgggagccaggaacaggcaggagggggctgctggggcatggacgctggctttctgccccgtgtgcctggtggtttctggtacctggtcgtcgtacctggtggctctacccaggctgggggtcgaggggaggggcccccagaggcccctgccagcctgtggcattcaagcactgccaggacaagccagattgggcggtggaaacacacgggacagggaggcggccaccagtgcccaggctggtacctgccgcaggtgccagcctgcacctcttctgatctgaacttgccccaagtccacctgcgtctccctccttctctccagactgccccctcccagatcctgaaaggcccctgcagcatcaaatggttgattttagtctttgcttaaattaaaaaattaaannnnnnnnnnnnnnnnnnnntgtacacacaggacaataacagagagtgttgaaaagggaggtacaagagcgggccggggaaaagccaggggcgggggctgtggcccagggctgctgggagggaggcagggctgggtgatgggacaaaggcagcggggaagggtgagaagttaggggaccagaatggggggcaatttattttacaataaaaacaggagttcaaacctcagcagaacaggactctggggtccccagagggccctcctcacactgggtgaggaggggtgggcttagggggacgacaggggtgggcggggagctcggcttcaggtttagatgatgacggtccctggtctgagggagaagggctggagtctcagcttctccgtgacttcgagtgttgaataagccactgtagggtgatgtcaatgttgtccttttctttgcaagagatggagtagcagcagatctctcggtcctggatggcagacagattcattttctcaatcagctccttctcatccaatgctcccggaaggtctcgcttgttacccaggactaagaccgggatgccctgcagctgaggtttgtccagtaggttgtggagctcgttcttagaggcctcaatcttctcctggtcagcagcatccaccatgtacacgatggcgctcactcctcggcagtagcgctcccacatgctgcggaaacgcggctgtcccccaatgtcccagagcttgatagtcacattccctttggtgattttgcgcatgttgaaacccacggtggggatcatgtcctcgttgaactgtcctgacgcgatcacgttgacgaaggtggtcttgcccgagtactgaagcccgaccagcgtgagctccatctcctccttccagaatagggccttgaaccagtccagcagcttgttgaacaaagcgatcatggtcgctgccgccggccccgcccggtgccaggtcnccgccgcccctcgctctcaactg

SEQ ID NO: 129057 - DNA, 706 bp, Homo Sapiens
  misc_feature (134)..(144): n is a, c, g, or t
aaagttctgattggctactgtaaaggcaatcttagaagatgcatgtaaatataatataaatcaactttcttatcaattagacattttccccactcacatctcttagtttttagggtattcagtcccagcaaccnnnnnnnnnnntgtaaatcatattttgtttctggctaatgttcaatcagtttttcttttataagagcttttgatgtactgtttctacggttctttaggcacttacacataaaaacattcagagggttttccccttaacacacaacttttaattctcatgaaaatgttgcacagttagaatttgtcttgcataggtaaattctgtttataacatggactctgataatccaaatattaacattcctaatatagggaaaaataagcaccattcatagctaaaaataatagaatcctgtcataacccaatatcataattacaaggatctggatatattctagaccaaatcacactccctgaaacattaccatgtacaataaagcctgaaatagccaactaattgaatgttattcttaatcctttacactggcactaaaaatagttcatctgtaataagcatgaatacgaccatgtaatagttagtagcactaattgaaaaggaataaaaaaatctaaccaccatagcagaataaggggtttaggtattattaatagccctggtacataatccataaa

SEQ ID NO: 129058 - DNA, 1474 bp, Homo Sapiens
ttttgaagggttaatattagcaaagttttactttaaaaatttctgctcataaatgactctgaaaaagccaatacgcaagaggctaacacaactgtagtctaaaggcaacgtcgaggtcactgatatgtccctcagacaagaggcactgctcagaatccccctgtgctgggggtgagggaaggaggggacggtttaggacagaggaataaatacatgtggttgtgggagttctgccatcagggatggtggccccagcccaggaccccaaaaccctgaggcggtgcagtgggctgccaaccccccagctcggggttccccaaggctgcctcagtgtttggatgggctggaaggaaatgctgaggttctgggagggccccatggccagccccctcttcccactctagccagaggagagccaagctcccggctggccagggccctggggtagggagcagtgcccccaagagggctttctggtgtcaatgtctcatgcagcgtcaggtggtgaggcctgggcctggccctgaggcgggagtgggggtgacaggcgaggctggggtgggccctggcacctgcagctttgggctgcccatgtgtgtctgctgacatcccgactatggtccacggccgggaatggtgggcagacggggctgctggcagccctcagccttatagtgtgtgtgtggggtggacgaggggtcatgaggacagggatggggctgggcgtctctggtaaggaccagtaagtgccaggcaggacgtactctgaaggctcagccgtggcccatctgggacacagccctgctcccgaaggggctccaggggaactgctcagccaggtgattcaccagggcacgggcaggccaggctgaacccggggccccagtgtgcgatgtggggaggtgactgggtgagcgtgaacagggcgtggggtgcgcggggcgggtggccgtgtgaccgtgcccggccctcagaagacgaagcagcgctccgtggggtggcccacgtggtccaggttgggaaggcaggcgtactggatcatgggtggggggccacacatcagcaccagcggctcctcctctgggggtggaaggtggtcccggatcatctcctcattcacgaagccctggccgtagtcccaggcttcaggggctctgtccagcgtgtaccagagcttgaagcgtgcagaatgtttgttcctgagttcctccagctcaggtcgcagcaggatgtccttctcggtctggttggcaaagagcaggtggcacacagtgtggtcatcagggtccttcatgatggcgcggatcacctgcagcatcggggtgatgcctgtccctcccgcgatcatgcccacagacttcactgtcctgatgatagggttggactttttgtcaggtcggatggcgaacttccctttgccctggtagaccagcagcccactggggccccggaactcaatggtgtctccaatctg

SEQ ID NO: 129059 - DNA, 396 bp, Homo Sapiens
tattagcaaatgtttacatgtaggttttcagctcataaatgactctgaaaaagccaatacgcaagaggctatcacaactgtagtctaaaggcaacgtctaggtccctggtatgtccctcagacaagaggcactgctcagaatccccctgtgctgggggtgagggaaggaggggacggtttaggacagaggaataaatacatgtggttgtgggagttctgccatcagggatggtggccccagccaggaccccaaaaccctgaggcggtgcagtgggctgccaaccccccagctcggggttccccaaggctgcctcagtgtttggatgggctggaaggaaatgctgacatcccgactatggtccacggccgggaatggtgggcagacggggctgctgg

SEQ ID NO: 129060 - DNA, 1110 bp, Homo Sapiens
  misc_feature (258)..(258): n is a, c, g, or t
gcccggggccaggccccgggttgaaacccgggggcccccacccttttgcgattgtggggaggtgaccggggtgaagctgaaacaaggccttggggtttcccgggccgggtggccccttgtgaccgttgccccggcccttcggaaaggcggaagcagcgctccgtgggggtggcccacgtggtcccaggttgggaaagccaggcgtactggatccatggttggggggccacccatcagccaccagcgggctcttcctcntgggggtggaaggtggtccccggatcatctcctcattcacgaagccctggccgtagtcccaggcttcaggggctctgtccagcgtgtaccagagcttgaagcgtgcagaatgtttgttcctgagttcctccagctcaggtcgcagcaggatgtccttctcggtctggttggcaaagagcaggtggcacacagtgtggtcatcagggtccttcatgatggcgcggatcacctgcagcatcggggtgatgcctgtccctcccgcgatcatgcccacagacttcactgtcctgatgatagggttggactttttgtcaggtcggatggcgaacttccctttgccctggtagaccagcagcccactggggccccggaactcaatggtgtctccaatctgcatgctctccaggtactgagacatcttccctccagcgggaaacttgggatgggtgtccttgaagtaaaccttgatgaccaggtccacgaagcccttgtcatcatcgctggagatgggtgtatagggccggacgaccaggtttccatcaattcgagccgagaggtagatgtgctggccgacagggaggcccaggatgtgctggggtgacggcagggcaaagcggaagcgccgggtgtcatggctgatgatctcccggtcgatgagccgcagcgggtacttgatgtccgggctctcgagggtgatggctggcgtggagcgctggaacagcttcatgagcagactgtacaggaaccagactgggaagagcaccatatggcccaacgtgctgagctgggcccccatggtggccccgcgccgcgctcgctctgtcgccgccgccgccgccgccgagaccgtcg

SEQ ID NO: 129061 - DNA, 795 bp, Homo Sapiens
gagaaaagttaagctgttttatttcacaggatagctccacgtcaaaccagcaggcaccatcagaatacgcgacagaggatccaatcagacactctataggacgggcgtttggtcgtaaggtagagaaacgatatccagaagagggcaacatttatcatcacgtggggacaggcaaccagcaatttcctagggtggttttggtctgtttttcctgtcacaatttggggaggaaggaaaccaaaggaaacaaaatagaccagccactctgaagcaatcagaatcaaacctattgccaaaccatgtaaacagtcacactgccgggaacaagggcctgggcagaaaccctagccaggatctacttccgtctaaggaaggaaaagtgcactctggttgttctggttcaaggaacagctttgttattggccggggacaactcacacagaaaggaggtgtcaacaaggggcagcgatggccatgtggccagtcccagagggacagcaggacactggcagatcaatctcagggaggtcaggagggcttggacctgacagcaaagtcccttctctcggctcccctgggcagctttggatatgtggggaatgttctatgtggctgctcagaggagaggagacccagagaaccggggaagttgacatgaaatgtcagcattagctctgcacagcagaaaatcagctaggaacacctcggctccccctttctgctttcctcctggcgcacccgactccagccaggggggtaaccatgttgtggcagcacctcttctgggtccagaag

SEQ ID NO: 129062 - DNA, 1358 bp, Homo Sapiens
  misc_feature (1282)..(1316): n is a, c, g, or t
gactttttaaataaacatcttttaaaaatcatttatatccaaagagatatataattttttacttatggaaagttatttctttaaaattatcaaaaggcagacaatgacaagaagtttatttcagctttacttaaaattttagtttcaaatgaaatgaaatgtgacactgaagcataagaacacaactgaagactgcaaacaacctaattcattttccgagtttgctcaagcctccaggcaccagtcaaatatcgaagtcgtataaaaagtaggtctttacccatttgtagccagctccagaatggaactaatttagaaccttcaatttctgtccagttgacagcaatttctgctattggaattttaaagaactgtgctatgtacagtagttctacatcaaatgcccatcgttcaacgtgtagagatgaaaacgtccgtgaagctgcttctcgagtaaataatttgaacccacactgtgtgtccctgattcctttgacacaaaggaaccacaccagaaagtggaacccatacatgagaagagtacggaagtaagaacgctgagcaattgattctttttctaaatgagctcgagatccacatgctatagccatttgattaggccaaggctgtagatcatttagccccttttctaatttctcaacatctggaaactttgtggctccatcagcatctgccataaggatcttttctcctcgagaactgaatatacccattctaatcgctccaccttttccacgattcttcaccagggttatcacacgtactttgtcacttccatatttctggcaatatttaaaagctacctttgaggtctgatctttactgccatcatcaactactatcacttcataagtgaacgcaggatctcgtttctgtctcttctctagatagctcagagcttcatccatcatcacaggcaaccgtttttcttcattgtatgaaggcacaacgacagaaagttgtttggtaggtgagtcccatatgctgggtaaagtttctttctggcctttggcatttaagaagaatttctcttcttcatgtcgatggagtgctggcatttttgtagcagttgtaaatgcaacgatggaaatcagtacgagggctgcggccgccagcgccgcgccgagcaccgccagctgcaacagaagcggagccattctccatgccgtggcagcccgcccaatcccgcacctccacacaggcggaagcccccggccgtaatggccgaattcccgggcatatgtccggtaccgtcgactgnnnnnnnnnnnnnnnnnnnnnnnnnnnnnnnnnnncggccgcttcctcgctcacagactccgctgcgctcgtcgttt

SEQ ID NO: 129063 - DNA, 1012 bp, Homo Sapiens
  misc_feature (390)..(422): n is a, c, g, or t
  misc_feature (630)..(630): n is a, c, g, or t
  misc_feature (723)..(723): n is a, c, g, or t
  misc_feature (843)..(844): n is a, c, g, or t
  misc_feature (908)..(908): n is a, c, g, or t
aggtaaaataagggcacatctttattttgctacaaggcagtaagtacaccgtcatatctcaaaagttcagtgctggccatcttgcatcaaatgttcttaaggcagtgactggctatcaaccacagtttctgtctccccagttgcaaacacaggatccatgcaacagttctgagaccatacacttagaaaccacaggggatgcggatcaaatgcagaactcccaaattataaaacagtcaggctacactcaaaacaaaacatagaacatcaacaacacacatctcccaaaaaagaagtgcaacgcatgcttgtataaaccaacaataacaaaaaaaccacaataaaaaatgcagagtctcccaaacaagttttcaaatgtattgcagaagnnnnnnnnnnnnnnnnnnnnnnnnnnnnnnnnngtctgaaatactagtgcatagtcaattacctaacaccaagtttcttttctttctgtccaagctctactgcccctctgatactagcagcatgtctacaggctaagaccatagcagcaaaaaacgtttttcatttggcatttacaaaattaaattactgaataaaaatataattttttataaaactatttcttacagtaataatttttanagcaagctaacagaaaactcataaaatggtttggtacaataaatgtaccttcaatgtcattaaccataaatgagcatttacaatctggattanatgtcacatggtattaagtctacacttagagtaatgcttttactgatttttacaaatatatgcatatgtttagtgatcgagaaagtgaatactggagtacttttactgtgtcaatttcannaaccatcacacgaaaatatgatcggttggatctttaaatcagataatcatttatgtttttttanaaatctcgtgcggatctggctcgaggcaatcctaaggagtcgataatcgatcagtcagtgttctggtgatgtacgtcaatcaacaatacacgagaaatgtagcg

SEQ ID NO: 129064 - DNA, 907 bp, Homo Sapiens
  misc_feature (72)..(114): n is a, c, g, or t
ccaccccaacttataggggccgtcaacggtcctaggtagcgaggcctgggtggcgtttcaacacgagggagnnnnnnnnnnnnnnnnnnnnnnnnnnnnnnnnnnnnnnnnnnnaagtaagcacagcaataaagttttaatggaatagctttggcccaggcagaggcagttcccagatgtctcaggacgcgtgtgaaccccaagaagttgggggcgttatctgggcccttgggatccattcccctgggtataaagtgttggtacgtggctccaggcctggcccactcagcctcccccaggaaggcttctcaagtggagaaggttcttggcctcagaactcacggcgctgctgctcacgctgaccccccactagatgcagatcggtgtagaaaggcctgccagggcagggatgagggccccaagctggaagcagcccagaaatccttttaccagaggacaactccctaatccgctgggcaggggcggggtgtcacacgcaggattccgcgacgactgtcactgcctcctgggcgcccctctgtgcgggagcggggagggaagaggatggaacgccctgtgtctgcctcgggcgcagtgcgaggcccaagctggtctttgggcggcccttgcgcacctctgcagcgctgcgacctggtgcctgtatcccccacggcctcctctgctacccacgagagccggttgattttcggccgggctcagggagggcgtggcctccgcgttccccatccccctccaggacccacgcccttctcggagcgcaccagggtcagagccgggatggtccccgatcccccagcgcccccacgcctggtgaccttgggtcgggcgtcccctcacctgacgctcccgcggcgagcggctcccccgccgtgcaggtggcggccgc

SEQ ID NO: 129065 - DNA, 756 bp, Homo Sapiens
gaaagcagctgtgggactatatgcagagccacagaggcagagctgcccagagccttgggagcccactccttgtgtcagtgtggcctggatgtgagacgtggagtcaaagatcattttggaggtttgagatttaatgactgccctcctggattttggacttgcatggggcccatagcccctttgttttggctgatttctcctatttggaatgggagcatttacccaatgcctgtatccccattgtatcttggaaataactgacttgtttttgattttacaggctcacaggaggaagggacttggctggtctcagatgagacttgacttggacatttgagttaatgctggaatgagttaagactttagggggctattgggaaggcatgattgtgttttgaaatgtgaggacatgagatttgggaggggccagggtggaatgatatggtttggctgtgtccccccacccaaatctcatgttgaattgtgatcctgagtcttggaggtagagcctggtgggaggtgattggatcatgggggcagatttcccccttgctgttctcatgacagtgagttctcatgagatctggttaagtgtgtagcacttccccctttgcttgctctctccctctgccatgtgaagaaggtgcttgctttcccttcgcccttctgccatgactgtaagtttcttgaggcctcgcagccatgcttcctgtacagcctgcagaactgtgagttaattaaacctcttttcttcat

SEQ ID NO: 129066 - DNA, 1075 bp, Homo Sapiens
  misc_feature (957)..(991): n is a, c, g, or t
  misc_feature (995)..(1034): n is a, c, g, or t
ttttttcaagctgaagttttatttaaaatgtaaaagaaatgttcccccaaaatgctggtgaataaagcaaaaggataccatacagtgctctcttcctacgagttagccagcctatccaagtacagggcgatatacagtacttaatgctggtagaatttcacagtagtttagtgttaaagattatctgtgcctagattatgaagagattctcagtgtgtgatgtttagttcagggtttacatcttactgggcatgaacaagagcccctgctccttggccatagccaaatcccttgggcccaaagttctttgcatagcatcctttacaatagatttcaccttctttttcagtcagagttgttgattcaagactcttcccacactttgcacatcggaaacagtttttgtgccagggctttccagctccaattatcttctcggcagcatatacagaatccccacatctggaacacttctcagcacctccatatttctgagcaaatttagaagtgtttggatttgttgtaggcctgtgaggctgaacactctctggtttgatgcccagcctctcgccacggtccatgttaagcgtgccagcgccctggccataaccgtagccttttggcccatacttctttccgtagcaggatttgcagtagatctcttcatcgtgaattgccactgttgtgctatctaaatttttcctgcaaaccatgcagagaaagcagcagcggtggaagctcctgccatcacactgcacctcttctgcgtggtacacggtcctcccacaggccccacacttgtttccacctccccagacaggcattttgagtcggaggcgggagcacgtaccgcaggcggagctagcgaggctgggctggagggagggtccagggagtccgagatcccccggccgtaatggccgaattcccgggcatatgtccgctaccgtcgactgnnnnnnnnnnnnnnnnnnnnnnnnnnnnnnnnnnncggnnnnnnnnnnnnnnnnnnnnnnnnnnnnnnnnnnnnnnnnctagcgacgagctagcgccctatagtgatctatcatccttt

SEQ ID NO: 129067 - DNA, 562 bp, Homo Sapiens
aggaataaaatagctttggactttatttaaatgtatccattccaggagcataggcctggaagaagcccaggccccaagaagttgtgactgtcccctgggcttcctatggcaccaggcattgaagcatgtcctggtggccgggagtggctggggcagagggcggtgaagagggtggctatagggagtttagggtgaggacccacccccgggcctagagggccacagtgcgcaggctcattggaggatcttccctccggccacctctcctgcacctccagaccactgtcccgatgatgcccaccacaaggccgactcccgctgccactgggacagcccagtagagcacctcgggggcttcttcagcctggtctgggagcaatcggctgttccgcagggtgtagaggtaagggctctcaggagaggggcacttgagtttggctcggctgtgggtgaagttgttggaggtagtcttgcggcccactggttccagcatgttgttccagagtgcgatggccatctcggcatgcccgcggtctgagaagtgaaccagtcctcggagaag

SEQ ID NO: 129068 - DNA, 1109 bp, Homo Sapiens
  misc_feature (1034)..(1068): n is a, c, g, or t
aaaaccccacactgtggtttattattctgttatggcaatgtctatgttgcatattaataaaaaagaaaatccttggtgtttagaaaacagtgttatcacagataacaataagctattcttgttcctggttccaatgattttgaacctatttctcagaacaagaagccctctgattcaaatatgaaacagtattctatttcgtcacaaagatctgaaaccccatttttgagccatctctgtatataataagaatccagcctgcatttgtcagtgatagagagtacagtaaataagaagtccctgaagaggccagagtgttgacaaaattcaacatgatggtggagtccacacaaacacaggaaacaaagctcggcctttccatacagccgtctgtccttggaatggcttcgttttaagtcaacgtctcttcatgccgcacatattccccaatgtctgcttgatgaaataccacaatcgccatggggtctacttttctgcagtcttgtgtagatttggctgccaccccaaaacccaaagggatgtctgccatggagtacaccaccacgccctggtactgagaagtattttcagtgattcgacccagaccagatttcaacacatggttcccatacaggaaggactgctctgcaccaggctttatccaaactttatacttggcataaggtgcaaggtaatccagagctgtgacgtgcaaccgaaacttgtgggttttagtgaattttccaaagcaggtccccagcgacaccagcttgtccccggaaatattggcggccagcttcataatcttctcactcacatagtacacccggtcgttgtgcagacggaaacagtaggtgccatcgggccggtccaccagcagttgaagattctccccaatgtatttcgctatcttctcaaacatgacacgggtctcctcttcagtcaaaggccgcatttttccccctgggttggaacaccggatccccggccgtaatggccgaattcccgggcatatgtccggtaccgtcgactgnnnnnnnnnnnnnnnnnnnnnnnnnnnnnnnnnnncgccgcttcctcgctcatagactcgctgcgctcggtcgttt

SEQ ID NO: 129069 - DNA, 1380 bp, Homo Sapiens
ttctgcaaatataagaagtaattttattgcaatatactgtggctagagtggtctggggagaacgggacacattttgaagttcagtacaaattataacaactttgaagggaccacagaggaagaaaatgacaggagaaaaggacaaattggatgggatgagaaatgaaaacagaatcacatgacctagacgcagtccacgggggtcgcgggacagtcctcggctatggcttttcttttgaagagatgaaggtgacagtcattggcacatgctggcatcctgggctccagagactctccaagccagacttttctttggcaagagcgagacttactttccagggaaatttggaaaatccacgctggcggtgttttgttcctcctgggtggcttgtttgtggcttcctaagctggaactgcattctggtggtggtgggggtcggggacagcaccagagccccgcaggctcaccccaagggcccagcctgcatttcccatggtagaaggaaaaggcgctgcacccgggcaacttttcacagtgaagagatcgcctttcctggctgcccctcgggtcctcctgcccacagacggcagccccccgacctcgatggccaggaaagggttccccaaaggggacctcacccgccccgagctctggagccgctgacgctcgcatccaggacatttgagatgggaatccaaataggctacttggaaaagacgtgctgcaggcagccctggagagactcatggagttcattgtacattactccatctaccgaggcagcgcatggcatgactgaacggcttggaacaaacacagaaattagcaccacaaacattcaggaacccaaatataatctgctatggtcacaccacagacaatgcaggaagaggctttttattgcttgtgtgtgttttcaaatcaagtaggcacaacccagtcctcataacagccctcgggagtggacgcaccggggcgggagagcgcaggagggagtgtgcttggctatcctgcccagtggaaaggaaagtgacgtgcattgatcttagagtccttggcaacagactgtggaggcaataacaggataaagaaagcagggagaacgaggcatggccagggaccccagtgcgccttcaaggagaccttaaaacagatagcaccacaagagagccacaagagagaagtgtaaaaaataagcaccaattttcattgagttatcacctacaaaaaatgtggtttccctgccctggacattctcccatcaggctctgcgggaagaaaagcggaaaaaggaagcaaataaaattaatccaaacctgtgttttagtcttaagtgcatgtagaaagaagaaaattatcaaattttttccctccctatt

SEQ ID NO: 129070 - DNA, 930 bp, Homo Sapiens
  misc_feature (634)..(642): n is a, c, g, or t
  misc_feature (753)..(856): n is a, c, g, or t
gggggtgacggaaaatggggcccccccgggggatatttcttgggcgccccccccttgtttgttttgtagttttgtaattggttgtttttaatattgcagtaaaactttatttagataaataaggagctagacagattttgcccatggaccatagtttgatcatggccaacctatgatctaaaccaaagtccctaggcaagttgcaatagaaaagttgtgtgagacagtgagattttgcctttgttattcaatggcaagctagcccatgctgacacagaaattggtcccttgttttttaaaatgctaaaatactgaacactggcttaatggttagctggcaggcattcaggaaattgctatcagaagatggaagaaataacttacacaagggtaatttatattatggaaaggtgaaactgccccttgagataacctgaaaggcagatcatctaccctttactaaagaaaaagacagaaaaacaaaatattttgtagttgctgttcactgcacttgacaaaacgtacagaagagatgaactcagaaaagactggtcagtttgcaggcaaaaatgaaaaggaagagaattcaaattcaagtacttactgggtaggatgaggcaacattttaatatcnnnnnnnnngataaaaatgggaaatccttttaaaaataaataaaaagagaaatcctttagccaaaaggttgattaaaagccagttttgccgccgggtgcagaggctcacacgtataacannnnnnnnnnnnnnnnnnnnnnnnnnnnnnnnnnnnnnnnnnnnnnnnnnnnnnnnnnnnnnnnnnnnnnnnnnnnnnnnnnnnnnnnnnnnnnnnnnnnnnnnttagctgggtgtactcgtgtatacctgtattcccagctacttaggaggctgcagtgggagaattgcttgagcca

SEQ ID NO: 129071 - DNA, 485 bp, Homo Sapiens
  misc_feature (75)..(177): n is a, c, g, or t
  misc_feature (251)..(296): n is a, c, g, or t
tggctcaagcaattctcccactgcagcctcctaagtagctgggaatacaggtatacacgagtacacccagctaannnnnnnnnnnnnnnnnnnnnnnnnnnnnnnnnnnnnnnnnnnnnnnnnnnnnnnnnnnnnnnnnnnnnnnnnnnnnnnnnnnnnnnnnnnnnnnnnnnnnnntgttatacgtgtgagcctctgcacccggcggcaaaactggcttttaatcaaccttttggctaaaggatttctcnnnnnnnnnnnnnnnnnnnnnnnnnnnnnnnnnnnnnnnnnnnnnngatattaaaatgttgcctcatcctacccagtaagtacttgaatttgaattctcttccttttcatttttgcctgcaaactgaccagtcttttctgagttcatctcttctgtacgttttgtcaagtgcagtgaacagcaactacaaaatattttgtttttctgtctttttctttagtaaagggtagatgat

SEQ ID NO: 129072 - DNA, 845 bp, Homo Sapiens
  misc_feature (769)..(769): n is a, c, g, or t
tacaaggagaggccttgggcccagatgagccagtacagactccagacagaggggcccttggggccctccaacctcaggtgatgagctgagaaagatgttcacgtctaagcgtccagtgtgcacccagcgctccatagacgcctttgtgaactgaaaagagactggcagagtcccgagaagatggggccctggctttccagggcagtgcagcaagcagccggcctgcaggtgagcatggaggcccggccctcaccgcctcgaagccatgccccagatgccactgccacagcgggcgctcgctcctccctaggctgttcttagtatttggatttgcattccatcccttgggagggagtcctcagggccactagtgatgagccacgaggagtgggggttgggggcgctcctttctgtttccgttaggccacagactcttcacctggctctgaagagccactcttacctcggtcccctcccagtggtcccagccttctccaccctgccctggctatgtcccctgcgtgcccaccgctcgtccatcctccctcctctcccgtcttcctcccgtggagacggtatttctttgctgtctgtccctttggcccagacccagcctgaccaacgatgagcatttcttaggctcagctcttgatacggaaacgagtgtcttcactccagccagcatcatggtcttcggtgcttcccgggcccggggtctgtcgggagggaagagaactgggcctgacctacctgaactgactggccctcncgaggtgggtctgggacatcctagaggccctacatttgtccttggataggggaccggggggggcttggaatgttgc

SEQ ID NO: 129073 - DNA, 2138 bp, Homo Sapiens
agatttttagcatctttatttgagaagtcaattctgcagatgggtaacaattccaagtgttgatatatctcaacctttctatacagaaaataacaaaactcaaccagccagcctccccacatatgcttccaaccacatctggagtgtccaccatcagtccccttggctactttcaaaccagagctcaaatgcagaccgttttccttaggaatcattcccctgacccaggttttcagagttctttttccaggacagaattatagccccaggtgaagactaggtggatataggacaagaaccatcctaggcctggctcacagccaaagtccatcatccattttcagcactgaagagcaagatcttcaccaattcttgtttttgtagcccccatccagggacagcaccactgaaagtttgcaagacagctgggttcagtgaagtgtttgaaaacagaatatagcaccattggaaaacaaaggcctacagccacacttgatcacctccacgttagacagataggaattaggatcaggaacacagatcagtacagaaggccagaacaaaacctttggctaatatataaaaccagcagtgctccaaggcagattcagccaataattaagaaaaaaaccatcaaagcctcaacctttgcttacaatctttattgaagttatacaaaaagaatcctccaaaagtgaaaaaatacattatatacaaaaacactttcccttgggaggagggctgtgccccctcttaacatgcagtgctttcaactgtagctccagcctccactgtcccctccactgctgcccggctttcagcctgattctcagcctcctcctccatgttttccgaaacttcatttccactggggacagcatccccactgcctccgttcacctccggctcttgtttggctttctttgcatcatctttccggggactctcttcctctggtttcctcttctttctgacaaggtgggaaatatcagtcacacaatttgatgaggaagcaccgtctgttggctttctactggcaatcatggagactgaagagcctcctccaccaggagtgaaacctgaagtagaactctccaccagagtagctttcagagccagttcagctacattcccactacgctgagactcctttgcatcttctatcttctctctaatttcgggtagcagttcctttagttcctcaatttctttcttgtattcagcagacgatccttcagcctccttcacctgctcgtttagtacagccattctgttctcaatgacttcaatagatttgctgaactgtgccactgcctcatcatactgagagttgtacccataagccaagcccagctggtagtgggtctctgcaaggagacggtcgtgggcttccaggtactgttcctgcaggttaaggcaggactggaactcctccacagcttgcacatagttttcagattcaacactaacttctccgagtttaagatgtgcctgggcagcataaagctgtgcttcttttgtttcttgccttttaaaaatgatctttgctaaatccagcatatcccaggcaagctctaggttcccaatctcctcctcctcattttcttgaagagacttgttttcaaggactgaatcatttggcatttcttcagtcttatcattttctttatcatcctcttccgagccttcagtttcttcaccctctttcatctgttcttctctctcttgtgtctcttcattagcagctatctgaactttgtcttcaggtgatttctcagtagctccctgggctaccttggtatcaaccccatctccagctgcctcagactcttctacagacagcttagtctcctcctgactaggaaccagctttgccctgaccttctcctctagtcctgagccatcttttgtttctgtcagtctttctatagaagtctgtggttcaataggagtctgatctcctacaactgacggtccattgactgcaccatccttagggagaactggagcctcctgcccaggcttttcagagacttctgatccagcctctacagctgaggcctctgcagcctctgttgtcacctctggtgactcttcagcaggtggtacttcttgacctaccagttgttcaagaaccc

SEQ ID NO: 129074 - DNA, 508 bp, Homo Sapiens
gggcctgtttttctcgcaggctctattccgttcgctggttcgccacctcaggggaacgatggccatggagtccacagccactgccgccgtcgccgcggagctggtttctgccgacaaaattgaagatgttcctgctccttctacatctgcagataaagtggagagtctggatgtggatagtgaagctaagaaactattgggtttaggacagaaacatctggtgatgggggatattccagcagctgtcaatgcattccaggaagcagctagtcttttaggtaagaagtatggagagacagctaatgagtgtggagaagccttctttttctatgggaaatcacttctggagttggcaagaatggagaatggtgtgttgggaaacgccttggaaggtgtgcatgtggaagaggaagaaggagaaaaaacagaagatgaatctctggtagaaaataatgataacatagatgaggaagcaagggaagagttgagagaacaggtttatgacgcc

SEQ ID NO: 129075 - DNA, 997 bp, Homo Sapiens
  misc_feature (176)..(225): n is a, c, g, or t
ccggtgtgttacacatgcggagcgtgtcacatctgattttccgggcttattgggtggtgcattgcccccgagggggtcgccaggaccgggcactttccgcgcgctttagccccgcctcttctgttttttccgctccctttgggccccttgtccaaaagcgggtgacggtaacttgnnnnnnnnnnnnnnnnnnnnnnnnnnnnnnnnnnnnnnnnnnnnnnnnnnctacatgctttatgaagttatacgaaagatccctcccaaaagtgagaaaatacatatatacaaaacactttcccttgggaggaggctgtgccccctcttaacatgcagtgctttcaactgtagctccagcctccactgtcccctccactgctgcccggctttcagcctgattctcagcctcctcctccatgttttccgaaacttcatttccactggggacagcatccccactgcctccgttcacctccggctcttgtttggctttctttgcatcatctttccggggactctcttcctctggtttcctcttctttctgacaaggtgggaaatatcagtcacacaatttgatgaggaagcaccgtctgttggctttctactggcaatcatggagactgaagagcctcctccaccaggagtgaaacctgaagtagaactctccaccagagtagctttcagagccagttcagctacattcccactacgctgagactcctttgcatcttctatcttctctctaatttcgggtagcagttcctttagttcctcaatttctttcttgtattcagcagacgatccttcagcctccttcacctgctcgtttagtacagccattctgttctcaatgacttcaatagatttgctgaactgtgccactgcctcatcatactgagagttgtacccataagccagcccgacgcgtgggtcgacgatatcccgggaattccggaccgtaccagcctgctttttgacacactggttcatagtcacaat

SEQ ID NO: 129076 - DNA, 896 bp, Homo Sapiens
gggaatctgccattttctgtccctgagtgagtctctggcgtcccaaattgcctgtttttctcgcaggctctattccgttcgctggttcgccacctcaggggaacgatggccatggagtccacagccactgccgccgtcgccgcggagctggtttctgccgacaaaattgaagatgttcctgctccttctacatctgcagataaagtggagagtctggatgtggatagtgaagctaagaaactattgggtttaggacagaaacatctggtgatgggggatattccagcagctgtcaatgcattccaggaagcagctagtcttttaggtaagaagtatggagagacagctaatgagtgtggagaagccttctttttctatgggaaatcacttctggagttggcaagaatggagaatggtgtgttgggaaacgccttggaaggtgtgcatgtggaagaggaagaaggagaaaaaacagaagatgaatctctggtagaaaataatgataacatagatgaaactgaaggctcggaagaggatgataaagaaaatgataagactgaagaaatgccaaatgattcagtccttgaaaacaagtctcttcaagaaaatgaggaggaggagattggggaacctagagcttgcctgggatatgctggatttagcaaagatcatttttaaaaggcaagaaacaaaagaagcacagctttatgctgcccaggcacatcttaaactcggagaagttagtgttgaatctgaaaactatgtgcaagctgtggaggagttccagtcctgccttaacctgcaggaacagtacctggaagcccacaaccgtctccttgcaagacccactaccagctggggcttggcttatgggtacaactctcagtatgaatgag

SEQ ID NO: 129077 - DNA, 1043 bp, Homo Sapiens
  misc_feature (810)..(810): n is a, c, g, or t
  misc_feature (826)..(826): n is a, c, g, or t
  misc_feature (829)..(829): n is a, c, g, or t
  misc_feature (838)..(838): n is a, c, g, or t
  misc_feature (867)..(867): n is a, c, g, or t
  misc_feature (941)..(941): n is a, c, g, or t
  misc_feature (959)..(959): n is a, c, g, or t
tttttccacagtggttccagatcaggaagttttattgctgacatgcaggaagagtccccatgtagtacaaaaatatgtctttatacaaacttttttgtgactttttccgtttctttacaataggacttctctcagtgtgtgacacccagtgagggctgacccatcctcctctcctttgcttcaccaggaatgtcatcagacacatggcttgaccttggaagggcccagtctgtctgacagggctttgcagacccggcggctattgctttgaaaaggaggagaaagaccacgcacgggcagcagcctggagggacccggtgggctgctgagagggggctccgctgcgacgggccctggcccagcttcaggccctcacaggaggacagtcaagggctgggagccctaggccggactgcatttccgctcccgcaggagactttctatgaaataaatatagaaaagagggcatcccccagccccacagcacaagaccctggccctcagcgctggacagctgagacagacgcaggctcgctgctcagggggagtaagtgctgggctccagtaggctcccacaggcccactgaggcagaggcatgagtcgcccaagtgctggatggggcatggggagaaaggggcgtgggcagccctgctactgctggcaagaggtggccccattttttccagatggggaaactgaggcacaaggaggtttgggaacttggccaaggtcactcacagtgagtcagctttttaggggtgaggagagcggctcacaactctgggaacacagtcacctccccactgggngagcaaggtcaggcanganggggctcanggtcccatgactgctggaggggacctcangctctctgaggacatatggggggtaggctctggggacggtctttgcttggatcaggagggccagtccatagggncaggggaggggcatctgntgagacagattctggcagagggatcactcaaatctcgtcaaagcaccaggtgtccagcagcagagctctgcgatctggctcagg

SEQ ID NO: 129078 - DNA, 1059 bp, Homo Sapiens
ccacaagaaaagctggggtatcgcgttaagcttgggccccctctggggggattttctaagagccgcgcgcccccgggggggataggagttaatgtacatcactttgtgtggttaccaaaaggggtctttatttgtaaaaagccaaaggggcccctggggcaacaggacaggcaggccggcttctcaggggtcaggggcatttgggcagatgcgcttgagtgggggggcaccctccgagtcctctgtgtcaccctgggctgcctcagggacaggtggcactggctcaaagacagggtaagcttcgggggcctcagcttccagcagttctggaacaggctcctccttggtcagcattgggggttcgtcggtgctgccagcagttatgcccccgggatctctctcttggcccagccgtgggggctgagcctcctcagggaccccttctgggggtccggcaggtgacacagggcggctgggctggggggtgcccccaggactgggctctgtgcccttttgcagggaaccttccgaatggaaactctggttgctgttctcatcattaagatccagcaggatgagagggccaccccctcggggactggcgcccctgccccgacgttcccggccacgggatctctctgccccgccacctgcccgccttcgctcctcctcctggggatccaccactggcacccacttgaagatacgaagggaagtgtcgcccacagtcacccatcgcttctcccatctccggaccttctcgatggtcgccatcaccttcttgatgtcatccttggcccggctccgggtctcggcccgtacagtccggccggccatgctggcggggctggggccggggccgagcccgcggcggggccgcctcccgtccggcgggctcaggctccgcgccaggcccgggcgccgcgctctcggcctgccgtcccccctggagttggccgcgccctctctcgtccccaacgcctccgcaagtccccgccccgtttcctgccgccgcgccccgccccggcctgtccccggagcggcccggtggcgcgggcg

SEQ ID NO: 129079 - DNA, 1239 bp, Homo Sapiens
tcctggtgtttcaaatatttattttaggtagtaaaggcttttgtcgttctaaatcctgattacaagtcacatgatcaagaacaactaataaaggagattcaggagcatgttaaaaaaactacagcaccttacaaatatcccagaaaggtaggcatcctaattataacgaatatttgctcagtgttgtggacaatttcaagtgtttatttttacattttaatgaatattttcttcacacatgctgcaccacatgtcccaaactgaactgatgacatatgggtaagaatcagaatctttgagattaaaatgaaaccctgaacctattttgtttggtcctttggcttactggactcacagtaaatacttaatatcaagacaactttcctaacaatacccttttccctattttggctgttacccaaaacccattccaaagactattctaattcttccacctagaattcataatcaaactgctatataattggctttatgtaaagataaaaatttccaggctaattttcttccccttgatgccaacaggtagaatttattcaagagctgccaaagactatcagtgggaagacaaaaagaaatgaactgaggaagaaagaatggaagacaatttaaagttgtttcattaattaccatatctataaaacaaacatagtatctgtcaatctctagaaaccacaagatgatggagaggtcataaaaactgtggtagtatgcttagaaactgttgatttaaaatatcttgtggttatgatatcagaggctaaattttgaaataaaatatttggcaaattcctccacattagtgtcaatgttcctatcatttcttaatataaaaataataccatcaattgctgattaatttttaaatgtatagtatagaagcagtttctgaaccagatctctgctacataggttttcaaactttagttgactaattcttctgatatgttgatatacaaatcagaaccaatgttcaagcctgaaataaaactaaagaacttataaaagtttttagaaaaatataaaatatcagttagaagattatgataatctcaaagtacaagaatctacctgaaaatagactagggatttttattagccacattttttgcaaataatttaaaaatagtttagacttgtttcaaggtctaactataaaagaaggatcatacccggccgtaatggccgaattcccgggcatatgtccggtaccgtcgactg

SEQ ID NO: 129080 - DNA, 1043 bp, Homo Sapiens
  misc_feature (243)..(243): n is a, c, g, or t
tttaaggcattctccccccagtttttaggccctttcccatcatctggtggtttcaagagattgacagatacaaggttcgttttatagatatggtaattaaggaaacacctttaaattgtcttccattctttctttctccagttcatttcttttgtcttcccactgatagtctttggcagctcttgaataaattctacctttctgggatatttgtaaggtgctgtagttttttaaacatgctcntgaatctcctttattagttgttcttgatcatgtgacttgtaatcaggatttagaacgacaaaagcctttactacctctcctctgatggggtctgggctgctgacaacagctgactctgcaactgaagggtgttcattcagggcattttctacctcaaatggtccaattcgatagccagaggataatatgacatcatctgctcttgcaacaaaccagaaatacccatctttatccatatatcctctgtccccagtgatatagaaattgcctcgtagagttgaagctgtttttgaaggattatctacgtaatgagtaaaaaggccaaatggtcggttgggtagaacttgaatgccaatatctccttcttgtccaggaggtagaacattgccatttacatctacaatcttaacatcgaaagcaggagaaggttttcccattgagccaggtttaattttcattcccttaaaatttccacagattagcaccgtttcagtctgtccatatccttcgtagatatccaggcccgtcttgtttctccatttttcagtcacgtcaggggtaattggttccccagcactcacacagtgctttaagcttttaaacttatagctggttatatcattctgtacaagcattcggtatacagttggtgctgaacagaagactgtgatgggggacttggagagtgtttgcaagatagaagtcggctcaaaacgggggaaatggtgtgtgaatacacatgctccctggatccacggggaaaaaacactactccatgcaggattttgcccgcccgtatt

SEQ ID NO: 129081 - DNA, 1597 bp, Homo Sapiens
cgcactctggaggtgtctttctgtgggctcagggcaaccacacatgcacaaggtgggtgcagcttcccaaccattttatacagagtcacagtgtcagaactctggtggaaaacagggtggggtcgggggatgacatccaactcaggaggtgtccatggtctcgcctttgagttcgttgaagaggaaggcgtcctggtactccttcatgtactgcgtggagcgggactcgtccaggaagagtgagtagacccgcttgatgtcatccacctgcacttctgtacccttgcgtttccggcacaccaagctggcagctgtgatgagctggatggcgtagcgcagtgacgtctccagcccgatgcgggtcagcaccgtgtaggcgtcctcactcatctccacatcttcttcctcgcaccggatgcggaggatctgcttcgtgtctttctcgctgtagggggtggtggagacgataagcagccggtccagcaggtctatggggatgccgtgagggctctggtagctggtgccccggattcgcgtgatgccacggttggtggccatgatcaggacaggcgccatgtcactctccagggcccggttgaggaaggagaagctctcgatgtccagcatgtggacctcgtcgatgaacagcactccagggatgatctccgccttgccctcctcgcgccactcagccaccttggcattgatctgctcacggacttctgacttgatctcccctgtgtcacctgagaagagcgccaggaagccctgggtgcgagagttgatgacgtcgatctcgtgcagggacacggtgtgcaccacctccttgcgtttctggagctccccatctgggcactgcacgaacttggtctgggagcccatagcgtcgtagtcgcgggcgcgtgtgaaggagcggcccagcttggagatcttgcccgtcgccttgtcgatggtgatcacgtccccggcctggaccttgtccttggtcagggactcaatcatcttggtgcccaggtcgtagatggtctccatctctgtggtcttgagggtcagtttgcccaccttggagcccgtccctgttgctggtcgatcaatctggatctccaccacctccccttcgatgatctccgtctcctccttgatgcgaacgccgatggaccgccggaaggcctgcgtcagcgcctcggtcttgctcatctccagggagaagatttcactgccggcgatggctgtgaatggcgtgtcagggcccagggcctgcgccatgcccatggcgatggccgtcttccccgtgcccggctggccagcaataaggactgcccgaccggcaatcttcccttcccggatcatctccagcaccacgccagccgcccgccgtgccgccagctgacccaccatgccttgcgaagcctgccgaggctccaaggcatcgtccagccccagtccccggatgtgggagtgggcaccgattcgctcaatccttgttacatcacggatctccgggactttggttgtggctgtaacggttgccatgatgccctcgtgccgaattcgacacccaggcctcgctaccttaggaccgttgtagttactgccg

SEQ ID NO: 129082 - DNA, 1294 bp, Homo Sapiens
tggatggttccagccattggggacccttggtcgatggaccagcactccccggggatggatttccgccttggccctcctgggggccattcaagccactttggcattgatctgctcacggacttctgacttgatctccccctgtgtcacctgagaagagcgccaggaagccctgggtgcgagagttgatgacgtcgatctcgtgcagggacacggtgtgcaccacctccttgcgtttctggagctccccatctgggcactgcacgaacttggtctgggagcccatagcgtcgtagtcgcgggcgcgtgtgaaggagcggcccaacttggagatcttgcccgtcgccttgtcgatggtgatcacgtccccggcctggaccttgtccttggtcagggactcaatcatcttggtgcccaggtcgtagatggtctccatctctgtggtcttgagggtcagtttgcccaccttggagcccgtccctgttgctggtcgatcaatctggatctccaccacctccccttcgatgatctccgtctcctccttgatgcgaacgccgatggaccgccggaaggcctgcgtcagcgcctcggtcttgctcatctccagggagaagatttcactgccggcgatggctgtgaatggcgtgtcagggcccagggcctgcgccatgcccatggcgatggccgtcttccccgtgcccggctggccagcaataaggactgcccgaccggcaatcttcccttcccggatcatctccagcaccacgccagccgcccgccgtgccgccagctgacccaccatgccttgcgaagcctgccgaggctccaaggcatcgtccagccccagtccccggatgtgggagtgggcaccgattcgctcaatccttgttacatcacggatctccgggactttggttgtggctgtaacggttgccatgatgctcaccaactgccagagtcctagcggaaacggaaacgcgcgaggagcgagatgttctggctcctctaggctagctggttcttcaaagatctcgatggttcctcataaatatgtaaatattgtgggggcgtggcgggactttatgccccgccctcccaccgaggctgcgctggaagacgggcgtccggaactcctgggtccattcccaatgtctcctggctcctcctccttttgctcagccccaccaccgccccgctcaggccgattgcaaaattcttagctgttctttgagtaaccacacgtcctccacgccctcgtgccgattcacacacccaggcctcgctacctagccgtaat

SEQ ID NO: 129083 - DNA, 1015 bp, Homo Sapiens
ggtgcccgttggtcccgtggtttcattcaaacgcccttcttcccgccgtgggaaggactccgtccccaggtgacctccggtgccccccccgggattgttccccccttgcctcctgccccattcaccacgtggccatgatgtgcctccggactttgtgacgtgtttgtcccgtgtgtcacctgagaagagcgcccaggaagccctgggtgcggagagttgatgacgtcgatctcgtgcaggacacggtgtgcaccacctcctgcgtttctggagctcccccatctgggcactgcacgaacttggtctgggagcccatagcgtcgtagtcgcgggcgcgtgtgaaggagcggcccagcttggagatcttgcccgtcgccttgtcgatggtgatcacgtccccggcctggaccttgtccttggtcagggactcaatcatcttggtgcccaggtcgtagatggtctccatctctgtggtcttgagggtcagtttgcccaccttggagcccgtccctgttgctggtcgatcaatctggatctccaccacctccccttcgatgatctccgtctcctccttgatgcgaacgccgatggaccgccggaaggcctgcgtcagcgcctcggtcttgctcatctccagggagaagatttcactgccggcgatggctgtgaatggcgtgtcagggcccagggcctgcgccatgcccatggcgatggccgtcttccccgtgcccggctggccagcaataaggactgcccgaccggcaatcttcccttcccggatcatctccagcaccacgccagccgcccgccgtgccgccagctgacccaccatgccttgcgaagcctgccgaggctccaaggcatcgtccagccccagtccccggatgtgggagtgggcaccgattcgctcaatccttgttacatcacgatctccgggactttggttgtggctgtaacggttgccatgatgcctcgtgccgattcacacaccagcctcgtacctagcctaacgttt

SEQ ID NO: 129084 - DNA, 1181 bp, Homo Sapiens
ttttccatgcccatcagggtttattgtttctgtaacagcggccacgccctggggcggtggcctgtgcagctggagatctctcagcaccttgggttgggggcggggctgggcgggacatgggatggaggcggtgcctgtggccagacagggtggaccttggggcctgcaggcaggagatgagttcggcggccacagtggcccccagcagcagcagcatcagcgggaggttcagcgggcgcgctcaccgcaccaggtggaaggtgagccagtacatgagcataggctgcgccgccgccaccgccatggtcaggtacatgcgcagctggttccgggccccacgcaccgggaccccctcagctgctgcgtctgccaagatcttcagccgcagcgtccggatcatgaacacaaagatggctacgcagcaccagcccagcaccaggtagtagccaatcttcccgaagagcaggcccatgaggaccccgccaatcatcccgacatatttgtagcccaagaaggccaccaggtcgatggtggtgaggtcggtgttgacagtgaccagatagaggctgagcaggatggccagcacctccagggtcagccaggccagggctgagctcgcttgcagccccaggaggtctggggagaacctatcctgggtccccagcgcaagaccagccaccaaaacgtaggtgatgaaagccattgctggaatgtagaggtccggggcattgacgtcaaagcggggggccaccggggtgtcctgttggtactgcacttcccagtcctggtgtaggtaggggaagaacagcaggcccagctttctgcccacatacatggtgtccacagcaaagtaatacttgagcttggtgatggggatgaagcggtcgatgttcttatccaccagctccttgccctgcgcggccaggctgctcccataggccatggccatgttggacaccgggtcagccaggaaggctgcatggggcgtgggagaggctgcaggataacttaggccaccaggtgcccgctgggccccatagccccggctctgggctgaacttgtgtcatcgaaaagctggtgggggtcggccatgcccggctgggacacagggatcctccgcttcgaggctcagggttccagatctttgatctcgtgacctctgacctgcagtgacctcgcc

SEQ ID NO: 129085 - DNA, 1005 bp, Homo Sapiens
  misc_feature (35)..(35): n is a, c, g, or t
tacatgcgcagctggtttcccgggcccccacgcanccgggcccccctttcagctggctgcgtctgccaagatcttcagccgccagcgtccgggatcatgaacacaaagatggccacgcagcaccagcccagcaccaggtagtagccaatcttcccgaagagcaggcccatgaggaccccgccaatcatcccgacatatttgtagcccaagaaggccaccaggtcgatggtggtgaggtcggtgttgacagtgaccagatagaggctgagcaggatggccagcacctccagggtcagccaggccagggctgagctcgcttgcagccccaggaggtctggggagaacctatcctgggtccccagcgcaagaccagccaccaaaacgtaggtgatgaaagccattgctggaatgtagaggtccggggcattgacgtcaaagcggggggccaccggggtgtcctgttggtactgcacttcccagtcctggtgtaggtaggggaagaacagcaggcccagctttctgcccacatacatggtgtccacagcaaagtaatacttgagcttggtgatggggatgaagcggtcgatgttcttatccaccagctccttgccctgcgcggccaggctgctcccataggccatggccatgttggacaccgggtcagccaggaaggctgcatggggcgtgggagaggctgcaggataacttaggccaccaggtgcccgctgggccccatagccccggctctgggctgaacttgtgtcatcgaaaagctggtgggggtcggccatgcccggctgggacacagggatcctccgcttcgagggcagccggggcgtccccgcagccgccgccgccaagcctgccgggtgcatccttcgccgccgccacgtaagccgcggttcggagcgtgcccgcccggctcccgtacccctcgtgccgaaatagccacccaggcctcgctacgttggtgtgagtcgtggggtggttatgttgggttgttgt

SEQ ID NO: 129086 - DNA, 873 bp, Homo Sapiens
  misc_feature (30)..(30): n is a, c, g, or t
  misc_feature (49)..(49): n is a, c, g, or t
  misc_feature (129)..(129): n is a, c, g, or t
tgttggtttcccggggccccccacggcacnccggggacccccctccagntttggttgcgtctgccaagattctttcagcccgcagcgtcccggatcatgaacaccaaagatggcctacgcagcaccagncccagcacccaggtagtagccaatcttcccgaagagcaggcccatgaggaccccgccaattcatcccgacatatttgtagcccaagaaggccaccaggtcgatggtggtgaggtcggtgttgacagtgaccagatagaggctgagcaggatggccagcacctccagggtcagccatgccagggctgagctcgcttgcagccccaggaggtctggggagaacctatcctgggtccccagcgcaagaccagccaccaaaacgtaggtgatgaaagccattgctggaatgtagaggtccggggcattgacgtcaaagcggggggccaccggggtgtcctgttggtactgcacttcccagtcctggtgtaggtaggggaagaacagcaggcccagctttctgcccacatacatggtgtccacagcaaagtaatacttgagcttggtgatggggatgaagcggtcgatgttcttatccaccagctccttgccctgcgcggccaggctgctcccataggccatggccatgttggacaccgggtcagccaggaaggctgcatggggcgtgggagaggctgcaggataactcaggccaccaggtgcccgctgggccccatagccccggctctgggctgaacttgtgtcatcgaaaagctggtgggggtcggccatgcccggctgggacacagggatcctccgcttcgaggccgaacctggcatcccagcgctgtgcacacctcagggttcca

SEQ ID NO: 129087 - DNA, 1585 bp, Homo Sapiens
tttttttgaaaatggattcaatttttattaaataatgtaaaggattttcttggcactattcacattctcttgcctgagtaaaacaagccgcgtttatctgcattggtagcagagggaaagctactggagcaaacgctaagtgaatgggttcccgtgccgagggtgtcctcattcttgggctctgtcaggcctccccttgtctgcaggactggacaggccaccctccccaggccctgcccttgccgcgagcgtgtccttccatacagacaacagccttgctgggtcacctggaggagctgcgctctttgctgacacagtcgtcctgggaggtggtgtccccgtttcccaccatgctgcacgtcctcctcttcttcctgcggtgcactgtcccatcgccctcggatccagactcgcactctgagtcggagtctgacgaactggagctggaggagctggaagagtcgctggagctgtcggaagctatccctgtggactcctgaaggtcaaccgagtctgcgaggactgccaactcggggtgctcttgcttcaaaatcctataccatttccttgataactttggtctccctcttaccgtcttgtgccataccacagggaagttggtgctgctggcaaaattttgggtgatggcgatagtagtgtcgagattgaggacaacatgccaccagcctcctggtaccaagacagtctctcctggtttttgtaagatttccaggggttttgaattcagttggccaggtttggaagctgtgtccggggataaatcacatttaaccaggtaatagcttcgtcttgctggttccctccttcgtctcgggtcactttgatgagttccctgggagtgctggtaggaaacaggcaccagcgcttgtgtccctgaactaaggcattccaggcactggttcccagagggtcgatgtgaatcccagttccggagcgtggtggccccatcactaaccacctgtaagggggcctgcgcttctccccagcatactggaaaaggtcatcagtgaaaaactttggcaccttgtagtcttccaaaagtttccttcttttaggggtgttcaccatagctgctgtcaaagatgtaaaggggactatcatctcgagtgctctccatgtactcgatgtagtatttcatcttcatcttcactgagtagccatcgttatcctcaccacacttgaacttctggttccgatatttcctttttaggcgctccagagtccatttctcctgcgcagaccagccctcttgcgcattcaacaaaaccacgggcttgtaaggtctttcataccgctccacaaattcttccacagacagctgtaaagcatctgccctttccacgttatccgccacggccgccgggctcagcgagaagctctcgtagtagttgtgccgggtccaatccagcgagtccttgagctccggccgcgcactccgcttggcctcgcggatgcgcttcttgctcttgtggttcattctgcgggttcgccagctggttccgctacgacctcggcgcagcccgctcctcgtgccgaattaacacacccaggcctcgtacctaga

SEQ ID NO: 129088 - DNA, 520 bp, Homo Sapiens
tttagaaaatggattcaatttttattaaataatgtaaaggattttcttggcactattcacattctcttgcctgagtaaaacaagccgcgtttatctgcattggtagcagagggaaagctactggagcaaacgctaagtgaatgggttcccgtgccgagggtgtcctcattcttgggctctgtcaggcctccccttgtctgcaggactggacaggccaccctccccaggccctgcccttgccgcgagcgtgtccttccatacagacaacagccttgctgggtcacctggaggagctgcgctctttgctgacacagtcgtcctgggaggtggtgtccccgtttcccaccatgctgcacgtcctcctcttcttcctgcggtgcactgtcccatcgccctcggatccagactcgcactggacacaggaggacagaaaacaaggagtcaacctggatgcaacccacttcttcattaaacaaacctctgacctcgggagacagcacagatattggtcactttctcc

SEQ ID NO: 129089 - DNA, 630 bp, Homo Sapiens
  misc_feature (395)..(395): n is a, c, g, or t
  misc_feature (400)..(434): n is a, c, g, or t
cggccaccagcaggaagcacccgttttgtctgctgcttcgagaggccgaggcgcgttcctccttcagcgactcttcggaggaatcgtttgaccaaggttactagctccaaacacaaaataccttccgtgtttcctagcgagagagtgcgtgcgagtgagcgagagggaagcgagtgggcgcacgggagagatggtgggtgaggaggcccgtgcggatggccgcaagaaggctgccatctgggttcttggcagcgtagcctgctgttatcagccgaatgattttgatttttgctttgatatgtactgtatcattgtgataatatccccggctggctctttttgagctgttatatggactgcttttgagtctgcgtttctctccacttgccctcctncctgnnnnnnnnnnnnnnnnnnnnnnnnnnnnnnnnnnngcactcacgttttctgcccacccagagaccccaggcttggttcgggctctctttgggcacgggttcggtggaggcttcccgaggaacattttgtaaatggaattctgtcgtgtgggcgtgtgacttgatgtttgtaccgcgattttggtaataccaagctttattaaacatatcgagttcatttttaactaaaaaa

SEQ ID NO: 129090 - DNA, 865 bp, Homo Sapiens
gggcattttattaaaacttgaaagctatggcttgccgccatcaatgacgcctattgggttccaatagcctcatgttcaaatctgactcgttagcaaatccacccaactcaacatcggtcatcttgacattgcaggatattcagcaagtctgaagtttttaatcgggaaggattttctaccgttactgaacaaataaaggttctttgtagcaatggctggaaatgcaacatgagccctttcttcacaccaaaagaactcataaatagttcaccgggtgaaccaaagactttatttttcaaaagcaggtaacaccaaagtactatgtggtatccatattcgttgcaaaaatgataattactggaattttccaaacatcaaatgaagggggatcaatggttaccactatcgttttcaaccaatatacagatgttcgctcaaggtctaggttttatttctacatagtagtattcacatgagttccctattctgaagtattatcaaaacgaggacccttgaaggtcgagcccagctttgtcttgacttcaaagatgacacagcagccaacctagaatcctggcttgctgcttgagtcctagaaatcatgtcttctcatgttttacaacaagctgtgtctctgaaaactaaaatcagactttagattcctctgaaacagttctggttcccaagcatccgcaccatggtacccagacatgctcaaaatgtgctttcccttatctttcaaaacccaccaccaggaaaccaaaacggaccccactctgagagttccatgatgaaggtgtttaagaatcacattaaccccaagtaaaggcagtagatgaaattatccatttctcctcgtgccgaa

SEQ ID NO: 129091 - DNA, 1251 bp, Homo Sapiens
  misc_feature (979)..(979): n is a, c, g, or t
  misc_feature (1053)..(1053): n is a, c, g, or t
  misc_feature (1166)..(1166): n is a, c, g, or t
tttttatttaaaatattttaatttctaaaaagcttaaatcatattaaaatttaaacaatttcattgtacagtacttgacaatacatttcaacaaactgaaaggcaaaccagtaaatcagttttgcttactttctaagcttaataatgtacagactcttgctcttcaagaagatgcaaaaatcagcaacagtacaagtgaaatatttaaataggaatctgaaacaaaacgaattcaatctgatcaaatccacaattaattgaagttttcattttattcaattgtgaataaaatagcagacactgtttcatccaataagccaatgatatcagcttaggagaaatgatctgcctggcttgtgcaagacaagaacagttaccttctgctgaaaggatgtgagttttcaaatttggttttcatgtcatagtttccaaataaatgaaccgctccaccaaaaacgacagtctagttgctacctatcttccagggtttcatcatacagccatttataagcacaatctttggaacgctctatagtttcaaaaagtgttttgaagtcttgagggtgcatgttaactactttctcatcctcctgttttcctatttgcatcaatatatctctcgcatcaagtggagtcaatgaacgtaagtggtctattacagtggcgctgcgcctcccaaaacagtgctttaacaagtgaaaaaatatattatagttcataggtgttaagttcttgggaaataaattttgacgaggaatcatttgaatacgatacagcttttgttgtaattggactaaaaattccctacgctttgggttttccagcggtcctttccgggtgtatatatcagatgatgaccaagggtccatgtgcagaaccttaatctcacacgctaattgcccagatacacctaatacatgatacacgtctggatctctaggatctgccattatgttctggaattctttttcaccaatanacatatttacttctattcgtcagatttatatatagagtacaggatacactcatatgcgagttccaagtgccttntctcactctacttgggaaattccactacttttaagggatgtctgttgtcaaggattgcttctatccaattcttaggagctcgagatacatacagtgtttatactcacactctngatcatttacgatcaagtgataccgtagttcatcagattttctaggaccaatgtgataagttgtacttcaccacacttgacgttc

SEQ ID NO: 129092 - DNA, 662 bp, Homo Sapiens
  misc_feature (626)..(626): n is a, c, g, or t
ttttcagttgagcagacatttattaagcacctatcaagtgcaaggcactgtgctaggcgccgtgggaaatacagagaacacaggcggtccctgcccacgaggagctcacagtctagaaagggcagcaagacagtacacaatcagtggcagcagcaccagccagagtggcaagtgctcaaagcgagacacaaagtgctgtgcggtcacaacatcatggggatgcttctggcagaagcactggaaaggagacgaggactcaggctgggccttccaggagggaagccatttgggagaagggcatctctagcggagagaggtccatctgcagagcccacaggtcatgggaaacatgtggctgcagggagagtttggggacagtcaagtatggctgggaggtggacagccacggacactaagctcaggagatgtgaactttgtggtctggtcaaacagccactgcagatcacttcgcaggaggaggggtgactagaagtatgttactggaaggtaaatctggccacactgcagcatctggacggcagagggcagcgctgggaggggccagccagttagggcccaccacccctgggtgtctgagagtgggagtagcgggcaggggccagcanagcacgagggcagagcaggggaccatacggagggtg

SEQ ID NO: 129093 - DNA, 1358 bp, Homo Sapiens
  misc_feature (225)..(278): n is a, c, g, or t
cccgggaatcgtcgaccacgcgtccggccccctgcccctcgccgcccgccgcctgcctgggccgggccgaggatgcggcgcagcgcctcggcggccaggcttgctcccctccggcacgcctgctaacttcccccgctacgtccccgttcgcccgccgggccgccccgtctccccgcgccctccgggtcgggtcctccaggagcgccaggcgctgccgccgtgtgnnnnnnnnnnnnnnnnnnnnnnnnnnnnnnnnnnnnnnnnnnnnnnnnnnnnnngcccgcgcccagtcctcgggcggtcatgctgcccctctgcctcgtggccgccctgctgctggccgccgggcccgggccgagcctgggcgacgaagccatccactgcccgccctgctccgaggagaagctagcgcgctgccgcccccccgtgggctgcgaggagctggtgcgagagccgggctgcggctgttgcgccacttgcgccctgggcttggggatgccctgcggggtgtacaccccctgttgcgggtcgggcctgcgctgctacccgcccccgaggggggggaaaaaccccgggacacgctagatgcacggggcaaggcgaggtgcatggaaagcttggcgcgaaaacccatggcaaatccaagaaagggcctggtagcccttcctgaaaaagaagtaaggggtgaactcccccccagaaaaaaagctttgaatccgccttgtaaccgtcgccatgtaccctctgggtgtacttggtgtagacccactttcacgcgaaaacataaaagaaccggaaaagaaccagtggcgggcgcagtaatagggaggcgaatggcggggaaacccccgcgggaggaaaccgccgggtggattgttgcccctggggcacttagctccgcagaagcgagacgctggcgcagcgggggtactgcagaatacaactcccgtcgtgaatttacagagattgagctcaacggtcatgagaaagctcgtcgaaggcagtacacacgaaactctcaaaggtaggctgaggcggtaagacgggggtagagtaccgcgcgcacttacaacacatgctcgagctcagtaagctatgacgtatgaatgatcgagcacaagtccagatggagagtgtagctcggggacgggggagtgtgagtaagagaggtcgggggcgtgggaaaaggaggcgctagaacgagcgaacggtggttaaataatcgatatacgatgagcggagccacaaaattacgtatactaaaccacgcacggtagtgaggcaatacccatcatcgcttttatggcgatagaagacactggccgcagacgccgccggccaaggtaaagggtgggaaa

SEQ ID NO: 129094 - DNA, 2107 bp, Homo Sapiens
  misc_feature (170)..(248): n is a, c, g, or t
  misc_feature (1183)..(1215): n is a, c, g, or t
cgccgcccgccgcctgcctgggccgggccgaggatgcggcgcagcgcctcggcggccaggcttgctcccctccggcacgcctgctaacttcccccgctacgtccccgttcgcccgccgggccgccccgtctccccgcgccctccgggtcgggtcctccaggagcgccagnnnnnnnnnnnnnnnnnnnnnnnnnnnnnnnnnnnnnnnnnnnnnnnnnnnnnnnnnnnnnnnnnnnnnnnnnnnnnnncagtcctcgggcggtcatgctgcccctctgcctcgtggccgccctgctgctggccgccgggcccgggccgagcctgggcgacgaagccatccactgcccgccctgctccgaggagaagctggcgcgctgccgcccccccgtgggctgcgaggagctggtgcgagagccgggctgcggctgttgcgccacttgcgccctgggcttggggatgccctgcggggtgtacaccccccgttgcggctcgggcctgcgctgctacccgccccgaggggtggagaagcccctgcacacactgatgcacgggcaaggcgtgtgcatggagctggcggagatcgaggccatccaggaaagcctgcagccctctgacaaggacgagggtgaccaccccaacaacagcttcagcccctgtagcgcccatgaccgcaggtgcctgcagaagcacttcgccaaaattcgagaccggagcaccagtgggggcaagatgaaggtcaatggggcgccccgggaggatgcccggcctgtgccccagggctcctgccagagcgagctgcaccgggcgctggagcggctggccgcttcacagagccgcacccacgaggacctctacatcatccccatccccaactgcgaccgcaacggcaacttccaccccaagcagtgtcacccagctctggatgggcagcgtggcaagtgctggtgtgtggaccggaagacgggggtgaagcttccggggggcctggagccaaagggggagctggactgccaccagctggctgacagctttcgagagtgaggcctgccagcaggccagggactcagcgtcccctgctactcctgtgctctggaggctgcagagctgacccagagtggagtctgagtctgagtcctgtctctgcctgcggcccagaagtttccctcaaagcggcgtgggatcnnnnnnnnnnnnnnnnnnnnnnnnnnnnnnnnnagcatgggtgtgcccttggggtaagccagagcctggggtgttctctttggtgttacacagcccaagaggactgagactggcacttagcccaagaggtctgagccctggtgtgtttccagatcgatcctggattcactcactcactcattccttcactcatccagccacctaaaaacatttactgaccatgtactacgtgccagctctagttttcagccttgggaggttttattctgacttcctctgattttggcatgtggagacactcctataaggagagttcaagcctgtgggagtagaaaaatctcattcccagagtcagaggagaagagacatgtaccttgaccatcgtccttcctctcaagctagccagagggtgggagcctaaggaagcgtggggtagcagatggagtaatggtcacgaggtccagacccactcccaaagctcagacttgccaggctccctttctcttcttccccaggtccttcctttaggtctggttgttgcaccatctgcttggttggctggcagctgagagccctgctgtgggagagcgaagggggtcaaaggaagacttgaagcacagagggctagggaggtggggtacatttctctgagcagtcagggtgggaagaaagaatgcaagagtggactgaatgtgcctaatggagaagacccacgtgctaggggatgaggggcttcctgggtcctgttccctaccccatttgtggtcacagccatgaagtcaccgggatgaacctatccttccagtggctcgctccctgtagctctgcctccctctccatatctcctttccctaaacctccctccccaaacctccctactcccctggggatcttctggcttgactggatgggaaggagacttagg

SEQ ID NO: 129095 - DNA, 690 bp, Homo Sapiens
  misc_feature (446)..(507): n is a, c, g, or t
gtgcttctgcaggcacctgcagtcatgggcgctacaggggctgaagctgttgttggggtggtcaccatcgtccttgtcagagggctgcacactttcctggatggcctcgatatccgccagctccatgcacacaccatgcccgtgcatcagtgtgtgcaggggcttctccacccctcggggcgggtagcagcgcaggcccgagccgcaacggggggtgtacaccccgcagggcatccccaagcccagggcgcaggtggcgcaacagccgcagcccggctctcgcaccagctcctggcagcccacgggggggcggcagcgcgccagcttctcctcggagcagggcgggcagtggatggcttcgtcgcccaggctcggcccgggcccggcggccagcagcagggcggccacgaggcagaggggcagcatgaccgcccgaggactgggcnnnnnnnnnnnnnnnnnnnnnnnnnnnnnnnnnnnnnnnnnnnnnnnnnnnnnnnnnnnnnnacacggcggcagcgcctggcgctcctggaggacccgacccggagggcgcggggagacggggcggcccggcgggcgaacggggacgtagcgggggaagttagcaggcgtgccggaggggagcaagcctggccgccgaggcgctgcgccgcatcctcggcccggcccaggcaggcggcgggcggc

SEQ ID NO: 129096 - DNA, 695 bp, Homo Sapiens
  misc_feature (63)..(119): n is a, c, g, or t
ccatcatggccaactggtaggttcctaagtctccttccatccagtcaagccagaagatgcccnnnnnnnnnnnnnnnnnnnnnnnnnnnnnnnnnnnnnnnnnnnnnnnnnnnnnnnnngcagagctacagggagcgagccactggaaggataggttcatcccggtgacttcatggctgtgaccacaaatggggtagggaacaggacccaggaagcccctcatcccctagcacgtgggtcttctccattaggcacattcagtccactcttgcattctttcttcccaccctgactgctcagagaaatgtaccccacctccctagccctctgtgcttcaagtcttcctttgacccccttcgctctcccacagcagggctttcagctgccagccaaccaagcagatggtgcaacaaccagacctaaaggaaggacctggggaagaagagaaagggagcctggcaagtctgagctttgggagtgggtctggacctcgtgaccattactccatctgctaccccacgcttccttaggctcccaccctctggctagcttgagaggaaggacgatggtcaaggtacatgtctcttctcctctgactctgggaatgagatttttctactcccacaggctgaactctccttataggagtgtctccacatgccaaaatccctcgtgccgaattcgccacccaggcc

SEQ ID NO: 129097 - DNA, 399 bp, Homo Sapiens
  misc_feature (54)..(94): n is a, c, g, or t
ctgagtctgagtcctgtctctgcctgcggcccagaagtttccctcaaatgcgcnnnnnnnnnnnnnnnnnnnnnnnnnnnnnnnnnnnnnnnnnagcatgggtgtgcccttggggtaagccagagcctggggtgttctctttggtgttacacagcccaagaggactgagactggcacttagcccaagaggtctgagccctggtgtgtttccagatcgatcctggattcactcactcactcattccttcactcatcccgccagggtttaatacatgtcgagactatgtaatacgtgccagctctagtgtttcaaccttgggcaggttttattctagacttactctctgattttggcatagtagtagacactaccaataaggagagtataccgtcgaaact

SEQ ID NO: 129098 - DNA, 1474 bp, Homo Sapiens
  misc_feature (705)..(728): n is a, c, g, or t
  misc_feature (742)..(772): n is a, c, g, or t
  misc_feature (979)..(1027): n is a, c, g, or t
  misc_feature (1042)..(1115): n is a, c, g, or t
gtagcgaggcctgggtggcgaattcggcacgaggctgattttggcatgtggagacactcctataaggagagttcaagcctgtgggagtagaaaaatctcattcccagagtcagaggagaagagacatgtaccttgaccatcgtccttcctctcaagctagccagagggtgggagcctaaggaagcgtggggtagcagatggagtaatggtcacgaggtccagacccactcccaaagctcagacttgccaggctccctttctcttcttccccaggtccttcctttaggtctggttgttgcaccatctgcttggttggctggcagctgagagccctgctgtgggagagcgaagggggtcaaaggaagacttgaagcacagagggctagggaggtggggtacatttctctgagcagtcagggtgggaagaaagaatgcaagagtggactgaatgtgcctaatggagaagacccacgtgctaggggatgaggggcttcctgggtcctgttccctaccccatttgtggtcacagccatgaagtcaccgggatgaacctatccttccagtggctcgctccctgtagctctgcctccctctccatatctccttcccctacacctccctccccacacctccctactcccctgggcatcttctggcttgactggatggaaggagacttaggaacctaccagttggccatgatgnnnnnnnnnnnnnnnnnnnnnnnnaacaaaacagaacnnnnnnnnnnnnnnnnnnnnnnnnnnnnnnnggggcggccgctctagaagtatccctcgagggggccaagtttacgcgtacccagctttctggtacaaaggtgggtccctatacgtggagtcgtataataagctaggcactgggccgtcgtttaaccaacgtcgtgactggggcaaaacgtggctagctggggatcttggtgaaggaaccttacttctggttggtggtgacatattgnnnnnnnnnnnnnnnnnnnnnnnnnnnnnnnnnnnnnnnnnnnnnnnnnacggctgtactaggnnnnnnnnnnnnnnnnnnnnnnnnnnnnnnnnnnnnnnnnnnnnnnnnnnnnnnnnnnnnnnnnnnnnnnnnnnccggggtgctctgaaatgcgcaaatacagaagagaacaaagacaaagcgaaaaaggaacgaggacaagacacacaaccgaaacctgtcccacagaccagccgaaaaaagcagcagcaaacataggcaacgacaccagggagcgagaaacagcaccaacaggacacacaagcccaagacatcaaggaagccaagcaaagaaagagacacgaaacaagcgaagcgaaacgccaacacaacggacgcacccaacaccacgaccgacgagcgacaggcagaagaagcaaggacaggaagacagagaaaggactgcacacaacagaagacagggcacggccaaaaccgcaaaagagaaagactg

SEQ ID NO: 129099 - DNA, 1271 bp, Homo Sapiens
  misc_feature (246)..(305): n is a, c, g, or t
cacatgcctgaatcagaggaagtcaggatgaaccctcccaaggctgaaactagagctggcacgtagtacatggtcagtaaatgtttttaggtggctggatgagtgaaggaatgagtgagtgagtgaatccaggatcgatctggaaacacaccagggctcagacctcttgggctaagtgccagtctcagtcctcttggcctgtgtaacaccaaagagaacaccccaggctctggcttaccccaaggnnnnnnnnnnnnnnnnnnnnnnnnnnnnnnnnnnnnnnnnnnnnnnnnnnnnnnnnnnnnttgagggaaacttctgggccgcaggcagagacaggactcagactcagactccactctgggtcagctctgcagcctccagagcacaggagtagcaggggacgctgagtccctggcctgctggcaggcctcactctcgaaagctgtcagccagctggtggcagtccagctccccctttggctccaggccccccggaagcttcacgcgcgtccttccggtccacaacaccagcacttgccacgctgcgcatccagagctgggtgacactgcttgggctggaagttgccgttgcggtcgcagttggggatggggatgatgtagaggtcctcgtgggtgcggctctgtgaagcggccagccgctccagcgcccggtgcagctcgctctggcaggagccctggggcacaggccgggcatcctcccggggcgccccattgaccttcatcttgcccccactggtgctccggtctcgaattttggcgaagtgcttcctgcaggcacctgcggtcatgggcgctacaggggcctgaagcttttgttggggtggtcacacctcgtccttgtcagagggttgcaggctcttccatggatggcctcgatctccgccagctccattgcacacgccttgcccgtgcatcagtgtgtgcaggggcttctcccacccctcggggcgggtagcagcgcaggcccgagccgcaacggggggtgtacaccccgcagggcatccccaagcccagggcgcaagtggcgcaacagccgcagcccggctctcgcaccagctcctcgcagcccacgggggggcggcagcgcgccagcttctcctcggagcagggcgggcagtggatggcattcgtcgcccaggctcggcccagggcccgcaggccagcagccgacgcgtgggtcgacgatatcccgggaatatccggaccgtacagccttgctttttgaaaactgggtttatattacagca

SEQ ID NO: 129100 - DNA, 446 bp, Homo Sapiens
  misc_feature (326)..(382): n is a, c, g, or t
ctttttctcttcccaagttcctcccttaggtctggttgttcacaatctgctggttggctgccactaggaccctgtctgtggtagagccaagggggtcaaaggaagacttgaagcacagagggctagggagctggggtacatttctctgagcagtcagggtgggaagaaagaatgcaagagtggactgaatgtgcctaatggagaagacccacgtgctaggggatgaggggcttcctgggtcctgttccctaccccatttgtggtcacagccatgaagtcaccgggatgaacctatccttccagtggctcgctccctgtagctctgnnnnnnnnnnnnnnnnnnnnnnnnnnnnnnnnnnnnnnnnnnnnnnnnnnnnnnnnntgggcatcttctggcttgactggatggaaggagacttaggaacctaccagttggccatgatgtc

SEQ ID NO: 129101 - DNA, 553 bp, Homo Sapiens
  misc_feature (300)..(340): n is a, c, g, or t
cggcccggttagacggagactctccttataggagtgtctccacatgccaaaatcagaggaagtcagaataaaacctcccaaggctgaaaactagagctggcacgtagtacatggtcagtaaatgtttttaggtggctggatgagtgaaggaatgagtgagtgagtgaatccaggatcgatctggaaacacaccagggctcagacctcttgggctaagtgccagtctcagtcctcttgggctgtgtaacaccaaagagaacaccccaggctctggcttaccccaagggcacacccatgctnnnnnnnnnnnnnnnnnnnnnnnnnnnnnnnnnnnnnnnnngcgcatttgagggaaacttctgggccgcaggcagagacaggactcagactcagactccactctgggtcagctctgcagcctccagagcacaggagtagcaggggacgctgagtccctggcctgctggcaggcctcactctcgaaagctgtcagccagctggtggcagtccagctttcgagagtctccgtcgaactggtaccgagctcgattag

SEQ ID NO: 129102 - DNA, 415 bp, Homo Sapiens
tttggactttgccctgggagagcccaggacgtcccgcattttcctttacctattcctttttaaaaaaagtttccactgtgtagagaaccatatatgccataaacatagggtcaattatatgtctcccattagaaaaataataattggaaaacatgttctagaactagttacaaaaataatttaaggtgaaatctctaatatttataaaagtagcaaaataaatgcataattaaaatatatttggacataacagacttggaagcagatgatacagacttctttttttcataatcaggttagtgtaagaaattgccatttgaaacaatccattttgtaactgaaccttatgaaatatatgtatttcatggtacgtattctctagcacagtctgagcaattaaatgggttcataagca

SEQ ID NO: 129103 - DNA, 688 bp, Homo Sapiens
  misc_feature (408)..(424): n is a, c, g, or t
ttttttatgcttatgaatctatttaattgctcagactgtgctagagaatacgtaccatgaaatacatatatttcataaggttcagttacaaaatggattgtttcaaatggcaatttcttacactaacctgattatgaaaaaaagaagtctgtatcatctgcttccaagtctgttatgtccaaatatattttaattatgcatttattttgctacttttataaatattagagatttcaccttaaattatttttgtaactagttctagaacatgttttccaattattatttttctaatggagacatataattgacctatgtttatgcatatatgttctctacacagtgaaactttttttaaaaagaatagtaaagaaaatgcggaagctctggctctccaaggcaaagtcnnnnnnnnnnnnnnnnngcgggggggaatgcgaggaacattttatttcgacgcgtcgctgattttcactcgcttgagttttattttcttcgcgcgcttgtttatttgtttaatgctagaaactgtattcctaagagtgcatacctctttcaggtgagcatgataattggaagattttgatacttagagtatgaacatataattaagaagtgattacctaataaagataacaatgtgactattttaattattttggtggcagggagttggttttacatcacc

SEQ ID NO: 129104 - DNA, 909 bp, Homo Sapiens
  misc_feature (353)..(353): n is a, c, g, or t
aattttaaaatatttgtttaatgaaacaaattgactagtttcacagatccctctgcataatacaaagttctgaaagtttatggtcctggttttcaattaatcctccacactggcactggtctaaggaaactgaattgacacatatgtgtcccacattccaccattacagtattagccctttcccaccaactgccccttatgaagcttttcagtcactgcaacactcccgacaccaattatctcatctgttttaaaaattcacagtacttcatttcctccacttaaaagtacttgggcttcctttactcatttaattgacacagtcgagcaattgctgtgtatgtgcttaggtnaacatcaaatttgcctgtgtatcacagcatacattttaataggatgagtttatcaggctatctcagccttatacatgttctctcagtgtatgcttttcggccacataatgaactacaaatttttgctcaacccttttccacatagatctgagttttcttcctatgggttttctgtaacataaaataagacataattgatcacggaaggcacaaccacattcactgcattcacaaggtttctgtcctgtgcaaatcctctgttatctcctgaggctgcacatctgaccactggctgtcccacaaggactacgttcctgtttgcgaggagggcgctgatgtttaatggtgtctgaggggccacagaaggcacttgtgtagtcgccccgttagcagagtttttctcctgcatgacatcactggtgtgtaatgagctgtgcctctctgcaggaggattttccaccttggctgcctcttgtttctcccttgtgtgtattctcttatgcttaaccagacacgacatatacgcaaacgctttcccacactcgttacagccata

SEQ ID NO: 129105 - DNA, 920 bp, Homo Sapiens
  misc_feature (792)..(792): n is a, c, g, or t
acagggttctttgttggtgtggtttgtttctctgtaggttacatttcaaatttatttccaatcgttctgagctggatcaatggcagacaaaggtaccttttagctctggcacctgctgttccccccaaatgtcaaggactgacatttgatgccattatccccagtcagcatacagatgacttatttccttgcttccccagcccccgggtaccccagcaccccctcaccctcaacaaggactttcctgccagtgagctgatgttgtcctgcactgcccagggggccccatgtgcccagattttctcccacctccgtggagcaaaaggtggcctctggggtggccatcgcctccctgggtccctgggagtggcctcttgtagcgcgagtcctcctccgttcctccctgggcaggcacctagtgtttccaggtggctatctcgggaagaatcaagtgctctctctctctgtctggtggtatcagcaggggtgctgggcgatggggtgtatttttcctgatggagatgggggaggcattcagggaagtgaagtctgttgtccctcaaataaagtactcctttctgctgctatcaccagcatcttggagggcagggtctccctgcagggctgcatctgcactctcagcaaactccgtgcccttggcctcattggtgtggtacgtgcccttgtgccggtacatgtagcgcagcatgacgaagaggatggagactaggacgaatggccacagcagcaattacaccttgcatgacgacaatgtccattattggtgggggntggtggccaatttttccatcccccttccaaaattccttaataaaggtctggaatggtgtagattgccttgggtggaggagaggccatcccccgatcagctcaaggctaaaggccagcccggctgttgg

SEQ ID NO: 129106 - DNA, 551 bp, Homo Sapiens
aagaatcaagtgctctctctctctgtctggtggtatcagcaggggtgctgggcgatggggtgtatttttcctgatggagatgggggaggcattcagggaagtgaagtctgttgtccctcaaataaagtactcctttctgctgctatcaccagcatcttggagggcagggtctccctgcagggctgcatctgcactctcagcaaactccgtgcccttggcctcattggtgtggtacgtgcccttgtgccggtacatgtagcgcagcatgacgaagaggagggagtctaggtcgatggccacagcagcaatcacacctgcaatgtcgtcaatgtccattatggtgggggtggaggtctccattctgccatccggccatccagacatccctggatcaggctcgaggctgagaggccacgccgtgctgttggggcttctcgtcgaccacattcctgggcgtcagcccgggcagagaccgcggggactggccaggccgggccaggccgggccgggggagggtcgcgctcccgggctcctgaccctcggcggccgca

SEQ ID NO: 129107 - DNA, 1013 bp, Homo Sapiens
  misc_feature (24)..(24): n is a, c, g, or t
  misc_feature (54)..(55): n is a, c, g, or t
  misc_feature (63)..(63): n is a, c, g, or t
  misc_feature (82)..(82): n is a, c, g, or t
  misc_feature (85)..(469): n is a, c, g, or t
  misc_feature (650)..(665): n is a, c, g, or t
ttttgatgctgtcaggggcggacntttgaaaacgccagcacgcgcctttacgtnncttgcctntgctgcctttgctcacatntcnnnnnnnnnnnnnnnnnnnnnnnnnnnnnnnnnnnnnnnnnnnnnnnnnnnnnnnnnnnnnnnnnnnnnnnnnnnnnnnnnnnnnnnnnnnnnnnnnnnnnnnnnnnnnnnnnnnnnnnnnnnnnnnnnnnnnnnnnnnnnnnnnnnnnnnnnnnnnnnnnnnnnnnnnnnnnnnnnnnnnnnnnnnnnnnnnnnnnnnnnnnnnnnnnnnnnnnnnnnnnnnnnnnnnnnnnnnnnnnnnnnnnnnnnnnnnnnnnnnnnnnnnnnnnnnnnnnnnnnnnnnnnnnnnnnnnnnnnnnnnnnnnnnnnnnnnnnnnnnnnnnnnnnnnnnnnnnnnnnnnnnnnnnnnnnnnnnnnnnnnnnnnnnnnnnnnnnnnnnnnnnnnaagaattcggcacgaggaccctcctccattttgcgtctatttcttctattgtgcttctttggggataggaagagaaacataactactgttccaggtaacgtctgtatcatacagttagtgttgccagtgaaacgttcccagatacaaagaattgtgcttttaattccatttcacaatctgnnnnnnnnnnnnnnnngtcattgtctgaccaaaattccttctgcacatgaggccagtataggcaacgtcacatttgtttgtttcaaatatgcagtgtggtattttgtttactttgcatttaccgtgagcaaagatacttcttggaatggctgcagtgaggccgtgtcattggctcacaaaagtgactcataggtaatttctgtgtttgcattccactgctctgctccctaaggtccttgactttctccccaggaattcacttaaaaagggactgagcattgtgtcaacctgttgcagtgtttttcatatatgtgttcactctaaaaatgcaaataaagactgcttccttagagggtgctcatac

SEQ ID NO: 129108 - DNA, 948 bp, Homo Sapiens
  misc_feature (702)..(702): n is a, c, g, or t
  misc_feature (791)..(807): n is a, c, g, or t
gggaatttgtaaaggcaattcttttgagagcaggattctccaggctaaatcaaaggcagctaatcctgtccctgaaggagcagctaggggaacctgaggcttgttcttgaagtgggcaagctggccaaaatattggaacacacagaaccaaaccaggtgtgttctacacctgcatgagtgaaggatttccacgtagacacctaggaagagcccgcatgccctagactcactccagaggaaggattgatttgcaaccagaaagggagctgaaaaccacggagctccatggctcttcattcaaaagggaaaataatgattccacgttgctttttagagttcaaatcaacatctttctggataaatctattttttaacaatctttttattatttgtaaaagatataaaaacaactcccatcagtagcaatacaaggttatacattttaaccagattttctcaggccttttttggatacctttagtagttaactctcttttgtcaaaccctcttgtatataaccatcgcacaacatacagaaccctggggaatacagccaagggcactgctcactgtggcccgtgtattcattcccacaggctgcactgaaataacctggtaaaacaacaccctcctccattttgcgtctatttcttctattgtgcttctttggggataggaagagaaacataactactgttccanggtaacgtctgtatcatacagttagtgttgccagtgaaacgttcccagatacaaagaaattgtgcttttaattccatttcacaatctgnnnnnnnnnnnnnnnnngtcattgtctgaccaaaattccttctgcacatgaggccagtataggcaacgtcacatttgtttgtttcaaatatgcagtgtggtattttgtttactttgcatttaccgtgagcaaagatacttcttggaatggctgcagtg

SEQ ID NO: 129109 - DNA, 969 bp, Homo Sapiens
atgcccaatattttccttttattagtatttcccataacaccttatatacatattaatgcatacacggaaggagccaaaaagtacttgtcaaataaaaaagtaaatttttagaaaaatcagaaatgatggacacacttatatgtataacgtaattttcctgtacttttacttttcccctatgtttatttgaacaaacctaaaattgtacccatttgcacctagctaaccaccataaaaatttggagttctccagctgttttgtaacagctgtcctcctcaaatatttttttgagaaacaaacatagacctacgtttctctatttttctggactaaagagagatcatctcaaaatcacagaactcttaaaaattgaaaacaggatcatgtagtctaaaataagttcttatttaaacttgggaggtgaggggggcggggctgacatctagaaaggtgaagtactttgcctgtagtcacacaccaagtctgggactcaacacacaggctcgcctctttgcgtctctccctccttccaaaatacattttcctccctctcaaaagctttatcacgctttgtagttgcttaattatctatgtcaaacctagagagcaactgatgacactcagagacatcgcccaaagttctgaaaaccagataatcagataaactgccagttttaccacatccaaaaaatgcacaacaaaagagagaagggggagaatcgagaatacattttcagccgcaaggcaataaaaacacgtttcccttggagagagattatgttgggggcatcaggtataaaggtaattcctgttgagggtttttcttttccttgcagtttgtgggacccctttctcctgccccgaagctcgctgtgcgtgtgcgtgtgtgtgtccctccgccaacgccgccacctcagccaaacaaatgaactccgtccgagccgccaaccgaagacacaggcgagtgt

SEQ ID NO: 129110 - DNA, 635 bp, Homo Sapiens
  misc_feature (21)..(21): n is a, c, g, or t
  misc_feature (122)..(145): n is a, c, g, or t
gttagtgggaatcccattttntgcatcactgtgagtagcttcaggccctgtccctggagaaataatgctgcgcagaagtcacaggccatactgggcagttctggtacaaacctgcccttatnnnnnnnnnnnnnnnnnnnnnnnnctccatttgcatagaactgtcactcattcctgccagtctgctgtccctaccctggttttttgctggccccaaccactggccttgttgagtatcgatgggccctgagctcttctgtttgcttttggagctcttcagatgctgtcccccctgagaataccctaactctggggaaagagcagccaaaatcccaatacagtaaaactccacacaatcttgttagcaacagtgacccagaaaattttgagaagtccaatttcaccagaagaggcccagggctccctgtggtcacattttctacccagccattcttggcattgcaacctccatttctagctcctgttgaattttctccacccagaccccaaaaataaatggatccatgatgataattaagagaagagaaaaaaagatattatttttgttaggacaaaccattgtaggtttttagcaatgtgtatctgtgtgtccctcacaccttttcctattctac

SEQ ID NO: 129111 - DNA, 1137 bp, Homo Sapiens
cacttgtgtacatatttacatttatttacaaaagtatctacatcatcagtaaaaacaatttactgacaaaaaaagcaagcacctagtcatataataagttgatgacagccaaaactaatgcttgttctttgttagtgggtatttcttcttaaagcagctgcttcaagttacatttccaacagttgttcaaaaattgtaatactcaaatgagaaatcagatggctttttagtttttaaaataatttagttatgctgttgtcttcatcttctgttaccaatcaattggagttggttctgtctggttttctgtcacatttcagaataccattcatatacagcacaatacatgttgtaattactgctaatggtatgggtataagtgcatatctgtgtcttgaatgaccgctgcttgggatacaggttgtcaaaatgattgatgatgttgtattaaataatggattgctaagagtacactgtattttttgtggaagatcattttccatcttaaaatatatactggttgagttacgtttacattgctccataggacaatcccatgagtacattataagtcctcgatggctgttgtaatgctctggtatcatgcattggacttcaatgcttccattagtcaatgcacaagttagtgtgggagatggaagagactcaagcacataaagaaagaacttcatggtatcagtaatatttggcgattccatttcatactcatcttcatctgatgatgttaagttgtagatagtgaggctacctgacacagtgtctaaataaaccctatttttaaaagatgagaaagctctgaattcagaattttccagttctgcaactttatccttttgttttttccataggacctcttttaaaggcacattgcttggtacatggaaagttacattcccatacacaacaccatatatttgttgggaaaaacagctgatgaaaccaaagcagtgcagcaggcagaccacgctgaggacccccagggcccgccccgcgtcgctcccagcaaccatggctcgtcgggccggcctctgcgcgagtgcccagccacaagcagccctaagttcccccggccgtaatggccgaattcccgggcatatgtccggtcaccgtcgactg

SEQ ID NO: 129112 - DNA, 1028 bp, Homo Sapiens
  misc_feature (66)..(74): n is a, c, g, or t
cgcaaaaacgccagaattcttcccgggaaaaaaagggtcttccagaaagatccctttggatccccnnnnnnnnnccccgctccattaggcggggttaaattccccgggttccccacccgatcccatttatgcagggtaacccgggcttttcgaaaataaatacgccccccctttggggaagcccgccagattttcccccctttgtccaagaaaagcggggtccggaacccaggtatggcccagtgccaggtttcagtgctttttttttcagcaacagtcatagagtgcctcacagcaggggcacccacagctgcctcaggaggtggcagcggcgttttcttttgcaggttgcagggctttatatttcagcaacagtcatacagagccacacagcaggggcacccacagctgcctcaggaggtggcagcggcggcctcttttgcagcttttctctcttgcagcatcctctgcctctgtttggccaggcacttcctggcagaactgtaggcccccaggtcctgatagcggtcctggtaggccttggccacctgggtgaactgctccacttccttgatacagttctgctggtagttctgtccttccctctgctgacaggctttgagccgatcctgcataatgttgataatttcttggtcgactttgtagtccctcttccactgcatttcggcttcatacatgcacatgatgtcctcctccttgcactcagtgatgtctggcacgcggcggtactgccggtggtagtagtaatacctgttctttgcgtgctgccgctctataaattctctcacgagggtcacgggtcggtccacgatgaggtcgaacgctttcatcatgtagacgatgggattgggctgcaccggcgtgcggcgcgggggctcagggtacacatccttgtcccagctgtccggcatggcggcggcgggcgcggactccgctcccggacgcgctgccctggcctctacctccgtccgcctcgtgccgattcacccccagcctcgctacctagc

SEQ ID NO: 129113 - DNA, 1849 bp, Homo Sapiens
  misc_feature (999)..(999): n is a, c, g, or t
  misc_feature (1058)..(1058): n is a, c, g, or t
  misc_feature (1084)..(1084): n is a, c, g, or t
  misc_feature (1103)..(1103): n is a, c, g, or t
  misc_feature (1150)..(1150): n is a, c, g, or t
  misc_feature (1161)..(1161): n is a, c, g, or t
  misc_feature (1187)..(1187): n is a, c, g, or t
  misc_feature (1229)..(1229): n is a, c, g, or t
  misc_feature (1231)..(1231): n is a, c, g, or t
  misc_feature (1234)..(1234): n is a, c, g, or t
  misc_feature (1274)..(1274): n is a, c, g, or t
  misc_feature (1279)..(1279): n is a, c, g, or t
  misc_feature (1490)..(1490): n is a, c, g, or t
  misc_feature (1539)..(1539): n is a, c, g, or t
  misc_feature (1576)..(1576): n is a, c, g, or t
  misc_feature (1602)..(1602): n is a, c, g, or t
  misc_feature (1604)..(1604): n is a, c, g, or t
  misc_feature (1776)..(1776): n is a, c, g, or t
gggagaggccagggcaacgcgtccgggagcggagtccgcgcccgccgccgccatgccggacagctgggacaaggatgtgtaccctgagcccccgcgccgcacgccggtgcagcccaatcccatcgtctacatgatgaaagcgttcgacctcatcgtggaccgacccgtgaccctcgtgagagaatttatagagcggcagcacgcaaagaacaggtattactactaccaccggcagtaccgccgcgtgccagacatcactgagtgcaaggaggaggacatcatgtgcatgcatgaagccgaaatgcagtggaagagggactagtacgtgagccatgctgggagtgtggagcacagcccaccaagaaattatcaacattatgcaggatcggctcccagcctgtcagcagagggaaggacagaactaccagcagaactgtatcaaggaagtggagcagttcacccaggtggccaaggcctaccaggaccgctatcaggacctgggggcctacagctctgccaggaagtgcctggccaaacagaggcagaggatgctgcaagagagaaaagctgcaaaagaggccgccgctgccacctcctgaggcagctgtgggtgcccctgctgtgtggctctgtatgactgttgctgaaatataaagccctgcaacctgactacccacttcccacttctaccctcccccacctgcccccactaacgaccccatcgtggtgccctatacgcctctctcaaccaccatcatccatcttcatacgtgcctctgtcggcgcccgcttcgggcaccccacaaaagaatctttcccaagaccaattcttcctctctgcccgcgggcgggcgccacaattactcgcacaatcggaacaccgcgccccaataccgcgcggttttccccacaaaagaaaacatcccggggcccccaccacgatacagcggcgcctttgcgataccctctctcgccacccaatgtaatatacaatacttncgtgtgggcgtggcgaatccactccgcaggagccggctttgtgtacaacacataatctnccgcgccgaatatgggagcacatctntcttcgcgcccgacgaggntatatgtactaccaccgcgcgtggtgacacatatctcaatgtgtaanaagagcgaggnggaccgatcgctccgtgatcgcgctnggaaaccgcttctcgctgataacatcatcgcgcatagatgtngntanacgcgtggcccccggcgcgtgtgtcagttatgtcacccgngtctntaatacgcctgcccccgtacacgatggatgtgacacgctcgcacacataccagtcaatgtctcacaaaaagacacaatactcgcgcgcgcctgacacactctgcggcgacaaaacccgatacgcgtcctccatagaaaatgcgcgccgcgagccaagcatgtggagacaacatacggtcgaggaacacacccaggcgcacaagcggcgcgnccccggtaaacacacgccaccctgctcgtagcgctacacgcgtatgcgngagaccataagaacacagtgtttctgtgcccacatangcgtgggcgcaaacatagagacaccngnggtgaccacaacaattacaaagccgcgtccgcccatacatattattttgcggcgagcattctcgtcgaaaatccagcacgacacggtgagggatggaggacccacatctcgcgcacacgagagtgatttacgtgtgcgcaatgataaccaataaaaacaacacgctaatctnttcttcatctgctagcacaccccctctgtatagagagaataaagtagagcgcgccccgccgttctctttctcg

SEQ ID NO: 129114 - DNA, 730 bp, Homo Sapiens
aaccgttaaagttacatttttattaaacagccaaaaatcttaagacaaatacctacagaccatttcttcattggcaaatattttccagtcataaaaggtgataatttatgggattatattccagtttcctctcatgtaaataaatacatacactgaatctctaataccactctctctagatgtatacatctatttggaattgctttcttagtatgcactcagcaagcactagcataagaacacctgaggttctctgtcctcatttaatacctgtaagagaaaaggactttattctactgaattctgccctttttttgcaacaactgaattatccccatatttatttacaattttaagcttgattgctgtccacggagttactgttgcttctcaattataactagtgttagaaggcttgatttcataaatgttctttttaatccaaagatagatcatatatgaaaaccttcctcaatactcctttcaaatcagatgcatataaactatgatcccaatttccctgttagatgtatttctgttggatatttcctccgttgtcaccacagaggaagggaaaaagcagaaaagctgcccacctaacaaaggctaacataatggctaggctaatatattgacatgctatcatctttatgatgttttgaatctaactagcagacatacagtcaacttcctgttgaccatgtgcatctaatctgctttcttaattata

SEQ ID NO: 129115 - DNA, 1700 bp, Homo Sapiens
  misc_feature (1595)..(1629): n is a, c, g, or t
caccacaacagatttaataatagggaaaaactatgaaatactccaagaattatcacaatatacgagacatgaaaggagaagttttattgggaaacatggcaccaatagactggctcaacgcagagttgccataaaccttccatttgtaaaaaatgcattatttgcaaagtgcaataaagcaaaacgcaataagatgacatatgcctgtatctgtatcaataggaggaacattgccattttcttctacatgacataaaattgtactaaaaggcactagtatgtgcctttctgggtggcaggcctccactctcatgatgttttaacaaagcaaagtagatatacttacggattcaaattttgactactgaataactcatttcaaaaagaaaattcagctcaataaaattcagtatctgtctaaaactatttgtcagggtaataagttcatgggaggtccaaagacaaagtatgtagtcctattctatactaaagtaaacctggattgagatttataataaaatcacaacacaacagtattacttggtaaagtcctcaaagtagattttatttatacatttcttcaaatgattgtggtattttaaaaaatctctcccaaatttgatgacatagggacagtggtgagaacaaagtatccctaaaggaaacaaatatcgattggtgctttcctagctcactgagctaacactcagaagccaatttattctataatcctaaagaaccttaaatgtgggtttgtttgaattggccttctgagaatcattgaaataaaggaaatattacggaaaagagattagtttccaaaaatgtgctgtctttgaaaataagtcttcagacatgtgtgtcggaaaagatctgcaaagcttggtacagtgttaatgtgtaaagagaaccaatcacctccatggactttaaaactcaaaattatctatgaaatactttaaatgacatggcattaccaacattctttaaagcatttcatttaaaagaaaaatgtaagactgttctcacccttttgaaaagacctaatccctttctaaaccaaaagtataatttgcaagagaaacaacattacaattcactggtaaattaagatttctgaagttgtaagaaatggggccaaaacaagtcacgctcaaaaagggatggttaacacaagaaatgtgctatgagtaaagtgcatgaaagaaagcctgctcagctaaatgaagtagacaaagatcagaagtcaagggtcattcgccagagcggcagcaggctcgaaaaccacactgcaaattctggcatccactggcggtatcagcatgaggaccgttactgttgtcacagtagtaaaagtattcatcattcagagaaggacatgcttgaaccatatcctgcagggctgcaccatttatagtaagacaaccagagagattaacggtgctccaaataaggcagccctcctcccagagtcaaaaccctgagaccatggtctgtgatctgataacatccagataaagctgagaaacagaagtacacgtcccccggccgtaatggccgaattcccgggcatatgtccggtcaccgtcgactgnnnnnnnnnnnnnnnnnnnnnnnnnnnnnnnnnnncgccgcttcctcgctcaaaactcgctgcgctcgtcttcgctatcacgggcccctatatgatctatcatttc

SEQ ID NO: 129116 - DNA, 720 bp, Homo Sapiens
ttgatagaaaaattctttaatgaaaacaagtttacacgttgaacttatggcttaactagaataaatctaagtaagttaaaactgtataaggaccaaacagataatgactggtatatatgcaggttctctcaaaacggtgattcctagttccattataagacctctttaaaagcaaaaatgcaattctgtagatgaaaacagttatctcagagggtcaaccacacaatgtcatacagagacgctggtcttaagccatttttttccatattcatataatttcaaaacatgagaagtatcctacttgctgagaagtgccaaatgaccctaatattcaaaatatcttagaaatgctatcctttagttaacatacccttaaattttgtaacattgattttaccctggatttagtccatacacgtcaatgtacagacttatcaaagtacaatgctggaacaactagtgtttgtatttttggaatctagaaaataaaaacaatatagccatgatttcaaataggtgagtttccttatataacatttattcatatttattgtataagcatcatgattttttcttccaattaagttttagtgacttcctaaagacatttttaacaacattcctcaaaaataaacttacttagttttcagttttagttactagtgcctgcctataaaaggaccttaaatgatttaaccctaaagccagattcattcctat

SEQ ID NO: 129117 - DNA, 986 bp, Homo Sapiens
cttctttttcaaatctccctgtccttgttcctttggttgactatctccagtaacttttccacccttcttccgaatgtatgtagcaccagcagaattttcaagagcctcaacatctacttttagagacatactatctgacgatggcaagtgtttactaagagctttggctttctctggatctacaagtgagtaagcagaaataagctgtgccagggtgtgaatatcttttggattttgtttccacagctgttgtaggtcactaattgcctccttcttccgcccatatttgagtttgaagtttgcagcttctcttatcaaggacaaatgagcaggagattttggctgatggttttgataccactggatagcttgtgtgaagacctcaatggcactatcaatatcttcttcatggctatacatggtaactaatgcagataccatgcctggtttatgctttaactcctctatgcttctcaatattagacatgctttagaaatattaccttgagaaattttcaactgtgccatggtcagcttaatttcagctgcattttctggatgctgatctgaaaattcctgaagcagctctattgcttttgtgtgctgcttttcacggcagagctgggcagcttggattaacacaggtaagagatgctcgggactttgggactgtaaactggcagatattttgcggcattgttcagcctggtttgtgtacatagcaagtaaagctttgttaaattctatagcttgtagttgtttcttggaaaagcttaaactctactccttccgcattggttaatttcactttcttcttggagtcaaagaccttttggtcctttgttaagggggaatggaagtatttggcatttaccgctagtaatcccccatttgggtggggtttaagtttaattaatttggatgggaaaatttccaaaaacccccttctgttccgaccctaaacccgtcaaaaataaagccccctg

SEQ ID NO: 129118 - DNA, 1014 bp, Homo Sapiens
  misc_feature (249)..(262): n is a, c, g, or t
  misc_feature (914)..(914): n is a, c, g, or t
  misc_feature (999)..(999): n is a, c, g, or t
tttttgactttatcactgtataaaaatgtacagtggttttattgacatgtacattccaatatgtttacagctgcaagataatgaggcacactcagtattgcacttcattaaaatttcaggctcaaacttaacctagaagtttaaatgaaattgcatttgtaatttagtaattcttatacaggacaaacattgatatgtttatatacagtgtgatacttattacatttatatgctgtcctaacacaatgnnnnnnnnnnnnnnaaataacagtctaggaaataaaccagaatattcctctttttatccccacccgtgatgcaattgtacaggattacaaaaaggcagtatacaataaacaatgattatttttcttttttgcttgaaagccagcatcgttcttagtccatgggcatggcgattcttttatatcaattatctataaatgtccaatgcttcacaggccaatgacggtaatggccacatgcaaacacctcacaagtttgatgtcatttgttcaaaagaagataaaccaaaataatggggaaacttttcatagcaagaattatgtacatggtatttggtatccttcttgcactgtgaatggttcattttcatggatgtaaaaatggtcccgtccttatcctgagcagagtttaaacttcaccgcatcctcttgggggatgaaggcaatttttctctctgtagacaaaggatctgcgtgttctaaaaagtgtgggcatttctgcacactccacatcccagagcaaactcttccccagtgggtggatgaacaacatggagtggacattcagttccttctaactgcttgcctttgggacctgcaggacagtgtggtagttcttccttaggaatgctagtcattctttgaaaatcatcatgacaagcattacanaaatgtgttgttccaaaacagaaaaaaacagccactgaacagcagtagcgacatttatattccaaaaagtctgtgccatgtttgngaacatctgagccct

SEQ ID NO: 129119 - DNA, 1611 bp, Homo Sapiens
  misc_feature (1537)..(1571): n is a, c, g, or t
tttagacgaaattcaccgtaatttattcatctcgcatactcagcccaacaggggatgacactgcatctgtgcaggtctacccgggggttcactctggagcacagggtgcgggaggcaggcttggtagaaatcagagggtggggtaaccccttgtcccttgagggatatgcttgactaattcaaagagtttagcagtctgttgggggcatgaaagccattaggctgaggacctggtgggatgcagcatgaaattttaggtgtcacagtacaattgaccctgatgctttaacatcagacatttattttaatgatgactaatattttgagaggctgagagaaggctgttgagacattgtaataagtgcttaggggcatgagacattaggaaggccacaattatgagtaatgaaatgtggaggctgatgagaagctactgctcccatttgtttagcaggaggcaggaaaagtgatctggggtctctggcagcaaaagcgtgtggtaaatatttgggtgacgtcatgcatcccccatgcattggttttgatgtctccagtgagctgttgggcaagtctgatattactgatccacacgcagcaggcagcttcctgtatggagctacctccaccccttggacagttcaggactgaaagattgtcaaaaatgtgaactccttgatgtccagtaaaggcaactgagggaactgtctaacattggtgtaaaaagtgcactttccctaaggagcatgaacttagagttatcaaagcctgtggcaaatagtgggaatccagcagggcatccagtcgctgctttgtaccttaaataggaattctttgagggagctcagtgtatctctcaactgaagcagctgcctgcagcctacaggggcagtggaagctctgctggacaccttcttcacaagcccagcactgtgttttctgatgaaatgttgctttggtgaccatcagtagtgtctggaactctgcaagggataaggagtgtccctgtgagatctgtactgtgtccttagttaaaataaaggcatctgttaccttgattggtattctgagtatccatgagacaagaagtgtatttaattcaatggggagggaaggtggacgattcttggcaattgtcaaaaagtttgtaaaaaggtacaaatggggctaattgttggcccagcatcagtgctatgatgaccacctcaagtttggccagttgtgctgaggcttgtgtgtcatcctttatcagggacatcctagctaagggagggaaagcagcagcatcccactgagctccatcacatctgatcatggcatccattcagaaggctgacgaacttcactgctggtcactcagtcgatcccaagggcctcgcagaggggtgacatctggcaccacagtctgaggatgaaggaggccagtgtcagcactgtagcctaaggatgaaggaggccagtgcttcctgcagatgagaattgcagcgtgcccggccgtaatggccgaattcccgggcatatgtccggtaccgtcgactgnnnnnnnnnnnnnnnnnnnnnnnnnnnnnnnnnnncggccgcttcctcgctcacatgactcgctgcgctcgtcgg

SEQ ID NO: 129120 - DNA, 3461 bp, Homo Sapiens
  misc_feature (395)..(404): n is a, c, g, or t
  misc_feature (635)..(698): n is a, c, g, or t
gggagcgggggcgattcgttcgggtggtagttggtgtaggtgtgcccacgtcgtggcgccgctggtggctgcctcggcggtggctgcgggctgctagtcttggcgccgttggcggcgtattatactggtctactactcgctcccgccgggaaataagtttggttctactaagtcctaactattctgcgcgcgtggcccgcgaattctgtgtctatcacgctcgcgcggcactatatttgccgcctggtcggtgttggtgacaccacgctgtcattcgtgcccctctagcaagtggtctgtaattgtgtccctccctcctcagatggggcgtcttcaatatgcttctcgtctcgaggggatgatgtttgttccccagcacgatagtggtgtctctnnnnnnnnnngccggttcgtatgggggtgtccccgttctccaagtggttctccccgccgctccccgtgttgtctcccgctgtccccggctgcgtgttgttatccgctgcgcgcccctcgcgccttctgctctttttattagcctgctctcccctctattgggcgccccctcttgggtacccgcagaaagctcggggtgcctccgcttatattgtgtggccccccccggggaattcttgtgnnnnnnnnnnnnnnnnnnnnnnnnnnnnnnnnnnnnnnnnnnnnnnnnnnnnnnnnnnnnnnnngaaggaaacaaggcgcttgttttctctttgcacaggcagggagggtgttcctgagtgaccttccagaagagttcgaaattataagcctggagtgccgagggaggcctctgccgctgggggtctcgctgtctgctttggggttctggggcctctccttaccccatctggggtcccaggatgggcccaggggtccaggaaccaaggcagcactgcactggtgcccgcacggtccgggagcaggcctccgtagatcaggggtcaggggccccggcatcaggctctggggagtgaggtattggaatctgaggctcaggggtcaggggccccggcgtcaggctctagggagtgagctattggaatctgaggctcaggtgtgggagtgtcagggctcaggacataggtattagaatcccagggtatgaagtttcaggtttggggaattagagccgtgagtatttggggaagagcacggagcgctgctagcacggggcttgggtgttggaacactgggcctcctgcctggggtctgagatgacagagtagggggttaaatgcccaggtatcaagtatccaggtcccaggtgtctggtcctggggatgcgggagtcgcaggactgggctgcctgttctcaggagtcttggcctggtgctcacagccaagctgctcccatcagggctgtgcaccccagacgtgcgtgttgcccttcctgcggcgcagcagcacatagacgagcgcaaccgccgccaccaccgcgaggcccccaaagatgatgcccaacagcaccgcgtagctgcgtcctggctggcacttcggggtgggtgaggaccaggtgccgtcagcctggcaggtgctggtctctgccccggccaggctgtagccgttgtcacagtggaagtagatggtggaacccgccaggtacctgttgccctccttttgtccgttgggaggtggggccagccagccacaggacaccactggctgcaggctctgcatgcgacgctggtgcagctggtgggccacccgagtggcagtgcccgtgctcaggctcccagtggctgccacatcaaagttgcagaaatgatcgtccccacatagtttggctgcctcttgtgccaggctggggttgagggtggtctcactggggaagaggggctcgaaggtggggtcgtgcttgggttggtacaggaagttgtggaccaggaaccaggaatcgtaggtgagcagggaggacgcattgtgcacggtccagttggccccaaacaggaacagctcctggggactggtgcctgggggcaggacgcgcccgctgtgcagggtgaagtcgtcggtggggtcgttgttgagtgtcccgaggaggccgtgggtgtgggtgaggaacttctcaggcagcaggacggacacactcaggaacgggccctgcacgctgacctccaggccggcccctgatgccagcatgatggagaccctgtccccggcagccaccgacaggaacattcctttcaggtccatccagctctgctcggtgaagctcagcacctcctggttcagcagcacctccagacctccggtcctgttggccagcctgacttccaccacatctgagttgccctcctggacggccactgcggtcagcccagtgccacgggtctccgtgccgttggacatcgtcccgggctgggcccgcgcctgcaccctcaggtcggtcagcgctgcctccagcagcacgtactctccgcgcccattgaatgtgaagttggtgccgtcgaaggtcacaaagtgtgggtctccgaaggcggaggccagtcttgggggccggtagttgcggcagtcattggagggccgccgttgcatgtagcgggggcagtcgggtgcccagaggcagcagtaatagaagctgaggacatcgtagagccagtgggacatgctgggcactcggggtggcgtgcggaacgggggtgcgccccagtcatggccgcggtcgggagtgctgccgccgctggagtcagctgtcaggagctgcgtcccgtccgctgtgtagcagcactgctgacctgagccgtaccggaggctggcctgcacagaacgcacacagtgcacggccccggggtggtaggtgcacacgctgccctgctccatgtcacagccgtagtccgtgaagaagcggccggagtcagcccgggcctgggtcagggtgcaggggcagtccggcagctcctccaggaagttgggcagctgatcctccagctcctcccaggcctggcactgagttcgtgcccaggccacagggtcctctcggaagtcatcgctcaggtgccaggccagtgcgtggtcgttggtccagagcgcctgcacgtccttctgccctgcgtaatttttgctgtcgatgatccgaagtgcacccactcgccatctctggtagctgggaggagcaggttttggggtgaaagtgaaagagccggagttggggatgtgtgtggccagggggtacaggtacgaccactttgcagtccactcctgtgagtagggcattcctgtctcctcgtagccccacagttcgatggtgatggtctgcgtgggcagcgacttgacatgccaggtcaggctgaggttgcctgaggtgttggcggtgccgtatattgccaacgcgtctcgttcaccaactcgctcttctccatcattgacactttgttggggtgcacagccagccaggtgcccgcacgagggaaggagtggccgttgtccagtgacacagtgaaggggat

SEQ ID NO: 129121 - DNA, 800 bp, Homo Sapiens
  misc_feature (760)..(760): n is a, c, g, or t
  misc_feature (789)..(789): n is a, c, g, or t
ttttatttccgtttctagcggctttatttttgacatacacgacctcagacacaagcggggcgggcagcgctaggtgtacagaaaggagcgggctcggaccgagcaccccctcccccgcacgcaaggtccaaagcaaacgcaactgcggcgggagccaccggcgcaggcctcgggcggtggagacaggcttagcttccaggaaagagcagcagagagcgattcccagaacgcgagggcttacagttccccgagaagcaaaagaaccaggtccttcccagggttctccattattttttcctcattaaaatatattttaagtcagcacaaacataaccaaattgtacagctttaaagttcaaagcagtctgcatctagggaacgtgcatgtggtcaggagtgagcgcgtgagcagcggctacgtaactagcacaggtgccaggccccttgatgggaatccccatgctcactgcacaggcccagagagggaggggtggggtccctggcaagttgctacactggtccccttcctcttttaagcaccacccgtcccaccccaccctcaggggctggtgtcagcttggcccagggaagcactatagagagggctcacctgagcaccccaacccatgatcccatgttgcactttgttcccaagttggggctaagaaggctgggcctggcagggacagggctctctggcatggggcagggagaaagcagtggcagacagtatgcacacacacttgcccactaccattanataacagggctgggtctccaggtgtccanagtgctcctcg

SEQ ID NO: 129122 - DNA, 486 bp, Homo Sapiens
tctgtctcaaaaaagaaaacccaaagccagggagattttaatgccaaccacctagatccaaactcagccactccacggaccctccctgacgctgctgggagccagacaccacagggaagcaggggcaaaaactgaccctcacgcagtgtccgcctccagggaactgtggaacacatcgcagagagctcaagcgccacgtttggatccctgagcagctgtcacaagcctgcacccaggactggggggcctgctgcgggagcccaaagggaaagggagaatttccaaggctgcatccagctccatcaggcccagtgaatttccacacagcccgggtcaccacgctgttatgaaatcaaattccttctgtgacccctagtatgtaccggtaaatccagctggagggcgggaattccctagctgctgctgtgcttttgacaatttttcaagagcaggacactcgctgtacacaataatcactgaacattg

SEQ ID NO: 129123 - DNA, 612 bp, Homo Sapiens
cgggacagggaccaggactgaatttcaggctggacttcggggctcggcgtgcccgcagcagcagtgctgctttgggcacaaggcctgcagcctgcagcgtgagtgtatcgtcctggtagagggtgggcgggaatgtgctgaagatctcaaaggcagaggcatccatgaccctggcctgcgctagcagagctcgcacgtccccaatggtgttgtcaggctgcatcatcagtaggaaggcctgttccccattctcagacttgatgcgcagcatggagagcgggggtgccggcgtgttgggtgactcctggctcctctctcgctcagcggccaaggtgggcgtctccaccacaatctcctggatccgggcaggcaatgggcagcagttctgcaaggtgtccctgatggggccccggatgtcaatcacctcgccttgccggatcacaaacttggggagcctgttcagaaatttctcagcagtcatcctggagcctgggtgctcctccaccctgtccaaggccttgtgcatccgctgcctgcccaccacacggccctcgcctgggaaggggtccagtccatcctccaggtagacctgattgcgcaagtcactcacct

SEQ ID NO: 129124 - DNA, 673 bp, Homo Sapiens
  misc_feature (641)..(641): n is a, c, g, or t
  misc_feature (644)..(644): n is a, c, g, or t
  misc_feature (651)..(651): n is a, c, g, or t
aatgtggacacaacatgatattaggctttatttgaatttaaaatcttgattccatccagggacattttttaccgaagcgtctcagagactggctcagggtatttcttgacaagactgtacagggcttctcatcatacacaaaccctccacagcccacggctccaacccacagcacctcctgcagtccttttatgcttcttgtttcttctccatcaataatatgtcagtcaactgcttgtcagagacacttagctgctgacaggtcctcataacctgactcaggtaaactgccaagagatgcttgcacaggatgctgtcactcttccgtagcactgagaatgcaaatgcaggacatgaacagtaatgacaagaagccaaacatgtgtatgttttactggaacttccaaggacctggtaaacacgccttccactgggtgatgagattaaggtgatggactgtcgatcaactaggtccaaggcctgggtggctgatgagccaaagagaaacttcagcgataacagatattcatcaggaattcgcgcgctctcctgcaccgccgccgccatcgtcgctcaggagctcctccacaaccgccggcaacactacggccatcgcgccgcaggacacgctctccgacagnacnggacctncgcgacgctccagctgactgcg

SEQ ID NO: 129125 - DNA, 583 bp, Homo Sapiens
ttttcctgagtagcagaaaagtattgataaattttatctgttgcactttttaacaaaacaaaaagcatctgccaaccacagaacattgcaacacctaggccctgggctttcccccagcattcattcactagcacctcatgttttgggggcacaagcacagggctttcttaggctgtaaaatcacctatatcatctgtctgtccactgcttcaactccttctgcagtatccctgcaacaatattacatgcttatgaaatgctgcagacagggaattcctgtccttctaggatcctcttctggctgtgggcagctttaccataagttcttgtcttcttatgctgaaattgatttcattttcatcttcacgtattattgcttctttgctctctcggtgtccaactgagtctcatcgctctcccttctaatactccttctgtcatctattttgtcttttcttcttcagactgaaaatccctggtagtacctgtagtttccttcccaggacacgatttttagtctgttccttcaattgccctgttgtaaagatcagaagtgcagagtgaaaccagttcttcccttgtt

SEQ ID NO: 129126 - DNA, 678 bp, Homo Sapiens
ggacacaacatgatattaggctttatttgaatttaaaatcttgattccatccagggacattttttaccgaagcgtctcagagactggctcagggtatttcttgacaagactgtacagggcttctcatcatacacaaaccctccacagcccacggctccaacccacagcacctcctgcagtcctggagggaaaagggacagtaacatgaagtgtctgaagatccatttcacctcttttccatgtgaatcatgacgctttcaatgcatttcttgacaggattctattttgaaagaatgatgctcaatctgtaccttttatgcttcttgtttcttctccatcaataatatgtcagtcaactgcttgtcagagacacttagctgctgacaggtcctcataacctgactcaggtaaactgccaagagatgcttgcacaggatgctgtcactcttccgtagcactgagaatgcaaatgcaggacatgaacagtaatgacaagaagccaaacatgtgtatgttttactggaacttccaaggacctggtaaacacgccttccactgggtgatgagattaaggtgatggactgtcgatcaactaggtccaaggcctgggtggctgatgagccaaagagaaacttcagcgataacagatattcatcaggaactgtaaaatgagaatgg

SEQ ID NO: 129127 - DNA, 1104 bp, Homo Sapiens
ctgaagaaaaaactttttatgacttcaatgacatgttatttttaagcagcagcggaagtcttaaacacctttacatgcttcgaaatactgttgatgatctgattttcaatactgtattgggtgccattaaagagaccattgttctttgaatcagtctctgtgttgctgtgggaaacacggtaaggcagaagcactagaatcatggaggcaaattactgaaacactgtgatactgaaatactgctggcttctggaataatcttctgacatgtggaattagacatctgaagtgtcgctccaatcagtcacagttactaagctgctttttaatgtgcttgattcattttcttgaagtccttctccctttggccccttaggattaaatgcgccccaggcatttagcacatgagcaaaatgtggttcatttttcgcaggtggaggttccttctgttctttcccagatttttttcccaaagatatctcttcctctagggatgatatgtcccagtcttcatcctccacatccgcacactttagttcttgtaattcttcttttttgataaacatctcagggacattagttccaccgactggtttgttcacatttttgcgatgtggaaacatcttttcaactttttcagtaggtgttttaacggcgactcctgcgggcttgggagaatcatcagtgtcctcgatttcgcttccctcggtcccgtccgcgtcacttttcactgtgttcttcccgaagctgcccttgttttgtggtggcggcacaggaagtgggcctggggatgcgtatgcccggatgaggtcgtcgtcctcctgctcctcctctgaactaaaaggaggggtcgtaatagttgaagactttctgggaaaaggatcttccatgacatttttcttaatttttggaacagatgtcctatcagtagaaacagctttttgtctagtcagctgtaaaattgaggagaaagcactactctcttcagatcagtgcagtgtttctcaaatggataccctttcaactggagaagtacccaaaatgatacaacttccttccaaaaacagacaactgattagacaaagagcatacagccgcggccgc

SEQ ID NO: 129128 - DNA, 1004 bp, Homo Sapiens
  misc_feature (75)..(150): n is a, c, g, or t
cagaatatatagtctttttaaacatacatggcacatttacaacattgatctcatactaggccaacaaccaagttnnnnnnnnnnnnnnnnnnnnnnnnnnnnnnnnnnnnnnnnnnnnnnnnnnnnnnnnnnnnnnnnnnnnnnnnnnnnataactagaaaaatctcatgtttggaaggtaggaaatatacttttaagtaacccatgggttatacatcctctcacttaatcctcctaactattcataacgcagaccctcattttagaaacgcaggagctgagataagaaagagaataccatttgctcaaatttacccagttggcagtggtggagccaggactcaaaaccaggctctgtaactttagagcccagggctttaatgatacccttcttatgctatgtctcatgggaattcaaagatcctccctcacagcctcaacgatctgctgtttcacctcttagaatggccagtcactgacaggtggagatctaggcccagcttgctctggtggccctgaccatgggccattgtgtagagatgcatttcccttttgctcttacctacttggactgaggcacgaagtcttgagtagtggagaagagagtttcagtttgatgcccccaaatagctttgaactggatccctaagaagacttccttccttttaaagtttttttcccacatgggcccaagtagtaagcgaacacagaagaaagacagaaggaagtcaattccagatggctctccatcttgctctactgcagattaaacagaaaattccaacataacattaagcaaacaagagtattaatatcattcatattataaacagaacagaatggaaattcagtctgtatctgacttaaatttggggcaagggcctcagagccagaaaacagacaataaaagcaccctgattctgagcaagttggaggtttataatatttgaggcaagaaaaaatgaccaaggtactcctaggcctctctgggagtggccttctgc

SEQ ID NO: 129129 - DNA, 282 bp, Homo Sapiens
gtatgttaaagactttttattttcaggccctttcagaggaatcaattcctttaaacctttgtaaaatgccacaggagccaaggttaagcgatgcttttaacttaggaactgaccctctccaggcagagtctccaaagtagattacctcgaaatttcaaagaggcagttctacaagaggagcctttgaagaagccaatcctgttttccattgttttgctttcacacacgggttgaacttgaactcttacctttctccatttataacaaccaaaatccacctta

SEQ ID NO: 129130 - DNA, 1667 bp, Homo Sapiens
ttttacaaagcacagtgtttactaaaggcacaaagtggagggggtcggagggcagctgctcttccggcagtgacccctcccgcttctggcagcccccgcgctcacaccacctgggtggagagctattagcaccaaagtggggggtgcccacctgtgggagagccgaggaccaggctgcggggtggacctcctgccatctgagtcccaaaaaggcaggcctgagcacccccaggaccagttgcctcagatgaggagcttcccgaacccctcaagcatgtccttcactggtaatgaggggctcgggctcagaagacagggaatctccaccaggccctcttctcacctctagaacaccctgcccctccctgccccgcgattccatctccgggagaggggctgaaggcctcttcccactgcgccagtcaaaagggctgccctgggggtgcttctcctgaccccacaggctgccagacaggcactaagtccaaacaggggccaacggggaggagggaggcagggcaggtggctacttcacacacagtgcagcctgaagggtgggagggaggtgcccctggccctcccagcccccaggccggcccctgttccctggcacaggggcagccagggtcacagcacatcgccctcctccatgctgaagctgctccggcggctgctggccttggaggcctcgggggacatgttggacagaagtggatcagaggccagcggtagcagtgagtcgtccaggagcatgaggtccagatccttcttggacagtctggggaatggggagccatgccccggcgccagggtttcggggtagcccgggggaccctcgtcctccctgcccccaaagctcagctgtcggctgaagtccaggtcgatggaatggggccggtgcctgggtggccagggccagcgggccttgccgggacagagctggcagtggctcagggtcagggacctcagcccccagcatcagggcctcccctgggccctcttcgctaggcagctcctgcttcaccacctgctgggccagctcagccatgttcatgccggacggggaggtggtagggaggccgtgcactcgagcctgcatctccagctcctggatacggagccagagctgcttgttggtcatctccaggcggcgagagtggttctccagctcctggacttttgcaggtccttctgcatcctccggatgtaatccacagaggccttgaggatggtgcccttgttccagcgcacgtccaggtcattggccttggggatcagcattcccaactccttgatgcggtcattgatgttgaaccttcgtctcctttcaattaagttgtgattgtctttcttctgccgctccttggccagggccctgctctcagcatctgtgagctctcgcttctgggtcaggtccgcagggcaggagctgctggtgacgcccaccagggaggctgtgacctgggggtcgctgctgtacacattcaggtggctgctggacaggggtagcgtgttgggcatctgcatttcaggattgatgtagccaaggacatcgtccagacgcataatgttgtcaatgacatcatccaacttcaacacctccccaggcacaggtgtaggcgactggaagtgcctcggtgccgattcacacccggccttcgactagg

SEQ ID NO: 129131 - DNA, 1405 bp, Homo Sapiens
  misc_feature (1296)..(1330): n is a, c, g, or t
ctcgcttgtaaaataaaaggttcttgtattctcactgcttttgaggctttttcgttgccagcaagggcttttgcattgagggaaaaggaagcacagaacggattcatccagggtcctggagaggagggtgtggaggcaagaagcaggaaggacaagtcctcctctcggcacgcctgggtccccaggactgctgaagcacaagacccgaggggtggcctggtccttccctcctggcctgtgtggactctgatggggctgttggacgcggtggccttcaacctggggcccgttggccagagctcggcctctcagagaccgctgcaggccctgcctcgcctcctcctggccctgcacctccagccattcactgcggctctcacagctcagtacggtcggaatttgcgctgggcccgcagcagctcgatcctctgcttgtcctcctcgaacttcttgcgcagctgcgctagatgctccatcttgctctctcgatgctgccaggcgtagaagttgagcagctcttttcggctgcgcttccgtctctccctctccagcacccgcaagctggctgcctcagtccgggggagcacaggccgccggccccggcgggtcaccttcacccagccctcctcgtcagggaccccctcctcctccttggccttagcttcttcctcagcgatcttctggtcatatgcctccatgaacgtgtccacttccaccctcagggcctcagggtcgggcacagagtctgcgtagtcactgatccacttgtgaatgccactcttcacagggtggctctctgtggacaccagcagggggcccttcagggccaaggccgctgacaccccacttggcttctggaacaccacgtaggctacctggaaacccggaactggctttggatgaaaaaacttcgaccttgactcctttgggctctcagccaggtccggcttctcctgcaactctacagactggacgaggccacaggtggacaggaggcgggacaggctctcctctgtgcagtatgggggcacattgaggacaaaaagagtcctcttctgaggccaggtggacttggtgccttgtcgaacgccgtgtgctctcacatagaggtagtgagaagcctgttgcttttcagagaacttgattggaatagctgcgtagcccagtgggctggggatacggtcctccgggtcccgcgcggcgcacttcctcctgcgcgccaccatcttgccacccgggagcgcccccggccgtaatggccgaattcccgggcatatgtccggtaccgtcgactgnnnnnnnnnnnnnnnnnnnnnnnnnnnnnnnnnnncggccgcttcctcgctcactacttcgctgcgctcgtcgttcggtcagacgagctagcccctatagtgatgatcca

SEQ ID NO: 129132 - DNA, 1267 bp, Homo Sapiens
  misc_feature (1157)..(1221): n is a, c, g, or t
tttttttaagcattcacttcaagttttattttgcctcttgcatggtcttttacagttcgttttctacaggaactgagctctgatccaaacaatcaataaaaatgtaattccaaccttaatattcataaccaggaaatagcatagcacttcatgatcctagagtgatgaaagcaagaccagggcatctgtttcacagtcacctgtgaccagaccagccaacatgattactaaaagccaagataaaaccaaaagcaaacttgctaaaaaatcctgaattccatgaggttaactctgaaatcctccaaacaaaatgctagaattgtccactagtgttaagacgagaaaactgaggaaaactcagctgtcttactatctggtaagagtcttcccttcatctcaagccctcaaaaatgcaaacttggttccagctttacaacataccatatccttctatcggttaaaggtttctaacctaaaaaccttctctcctttcttctcacctatttagtgcatactcaaaggctttggttggaagtcactaggtaccactaggtacaatgctttagggctctctcaaagcccacaatggtggagttctgtgaaagaaaacttaagtttctttctctttacccctctcccctcactcagctcaaagttaaacagctgatgcaaaactacagagaagcaagataacaaaatactgttatcaatctatggagaaatcagccagccatgatgaaaaaatgagtcctgccgactatctgccagcttcatgctcagaacccttaaaaacacagaatctaaattaaaatacatgaagctttcacaatccggttaaaggaaaaaggtaactgtaaataactggttaaagtgtgctcattcgttcagaaattagatacaaacatgcaagaattaaagactctgatttaataaaatcagtagtaacaggtcttgagattaaacaactgacctgagggcaaatgggaccaatcagtccctgaaccctacctgacatgtcaaatccaacatttcacatgctgacctaatattgaggttaatttccagaagtaactgcacttttcaacagattaagtcctacaaaattaggctctcgtaccccaaatggtcatgcctacgcctaggtgggaggcactttnnnnnnnnnnnnnnnnnnnnnnnnnnnnnnnnnnnnnnnnnnnnnnnnnnnnnnnnnnnnnnnnnccacttttcactggtttacattattcaaagtgccattctgaaccaa

SEQ ID NO: 129133 - DNA, 1946 bp, Homo Sapiens
  misc_feature (17)..(17): n is a, c, g, or t
  misc_feature (592)..(655): n is a, c, g, or t
ttttgcccccgtttcgnttttcaggggtttgaaaagggtgtaagcccaagcttggatggccaaaatttcccagggggaaggccaaggattgccccaaaagttccgggtttatccaattcttaggggaggaaattccagcccagcccatgggtgaaaaaaaatgagtcccttgcccggcttatgtgcccagtttcatggctcagggaccccttaaaaaccaccggattgtaaattaaaaaatacaggaaggcttgcacaatcccgttgaaaggaaaaagggtaagctgtaaattacggggttaaagtgtgctcattcgttcagaaattagatacaaacatgcaagaattaaagactctgatttaataaaatcagtagtaacaggtcttgagattaaacaactgacctgagggcaaatgggaccaatcagtccctgaaccctacctgacatgtcaaatccaacatttcacatggtgacctaatattgaggttaatttccagaagtagctgcacttttcaacagattaagtcctacaaaattaggctctcgtaccccaaatggtcatggcctacgcctaggtgggaggcactttnnnnnnnnnnnnnnnnnnnnnnnnnnnnnnnnnnnnnnnnnnnnnnnnnnnnnnnnnnnnnnnntccacttttcactggtttacattattcaaagtgccattctgaaccaacaccctttcatttatagaggaaaaaaatttacaaaaacagtaaacacaaaggatagtcaggttacagctagtttatatacaaagaaatttacaagtttgtcaattgtaggcttttgccacaaacaaatgcacatttgtccctacaaagtacaacatgcctgaaccaacagtcattacaggagacaattggccacggctttacaaaaagcagaataactgccccaaattgaaattatttattcagcttaaactaatgccacaaccatcccacttggaatcactccaccctgacacttctgaaacccactctttctttctttcatctctgccatgtcccctaagactgagaggcatttcactcaataaaccaaggaagatgacagatgttatcttgattactctcaggtgagaaacgcaaccacactggatgcagaaaatagtgctgactacatttattgaagactctctccctgtataagcccatgtaaaaggtctcagcacctaacacaagactcaaaaaggaagcccacatctctctttcatacaggatttgctgcaatactatattcttccaaccagtgagtagtctcaaagtgtgatgggtgagttttacatagtcttctttgtttcgaatccaattggctgatttgttaccattctagaggctgaactgtatgaagacctcaactaccattcacaaggtgcagttaagagacttttggacagttcacagtgtcaacaaatgtcacaggctccgaccaagtataaccacatcctttggaaatccttccatttttgcaatttcaaaacatcctaacttgctgtaaaattccagaattcttttatcatctggtctcacttcacagaaagctccccgggagccattagccttcagtgaagacaggaggcaagccatcatgcttttggccacacttgggtcagttacttttttgtgaatgtccatctttatcagagaagggaaattagcaaggaaagtttctggcagtacttcctgttcttcatggaaactcaacattattttctggaaaaattagaatctcttgactttcacaatagttacgcattagatatctaacccaactacagaacttagcaacaagaaagcaatatttaataactcttccagtcactatgtaaattatctcacacaggattatcctataattctagctgaagcattttcactttctttgagacaggatctccttctgttggcggccgca

SEQ ID NO: 129134 - DNA, 952 bp, Homo Sapiens
cattcagtttgaaatgttttccccctttattttgtttttcaaattacaaaagcaatatatgtgaacaagacaatgcaaaggtattcagaaaacttattacccttctccaccaaggtaaccaatgaatgttaacaccttcgtgtgtattcttctacacttttctatgttcatataaacatccacatgcatatatacacacacaggagtttttactttttttaaaaatagaatcgtatacattattatgaaattttccctttttacaatatataccatgaacatccccacaaattagcaaaattctagctcccccatccccagccaaatttactaactcacacatttgtggtatcacccgtgattcagtcatttatgtatttttcttttttggttttccttttccctacacccctgactcccccataacctacctgcattacccacctccctccaagtcaatgcatactcttctatacttttcttcatgcacataaaatcaaataaacatatatagataccgtttattgctgacaaacacctagagacattttgttaatgatttacaaaaatggagtcatatttaacatacttaatatctaccttgcatttttcactcaagagaacattgtggaattccactcaagtccactagcatagttttaatttgtccaccttaatggctatattaacattctatggaatggatacactatagttttttcctttctacaatttcccagttgatgggtatttactttgattctagtgtttgctttggttttgggggtttttttgccattaagaacaatttttacaataaatgtccatgttcacatgttcatctgtcttttatgtattggagcttttacttctaagggaagattctccaaagtgacataaatattttaataatattaacagatttcttttcttttcttttgagatggaatct

SEQ ID NO: 129135 - DNA, 698 bp, Homo Sapiens
ttttttttaactttgaaaatttctttattacagacatttcagaaccatttaaatcaacagacaaggaaatttttagacataacatactgtgtttatcttgaggtacacattgggcccattagataacgttttggaaagtaatgccattgttaactggtagttaacaacccaagttttccaagcaaagaaactgtaaagatggttacaaaattctttgaaaagaatacaccatttccatttaagataaactctccaaattcttaactgatttcaatttttaggcttagcttaaatattttaaatgaaacaatatgagagtgggagaaaaggtttatagctaagaaattatctgagccctactacatgagattgtaaacaaaggaaatttgcgatctgataagctctattacaaaatttatagcctaaaaattagagcagcaaaattacagaagatatttgtatatagtttaaactgaaatcacgtttattccttgtttctggctatcacaatgagacaaattttaaaacaccaagttttaaagactgaacagtgtgatttaacatgatgtaaccatgagaatcccgtattattacaatcccacaatctaaaaactctacttcacataatttgcactctaggccttttattcttcttgctcaagcagcctggtgcctttaggtaacttgaaagatagtgg

SEQ ID NO: 129136 - DNA, 600 bp, Homo Sapiens
  misc_feature (560)..(560): n is a, c, g, or t
tttctataaaaatataactctttattaaataacatgcacaaatatcaactagtcattaaacagatatttagaacaaattgtaaagaaatacaaatccttaggtacaatttagtatcttgttcatgatatttgaagagtttaaaaagaatcactgattaaactaaccatcctttttctttctgaatccaaaaccttttcaggcatatactccattccaaatttttttctagcatttcagagcttcagaatatctttaataccaaaagcccttaactacttatttgattatacatttccaatgagaaggcattaacttttcttttaagctatcattagctttgagtctctttataaaagaaatttgtagaagcataatcatggcagagaggctccagctttttgaggtaccatttaagagagtgagaactgtggttaagactaaaaagctgggatgactaaaattcaccagattccttcttgtcgcttttatcttctaaaagcctgttctgtttgggccaacagtgctatttcccagacctctggttgaaccatcagaacanaatgccctataaacttacccctctctgattttctataact

SEQ ID NO: 129137 - DNA, 1232 bp, Homo Sapiens
  misc_feature (61)..(81): n is a, c, g, or t
gtgccaagctaaaattaaccctcactacaagggaataagcttgcggccgcctacgcggtcnnnnnnnnnnnnnnnnnnnnnaagtcacagaaacttttattggaaagaaacgagctgcagcaaagtgacactcagtgcacgcggccaaatgggcgaggtgggggtacaggtgggcaccggggccggcccaagaccagagccggtgactgctggggcctgctcgtggggcctccggccacagaccctttgggctggagtgtgcaggcccagtagaaatacaaaaataaactctgcggtccagctgtccctgctgtggcagttcatttgggcagggcagtcgctcctcccaccaggccccctgctgacaagtccggccacagcatgggcagcaggagtctgaggggtgagtgggcatccacaggatggagccaaagggctaggcaggtatggccttgggcagtgccaggactgtggcagcgccagggtctggccagcagctggggaggccccaggggcctctcaggtggacaggtccaggcattggttgaagctggatgaagctggggcctcggctcctcctcatcaaatacagatcactgggaccctgtcctcctccatggtgctggtctcctcggccccactgcccctgcttctgctttcttcctccacctcctcctcccccagctccatgtccagctcgttgcctgcctctgagggtgtgtaggtggagccactgatggaacggcagctaaagaagacgattcgcttgagccgcttgttgtagaagaagtagttgaaggaccagaggctaccatcctccccgaagggatctgagtccaagtctgggttatagctggggagtatagggtgacaggtggtgtgaggcgccaagtgccccacaaacctggaggcctggaggccatctgcagggatgccggcccacctgtagatgtcacattcagccaggcagatctcctcgtccaccgcgttccacagctgtggtttcagatccttgaagtcctcccgcacagctgagaacagactgcagttgactgcattcaccacccagctaaggctgggctcccggctgaactcatggctgcgggctgtgctgaagtcatagtcaggcctgaaggactcattgagcgtggcaatcaggtagaagagggtcttgcggctgcacttgtcactgagggcggacgcggggtcgacgattcgaggaattccggacc

SEQ ID NO: 129138 - DNA, 1255 bp, Homo Sapiens
  misc_feature (1098)..(1156): n is a, c, g, or t
gggccgggccggcggacgcttgttgttgtccggccgggggaggcggaggtcgctcgctcgctcgctcggctcgctgactcgccggagcgctctgtggcggtcggcggcaggtcggtcgcgagagcgggctctgtggaagggggcgaggctatgtcgcggtggcagcccggatgggccggcagggccgggagtaacgggacgtcgccgcggagcttcttcccccggatacagtgcggcccgagcggaggccgcggcgccgccctccgatcttgaagagcccgcgctgcgcggagcccgcccccgcctgcgcaccggcaccgacgcggagcgaccagcccagccagacccggcccggcgcgggctgatctaacccagccaggcaggcaatactagcccctctggagcacggagctccttccccaaagacatgaagctattggagaactcgagctttgaagccatcaactcacagctgactgtggagaccggagatgcccacatcattggcaggattgagagctactcatgtaagatggcaggagacgacaaacacatgttcaagcagttctgccaggagggccagccccacgtgctggaggcactttctccaccccagacttcaggactgagccccagcagactcagcaaaagccaaggcggtgaggaggagggccccctcagtgacaagtgcagccgcaagaccctcttctacctgattgccacgctcaatgagtccttcaggcctgactatgacttcagcacagcccgcaagccatgagttccagccgggagccacagccttagactgggtggtgaatgcagtcaactgcagtctgttctcagctgtgcgggaggacttcaaggatctgaaaccacagctgtggaacgcggtggacgaggagatctgcctggctgaatgtgacatctacagctataacccagacttggactcagatcccttcggggaggatggtagcctctggtccttcaactacttcttctacaacaagcggctcaagcgaatcgtcttctttagctgccgttccatcagtggctccacctacacaccctcagaaggcaggcaacgagctggacatnnnnnnnnnnnnnnnnnnnnnnnnnnnnnnnnnnnnnnnnnnnnnnnnnnnnnnnnnnnaccagcccatgggggaggacggtcccagggacggttcgggggagacccggcccaatacacagttacatgcggacgtcacggagccgggccccgggcacg

SEQ ID NO: 129139 - DNA, 1069 bp, Homo Sapiens
  misc_feature (61)..(84): n is a, c, g, or t
  misc_feature (856)..(857): n is a, c, g, or t
  misc_feature (869)..(869): n is a, c, g, or t
  misc_feature (874)..(874): n is a, c, g, or t
  misc_feature (877)..(877): n is a, c, g, or t
  misc_feature (914)..(914): n is a, c, g, or t
  misc_feature (923)..(923): n is a, c, g, or t
gtgccaatgctcaaattaaccctcactacaagggaataagcttgcggccgcctgctcaggnnnnnnnnnnnnnnnnnnnnnnnngtctctgggtagtcacgctagggctggcaggggaggaggcagaggaaaggcagggagaagagaaaacatcactgaaaaagaaggtgtcggggaggtacaccctgattctgaccagcccagcccacacagagggtctgaaaggttctcagccttctccatcacccaccctgcggcctctgaaaagaggggcccatctcagacacaaaagcagatactcccaaccttatggggaaagctaacggaggaatactcacagcaccgtggcacgggacggcccttggcttcagagccgggctggcaccgtttgtaaacattagacctggtgatgtctggggatggaggaggagagggatgcccagcctggaccatcaggtttgatgaaagagacagggtggggcccctcaaggcctgggaaatgtctattagctatgggaaagaggctgacaggttcatggtgggggttgcccaggaaggtgtggacaaggtctgaatctacctgactatgcatttgcatgacttcagtgctaccgttggaagtggccaggctcctgaggaagctaccactggcctggggtaatgagcacaacccctactcaggacagggtgctctgtggaggatggtggccttctgtccatagtcattctccagagggaagtcagactggattctttcttatgagatctaccgactctcttcacccgtggattccaggcatggagaagttgagaactgggagaggaggaggggtcctctatgatgtgagacttcctnnccgcatcacggnactgncangactggggagcaagacgggactggatttggctgtcanaggtgtggngctgagtttgccagtccctggagagagtccgatgtcatcacagttggatgatctggctagatggccaagtctagaatggtctgcacatgcaagctgtgtctggagcatgtagcagaataaaatggttgtgtgctgcaatagtcagg

SEQ ID NO: 129140 - DNA, 908 bp, Homo Sapiens
  misc_feature (310)..(322): n is a, c, g, or t
tggtttttttagccacctctaggccagcccttgggttaaatggcccaacccccggtaccccgtgtgaattcagacattgaatgatgggcctagtttcagtctgccccccaagtcagctgccccccaggcttctagaaaggaggccacccccctcccctgtgcaaatgctgcagttccttagtcagtgtcactgttttgtgtgagccagcgtgaggctccctttctgttctggagccagaggcagggcaaaccagacacccttggaaggttcccctgaacctgggcccaggcctcagaggtgattcaccgnnnnnnnnnnnnnttgtggttggaggagcttggctcccgccgcgtctgggaggcagagactggctctagaatggatgaatgaatgatgagtgggcgagccccggctggcagggggcacattgtcactggatcagcgccacagctgggcagccctctccgccggtctcctctatgggggtggtgaacttctctctcctgcggcatcgtctccagaccaaaaagccagaaagcagccccagcacgaaggtcaggctcagagcgcccccaaggatgggccaaagcagccggaagggggcaggaggtgctgcagcgcagcccaggcagaagtcgctgtgcggtcgcgccctgcaagacgcgcagtccatgcacttgtccaggtccgcgctccaggagctgccgcgggagcagggggcggtgcctggcgcttgctccccggccacggagcgctagcaacgccagccagagccccagcacgaggagccgcagcaaccggcgcagcgagccccgagccatagtgcacgcgacgcgtggtcgacgatatcccgggattccggaccgtaccagcctgctttttttacaacttggttcatatcacatgc

SEQ ID NO: 129141 - DNA, 989 bp, Homo Sapiens
  misc_feature (441)..(453): n is a, c, g, or t
ttttttttaaagttaaagattcttttattaataaattctccctcccctccaaactctccccaaaataaatatctcctccccgctttggggagttgggggggtctgtatcttagggccagccctcctagtgggccagccccctagtgttaaaaataggtccctaaccccccagggtgacccccgtggtggaatttcaggacatctgagtgagtggggcctagtgtcaagtctgccccccaagtcagcctggcccccagggcctctaggaaggagggcacccccctcccctgtgcaaatgctgcagttccttagtcagtgtcagctgttttgtgtgagccagcgtgaggctccctttctgttctggagccagaggcagggcaaccagacaccttggaaggttcccctgaaccctgggcccaggcctcagaggtgattcaccgnnnnnnnnnnnnnttgtggttggaggagcttggctcccgccgcgtctgggaggcagagactggctctagaatggatgaatgaatgatgagtgggcgagccccggctggcagggggcacattgtcactggatcagcgccacagctgggcagccctctccgccggtctcctctatgggggtggtgaacttctctctcctgcggcatcgtctccagaccaaaaagccagaaagcagccccagcacgaaggtcaggctcagagcgcccccaaggatgggccaaagcagccggaagggggcaggaggtgctgcagcgcagcccaggcagaagtcgctgtgcggtcgcgccctgcaagacgcgcagtccatgcacttgtccaggtccgcgctccaggagctgccgcgggagcagggggcggtgcctggcgcttgctccccggccacggagcgcagcaacgccagccagagccccagcacgaggagccgcagcaaccggcgcagcgagccccgagccatacctcgtgccgaattcgccacccaggcctcgctacct

SEQ ID NO: 129142 - DNA, 1006 bp, Homo Sapiens
  misc_feature (106)..(127): n is a, c, g, or t
tttgggggagagttagcgggggtttccgtgttttcgttgagatcccagaccccccttaaggggggcccagcgcccccttagggttgagaaaattagttcgccttannnnnnnnnnnnnnnnnnnnnnggtgggggatttttcaggacctttctgagtgaaggggggccttaggttcaaattttgcccccccaagtcaagtctggcccccagggccttttaggaaggaggggccccccccttcccctgtgcaaatgctgcagttccttagtcagtgtcagctgttttgtgtgagccagcgtgaggctccctttctgttctggagccagaggcagggcaaccagacaccttggaaggttcccctgaaccctgggcccaggcctcagaggtgattcaccgccccagccccgccttgtggttggaggagcttggctcccgccgcgtctgggaggcagagactggctctagaatggatgaatgaatgatgagtgggcgagccccggctggcagggggcacattgtcactggatcagcgccacagctgggcagccctctccgccggtctcctctatgggggtggtgaacttctctctcctgcggcatcgtctccagaccaaaaagccagaaagcagccccagcacgaaggtcaggctcagagcgcccccaaggatgggccaaagcagccggaagggggcaggaggtgctgcagcgcagcccaggcagaagtcgctgtgcggtcgcgccctgcaagacgcgcagtccatgcacttgtccaggtccgcgctccaggagctgccgcgggagcagggggcggtgcctggcgcttgctccccggccacggagcgcagcaacgccagccagagccccagcacgaggagccgcagcaaccggcgcagcgagccccgagccatagtgcacgtcctgcgcccgccgctgtctgcgcccgccgccggccggcagggacccctcgtgccgagatcgccacccaggcctcgctaccttggaccg

SEQ ID NO: 129143 - DNA, 602 bp, Homo Sapiens
  misc_feature (165)..(175): n is a, c, g, or t
gtgcgtcggtcccggacttttataatttattaaaaacatggccttggcagttatttttccttcaccgagggagagggacagggggagaaaataaacttcccctcctattcagaagtttatagtttatggagatggatgacataaaaatgtaaacatctccacacnnnnnnnnnnntgtcttaaccaaccgaaaagaaaaattaaaaaaggatttgtattaaatcttattctgtatatttaatgtagcatttttgtatttaaattgataattcaatatctttgaagtaaattatgaaatcaagacacctgtacaggcatttaatgtttttttgtaatataaatatatacatttgtgtttcccccaaaactgtttcatagttaaaaaatacaagtttaatttaattttttacacctattgattctgctgggtatgagctaaagtattacagaaaggaaacaggttatactcttagatttaaaaagtgaaagaaactgcaggcgcctttgtaaaatgcaaaatatttaattaaaagagattttaacataatgagagccactcattactttttagaagcctcaataaactgtccattgccttggtc

SEQ ID NO: 129144 - DNA, 611 bp, Homo Sapiens
  misc_feature (77)..(98): n is a, c, g, or t
gtatggagatgtttacatttttatgtcatccatctccataaactataaacttctgaataggaggggtagtttatttnnnnnnnnnnnnnnnnnnnnnnggtgatggaaaaataactgccaaggccatgtttttaataaattagaaaagtccgggaccgacgcagcccgcgttaaatgtcggacatacctttcttcaattcatagggagagtctttgcacaggtctagctgagactggctccgcaacattttcgggtctttagccaaagcgtccgctcggttcaacacggtctggtttaatccattgaaatgagaccccggaccggttgtggggcctggcccgggccccgggtggccatgaaggtgtccgaaggagccatagttcgtgtagccgggatagaagggcgcggtgtattagagaggccgggacagcaccgtcccgcctggaaaaggacactgcgccgagggcgagcgtgacggcgccggggccggcgacgcccggctgcctcctagggcttgcccggctatgggcccgggacacggtgggcatggagagccctcgttcccgccgcccccgtccttgaccttgtccgacgatgtggcgatctctgc

SEQ ID NO: 129145 - DNA, 759 bp, Homo Sapiens
  misc_feature (336)..(376): n is a, c, g, or t
  misc_feature (457)..(478): n is a, c, g, or t
  misc_feature (712)..(712): n is a, c, g, or t
  misc_feature (736)..(736): n is a, c, g, or t
tgtttaaatctcttttaattaaatattttgggttttacaaaggcgcctgcagtttctttcactttttaaatctaagagtataacctgtttcctttccgtaatactttagctcatacccagcagaatcaataggtgtaaaaaattaaattaaacttgtattttttaactatgaaacagttttgggggaaacacaaatgtatatatttatattacaaaaaaacattaaatgcctgtacaggtgtcttgatttcataatttacttcaaagatattgaattatcaatttaaatacaaaaatgctacattaaatatacagaataagatttaatacaaatcnnnnnnnnnnnnnnnnnnnnnnnnnnnnnnnnnnnnnnnnngtgtgtgtggagatgtttacatttttatgtcatccatctccataaactataaacttctgaataggaggggtagtttatttnnnnnnnnnnnnnnnnnnnnnnggtgatggaaaaataactgccaaggccatgtttttaataaattagaaaagtccgggaccgacgcagcccgcgttaaatgtcggacatacctttcttcaattcatagggagagtctttgcacaggtctagctgagactggctccgcaacattttcgggtctttagccaaagcgtccgctcggttcaacaccggtctggtttaatccattgaaatgagaccccggaccggtttgtngggcctggccggggccccgggttngccatgaaggtgtccgaagaggc

SEQ ID NO: 129146 - DNA, 398 bp, Homo Sapiens
  misc_feature (272)..(299): n is a, c, g, or t
tctctctctctcttttaaagacagtttttgggtaatctttttcttttgcttaagtcagagatggaagggggaaagagcaaaggaaaaaacaaccaacaacaaggagaatgaagctttcccttctggtatcaaaatgctccggagaggagggactgtcagtggagcacctggggccggctccgccctcgctgcgggtggcggtggcgcccgcctgcctggcgccctcagatgtccacgtcccgcacgtcggtgggtgtgcaagccaggtccannnnnnnnnnnnnnnnnnnnnnnnnnnnggcggccttggggtccatgttctgctgggcctggcgcaggcttgactccagcagggcttcgatctgctcctggcaggcccggaggcagtctgggtcaca

SEQ ID NO: 129147 - DNA, 712 bp, Homo Sapiens
  misc_feature (285)..(285): n is a, c, g, or t
  misc_feature (287)..(287): n is a, c, g, or t
  misc_feature (291)..(291): n is a, c, g, or t
  misc_feature (613)..(613): n is a, c, g, or t
tctctctctctcttttaaagacagtttttgggtaatctttttcttttgcttaagtcagagatggaagggggaaagagcaaaggaaaaaacaaccaacaacaaggagaatgaagctttcccttctggtatcaaaatgctccggagaggagggactgtcagtggagcacctggggccggctccgccctcgctgcgggtggcggtggcgcccgcctgcctggcgccctcagatgtccacgtcccgcacgtcggtgggtgtgcaagccaggtccactcctcctcctctntntccntcctcctcggcggccttggggtccatgttctgctgggcctggcgcaggcttgactccagcagggcttcgatctgctcctggcaggcccggaggcagtccgggtcacacttgatcactctggagaggaagcgtgtgaggcggtagtaggacaggaagttgttggggctcctcaggttcaggccttgcactgcggccaccacgctccccgctgccaccatggagggcggattggaaatgaacttcacatctgtggcacagagggcaacgaaggtctgcgcgtgtttgcggatgatctgtttggtctcctccgcctcttgcattnttggagaggaagtggtcaatgaaatcgtgccgggcattgcgggcaggattccattgaacttgtcaacaagagcagctcatttgcagtacctcctcgggc

SEQ ID NO: 129148 - DNA, 1200 bp, Homo Sapiens
  misc_feature (101)..(109): n is a, c, g, or t
ttccctttcgggtattccaaaatgctccggaggaggagggaaccgtccagtggagcccccttggggccgggttccgccctttgcttcagggtggcggtggnnnnnnnnnttgcctggcgccttcagatgtccacgtcccggcacgtcggtgggtgtccaagccaggtccacctcctccttctcttttttctcctccctcggcggctggggggtccatgttttgctgggcctgccgcaggcttgactccagcagggcttcgatctgctcctggcaggcccggaggcagtctgggtcacacttgatcactctggagaggaagcgtgtgagggcggttgtaggacaggaagttgttggggctcctcaggttcaggccttgcactgcggccaccacgctccccgctgccaccatggagggcggattggaaatgaacttcacatctgtggcacagagggcaacgaaggtctgcgcgtgtttgcggatgatctgtttgttctcctccgcctctggcattttggagaggaagtgttcaatgaaatcgtgcggggtcattgcggccaggttccacttgagcttgttcaccaggagcagctccatttgcagcagctcctcgggccggatggagttgtcggtgtagatgcacagcttctcggccgtcagggggatggtctccttcatcttagaggccacgaacatgcaagtggcccccagcagctgcaggcggctctttttcacgggctccagcgacaggaagcggtccaggtagttcatggccagcgggaagacctcctcctcgcacttctgttcctcgcagacctccagcatccaggtggcgacgatcttccgcatggacggcaggacctccttctgcacacatttgaagtaggacaccgagggcgcgcaggtctcctccgccttcagcatggcccgcagcacccggtcgttgaggaggttggcatcggggtacgcgcggcggatggtttccacttcgcagcacaggagctggtgttccatggctggggctcttcctgggcagctggggagggctgtgggtcctggctgggtccgcgctcggctctcgcttctgctgccccgcgctccctcgcgctcttctgcccctcgccggagcgtgcggactctgctgctcgctgctactgcgccgacagccctctggaggctcccaggactttgcaacttcaac

SEQ ID NO: 129149 - DNA, 1531 bp, Homo Sapiens
  misc_feature (1413)..(1447): n is a, c, g, or t
tttttcgttgtttaagattttaataaaggtggggcaaagggttgaattggtcgaaaagtcctcaacgtcctgacgggactcccctgaagccaaggcagtttgagtccattcattattctgtcttggatcttaggcaaagccccgggccccttggagcagcaccagggttcccgacacccccaccgacagggtcgaacgtgcacaggctgggaccacgccggagttcattgagccctcgtgggggagggcagttccagggaccaggaagggattcccgtccagtgtcaggttatccacctcgggcagctcgtcaggctgcggcgccctgttcagtctgttgcagctgagatcgagcactctgagcttggctggcagtcctttaggcacctgttccagcccagcgaacgacagattgagggagttcagggcgctggaccacatgcatctcggagcgctagggtttacggtggcgcgcagcgagttgtggctgaggtctaggctgtggggctgcacacctgccgccgccagtgcggcgcacacgcctgtgggcgtctccattcctgtgttgcgcagcgctagattctggatggccgggaacttgtggggacagagagccgccatcagtccgcgttcgcccagtccaggattgtcagacaggtctaggctggtaagggccgggaaggcgcgaacctgttcgcaggaaaaggcaggcgagtgtgcttgggcaatgctcagtaccttgaggcctggcttgagccactgctgcagctcggcgagccaagaacgccctgtcgcccacgacacgttgcgtaggcgcaagctggaaagtgcaagtcctgtggcttccagaggcagcggaggcatggtgccggttatctttaggtcctcgagcgtcagttccttgaggcgggagtacgctagcacacgcagggcgcctaccagtagctgagcaggaacctgtgcggctcccactgtgagccgccgcacgcggagagccttgaccgtgtcagcatactgccgcgggtcggcgtccgcatcgacgcgctttagaaacggctctaggttgagaccgccggcatggatctccacctctactgcagacacacactggaaggcttcggaccagtcgggctgaggttcggagaagttgcagacgcagcggaaatcttcatcgtccagctcacaaggttctggcgtggtcgcagagacgtgcaccagcggcagcagcagcagcaacaagcaggacgcgcgctccatggtcgataagtcttccgaacctctgagctccggacaggctctggaagtgctttagcttctttcctacacagcggcacccgccggcttccaggcttcacacttgtccccggccgtaatggccgaattcccgggcatatgtccggtaccgtcgactgnnnnnnnnnnnnnnnnnnnnnnnnnnnnnnnnnnncggccgcttcctcgctcaatgactcgctgcgctcgtcgttcggctactaacacctagcgccctatagtgagtcgatacgatctt

SEQ ID NO: 129150 - DNA, 844 bp, Homo Sapiens
ctatatctggtaattcacatgaaaaaatgagttgcaaattactgtattctacgatgaaagaagaatgcagattaaggataacgacacgtcttacccactagccacctttaaggatcatgttttcacgggtagctaaaaggagttaccataaagctctacacatataactgaaactctttgccactaatctagtcccagcacttttactttgtagagttctcaaatcaaaagtaacaaataattatacatcaggattgttaggaataccaattattttacaactgccactacgtgtttcttcttctctgacacaagtggcacagatccaggcttgctgtgtttaatacgattcacttcctttcgtcgacgagcttctttcatgatgcgctgttcctgaatctggctatagatagattttggtagatgtcgatgacgagctatacgttttatatgaggataatgctgaaatttctccttcaatttctggttataatccttggctgctttttctcgtgatgtaagcacacccaatttttcagaagcattagctttccacaggcgaatgttcatttcatcagatccacacataatatacttgctgtcagaagtccattttacacagataacatgttgcattctctttgtatgatatacctccctgcttcgacttttgtctacaggaaagattcgaatagatttatcgaaactagcagacacaaactccttcccagtgggagagtaatccacatcaagcactgcagatacatgatccatatggaccattacaggagtgtccagtgcacgcatatcaaaagtatataagttataatcttcatttgctgct

SEQ ID NO: 129151 - DNA, 1890 bp, Homo Sapiens
tttttaagttacttatttggtcatagaacctgggatctgaccctgtacagagctgacactaggggcccactcatagagcctggctgcccaccacccctgtctgtaccagcaaggtacagagtagcagacacgggccaagttcagtgacaacttcctgtgaccttcgatttctggctctggggtgtgccacaggcggggatctgtgggaaaaccccattccggtctatcgaggacagcaggccacacgcattctcaggtccccactggtggggagggtgtgtgcactgccatctcagcctttgttctctggcagggaaggcagctggcagaggccgagtcgaggtgggggtcagagagaacttcgggccgtctcatctcctccatatccggaggcatttgtccttcccaccacttgccactctctggccatctggactccagtcaacagcatatacctcatccgcgtggccgggcaggtccatggccagcttctgggccttcacatcccacaccttcagtgtgctgtcactgctgccgctgaccaggagccgactgtcagctgaccacgcaatctggtacacggcagccacgtggccgcgtagggaagccaggtacttgcccgtcctgccatcccacagcttgatggacttgtcaaaggaggcactagccacgatgcgggagtcaggagagaagagcacctggttgatgagagcttggtgtcctgtcatccgagtgagaggctttttgtcctctgctggggaccacaggaataaggtgaagtcgtcggagccagacaccagcctctctggaccctggccccgcacgaggttgtatcggctcagagccctctccttcaactcctgcaaggatccttggaggtcttggggattaactgaggcctcagcaggttcaaaggccccagtgcgcagggcatagtcagtgctgagggccatggtgttcacccagtggccgtggccttgcagagtccggcacagcacaccgtcatgagctctccagactttgatggttcggtcctgggagtcagattagagaaagcccgtcccctccccaccggagacaggtgaccgactgggtgtgcccggtgagatgcgctcacagcggcctgcagttgtgtcccagatccgcacactgccatccttggagctgctggccacatagcggcactcagggttcgcatggaggggctcccagctcaggcctgtgatccacttgctgtggccagcgagggtcctgcccacctgcttccctgtgcttgggtcccagaggagaatctggccattcttgcagcctgaggccagcttcttgccatctggagaccaggatatactaaggacccagtgtctgtgtcccttgcatgtgaaatgtggtgtctctgtgctgagatcccagaagcgcacggtggtgtctccagagccactggccaggtactttcccgtagggctgaaggccacagaaatgactgcctcactgtgaccctccaaggagctggtgcagcgagtcacagcccggactctgaagatagcctgtggctggtagatgatgtctaggaccttctctgtctccactgcctgggactccaacgtcttccccagtgaggagacgatctcagcatcgtggacaaagaaagccagtggcaggggatcctcctgggccagtagcgcgttgcacacgagctgcagcctgtccggggtgatgtccacgggcacgtcgaacggggaacccagcagctgcccgccctcatcctggaactgcactagcaaccgctgcacatcgcgcgccaccgcctcgtccgccactgctgccgccatcccctcgtgccgaattcaacacccaggcctcgctacctttaacccgtgagagttactgcca

SEQ ID NO: 129152 - DNA, 1515 bp, Homo Sapiens
  misc_feature (134)..(134): n is a, c, g, or t
  misc_feature (170)..(223): n is a, c, g, or t
  misc_feature (225)..(226): n is a, c, g, or t
  misc_feature (229)..(229): n is a, c, g, or t
  misc_feature (231)..(236): n is a, c, g, or t
  misc_feature (238)..(242): n is a, c, g, or t
ggccccgggtttttccttggggaaacccgtttgggccccgggttccctttccctacggggccccgggcgcccaaaagaaatgttttgaaaaattttttaagggcccaaggggggccacaaatttctttaagtgntggtgaatgtgtttgttccgggggaaggttgatgannnnnnnnnnnnnnnnnnnnnnnnnnnnnnnnnnnnnnnnnnnnnnnnnnnnnntnnttntnnnnnntnnnnnttttcccagttccacagaactgattttattagccaatacataccaaagacgggtggaaaagaagtattatttttgtagttttctttcataatggaagccttatgctattacagactgcagttttccagtcttttgattaagccttgccagttgtgtgccgctgcagcaccaaagaaactgttttgcagcctgtcacctcctctggcaggcagccatcctggtctcggagagtggggtcagcaccagactggagcagcagctctacaatatccagaaactcacaggcagaggcataatgtagagctgtttggccttcattgtcctgacagttaatgtcagctctatgttgcagcaacactgtgactagttccttatgtcctcgatcacaggcccagtgaagtagagccctaccctcttcatctttcacattcacatccacatttttcgatttgatggctttggttatatggtcaatgttgttttccctgcagtaatcaaatatatttttgtcttcttccctgatggtttcttcatgatatagagaactaataactggcccaccaaaacctgtatttgcttcttttcctttcttctctggtatctgaggattccaacctggatctagttttttaactactgcgatatattcctgcattgcttggctggggcttgaatcaccaagtgctttccaagcttcccatttttgctttccttcaaaatcaaagaagcttggtttaggagtattacaatttccaactttgacctgtttgtacctggcatacaggtacaagagctgctccctgctggccacctgaatcaggccttgcaggtgcgcggcagccttctcaaacagctcggccaggcaactggtctcctcgatctcagggctatgggggaactccacctccccggagtcgtcccctgagctcagctctccaccgctgtcgccggtgatggcccccgcgggcaggaatgatgaagccatgtctccttgctcgctccgtccctctgtgtccggtctgtcctccttggattgggtgtaaggccggcttggaggcctggcccaccagtctgggtcgcgagcctgagctccagtcggacccaagctcagtcgcggcgcgctccctcacgtgaccctgctccctgcccacttctactccctgggcgtgcagagcaggctcctcgaccctctgccgctctgcccagtcgacccggtctcctccggcttccccctcgtgccgaattccaacccagcctgctacctagccgtata

SEQ ID NO: 129153 - DNA, 744 bp, Homo Sapiens
agctgtaatatcatttttcttcatttttacaatcttaaaactacaaaatgctgtctttctttctttcagaacaggtgggattgttcctccagcagctcaacagcttcacagagaaaatattcaacgaatagtacaagaagctctttctgccagtggagtctctccaagtgacctctcagcaattgcaactaccataaaaccaggacttgctttaagcctgggagtgggcttatcatttagcttacagctggtaggacagttaaaaaagccattcattcccattcatcatatggaggctcatgcacttactattaggttgaccaataaagtagaatttccttttttagttcttttgatttctggaggtcactgtctgttggcattagttcaaggagtttcagattttctgcttcttggaaagtctttggacatagcaccaggtgacatgcttgacaaggtaattaagaattaatttctccattcttttttgttatgttgtccatttcaactaagtagcaatagatgtgctaccaccattcacctaaatatttctgaattttatcttagtaaactgaaaaaaattcacatatggtgagaaaaaatagaaagagtagtacacaattttattattcttagcctttcttaataaaatggtaagaggttcatatctgtacataaaggcctgaaatagtttgcagatacagttatgtattttgccaaataatgtatgtgaaagaacgtgct

SEQ ID NO: 129154 - DNA, 490 bp, Homo Sapiens
tttttttatgggtctaacttttattattaggtcagaacgaatgaagtagcagcaaaagggtctctcctatgatctgtctttcactggtcctcagggcaaggaggaaacttgggcaggagatgattgctcaatcccagcagactctcagaatctcacttggacccgaaagtgcatctgcttggtggcattgttcttcattcctgtcttcagcatccattttgatttcatcctttggacatactgcatgtctcgctctcgcataagagccgctcctgtgctgccagtccatcccagggctctgtactgctgaagtactcggcccacggccttccgatttttggcaactgccacagctcttgacaagccaaatcgctgtttgtagtatctcatcaaggagcgatgacccactctggcaccagaaggcagaatcaattccatggtttcatcatcatattccaagttcttttctgagggcaactcctcagcctta

SEQ ID NO: 129155 - DNA, 1230 bp, Homo Sapiens
atttccttacagtccattaatttgacatccatcttttacctggggattattacaattgcaataagtcattaatgttttcttcacacagcttcttaaaccaagtttctctgcagctctttcggttctgcttacagtgtgtgggaaatctgatttttttcccctagtaatagtttgataagaaatttagtgtattgactgcctcagtgacacaatttatctttaaaggtgtggaagctggtggggaccaaatgttacctgtgtttttgctgttgattgctattttcagaagcaaaccatgtttttcacttacagtaggagtcaacaaatttgggattttagaagggggaggagggagctatttgtgtaagactgctgtcatatttgactacatattaaaaacagtaaatgagcatttgttttaatttcttaaataccttgtctttcaacatacgttttgtttcctttcttccattagtgttcaaaaggttctacccattgtggaagaaattctgtgtgcagaattcagaggcacaaggctgatggcaagatagaaagttatttgcttctaaacccaccccgatgtggaaactgatactagctagagggagctgtagaaaacaaagatttcaggattgcacagtgtgtgggcaatggggatggagactttttccccctattcccagccacagtgcccaagcgttcaagtctcctggatccaggacagatgggattttagctggtgctttaaatcctagtgctggaataagtccaggtacttcagttcagctcttgcctctgtcactaatcttgctttatgaactcctttgattttctgaataagttccagaaggttctctattattctgtccttcttccaaactggaaatggctgtatctaattctcaggatattttggatgtgtgcctcaggtaatttatgtggaatgtgtaaagcaagatgtctccaattctgaatattccttccccttttcccaatcctccactcttggactacctttataacaacaccgagtacgcacagacctgaacccatgcccaagaagcacacacaatgactggagctgtcgggaattcctgtcagtggcattccctgagcactggctctgtacaactcaattataattttttaagaatcatacctctgtatagatcttttggactgtactgattaaactttgatattgtggagtaaattcagaagtgcaatttt

SEQ ID NO: 129156 - DNA, 783 bp, Homo Sapiens
cccatacatgggtttctgtgatggtgagaataatggacatggggaagtagcatctttccctggcccattgaaagaagagaatctgttaaatgttccgaagccactgccaaaacaactgtgggagaccaaggagattcagtccctgtcaggacgccctcgatcctgtgatgttggaggtggcaatgcttttccgcataatggtctaaacctaggcctctcacccttcttggggaccttgaacactggagggtcattgccagatctaaccaacctccactactcgacacccctgccagcctccctggacaccaccgaccaccactttggcagtatgagtgtggggaatagtgtggacgacatcccagctgctatgacccacctgggtataagaagctcctctggtctccagagttctcggagtaacccctccatccaagccacgctcaataagactgtgctttcctcttccttaaataaccacccacagacatctgttcccaacgcatctgctcttcacccttcgctccgtctgttttcccttagcaacccatctcttcaccacatagacctgagcaagccaggcctggcttgctcaggtctcctggatcagacagatgggattttagctgctgctttaaatcctagtgctggaataagtcaaggtacttcagttcagctcttgcctctgtcactaatcttgctttatgaactcctttgattttctgaataagttccagaaggttctctattattctgtccttcttccaaactggaaatggctgt

SEQ ID NO: 129157 - DNA, 1444 bp, Homo Sapiens
  misc_feature (1298)..(1332): n is a, c, g, or t
ttttttcacttataaagaaccatttattcatctgttgattttcattcattattttcatcaattacaatttttcctctcctgcatcagaggaaatcacaaaagacctgacagatttacgtagtcaactgagtgcgtaggttgctcaattagtagtacattagtgagtgctaattgataagagatcattttttttcttatataaggatatttatgacattgtaaatgccctttggaccaactcaggacaaggtacaaaatggggcccatggatggagctgtgagcccagctcaccactgttcaactctcttctctgaaacaaattgtccatggggaccctcagcatctgggggcaaaagggccaagtacacaggggtctctgcaccttcttctgggctcttggtggccttgggtcccgccatgtcagttctcacccaccctgggcagcaggcattcaggaggatcttgtcccctttcctctgctcactcagtttcctggcgtggatcctggacagaacggtgacgccaatcttcgtcaccccgtatgcgctgctgggccagccctccttctggtgcactcccttctttgtatcctccacaaacttgttcatgagccccaccagctcctcctcagtgatggtctcactgcggaacttctgctgcagctctgggctgcagcttttaagggctctgacgctcatgatgctagatacgttcaccactctcccttggggttttattagagggagtaattctgtgcacacatctcgggtaccaaagaaatttgttttcatcgtcacttcagcttgaatatgaaagggtgtgggatcagcaaccttgaaggcgatgcccgcgttgttgaccagcacgtccaggcccccgtactccttgcgcaggaagtcgcgcagggcgcggatgctctgcagatcgtcgatgtccagctggtggaagcgcgggctcaggccctccgcctgcagctgctgtacggccgcctggccccgcgtcacgtcccgcgccgtgagcaccacgtcccccgagaacagccggcacaggtcgcgcacgatggccaagccgatgcccttgttgcctccagtcaccagcgctacatggatgccggacgacatggctgaacggggcgcgcggaacacctgcgtggagaacagacctggctcaggcccgggagccccgcagcgtgttccagagactgctcgagtctggcggtcgtgggcgcgcacccgtgggttacacccccggccgtaatggccgaattcccgggcatatgtccggtaccgtcgactgnnnnnnnnnnnnnnnnnnnnnnnnnnnnnnnnnnncgccgcttcctcgctcactgatcgctgcgctcgtcgttcgggaccataaattaaaaaaaccgggacagctttaagggccggcccacaccctaatttaatgtggatctgattt

SEQ ID NO: 129158 - DNA, 2278 bp, Homo Sapiens
  misc_feature (958)..(971): n is a, c, g, or t
  misc_feature (2161)..(2195): n is a, c, g, or t
gagcaggatctggaactcctaagccggctacttttacaccaacccctccatccaccccacaccctcctgatgctcagagctcaactcctagtaccccttcagccacccctactccccaagattcaggcttcacccctcagcccactttgttaactcagtttgctcagcagcaaaggtctctgagccaggcaatgcctgtaacaaccattcctctttccaccatggtaacatctataactccaggaaccacggccacccaggtcatggcaaactctgctggacttaacttcatcaatgtagtgggctctgtttgtggggcccaggctttgatgagtggttcaaaccccatgctgggctgtaacactggtgccataactcctgcaggaataaacctgagcggccttctaccctcaggaggtctgctaccaaatgcactgcccagtgcaatgcaggcagcttctcaagcaggtgttccatttggtttaaaaaatacttcaagtctcaggcccttaaatctactccagcttccaggtggttcacttatttttaacactctgcagcagcagcaacagcagctctcccagtttacaccacaacaacctcagcagcccacaacttgtagtcctcaacagccaggggagcagggttctgagcaaggttcaaccagtcaagaacaggccttatctgctcagcaagctgctgttattaaccttactggagtaggaagttttatgcagtcacaggcagctgcagttgcgattcttgcagcatcaaatggctatggcagcagcagcagcacaaacagctcagctacatcatcatcggcatacaggcagccagtcaaaaagtaaaatgaagagaggcacgccaaccactccaaaattttgagtcttgcattactttttgttccttttttaaaaacacaagagcactgaatcaaaagaattgagtttctacnnnnnnnnnnnnnnaatgtgtcagtattttacattgctagatgtacaaactttatacagaagcacaaccttatcatttttaaataaaaacagggaaatggtttaacaaactagggttggtttgcctaagtcattgctttttaaaaatggtttcactatacataatatatatggaagtgacctaagaaataatagaaacatctttcagaagaatgtagtttgatatttatttagtataaaacgtttgtgcacagtgttaacaaatacaatttttacaaatctgttttgaaaatgtggtggctgtttatttgggtttcatactcttaattacttcatccatcagttttttaacttctttgtgtcttgtaactgctcggctcatacagtcctgaagtttagctccagttagcccacttccacctggtttgtgaagacaacagagtttgccttcctcatccattactattgttaaggttcctgttgccagatgttcctcctctccagtagggtcaactataagcaaagtgtcatcaaacacagcaaaggaagttgcaactggatgagttctaatattcaaataacttttcttctttaaattaacttctgctaaagcagtttcttcatttatagtaacttcaggcaactgtacattttttaaagccgctagcaaagcaaatgtgcaggcatccaaaatgtttccatcgtagtcgaggcaaatgagatcacagtatagaacccagacaagctttcctggagaaatgcataagtcctctttctgaattatctgtgaattttcaatgacatctgcaatgaactggctagccacttgggcctcttctccaggaggtccagaccggaatctcgatgaacacaggggtggtagatccacattaggaacaacgtatcctttatcaggggcatctgttgatggtgctgcaaattctgctttaactccacagattactgtagtatttcccaacttcactaaagcagaaccatctgcggtactaattgaaccgatgttgacagttgtggttctgaattcaccaagttctcttccatcaggacggcagttctctttcagaaatctcctgtaatactccagaggttccacggttttgaacccagccgccatcttcccgcccgcgcgtctccccggccgtaatggccgaattcccgggcatatgtccggtaccgtcgactgnnnnnnnnnnnnnnnnnnnnnnnnnnnnnnnnnnncggccgcttcctcgctaactagcttcgctgcgctcgtcgttcgctcaagaggatggcgccactattggtcagatacgtttgat

SEQ ID NO: 129159 - DNA, 879 bp, Homo Sapiens
cccaagtttttgttaaaaccttccctggggggtccggggaaaccgcgctggggcctcaataccagtcccggagaagttttaggtccccaggttaggccccccttccccacctgggtttggtgaagggccacccaggagttttgccttccctccatccaattactattggttaaggtttcctggttgcccaggatgttccctccttttccaggtaggggtcaacctataaggcaaagtgtcaatcaaaccccagcaaagggaagttgcaaacctggatgaggttttaatattccaaataccttttcttcctttaaattaactttttgctaaagcagtttcttccatttatagtaaccttcaggcaactgtccattttttaaaagccgctagcaaagcaaatgtgcaggcatccaaaatgtttccatcgtagtcgaggcaaatgagatcacagtatagaacccagacaagctttcctggagaaatgcataagtcctctttctgaattatctgtgaattttcaatgacatctgcaatgaattggctagccacttgggcctcttctccaggaggtccagaccggaatctcgatgaacacaggggtggtagatccacattaggaacaacgtatcctttatcaggggcatctgttgatggtgctgcaaattctgctttaactccacagattactgtagtatttcccaacttcactaaagcagaaccatctgcggtactaattgaaccgatgttgacagttgtggttctgaattcaccaagttctcttccatcaggacggcagttctctttcagaaatctcctgtaatactccagaggttccacggttttgaacccagccgccatcttcccgcccgcgcgtctccc

SEQ ID NO: 129160 - DNA, 1141 bp, Homo Sapiens
  misc_feature (501)..(511): n is a, c, g, or t
tttttgaaggagcaatcacttttattttttcagttatattaccaggttatgtatttgagatatgatttctcaaaagggaagtaactcaggcagaatccatgcttttaacaatgggtccttggtctagaaggatctgcgtggggtttaaggccctcctgtgactctctgatgagaaggcaggcaggcaggcatgtcacagaggaaaaggcagataagaacaacgtgctgggtcatgggaggagactccacttcctatgccacatgcgcagaggcatgactagggccccccgcacgactagaaccgtttcattcatagcaagcctggctacaaaaaggcagaagggctgatagtcacctgacacacattgccaccttttctctccccagctagttcaaactcacaaggccatttgcacagcattttggaaagccacccatcccctggatgaaaaagttttaagaaagttagtgcataatctaagggaagggcctcaaagcagnnnnnnnnnnngagtgatggcagcagttgagttttgtggctgctcttccgtgctattccatggggcgccgtgcaacgctgccctagaagcctgggtgcactggtgagtgggcgggaacaggcgggaggctccacgcagtcggtgcccgaagctgagccttcggggaagagaaatgaggtcagctctccacaccccagtgcccctgtgtaccctcagaagtcatagggggatacaaagatggtgaccttggacacgtggttggcctggaaggagcggtccaggtattccgacatgtcgacgtccacctccagcgtctgaggcccctccaggttctgcacaaggatcagatccccagtctgccggtctgaacgctgcatcacaaagtggccgcggctgttcccacccacgatcccaaaccgcaggctgttgggcccagctcggccgggggcagaggctgtggccatgcggaagagcgtgatgggcgtcttcaggttggaaggcagagagaggtaatggaaggagatggtcttgggcagatggcggcagggcctgctgtccatggggcaggggttccgctcacactggaatggagacgtcttcctcgtgccggattcgccacccaggcctcgctacctagaccg

SEQ ID NO: 129161 - DNA, 842 bp, Homo Sapiens
ttttcagagtgtaaagaaaggtttactccttgtatcatcccctccccgtgggactgcttcaattctatcggggacaggccagtccctggaggctgcaaggagccacaaacctttcccagctcacactctgcacccctcagtctctgctgctaaagaatcagactcaggtagatggggtgtccacagtctgtcctcattacccagtcataccgggtagcatggcccgagagagcccttatctctccccaccttaaaaccctcagcatcacacagcaggaaccagtccacagggcttaccaaggatacgcagtgaaaacagaataatgtctgttacaaaccccctaaacctgagatggctgaagagccagattcctgcaccccatctgactcccccaggcagtgggagatgacccaaagcccccattccctgggcagagtggtgtgcctggggaggcctggcagtggtgctgtgccatgccagaccttgtcctgccagtcagtcagtcctgttggttgggttgagccaggagcacccacaagtcatcaggggctgtggatttgttgcttgccgcgtaccgctgaagttcaaggtagctaaagggtggagtccatcagtgggtggccgttctcgggaagcatgatgcgagtgctggcacctccctgggcagaggatgtatagtggacagactcgcgggtggactggcggaggcacgcgcagcagagaaggcggcggaaggtgcggcgcatctcagcatctcggcaagagtacacagcagcattgaccagtgagttggcctcggccaacagtaggaagtacttttctacagccaggacattgcagg

SEQ ID NO: 129162 - DNA, 1378 bp, Homo Sapiens
  misc_feature (136)..(145): n is a, c, g, or t
ttgagatcttattaaatgttttatttcttaacattcctacatattaataaatgttctatttcttaacctgatagtgggtacatgaatgtttattattctgtaaatcatattgtgcttatgaattgtttcacaattnnnnnnnnnnttcatcccacctattccctttgctcaggttccatgctcattaaagaccattctggtgatgctctgacttctattgtagctttgcctccaataagcaaatggacattggtccatttggcatgtgtaattctctttttagagtaataaactggtgtacaagttttattttagaaaaaaagtattaataaaacaatgaatgcttagttcacttaattactatgttcttataaatgaaattaaattggtctcaaaatatatcctcttagagccaatgtatcttctgcaactaaccaaattcattctcagaatcaagaccttttcgacgcttcaatttccttccatattgcagcttcaatttttgaagtatcatattccctcatcatatcaaattcaagccatggctgattccacttctgagcttctttcatttgctgttcagttaaacaaagatcaaatctgattcctttaatattaaaatttggacgttccccagcgtttagaccagggcttaggcttcatttttactttcagctcattaacaggaactttttggttaggctcttgtactactggcttcatattcacatcaaaagtgctatattcaggaagggcatctcgtaagtatagcaagctatcatccagccgtttctctaatttgaccacctgaatctcctggacccgaggattataaagttcaaagcaaatctcgacaccttgtccttcgataacattcctaaggatgaaagtagctccaagtcctcttcctgatctctgaatgcaaatccccagaaactggctgatttttccactggcatatgggtcagctgtagtaacacgaagaatacttccaacatagaactctggaatgtggagtacttttctcctttctaacatatcttttctttctatttgaaatttcagaggatctgttcttccccttcgaggaatgaattcaggactcaagaacctgcgttccggttccacggggcggtgcttgtccacgatgaccggtttcggcggcggttggaacgcaccgggctcggaaggcccagtgctctgctgccggacaggccccgcgtggaccctgcaggcgatagaggccggcggggggagcagagtcctggcggcttggaaactccggcctaggcccattgcagcccagtgccccgctgcaatgcaggccgccatgccagctagccggacgcgtgggtcgacgatatcccggaatccgacc

SEQ ID NO: 129163 - DNA, 745 bp, Homo Sapiens
caaagtttgagtgctttattagaatttttaaatgaggcgaactatgattttaatttcacatcttggctaaggagatgccactggagtacagagataatctcctgtcttaagccacggatcagtcagtgtagccctccctacccctcaatctcaagaccctcttacttccgaactaaacaacacaattggcaaatgaagccagcacgaaactgtatcaaaaaacaagagagtctgcagtgagccagtgtattatgtaaccactgtaataagtgattacgtggcctcccatatggacctttcatatcctggtgggagatgggagaccaatttaatagctctgagcatgctccatggtgcaatcacaagtgccatgccaatacaaagacaagcaagcaggtgaatttccctagtgtacttttcaggaacacggttactcagttcagggacaggactacattgatgcacctgcaaagtaaagttggatgcttcagagcacatggatgatacccaggtcagcacggtgtaaggcatatatggacacaaagagaggccattgttggcaataaatagcattacggaaaagattccaaaccagcagaacagaaatggacctgatgctccagttttttagataagtaatcccaagaatccagttccaactctactgtcaacatgtggggcagaattcaatttctatcattgtttttacagatctgggctgaggccatttgctccttgcttggtt

SEQ ID NO: 129164 - DNA, 954 bp, Homo Sapiens
gttagcgccaaaacaaaaataggtgttggcggggcgagagacacgagcggcgacgtaatgtgcgtgaaatgcggcggcggtggtggcggggtggtatggggcgagggacggatgcgccctaatgtgcagggacccgggggtggcccttgggggagaacagcggtagagggggcaatggttccatttgcgccggggtggggaccggcggcgccaagggggaggggtttaggaaaagcttgtcgagggaccgaaggcggcccggacaagttattgttttgggaggatcggtttggggggcaccaacagatggtatttattggctgaagggtactttgggagacattaaaacaccaaaggcagctgtttgtcctacagcagaagtcctaaaagattccaggacccactttatttacctctctttcttctaatcccgagtctcagcagcccggatgtcttcctaacactctgcacatcattcttctcttccgaagctgatgcacctatcatatctgtgtccaaagcttgcctttcttattccctcacatttattattctcaagatattttacatgaagaggtccatttctaaggacttcgtggaacttgagtcagtgaatcataaaataataagggcaggatactgtgaacctgatactcgattaaccctacttacaacaaatgagttgcagaaccaagatacataaaagagagtggcattgttcttttccaacggggactcctggctgctttcgcactggtataggggaattcatgtagcctgtgttggaaacactcctcatcagacactgttttccctaggacagaagttaaatccccccaccgagaagaaaacctcagatgggacgttcccccagagggtagggcatgcactaataaaatcctaaactaaaccatcccatctgcccctgtgtgtccccacatgttacattcttta

SEQ ID NO: 129165 - DNA, 764 bp, Homo Sapiens
  misc_feature (653)..(653): n is a, c, g, or t
ttttagaaaagccaaaaactttaatttcaacatgagctacatggtcatgaacacaatgcaacgcgaccccactccaacccaagggccccagaaaccctccctccctaaaggcctgggcggctgctgctccaagagagggaatgagggaaaggtgggtggatggagagaggcccccagcctaaggacccaggctcctgccttcccaccacccgtccaggaagcagtcataaagtgaaagggctccagaggtgatgctcacagccctgggttcggctccattctgacctccctgaagcgctgggttagacgggcaccatcagcccacctcacaggctcggcgtcgggtgagctcgtggacgctaatgctttctgtccactctgaggtgctgctccagatgtggggccctcccagagggcctcggagacaccataggggaacagggagaggggctcggtccctgggcctgacacagcactgctgctcaataaataaatgcaggtgaccttgcctgacgcaacagctgtgcctccagagggggtgggactcggtactgtttctgacacggaaatgcacccaggagctcctggctgaagggaattggcttgtgaagtacataaccaccccctaagccacctgctccacctctgggtgntaaagagtgagctctgggctgttggagaacgagttcagtcctgccaccactacacagtgggactcaggcgagcacttccctccaggactcagctcctgctttgaatgggga

SEQ ID NO: 129166 - DNA, 729 bp, Homo Sapiens
ttttttgtataaagaggactttattttcccagagttctggaggctgggaagttcaacatcaaaacatcagtaggtgcagttgtctgttgagggctcatgtctgtttccaagatgatgccttcatgctgcatcttttggaagggaggagcattgtgtcctcacagagcagaaaatagaagggccacaggacaaactccctctatcaagccttttcataagggcacctgatcccattcgcaaagctctatcttcgtgacttgacttaatcacttcccaaaggtcccacctcctaatacttacactgtttcaacagtaaacagtttatgtagagtttcaacataaattaaggaggggacaaaacatccaaaccaaggaaggctgggagggaagccagagggaaagtgcaagaggaggtttggtggaggtgtcctagattgtttgcagtccaaggaggttggggagagtgtaacaggcctgccttggtatccctgctctgcagtcactggctaagagcagtccttagaaagcacagcctggcacaaatacaacaagaatatgtgctcagtaggaaagagaccacatttccccaatagcccaggtaatgccctcccctcaactggcatctctgttccctaacattgacctcttttctctgaatctcttggggacacatgggttgaattcaggttctctgtagccctctggattctgtctgcctctgttatcctc

SEQ ID NO: 129167 - DNA, 929 bp, Homo Sapiens
  misc_feature (507)..(523): n is a, c, g, or t
tctgccttttctgagtcatttcccagttcagtagctggatatggagacatttacctcaatgctggtcccatgttgtttagtggagacaaggaccatagatttgaatatagccatggtcctattgcagtcctggcaaacagcagtgacccttccacggggccagagagtactcatcctttgccagcaaagatgcacaactataactatggtggtaacttacaggaaaatccgagtggccccagcctcatgcatggacagacctggacttctcctgcccaaggacctggatattcacaaggatacaggggacatattagcacatcaactggcagaggcagaggcagagggttaccatactgagtatctgtttttcctcaggcacatcatttttatctggaaagacttttctagctgcaatttaaggcagcaatccaagagacttgaataataataattcaacaacagctttatttttatgtggagaagggtcttgcatacaatagtttnnnnnnnnnnnnnnnnncctttgcttaaattcatgctgttctaaaaactagatcgattgtacatcttcacaaattctagttaacaattttattttgtattcttgcagttttaagtggatgctaattttaggggcataagccttttatggccctcttgcagatcttctgaactatgcacatttgtgctttttttgtaagtttggaccaacttttatgtaacaaacagcccctccccacctccagttttacaacaatcagaaagggcactgatttatttggtatttttctttttacaaagctacctttagtcaaaggtcactgtcagtctttgcacctgctttcagtgttattgtgaaaggtgtactttgtgctcatttcagaaaataaaacacaacctttctcttgatgcaacagttttataaa

SEQ ID NO: 129168 - DNA, 1200 bp, Homo Sapiens
  misc_feature (1118)..(1118): n is a, c, g, or t
gaaaaaagcatcatttatttcaaagtacaacacaaagttgtatttttaagaaatacacattcaatcttgtatctcaagacttggctatgtgcatttcagttcatctttaaaataagttcaggtatacaaatgttacatacctcaagtacaaacagcacagaaaatgcatatggtctcgactgaatgtttttacattcattcactgttcttaagttgacttacatttctgtaatctgcttttaaaccaagacagccttactttaaaaaaatactctattttcagcacaaagtcctcatacagttttaaaattagatcttggcgcataatattgagaaattattaaaaaccaaacttggtaatttaacaaaattgtcacatgccaggatttctgaatcaactcaaattatttccttagctgtaatgtcaaatctgtgttcatacagataaataaagcatggggaagacaggtggtgaaaacgcagtaacgggaaaggttctcagatgtacaggtcttattagagtttgtggctgagtccagacttttctctaaaagcacaacagcaaatctcatgttatcataattgcaagaaagatctgaaagaagcgagtggtctgagcctgccctgcttgggtctgttttgcacagaagaggagggtggggaggggagctgcagtaagagccttaaaaagatgtctcagaaactggcacatcatgatctagacgagggcccactatgtttgtttgttttttgcttaatttaattctcgtgaggaaagtgcgaattagaccaagggtccgagcttcttcttccaatcgtggggctccatatccgccacgggttgtaggtctgtcccaagtcgtcagctggactggaggtggagggagcgtgaggagcaggggagttttctgtgcccatgaggccgatgcttgccagcgtgtttgctggagtggtgaagggaagggcgctgctaaggttgctggaccaaatggagctgctgaatggagtggtggaccacaggccgctggtgttaccgaggaccgatgtggctgtgtgggtcggggagccggaactggctggccaggaaggactgggatctgtcgctggcgactcccaanaggtatgaagggccactattaaactcgttccagctcctctgtgagcctgatccacgatgagatatccgcgttccagtttcac

SEQ ID NO: 129169 - DNA, 547 bp, Homo Sapiens
ttttttgaaaaaagcatcatttatttcaaagtacaacacaaagttgtatttttaagaaatacacattcaatcttgtatctcaagacttggctatgtgcatttcagttcatctttaaaataagttcaggtatacaaatgttacatacctcaagtacaaacagcacagaaaatgcatatggtctcaactgaatgtttttacattcattcactgttcttaagttgacttacatttctgtaatctgcttttaaaccaagacagccttactttaaaaaaatactctattttcagcacaaagtcctcatacagttttaaaattagatcttggcgcataatattgagaaattattaaaaaccaaacttggtaatttaacaaacatagtgggccctcgtctagatcatgatgtgccagtttctgagacatctttttaaggctcttactgcagctcccctccccaccctcctcttctttgcaaaacagacccaagcagggcaggctcagaccactcgcttctttcagatctttcttgcaattatgataacatgaga

SEQ ID NO: 129170 - DNA, 512 bp, Homo Sapiens
  misc_feature (117)..(329): n is a, c, g, or t
  misc_feature (360)..(427): n is a, c, g, or t
atataaaaatattcataaaaactttattttcaatagcaaaaatcttggtaacaacgtaaatgttcatcaacaggtaaatttgttcatcaacaaatcatggtatacctatacaaaaannnnnnnnnnnnnnnnnnnnnnnnnnnnnnnnnnnnnnnnnnnnnnnnnnnnnnnnnnnnnnnnnnnnnnnnnnnnnnnnnnnnnnnnnnnnnnnnnnnnnnnnnnnnnnnnnnnnnnnnnnnnnnnnnnnnnnnnnnnnnnnnnnnnnnnnnnnnnnnnnnnnnnnnnnnnnnnnnnnnnnnnnnnnnnnnnnnnnnnnnnnnnnnnnnnnnggggagagggagaaggaagagtgagaaattnnnnnnnnnnnnnnnnnnnnnnnnnnnnnnnnnnnnnnnnnnnnnnnnnnnnnnnnnnnnnnnnnnnngtttcatggaaaatgtgtcacaaccttattgtaaaggttaaatatgtgaaatgtattctgtgtcaattaaagtgttcttcaaatt

SEQ ID NO: 129171 - DNA, 657 bp, Homo Sapiens
  misc_feature (601)..(611): n is a, c, g, or t
tttttagaagcagatacacaaaaacttttattaagtggaagttagacttacttcatggtaattaaccagttacaagtgcatttaaattcatgtgtgtggacactgtagaagtcaaaatggtcttttgaaagtccagtgttctggctctgtttgtgccagtgcaaccccaggtagaaccatccacaaagtaagtacaggtcaacaatgatatcagactagattggcaacaccatattcattgttacaagcattacagaacagaaaagtccaaggaccagaagacgattactaaagtgattctgactataagccttttcttctacttaaatgcttccagaggaccagtgtagcaaatccttaactctggggggacagagccacttctgcattttacacttaaacgggccacagaaactgtaaacatttggtggtctcttgatgcccatttcaagtagatgccagctgtccccttgggaaagtgcagtttaactggtatgaacatttaacattgtacatcttcgatctgaaaatttccttctgtttcaattagcaccagtgtatttaaaaatatttttcctggtgttaaatatttaggaaacannnnnnnnnnnacaaaacgaacacacaaagtccataacaatggaaagcacaagaaat

SEQ ID NO: 129172 - DNA, 580 bp, Homo Sapiens
  misc_feature (420)..(420): n is a, c, g, or t
  misc_feature (452)..(452): n is a, c, g, or t
attgggaacattttatttggaaagattttgagcatcattctcttttcattttttattaaggcagtaacattctttcttcctggaggcggaggggggaaatcatctgagggccgtttcaaacagcagacatagaaccaaagtgtcatcaagccaggtatttcagcttcctctaagggaagactccaacagggggagtcaattacagcaggataggctgcctttaaggaagtgagctccctgccatcagagggtctcagagagaggtgcattaggggatgcctggggccctcccaacccttccctggggttctctgatcacggttgcaaagctcaggaaggcatttcagcccaacagactcacactgcagcatagagactcccacaggctgagtggaagaaacctcgaacaatggtgtgcangacaaaggtcacaaactggaggtgtaagttgntgatgagacaggtgatgccaaaacccacaagcagcaggttggtcagggtgaaggcactgatggcattggtgagcttttggatcttgcagtacgtcggctgcatctcccaggacagtgccctgaattgg

SEQ ID NO: 129173 - DNA, 2925 bp, Homo Sapiens
  misc_feature (43)..(43): n is a, c, g, or t
  misc_feature (94)..(94): n is a, c, g, or t
  misc_feature (156)..(156): n is a, c, g, or t
  misc_feature (195)..(195): n is a, c, g, or t
  misc_feature (202)..(202): n is a, c, g, or t
  misc_feature (2238)..(2238): n is a, c, g, or t
atagaacattaattgaaagatttgacatcatctctttcatttntataaagccagtacatctttcttctgagcgggagggggaaatcatctgagntacagtaagtcatctgaaagtcaaacccaaccaattgtatcagaaagcagcaaaaatactgntattggctgggaggagccacatgttgctttctgagtcanctgccanggacagatccagagcaatgcatttcaattgctttgaaaaatggctaagttccattacataccaccactaaagaagatacctcattgatggagcttttcaccatgatagagggcgtcttgcattggttcacaatggcctgttgctttttagccttcagttgttttagggggaaattgctcaacctatgagacctgctcaaattcatactgttctggttttgctttggaattctttgtccagtaaattagctcttcataacgcagttccaccatttcttatccagcatagattcattctgcccttgacagctggctaggtgtgtgtgtatgtgagtaggggtgctattgattggcacatattttcccccctggagtttaggggtggcagaaagcttttatagtaccaaaaaagtaaacattgataatatggcctgacaacaatcagatatgctaagctctagaagcaaaagcaaggtaggattgcctccaaatgttgacaggtattagccataccacagtaactagatctaatgtgagggctaaatgcctggagaggcagaaccctaaaggatgcttagttatagctccatgctgccgccgagtggcttgatgctccattacaccctccttggatccaaccttccattaaggctgaaggctctagagggcagagtattcaagatgttagatctggtccaagcccaaattctagagttaaaagcagaggggttcttagtggctgaaaaaaaaccaaacctgatgacatttgggactccagttttgaggaaaggctctgatgatgaggcttacttctgcaggctaccagagactcctgagacttcaacagcttgactgatttatcacacactccaagtggcccagagacaaggacggccagaagagatgggcccccccggaaggcatggttccaaaagtgtgaggagcaaagtcatgggaggcagggtaggaagaggggacagaaagaggggcttgcaacagatcaaatgctgacctccaggaacagggtttagggcaggtgtgatgtttcccctcctggccctcatcttgaacaaagaaaagggaagccacatgaagctggtttgaaagattatatcaaaattaataccactgcagcttctatccttggctaatggcaaaagcgagaagggtacctggaaaataacttctttcttttcctctagattttcgaagaagcaaataaatcaagaatagaaacctatatataggaggttgggcctcctgcaaagaatgaagcactttttgttaaatacaggagaggctacttggctgcactaatatgtgctttttggaatcttatagagtgtcaccaagttgaactttggaatggcttgaatcatccctggagcatctgtgccgggcagtcaggagtgagtgcaccgcctcccacccagccccattgggcctcacaccctcttcattcctttccccatgaggcaggcaaacacggtcatgaccattttggggttcacttcaaccaggtcttctggcagggcatacactcttgctccaatttttcgggccatagagatggcatattttgcattgttgagtttctcatcatcattcagattttctgtcttcagaaggtcatagttaatggaacctggttggatggcatcgatgaggtccagaacaggcagacttgtactaatcttcgggtccttgaaactagagatggatgaacttttctctgcttccctcaatgtttcattcacccagttgacaataatgtcatcattgaccttctggccaccaccaatttcttcgaggatattcagtgtataccttctcattagctgccaaatcaaggccagtgtgagagtgcggtttccttcattgagatcttgtccaccgatgccaaccagggagaacttcgcttgattcttccccaattctaccgcgtagttacaattctcaagcttcttcatattgcctcccagtttggggtatggcggtttgtttactctgttccagtccccaggaactttgatcttntcatagagctggaagatgaccagggcatctgataagtcactgtacaaatgattgactcgagggttaacacccagggagttcatccagttcctaaatgtccgctcttctctcgtctcaccttcaagagccccccagtcaatgtcctggttctctggtttgtgcagggcagggtatctgttaaagaggttggcaataaaagccaagttcaacttggggttccctcggacaacatctgtggctgtgacaaactgccggcagcccagcctctccgcctgctgcagcatgcattctgccctctggatgtcatccttctcccgcagtcctgacatgtcaataacaacagcaggaacaccttcttcatctccttttggagccacctgctcaagcaggtggtaataagcttttgagtccttgatgtcagtactgaagttgccaattttgttgcagcctgcattttccaggtggtaattagcccacctcagcaagagctcttcaggggagagtttcatcaaatcctccaggctctcaccttctctcaaaagagcaatcagagcttcatttctgctgagttcaatgtcagcaaacaacccaatcttgatgacttgccacagaagtcccaggaccagataaggcttcccctccttcaggtcctcagccccgggacgcgtggtcggcgatatcccggga

SEQ ID NO: 129174 - DNA, 910 bp, Homo Sapiens
ttccctcccaagggctgttcccccttggttttcaaaaaggacgcaaatccaggagctttcattttcgtggcggagttccaatgttcaagcaaaccaaccccaattctggatgaacttgcccacagaagtccccaggacccagataagggctttccctcctttcaggtccctcagccccctatgttgaccacatggcaccccgatgggtgaggcagagttcagagccaagttcagattttcctgaatggtgaaagggggttagcttctttttgtggattgttctttcatcaattgtgtctggcactgacaggttgatcattttacaaaggacaatgccatctccgacagcattaaagagatccattcgtgtttggggttcattgggatgacatgccgacaatcaggatcattttccagggctttgtttatccagttgacaaaggcatacttttcttcctctgaataggagtgttgggtgccaacgctagactgctctgaagtaccaccgattgcacaaatcccttccttcttattgattgcttttctaaaggtcttggcaacatctgtgctttttaggccatggaaaatcttgataaactcatcaaagctgatccttccatcttggtccagatcacctgtagccatcaggttttctgtaatttctcgtactctatacccaggcaaaggcaagcaagcagccttgaacaagtcattcaactcattgaagctgatgtatccattgccatcagtatcaactttggcaaaagcttctctgagctccatcatttcctcatcggacactgatcctctggccattttttattgctttaggtaacagatcttgcaggaaaaaagctgtccttggtagtactggtgtatgaccaggaaccccttctttctgatctgcaga

SEQ ID NO: 129175 - DNA, 1044 bp, Homo Sapiens
tgcaggcctgtcagcgtcccaaagtggttggatgggaacactgcagcatagagactcccacaggctgagtggaagaaacctcgaacaatggtgtgcaggacaaaggtcacaaactggaggtgtaagttgttgatgagacaggtgatgccaaaacccacaagcagcaggttggtcagggtgaaggcactgatggcattggtgagcttttggatcttgcagtagcgtggtctgatggatttggtagcaaccccgtcccgtgagtgaagtgaacgttaggcagatgccaccaaagccattcagggacagcgccaggaatatcaacggagacagagcttccacgtcccgggaggccagggccatgagggtgcaggacgcagtgaagcaggcactgccaaccagccgcacgggtcgggggccaaagcggtccatgaggatccccagtggcagggtggtggcgctgagcacgaaggaaccaatggtgaagcccaggttgagcatctcgtcctgctggtcacagcctggccacctgcgctgctcatcctgggtggtgttggtgctgctctcagctgggcacgtgctggaatagaagccctcgttcttcagaatgatcaacagggagccccagcccaggagtacagcagagaagaagaggttctccagcacagccgtgcaggccatccaccagcgcctccggtacgcctgttgcagcgtgggggccatgctggccccgagcctccggtcaccggcaaatgagcagccagcagctgcggacgcctccgggagcgcaacgctttcgcggcgcgtccggagtcccgtgggcccagccctgagccgcgccggcgctggggtcttctctgcgtgcaggacccggcggccacggagcttcagcctgacagcccggtggcctcgcctccgctgtctcctcggaagaagcgggggaactgggaacccgccgggcgccagaggtctgcgaagctgggcttggatgaagtggatctcctcgtgccgaattcggcgcgccgtcgacttcatactctctccccc

SEQ ID NO: 129176 - DNA, 1290 bp, Homo Sapiens
  misc_feature (194)..(206): n is a, c, g, or t
  misc_feature (402)..(493): n is a, c, g, or t
ccctgaaaaattgttcctcaatataatgtcccttgatgcgaccactttcttcacacccccctttataaacaccctctttttttgaacacccctaataacaccctgtaaattgttttatattttccccctgaaggggcctttcaataattctcctcctcaggagttgatatgtttcccccaccaaatagtatgtnnnnnnnnnnnnnagcaatgattttggggtttctcctccttccacacaagaggttttccccccgatacacgcacttgtttttctccacccacgcacggccgcgccgtgtgtttaaaacacgtgcgcgccgccctttggctcctgcggtcttttattatgcgccgccccccctctattggggcgcccctcttggtcaccccaagcggggnnnnnnnnnnnnnnnnnnnnnnnnnnnnnnnnnnnnnnnnnnnnnnnnnnnnnnnnnnnnnnnnnnnnnnnnnnnnnnnnnnnnnnnnnnnnatagggaacattttatttggaaagattttgagcatcattctcttttcattttttattaaggcagtaacattctttcttcctggaggcggaggggggaaatcatctgaggctacagtaagttcaatctgaagtcaaaaccaaccaatttgtattcagaagcagcaaaaatactggttatgggctgggaggagccacatgttggctttctgagtccactgccaaggaacagatccagagcaatgcatttcaattgctttgaaaaatggctaagttccattacataccaccactaaagaagatacctcattgatggagcttttcaccatgatagagggcgtcttgcattggttcacaatggcctgttgctttttagccttcagttggtttagggggaaattgctcaacctatgagacctgctcaaattcatactgttctggttttgctttggaattctttgtccagtaaattagctcttcataacgcagttccaccatttcttatccagcatagattcattctgcccttgacagctggctaggtgtgtgtgtatgtgagtaggggtgctattgattggcacatattttcccccctggagtttaggggtggcagaaagcttttatagtaccaaaaaagtaaacattgataatatggcctgacaacaatcagatatgctaagctctagaagcaaaagcaaggtaggattgcctccacatgttgacaggtattagcccataccacagttactagatctaatgtgagggctaaatgcctggagaggcagaacctaaaggatgct

SEQ ID NO: 129177 - DNA, 867 bp, Homo Sapiens
tagtacaagatggggatgacgaggttataaaatattatggggactcaaaggaggaatacaccatatgcagtcagaaaagggttgctttacttctcaagctgttaacacagagaactgtacatactttatacttatactacattaattgcttttgcgctcatcaatcttggtgaattagtaataaagactaagtcccatgtcattgtcaaaatccaagcaaactttcaaactcattcatgagatatttattaaaataacacatttagggaaaaaaatcaatacaatgtatacatcattactgaaaactgtataccatcatacaaaaaaggattttattttgggaaattgttttctaatttatggcaagttttactttcagaaataaaaccacaacaacacaatctaattcaatcttaaaggctggcatgctgagcaaggaatgttcttattctttgtaggagctccttctttacactgtcaggtaccagggctctgccttttggagtgatttcagccaccaagtcatcaacagtaacgtgttctagtcctttttctttaattacctctttacagtgtgccttcaactgatccttccagccacattcaattaatttagctctcagcaactctttgaggcgttctctttctccagtttctatcaacttttggttaatcgctgctctcatctgcgcatctttgttcatcttgctaaccaccatcaccgcgggcgagggccgtcccttcccagcgacgaaatgacccttgcgctgaggaccgttacctaccacactcttcggctgcccggacttagaccctcagtagctcgggcacctaagcacacagaaagctagaacacgcatttccccc

SEQ ID NO: 129178 - DNA, 683 bp, Homo Sapiens
  misc_feature (61)..(78): n is a, c, g, or t
gtgccatgctaaaattaaccctcaactaaagggaataagcttgcggccgcggctgtaggcnnnnnnnnnnnnnnnnnnctttcctataaaattttatttattacataaaaaattctatacatttgttagactaaaatacagttttcattataattctggcaactgagtcagtacacagagaaaacttagcattagatcagcacttttctttctagttcgtatttctgcacaagaaaaacatttcaaagctccgtttcatataggctgattgttctctgaagccagatggaattccatccaattcagagctcttggaagttaatttcccagcaagatttgataactccaactccagaaagttaattgcttaatatacatatttttaaagtcctctgagagcataatgctccatctgtaaagtctgcactgtgtcaataatgaccgtcacaaatactagggctacaactgtgtctgtggggcatgttcaagcacctacatgtttgttcccccacatgaatacagtgtagtgacactgtaataagaaaaaaatccataataatggtaaggtaaatgattccaaactatgaattcatggaaggcttaactgtgatcctccagtttataatggacatagacaagacaagatacaaaaattcatttttggcactatgaaataggatgca

SEQ ID NO: 129179 - DNA, 1994 bp, Homo Sapiens
  misc_feature (815)..(904): n is a, c, g, or t
  misc_feature (1810)..(1895): n is a, c, g, or t
ccttcttgtctttctcctttttctttggtttgttctgctggggctgagagagggctgcaagctgctcgtgcacggctttgagctgctcctggagctcagccagccgctgggctcgctcctcctcagagtcatcagtcgaactgtcactgtccgaggagctatcgctgctgctgtcgctggatgagggcggggccacaaccttggtgggagggggcactgccggggaggacacggccaccactggctcctcaggctcgtccggcatcttggcaaagcgcatttcgaacacatcctggagcttgcgggccatggccaccacctcatggtcaggagggttgtacttatagcagttggagaacatcaatcggacgtcagcaccaaactcctgagcatcacggtactcacgggcctccagtttagacttgattgtgctcatgtccatggggtgcttgatgatgtcacagtagtcgtgtaggcccagtgcctccacgtccacaggcttgtagaagggccaggcgtaggcggcgtgcttcttggcaaacatctccttgaggatgccgctgcagcacttgagctgctccgagaccttgctgctcttctctggtgctgggtgctgctgagagtcgggcacgtccttctttggaggtttcacaggccggctgctctcccgccgctggcccagcttggtggtcttgggctccgggggcagcgagggtggctcgtgaatggggtcaatggtggtgggggtggtggtgtctgctttcctcttcactcccttctttgtcttcacaggctgtggggtggccgcgatgatnnnnnnnnnnnnnnnnnnnnnnnnnnnnnnnnnnnnnnnnnnnnnnnnnnnnnnnnnnnnnnnnnnnnnnnnnnnnnnnnnnnnnnnnnnaggcaccactgtcatgacaggggtctggacgatgaggtccggggtgacggcagggaaggggtgaggcgtggcctgcacaggaggaggattcggctgaggggtctgggtctgcggaggagtcgatgcttgagttgtgtttggtaccgtggaaacgccaggttttgctgtctctgtttctttcctcccacgtcctcttccttttgcctggactatccatgatctcggttttcttctgtgggtagctcatttattttttgcaagaagagcttttccagagcttctgccattaagactatgtcatctccaggctacccatctcttctgggcatttttacccactacaccagcagaggtcaaaagctgagttctgtatagtgtctccctccagagtcgttctatttgaaagggttgattttaatcacatctgtggtctgaacttgttgtagatgtaacaatttgtaaacatagtgttgaagtcctggatacattcctgagcattccagtaatagttgttttccaagcgcttctttattgttcccatatccataggcgttttaatgatcttatagtaatcagggaggttcagcttgacggcatccacaggctgctggaaaggccatgcaaactggtgtttccatagtgtcttgagcaccactctgagcaggtattgcagttggttggtctgcctcttgggcttgttagggttggaggtctctgggggcggggggttggtgctggctgcgttggctggctggggttgggcctgggcctgtgttgtagacatttgggaagtttctagtccatcccccattactggcagatttctcaatctcgtcccagggccgctctccgcagacatgctagtgatcccatcacattcttcaccaggcactctgagacgctagnnnnnnnnnnnnnnnnnnnnnnnnnnnnnnnnnnnnnnnnnnnnnnnnnnnnnnnnnnnnnnnnnnnnnnnnnnnnnnnnnnnnnntctgccgagctcacaggccgcgctcgcccgcgggcaccgccggcagccgccgcagcccctcgtgccgaaatcgccacccaggcctcgctacctaggacc

SEQ ID NO: 129180 - DNA, 944 bp, Homo Sapiens
  misc_feature (529)..(586): n is a, c, g, or t
  misc_feature (721)..(772): n is a, c, g, or t
  misc_feature (822)..(874): n is a, c, g, or t
cggtacccggcgtggcctgcacaggaggaggattcggctgaggggtctgggtctgaggaggagtcgatgcttgagttgtgtttggtaccgtggaaacgccaggttttgctgtccctgtttctttcctcccacgtcctcttccttttgcctggactatcatgatctcggtttcttctgtgggtagctcatttattttttgcaagaagagcttttccagagcttctgccattaagtctatgtcatctccaggcttgttgtagatgtaacaatttgtaaacatagtgttgaagtcctggatacattcctgagcattccagtaatagttgttttccaagcgcttctttattgttcccatatccataggcgttgtaatgatcttatagtaatcagggaggttcagcttgacggcatccacaggctgctggaaaggccatgcaaactggtgtttccatagtgtcttgagcaccactctgagcaggtattgcagttggttggtctgcctcttgggcttgttagggttggaggtctnnnnnnnnnnnnnnnnnnnnnnnnnnnnnnnnnnnnnnnnnnnnnnnnnnnnnnnnnntgttgtagacatttgggaagtttctagtccatcccccattactggcagatttctcaatctcgtcccagggccgctctccgcagacatgctagtgatcccatcacattcttcaccaggcactctgagacgctaggnnnnnnnnnnnnnnnnnnnnnnnnnnnnnnnnnnnnnnnnnnnnnnnnnnnngctgcctgcgcggcgccggggcccgcccgccgctctgccgagctcacagnnnnnnnnnnnnnnnnnnnnnnnnnnnnnnnnnnnnnnnnnnnnnnnnnnnnnactgcttcggctcctcggctgcgggagaccagaacaaacagcccagccgccgccgccgcgccacccaggc

SEQ ID NO: 129181 - DNA, 1455 bp, Homo Sapiens
acaataggctagtacgaggccgggtgtttaattcggcacgaggcatatgtctcgaagatgtgcacccccaatgacccggagcccaggtatctggagatctgctccggcagatggtcaagacaccctcttcctgagggccaaggatgaggctagtgcgaggtcgtgggcgactgccatccaagcccaggtcaatactctgacgccgcgggtcaaggatgagctgcaggcactgttggcagccaccagcacagctgggagccaggacatcaagcagattggctggctaactgagcagctgcccagatgggggcacagcccccaccctggccctgctaactgaaaaggaactgctcctctacttgtctctccccgagacccgcgaggccctgagccggccagcccgtactgccccactcatcgccaccagactggtgcactcaggcccctccaagggctcagtgccctacgatgcagagctctcttttgccctgcgcacgggcacgcgtcacggtgtggacactcacctgttcagcgtggagtcaccgcaggagctggctgcctggacccgccagcttgtggatggctgtcaccgggccgccgagggtgtgcaggaggtgtctacagcctgcacgtggaatgggcgtccctgcagcctgtctgtgcacatcgacaagggcttcacactgtgggcggctgagccaggtgcagcccgagctgtgctcctgcgacagcccttcgagaagctgcagatgtcttcagatgacggtgccagtctccttttcctggattttggaggtgctgaaggcgagatccagctggacctgcactcgtgtcccaaaaccatagtcttcatcatccactccttcctgtcggccaaagtcacccgcctcgggctgttggcctagaagtcgccggatgcactagccctgaagaggggtgtccatgacatggcctgagctgggcctccaccgactgcctgctcacccctgggctgagggaagggagaggagaggaacaagggcctccgaaaccccaaccctgagggagactggattggtcttggggcccaggacccagacgcaggacagagtggactctgcctgtgatggggtggccttcctgctgcccccctccaccagtgccttttgcagagagatattttgtgtacacagaagccattccgagtctgggacctgcccctgtgcggatcctgaccccagccaacagctgagctgccgggcctcctcgaggcccctaagccacccccagaggtcccatctgaagctggagtaccctggggtcagcagcaagagaaagaagaggagattttctgtttgtttttcccctcagccctgccaccgtggggagtctggtttttctcttcatcctgtctctctcctccttactcttggataaataaacagcctgtgagcacacaggcagcccggcccagtg

SEQ ID NO: 129182 - DNA, 1550 bp, Homo Sapiens
ggtgtgaggacttaaattttgtgttacctcccaagagatactttttgagagtatagaacacagctcttgggagtacagttctctacgttctctactaaatcttaataaatgcttgacatagttacagctttaaaacatgagtgatttgccaggtccttatgttgtcaccatagagcaacaaaggtatagggctgccttcctcttatttatttggggacattattttgttatttagataccaaggcctaattaattaagtacctataagaactatttatttggagtaactgagcctgtaactcaggtttatggctgttaagtatagattggggaatctttattatgtcttctcctaagcagtttaaccaaatgtgtggttagtgtttttttattcccctaagacagaaagaacaaaaaatgttttaaatttctcttatataggaaataatgggaacgtcaaagctctgtatacctactaagtggaaaacaagaccatcatctaagtgatttgagaaattaacaaaagtagtgactacacagcaataattacagtaaattaaataaagattcctttaaggcagacaagggctaagatttccttagcagtaataatgacatacactgaattgaaaatctattttattacagaaagatcagtttctaacaaatgaaaatgtatcacctgttccttaactgtgtaaataataattaaatttctttgaaactggaatctgcaggtacaggtattctttaatcattattggatcatctaaagtagaagctgtcctgaggaagaggaagcttttgatcttaatactagtatctatataaaatggtgtggatgaacaatcatctaaaatcaatctattttaaataggaatttcctcctgaaaagtttcttacttgctacctactacccacaaaggactgatatggtacagtaccgggattgttcaactttagcaaagatctccaatgcattcttcttctcatcacatctgtcagaatctgctaacagtacaagaaaacagacacctatgaaatcatctaacctgctagcatgtcctttagacagcaacctgtctgagggtccttcagaagcacatttacaatttcataaaacttgtgttcgtatgccaacttgtaatacaggtaaacatcttcacaatatgtgagtaatttcttcaggttttccatgaccatgtcagtaggctgatgttgtttatattttttggaaatctcttcaaatatactggactttaataacctttgctgcttaaattcttccaagtaattaaagtctcctttaagaatcacttgctggtataaaatttcagcccaatctggaacaaaatcgtaggcctcagccacaatagaagcctggtagaaccgaggtagggccagaatacagtccatcagcttgtggcggcccaagttgatgagcattgtgttctggccagtgttcagaaagtgaatctgcagagttatcaacttggtgagccgctgacagtgctgggcctgtcgcacacaggagtccttgtgggcgtaga

SEQ ID NO: 129183 - DNA, 1179 bp, Homo Sapiens
  misc_feature (1062)..(1096): n is a, c, g, or t
gcagataatttctttattgaaactatcaggaagttttactatgaaattttacatacatgatggaaagtggaagacatataccaattatattccaggaaaaaatactttaatagtattgttatatagtgtattggctaattccagtggatcctcatctctcactgctgacattatctccaatatttgaattatatggcagggttcatttctgtcttttaagcagtgcccactttcccacttctttttggtaggaaatgcagttcttatatattttgatccagcatgtgtacttttgactccacaccaaggtgcatctgtctcaatcattaatttttcactaggaattgacttcaaaacttccaaattagcttcagttttcagtgagcaaccattaaatcctatataaagatccaagtcaatcaaagcagctgctgcttccttggtaccatcaaatgaatgcaccactccccctacacaccgatctctatttcttttcattatgtccaaaaattcagcatgtgagtttcgacaatgaagaaacattggtaattttgtttgttctgacagttcaaactgtttttcaaaatatttgagttgagtatctttgggacaaaactgcagtcggtcaaaatcaagtccgcattctcctattgccacaactttccctttattgttttcagcaagatttagcaactcctttaagtaaagatcagggttattcttttcaaattcaccacatcttgtaggatgacatccaactgtactgaaaaacataccatttgtttgtgccaaatgcagtgcatctttactgtcttgtagatttccacctgtaatcataaactttttaacaccaatctcgacagctctccctattacatcctgtaagtcatcttgatgcttttgaacccccctataaattcctctgaacatagggtcagtcaagttgataccaatatcgataaacttgaagcgactcatgactgcgcatggaggacctccccagcggaagcccccggccgtaatggccgaattcccgggcatatgtccggtaccgtcgactgnnnnnnnnnnnnnnnnnnnnnnnnnnnnnnnnnnncggccgcttcctcgctcactgcttcgctgcgctcgtcgttcggcttgaaagacgtagcgccctatagtgatttacattttttt

SEQ ID NO: 129184 - DNA, 389 bp, Homo Sapiens
tgcttttcacagccgggctgtgtctgctccagagctgatttatacgcagaatctgcgctcgcttctccgctccctcccccgtcagcccggggacggcgccggacggtcgcggctgtgccgggcaggatcgggtttatttattgcctctagcccggagccggggcggcctggggactgcacagttccctctgcccgagcccctccccttctctccccaccccccaaagccggctgcttcccaggggcctgtcttccccaaacctcttaccagactctgggcggagccctccgacggtctggggtggaagtcggggacggaggcagagaggtggtaaggcgccccaaggggccgaattctgcactacctcgcacggacccagtggggagag

SEQ ID NO: 129185 - DNA, 1551 bp, Homo Sapiens
  misc_feature (74)..(108): n is a, c, g, or t
  misc_feature (152)..(160): n is a, c, g, or t
  misc_feature (274)..(368): n is a, c, g, or t
  misc_feature (375)..(393): n is a, c, g, or t
  misc_feature (399)..(410): n is a, c, g, or t
  misc_feature (423)..(563): n is a, c, g, or t
  misc_feature (1391)..(1391): n is a, c, g, or t
  misc_feature (1399)..(1400): n is a, c, g, or t
  misc_feature (1409)..(1409): n is a, c, g, or t
  misc_feature (1487)..(1487): n is a, c, g, or t
aaatattttatttcgcccagcggcggacaggggtggggactcccccgggtgggagataaaggtttacaccactnnnnnnnnnnnnnnnnnnnnnnnnnnnnnnnnnnnaattttaaattaaaaccccccccttcttttattaaaacagggcnnnnnnnnnaaaggtaattataaatttgggttccgactgggactttgtttgggtaaaagacaggagaatccgccccgacccccctttttggttttttaaaagaagttttctttccgcgggggnnnnnnnnnnnnnnnnnnnnnnnnnnnnnnnnnnnnnnnnnnnnnnnnnnnnnnnnnnnnnnnnnnnnnnnnnnnnnnnnnnnnnnnnnnnnnnnccgcccnnnnnnnnnnnnnnnnnnntttttnnnnnnnnnnnncgggcgccgcaannnnnnnnnnnnnnnnnnnnnnnnnnnnnnnnnnnnnnnnnnnnnnnnnnnnnnnnnnnnnnnnnnnnnnnnnnnnnnnnnnnnnnnnnnnnnnnnnnnnnnnnnnnnnnnnnnnnnnnnnnnnnnnnnnnnnnnnnnnnngaaaagcaaagtatcccttttattataatttctttttacataaccttttcaacctatattcaggtaactacctgtctctcccatgaaaggagaagggtcctgcacattacaacaggcaaaaaaggcttttaagaaataaaatattttaaattgatccattacatttgttcaattttcttgagtacattggaaagtgggaaaaacacaaaaggagaaaaaaatggtatttcaaacaaccagactataataatcttagttagattggtagtacactcattatactttttccccaaacaggtacaaaggaggttcaagtgctctatgtggatgctagtctatacctcgatatttttattttactcccagtactcccacggccatggccagtgtttgcctaaattctctgaagcatatcaaggagtctcagttacgcaaaacaaccttgggcaaccacaaagaagagggatgcacatctcccagaaatattaaatagctgtatctcaactacagtttcagaatttagaaccaccaattcaagatggaaatatgcagtgggaagagttattaaaaaggtaacagaatttgactaagagcatgaaatgtagaactttaagattaaaagagctccctggaaggacaatgaggcatatggagcagaagggaaagcagggaaacggctgagatagtttaattacaccaactctactatgcagcatccctttatcaaaaggaaaaatataaagtctataaaaaatattttagtattgcaaactgctgcataatttattgtaggcaatggtagctataaagagggtccttgacccctanagaaagannagtaagcantttctattagtagactactagttgttttttgttgggaagcgtatagaaggagataatttctccactcagaagatttanatgcattgctttgggtagtgtaatactgagactacatgcatgaatacgggaaagatatggcaaa

SEQ ID NO: 129186 - DNA, 1095 bp, Homo Sapiens
ataagtgaacatttatttatttttaaatttctctctaggcaaacaatggaatgtattggtggtttgctggtgaaccgtttatagagaattcaactccatccatggctggaagagggtctgctgccttccgcagaggtggtctggttctccccacaaatgccccgacagctgaagtgatgctgagatgcacttcttcaggcaggaggatttgctccatgtagcttttcctatacacagggagggcgtttacagctctgcttcatagcagcggatgctgcaggggtatgaggggctgacccttgctgggacaactgagcacagatgaatgtgtcactgagaaggaattccataacacatgtgactttcaaagtttttattgagtccaaatggactgcagatacagtgaggatgctgctgccttttgtgccaatgaattcaggctccaagatccccaggacacccccattctgtctccatctcttgcatctgctttcctttgcaggttgacctcattttcctaatcccattgcccccatgaagctggaaccatggccagaggtagccttgggaagagaaaatctcatctctaacctttgagtggaaaatgctaaggaatggttctgaatggctcagctggaccccatgcctctccttggtctaatcatgggagccaaagggatgggtcacttacagccagcttggggcatttgccccgttgctgtggccaatgcccttaacagaagggcagaaaagatcatggggtcagcaaagagagcagcctcctcaaagctcagaggagtgtaggcacaggtgccacagagcagcacgagaccatccttgtgctctacaacctagtacaattgagttggggaaggtgttgattgatactcatatgaagacattacgaagtaaaccctgaatgtgtctggtggaattcaatggaaggagagagaacatcagagattgatgtgttcagagacgtgaagccacggggcaggaggaagccctgggccagtggtgagaaatcgggctggatagcagctatacaggggggcctggaagcacagggggaagaagagtagatctacacactat

SEQ ID NO: 129187 - DNA, 1004 bp, Homo Sapiens
  misc_feature (722)..(722): n is a, c, g, or t
  misc_feature (874)..(874): n is a, c, g, or t
  misc_feature (878)..(878): n is a, c, g, or t
  misc_feature (907)..(907): n is a, c, g, or t
  misc_feature (923)..(923): n is a, c, g, or t
  misc_feature (978)..(978): n is a, c, g, or t
ttttttttcaggtttcaaaaactcactttattccaatgtgaaatgaggacgtgatggtttaaaaacaagaaaaagttcttgctcagcggtggggatgctctgcttgcccgctcacgcccatcccccttgaaacaaggtgtctggacggaccacacccataagcggctctccgcaaacccaggcagacgcccgtctcctccgggtctcagggtggccacatcctcccccaccagggctctgacagcaggcacagagcagcagcacgggcagggtggagcgggagcagcgtgtgggggcccccgccacccccagagctagtctcagaccaggaagggagctgggcaccagagaagcgacatcacgtcggcacctgtaactcccgggatccgtaattgggccccgcttcccccagcctcgcccccggcccactgtgcgttcggcagctcaggttaaaactgaggggagggatacattcagaccgcaggccccaaggctgcgcccagctgggtgcagggagtagggagccgagtcagagccacccactgggctctgagggcccagcaagccaaccccgacccctccgttcgggagcagcagccagaccacgccagtcacaacggcggctcccgtcccgccccaaataagtggcaccccagctttccaagccccgccaaagagctccggctccccaccctccccacggggtttttccggctaaaccntgactttcagacaggctgggccgggggttggtggcaccaagcagcagcatcatgtcgacatacaatgactgagaatccgtctggcgtcaccatcaggatcaccactcaggatggtcggctatgtcagggaaaggacggtcacactcaagcanggcngatcgcaacgcgggcggagcgggggcgancacactgcccccagcnggactgatgcgcaacgcatcactgtctcatggggctcgcacatcatcatggacangcaacactctgcgggcagagcagtca

SEQ ID NO: 129188 - DNA, 1203 bp, Homo Sapiens
  misc_feature (961)..(1011): n is a, c, g, or t
gcggccgcagctgcggcgctggaatcctggcaggcggctgctccgcggaagaggcgctccgcggctcgacggccgcggcggagggaggcggcgccccgggggagagaggcggcgccccggggccccgaggcggagttcgagtctgacagcggagtcgtgcttcgtcgcatctgggaggctgagaaggacctgtttatctctgatttctggagttcagcactagaaaccatcaatagatgtctcacaaaacatctggaacaactgaagacccctgtggggactctttcagacatctttggaaacctgcatcttgactcattgccagaggagtcagatgtggccactgattctatcccaagagagatcttggtcacaggaacctgccatttgaagtgtgtgtgttacggcattgggaactttgccacctgcatcgtagctagaaaccagctaacgtttttgctgcttttgttggaaaagtgccagattcccagaagtcactgttgggtatatgaccctctgtttagccaacttgaaattgaagtccttaacacccttggtgtgactgttctcagtgagaacgaggaagggaaacggagtattcgcggggagcctaccatcttttacatgctccattgtgggacggccttgtacaacaatcttttatggagtaactgggtcagtagatgccctttctaagatggtcatcattgggaacagtttcaaaggacttgaggagaggttgttggcaaggattctgcagaaaaaattttccttacattgcaaggattttaaaaggactggaggagcttgaggtttcctcagacttcacaatacatggacatatttaatgatacctctgtccactggttccctgtgcaaaagctagaacagctctccatagatatttgggagtttcgggaagaaccagattatcaggactgtgaggaccttgaaatcatcnnnnnnnnnnnnnnnnnnnnnnnnnnnnnnnnnnnnnnnnnnnnnnnnnnnggaactacagagaactcctttgccaggaaagaacatcaacttggctgtcctgttttgaggacgataccccacatgaggacttggtataaagattcctgccctacgtggcattgtcccgttttacatccttccctcatgacctggcctgatgtggagtagctcctgagtaatgaagttacccttttgaaggtg

SEQ ID NO: 129189 - DNA, 589 bp, Homo Sapiens
tttagatcaccttcaaaagggtaacttctttactcaggagctactccacatcaggccaggtcatgagggaaggatgtaaaacgggacaatgccacgtagggcaggaatctttataccaagtcctcatgtggggtatcgtcctcaaaacaggacagccaagttgatgttctttcctggcaaaggagttctctgtagttcctccatagcagccttccctttagtctctggtggcagcttctacctcagccaacactgagtacctcacaacgagttcagtcagtagcagaaggatcttctctcttgttcctgatgatttcaaggtcctcacagtcctgataatctggttcttcccgaaactcccaaatatctatggagagctgttctagcttttgcacagggaaccagtggacagaggtatcattaaatatgtccatgtattgtgaagtctgaggaaactcaagctcctccagtccttttaaaatctttgcaatgtagggataatttttctgcagaatccttgccaacaacctctcctcaagtcctttgaaactgttcccaatgatgaccatcttagaaagggcatctactg

SEQ ID NO: 129190 - DNA, 1235 bp, Homo Sapiens
  misc_feature (1219)..(1219): n is a, c, g, or t
cctctgaaatggctttatttccccagtgtgaggaatctgtgagtggtgaggggtctgtggtccctgttaccccaaggaccctgcagcctccagatggataacggcccgggatccaggccttgatcctcccaggctgggactggttctgggaggagccgggcatgctgtggtttgtaaggatgacactcccaaaggtggtcctgacagtggcccagatggacatggggctcacctcaaggacaaggccaccaggtgcgggggccgaggcccaaatgagccttactctaggagcaaaatcccctgtgggggcttctccttgaagtccgccagcagggctcagtctttggacccaggcaggtcagggggtggcggcccacctgggggcagcaaggcagagcggctcagggcctcggccacccaccccaggacgcggctacactgctggacctcccgctccagcactttcaggcgctgttcgtactcgcggatgtgtcccagctgtttcagtgccaagtccaccttctgggacgtgcgcttcagacgctcggagtcgctctcccgcttgtccctagcgcgtgccagcagaaagttctccttatgcaccgattcccacgttagcagcttccgctcggcttccttagaaaggtaaacccggaaatgctcgagggccggggaggacggctgggggctccggggtcgcctgcacaattgcctgagcaggaggcgcaagtgggagatgacgataaagggcggggccagcgcgggccgagagtggaattcccggatgaggcggtaacgctgcgccttccagtagagatcgctgttgccctgtactttgccgaatgtgtaactgaacatggcaatgagcaagttgaccagcaggatgttggccacgagcaggaagatgacgaggagcagcaccaccagccagttggcatactgggagacgcaggtgcccgcctgggccccaggagggtgtgcccagaagccgggctccgacgagcagttgctgtgctccatgagggccacgtccatgtcctcctggggaatctgcccgaagatctgcaggtagggacggtagaagacgcggcgcaggatacttgggaagtcactgtcccgtggcctcaggagcccctccgtggccacgccataggctaccagccacacgccgaggaagaagaggaagaagaacacgtccttcatctgtggggagatcccngggaattccggaccgg

SEQ ID NO: 129191 - DNA, 1436 bp, Homo Sapiens
atttggaaaagagacagttgaatcccttttctttaccagcataaggcagtcaggcaaacctaagagttgcttatttcggcaacataaggcggggtcattgcatgacagcaagaaggcacgaggtcccctcatctgtcctttcccagctcgcaggccttggaaccccgcccagggccccgctgagggaggcacaggcacagtcctaccgactcctgcctggcagctggaggagcccaggttccagcacaaaggagtctgtggacaggcaggggcagaatcctggagggagcgcctgagccaccatcccatgtggcagctgctggcgtagcagtgcctcgggctggcatcgttttggaagcaagtgggttcagtgaagtgtgttgccacgaatagcacccgctgcttttggctttattaacgtggcaaggagaaattcaaaattaagtatgtctcgaattctgtttgtggcagatggtgcggctctggagctcagccctcggcggcctgattcccaggggtccaagccaccctcattctctgagtcagggttgggcagccacttgtgtcctgagaaggtgccagaaggcctgaagcccaggcaaggggaacgggcagtgcctgtgcctcgggggtacctccagcatggcctggagcacatccagccatccccttcccccaaactccagcccttctcagaggggctctgggggtcattcaagggggacttctagcttctctctggaaccctttgtccagagcaaagccaggtttccaaggtccccacggcaaggctgttgggtgctggcagcaagaggtacacagcagttctcccagctcacagcagtgacctcagatctccagcagcaagggccgcactctcgtgcccacaagggccttgcagaaatgctccggtccctgggcctcccccggcaggaggggcggggctcctgcctgcagtgaggccacagcactaagcggcttcagtcacatgcttttcaggtgaatcactccaaattcagtgaggagggccacgacaaggaagttcaggtagaagaggagcaggcagaagccatagactctgctgagctggaagcactgcaatgggactgagaccagggagaagacgaggctgagccccagggcgcctgccaggacccacaccagcagtccgtctggctccagcttcacttctgtgtggcttcgggagatctggagcaggcagcccagccccacacccacgaggatgttgaagatgatgccgccaaagcaggcggagaacgccatccgtgggtagccctggcgagccagtgtgaaatccgagaaggcatctccaatgctgttcccccaggccagcagcgtgagccccagcacagtgttgctcagccggaagaccacacccagggaccgcaagatgttcaccacctctgtggcggccc

SEQ ID NO: 129192 - DNA, 1185 bp, Homo Sapiens
gcaattctgtaaggtttattgaatgggtgggtaaaaagtgaacgacagctacaaattcaaaaataaaactcttggttattaaagtcattccaggcatggacagagggatgcgaggctggccttccctgtccacggtcctctgaggcagctgaagtctcccatgtctggaccccgaatcttgtgcagattgaacagtggatccggggtgctctgagcaggcagcagggagcagctctggtgacgcttcatgtggtagcctcactctccattctctgcccctctcgtgcccacaaacaccaccaagagattcacggtgagaaatatcagcaaacccagatcccagatcaccaactccatggtcttaggacttccttggactgtccttggatctaaggctgagactttacccacgcagatttccggaggctcttcctctgcaacagccactgaaagcatgtgagggacagccccacagcaggacagaacgtggaaccacgggataccactttcaccttgcttcccctacatcatccaagccccaggaacagcacatgactcttacaagcaccgcagctcagcctcttcttgaagacacgtcacctggggccactgggcacacaggacagaggtcagctgacaatcctgggacctcaggatccatgctctcccagaggacgcctctcacacacatggggcggcagtcatgtgacactcccaggggcattctcaccccgcggacagtggaagcccctcagggggtgcagatcagagtgctgcaggagagagagggcgctggctggtgcgaagccgtccgaggtgcagcacagcccacaaggcctgccagtgtctttcccgaggacacgcgaatcctggggggctcactccggcaaagaggacgagacactgcaccaaggacagggcctgacctctctggccgccttccccggggcctcagtttcccccgatggtgagagtggagccgaccatgcgccctgctgtggactcacccggcgccctggcgtcgagtggcggcggagacctgacagacagcgtgggaaaaatcaagatgtctgcagatttcgagagatggggtgcggtggcgtgcgatggcgaaggacggcgagggacggcgaaggactgaggccacacgacaaggaagctacgcatcccgggaattccggaccg

SEQ ID NO: 129193 - DNA, 1006 bp, Homo Sapiens
ggagcaattctgtaaggtttattgaatgggtgggtaaaaagtgaacgacagctacaaattcaaaaataaaactcttggttattaaagtcattccaggcatggacagagggatgcgaggctggccttccctgtccacggtcctctgaggcagctgaagtctcccatgtctggaccccgaatcttgtgcagattgaacagtggatccggggtgctctgagcaggcagcagggagcagctctggtgacgcttcatgtggtagcctcactctccattctctgcccctctcgtgcccacaaacaccaccaagagattcacggtgagaaatatcagcaaacccagatcccagatcaccaactccatggtcttaggacttccttggactgtccttggatctaaggctgagaccttgcggacccatggtccagcgacctgctactatgaagacaacacatcccatggagcctctgcacacagcggacccatcttacaagcaccgcagctcagcctcttcttgaagacacgtcacctggggccactgggcacacaggacagaggtcagctgacaatcctgggacctcaggatccatgctctcccagaggacgcctctcacacacatggggcggcagtcatgttacactcccaggggcattctcaccccgcggacagtggaagcccctcagggggtgcagatcagagtgctgcaggagagagagggcgctggctggtgcgaagccgtccgaggtgcagcacagcccacaaggcccggcgcctggcgtcgagtggcggcggagacctgacgacagcgtgggaaaaatcagatgtctgcagatttcgagagatggggtgcggtggcgtgcgatggcgaaggacggcgagggacggcgaaggactgaggccacacgaccctcgtgccgaattcgccacccagcctcgctaccttagaccgttatagtactgcctcttttaacacctcttttgcctgctctcttgcgtgggtttttgttc

SEQ ID NO: 129194 - DNA, 831 bp, Homo Sapiens
ctgtaccacttttagcagcagatgaaagagtttcttttcctgcaattgagacagcactggtatgacttggttttctgtttgcaccacttccattggttatacaggacatgggaataactgctcgagggcttggttggcctttacttgagactgattttttcactgaggccacatgatcttcagagattgcaagacgcctcaaaacatcagccaaagccgcctttagcacagtgatttcatcttcttgttgctgaactcgtgactcaagagctgacaggcgatcttgaacatcagaagtacttgcagatgaaagagtttcttttcctgcaattgagacagcactggtatgacttggttttctgtttgcaccacttccattggttatacaggacatgggaataactgctcgagggcttggttggcctttacttgagactgattttttcactgaggccacatgatcttcagagattgcaagacgcctcaaaacatcagccaaagccgcctttagcacagtgatttcatcttcttgttgctgaactcgtgactcaagagctgacaggcgatcttgaacatcagaagtacttgcagcagaaatactatcatcgagactgccggcgaaaccgtccatcttgcggggaaagcgccgggctccgggctcagaggggcgggcacttcattcagcggaccgacagagtggccgacgctgagcctgacccgctcgttctctaggtcgcccggctcggctaccggctcccgcctccgtcgtccgtccgttcgccctggggtagtaagccgcggccgcccgaaccacttccccgtcacgttccc

SEQ ID NO: 129195 - DNA, 744 bp, Homo Sapiens
  misc_feature (601)..(609): n is a, c, g, or t
atattcttcaaaaagttttatttttcatattcagttaagtcacctggaattgatagatttcattaacaaaacctgattcatagtatatgtgacaggtaaggtctatctagaacaatctgtaattatttattatataaatttacaagtaagtaagtaagtgacttgcccatccttcagggacatcttgcttccatgaggctacagtaatctcactgtggttaacatcagggtagctgtggtccatgggttaacactggctagtcatcgttcatgcccccctccactctcaagtatcccattttgagacattacattacaaagtcagccttgttataactgctttctcttcaccatgattactacctgttgtgtgtgacctatttatattcatccactgttgtaacttcccattctgttataataattaatgatcctctgtagaagatcaaatggtctaattttggtactaactgaacatagtaatattttggctacagagacacgtgtttactccttgagtacaccttctgtacaagtccagtgctctacggctgatgtgtctgtgggacatctaggtgatgtacttcctgtacttcttggnnnnnnnnnatagccatttctaaccaattaacacacccacttactgtaaaaacctgtacacaatttctaaacagtcaaaatgctttccttagtctattgaaagacagggtagtgaattataaatgagagctatcattgcatttc

SEQ ID NO: 129196 - DNA, 1450 bp, Homo Sapiens
gccccgcagctcatgagacgtcggctgtgatcgttgctgggtgcagcgtatcgatgtttcgaggcgctcttttgatccctcccagctgatggtcaagtggttccgaattcgccttgagcgcgccccccgttgcgcgtgcgctgggcagcttgtcctctctctgtgtcgcaggtgagccttgttccgactgggcgttgcgacgcatgctcgttcctacgacttgacagctccgtgttgcgaggtcgaatcacaggctgctacggtgcagcgcaagtgttagctttgtgcgcggggctccggtagacactgtcgcccgtggtgctgttaccgctctctgcgtcaatcttgtgattgtcaacttgtaatgctgactactttgattctttgatacattttctatcggatacgggactcagctcgattatcgcccgctgaactctgggcaggctaagtgcagcccgcgggagcgggacgtggccggggcggctcagcagggcgcccagcatctcctcgcacatggctaggcaccgcggcacgtggaagcagcctttgaaaggacctcccttgatggagagggccaccttgccctctcggctcaggtagccaaaccattccccgtactcgggatcgcgaaactggcggaaggtgtactcagccacttggtataagaggtgcagcatcacagggtccccactgtcactgtaacccatgaggaaggcattcatggcttcactgtgtggccaccagagcttcatggcccactccagctgggtggggcagatgttatcagcatcctggaattaaaagaggcctccgtggtcatggtcccatccggagtggcagggcatcaataggaacttgtcaatcacgtgggctcgacgttcggggtcgcctttccgactgcattgtctgtgcagtaatcagtcgcgttccactgtgctggtctgggttctgctgtctccccacgcatccaggaagttccttgccaccctctgttacattctccaccacagtttgttcatccctctgcacgtgttgccatattctctccggctgcccagttccccacctccgtgttcttgctcgccatttcctcattcgctctctcgctgttgctcctctacgtttagttctatcattgtcaccggcatgtgctctgcatccggtgctctttgtcttttggggcggtcccattcccttttttcctcctgtatccgggtgccttcttttcaccatctccccgcttcttttggttaccttcttccctgctggttccatcattcgtcctgcctctgtgcttatgacttcttcgtttggtcttgtcgcgctctcttgtctcttggccattcctctatttcctctgctgttctttttcgtcctctgctctttctactttctttgtcctgttcgtcctgtcctgcttctttctcttccgttgcttcttccgcct

SEQ ID NO: 129197 - DNA, 1118 bp, Homo Sapiens
  misc_feature (955)..(963): n is a, c, g, or t
ttttttaaaaaacaaactgcaaaatggtatttatttacattaaaacatgaattgcctgtatacacacaaatataagaggaacaatctgttatgcacaataactgtaatatttagtacatgttatacacagcagtatctgttaagtcagtggtttgagtgaaaacacagtaccaaaacattcctgatacaaaataagttactcattcacatattctaatcatacaagacacttaatattttaaaagttacatacttcaaataacactggctaaatgtacaactaaagtttattaattttttttatgaaaagacttcagattgttattcataaatgatccctttcaggatgcattatcttttaaataaataaactaaattgacttcaagactatttataaatagcccactaaaatatgattgaagacattccttcattttattaaaggtgtagctatatactagagaatatgctcaactactgcctccaaattccaacactgtcattctaatttgcaaataggaattatttaaattccaacttcaggacatgagatgagctgcctgccctattttgtcaattgtttccaaaagcattaacggattaagagactgtcttgaacatctcaaacatttgagaaattcaaggttttctttatgttttaagctgatcctatatatggagattttgagataaattggaacacttttagaagaccttcacaaagaatttttcaattctaaaatctattacagatttatataaagtccaagagaacatgtgaaatattttcataatgcagtgaaggattcatctttggcatttctccattcattctaaaataagatacttcaacaaacattttatacttttctatctacctactatacatattttctatacacaaaagtatttgattgaaatttgtgttttaacagcaatttcattgctaagaannnnnnnnnagatatgaaaaatattagtaacattcagctttttactatgagaagctgaagttttgatgttgttgaaatgaatttgctcagtttccttttttggtgaccagcatttcaacatcctatcgaattcagcaatggataaagcagagatactttacaat

SEQ ID NO: 129198 - DNA, 642 bp, Homo Sapiens
  misc_feature (631)..(631): n is a, c, g, or t
tttttggctgttaacattgttttatttcctttatacaaaaagtagaaatgacagaaaaaacactcttgacagaaacaataccactgacctgatctcatgaaggagctgagccaaatctgcccacattatggggaaagggaggttcaatcaacattagcaaatactcatgcaattgatgaaatataaaatggtatcagtggcttggtgaatgtcctgtgggtagggtgaatcaatctactcttaaaaaacatacattttcccaatcatgcttttaaacggcatcttttaaaaaaacaagttatatatacagatatcaccccaaaatgaatcttttacagtctactactataaatttaaggcatcctgatattctgttcttctgctggtgaggcattgttttcatggttctctttccaaagaggatagtccagaaatttccaataatttccaaagggcatcagtgagagaaaatttaaaaagtgatttacaagaagagttcttttgactctggctcagcaatgtgctttatgctgtaggatttcttcatttttctattgatgtcattatgctgccttattctttcctttgctagcggagctggcagggtttcccttggcatctgtcttcctcncaagtgaggtc

SEQ ID NO: 129199 - DNA, 1000 bp, Homo Sapiens
  misc_feature (534)..(534): n is a, c, g, or t
  misc_feature (549)..(549): n is a, c, g, or t
  misc_feature (629)..(629): n is a, c, g, or t
  misc_feature (670)..(670): n is a, c, g, or t
  misc_feature (672)..(672): n is a, c, g, or t
  misc_feature (675)..(675): n is a, c, g, or t
  misc_feature (689)..(689): n is a, c, g, or t
  misc_feature (714)..(715): n is a, c, g, or t
  misc_feature (782)..(783): n is a, c, g, or t
  misc_feature (785)..(785): n is a, c, g, or t
  misc_feature (839)..(839): n is a, c, g, or t
gaaaataaccaaatatgaaaatgtgttttatttctcagtacaaagccagatactgtaaggctatgaaaaactgactagccagaggccagaaaggacaaaaagaagactatctctggcctggtgccctgtgatctggcgtggtgtcacaggaggtctggggacagcagcaaagacctggaccggtggaggtggatgagggaagcgatctgccagcccttccagcctcccgcggctggggcctgaggatcctgcctgcctttgggggccactggttgcctggcctggctggttccaggaatgaactgggagaggacaggaggtgcagggagggggcgggggtgggaggcgtgaccctttttgcacgggaagctctgttttcattccgtgccacaggtgagtgtgcagggctagagttgagaatgaaactagggtgctgttgcccccaaaggtaccttcagtccctctaccacatcccagttagaaagtcttgagcccttggacaggcagacatgggcctgggacttaaggctgtangaggtgaggctgtantgacaggggtgggaggtgagggcgttctgacaggggtgggaaggtgatgctgtattgacgggtatggggcggagcctganaagaatgtgtgcggcaacaaacgtgcgggtgtttctccaangnttntggattctcttcantgtcaggggaacgtgggcagtgttnngggttcaggctcgcctcctctccatgtcatgcacgctggctgtctcaccacttccggaactggggtnnangaaaatcaggctctcctgccctcctgcgattcttgcctccagggcaaatcctanatgagtctattattcgtatcattcaaacttttctgtgtgaatgtatccgtcaaatccacacaacaaccgacaaaatgtaactggggccataatacaccaataatctttcccatgccttcatcgaaactctccatatatatcgcagcggaaaggttcgttga

SEQ ID NO: 129200 - DNA, 668 bp, Homo Sapiens
atgacaaaagtgtttaatgctccataatgtgcagcttctaagtgaaaaaggcccgttaatcatccacgggccgtacattctcatgacagagcagccgccctcctcggccccccaagagggaggcataggcagggagtgggccctgtgaggcacggtcctgagtgtgcccgccaggaacgcacacgtgttagtgcccacatgaaacaggggtggggcgtgacatttacacaggagagaaccacagacacccatgtgaggagacacgaggggcacaggtgaccatgggccagggaacaccccagtccatgcatggctgaatccacgaggagcgcgagctggatggtgggagtcacgcggtaacgggctcaggtctcctaggagcagaacaggcccaggtcctcaggagacctcgtgcccagggcagcgggacagacctgagcctgcccatgagaacttgagtgtgcaaacctgcgcacaggtgtgagaacagactccagggcgagtgtttaaggagaagacacagacacacataagacccactagtgggaatgtggagaccccaggaaaggtggggaggcccagagcagcaagtagaggggagtgggcactctgtcccgggactctcataggctcggcagggccagagacagccttgggggtgagaggcc

SEQ ID NO: 129201 - DNA, 618 bp, Homo Sapiens
actatgtctggtgggccaaattcagcccacttcctgtttttataaattgttttattaaaacatagccacactaattcatttacatattgtctatggtttttttctgcattatgagaattgagtagttaggacagaaactagaaggcctacgaagcttatttatctgaccctttattgaaaaaattggctaaccccccaatgaaaatattttccattaaaaaaactattacatttcaatttgtgttactgaatacttagcaagataaattctttgaaaactgaattatgttttttaagtacttgccaaatagtaagaaacccatttcagtggagattggacaaactagaaaaaataaaacaaattcctcacacagaaattcaactgcaaaactaaaactaactcttcaattgtaataagaacctcgaactactgaaaatcatattttggaaagccctctttggaaagccacacacaaaaaataaaggatacaggcttttgttttggattttctgcaatggcaataatgaaactctaagcaggtctgcctctctcagaataacttaagttaacaaaatcagaaaaagttccaactagaatatctggagcacaaagcttac

SEQ ID NO: 129202 - DNA, 810 bp, Homo Sapiens
cagtcgacggtaccggacatatgcccgggaattcggccattacggccgggatacttattagtcattatgtatcttctttggagaatgtctgttcagatcctttacctactttataattggtttatctttttaatattgaactgtaatagtttttaaaaaatatatcctaaatacaagtctcttatcagataatatgatttgcagatattttctgtcattctatgtactgtcttttcacattcttgatgatagacttttcagcccaaatgtttttaacttgatggaatacaatttattttttcttttgttgcttgtgctttcagtcatatttgtgaaaactttgcttatcccacattacaaagatttactatttctaagtgatttataattttaccacctacctttaggtctctgatccattttgagttaatttttatgtgcgaggagggagtctaacttgattcttttacatgtggatatttagttgtcccaggaccatttgttgaattaagtgcccagaacaagtacatctatatatagagaaagtagattagtggttgtcagagactgtaagaagtggggaattggagagtgactgcccataggtacaggcatgctttttggcattatgaaaatattctggaattaggtagtggtgatggttgcagaacttttggaatatggtaaaagacactgaaatatatgcttaaaaatggtgatttttgtgatatatgaattatactatagaactaataataacagtaataaagcaaggtgtctttccacatctccatgccttgtattttcatt

SEQ ID NO: 129203 - DNA, 978 bp, Homo Sapiens
ttgagcttggtgaacctagggggtgctgagaagcccatcatagacaagaagtagcaaactgtacattccttcttcctccccctgctccagaaggtgacggtactgaagatgctccagtaattggtgacccaaccctaggaagtagggagaaatgaaggaagggcataggaaaattttcccagtaaatcccctgatggtcacattaaggtaaaggttttggctggtcagtgtgccaagacctctccagcttctcattcatgatgacctctcaaagttgggaaacaagctgatttcttgccaagaggtctcccaggagatatttgggaaatgtgaagttcgtatctttaaggagcatttttggtcagcgtggttgatgaactaatgatgagagagttaaggaatgttgctagaacatagggcttgctggtacctatgtgactaagaaagggacatgatgtaagggaaaaggcctcaaattcttgtgaatgtggacattctcgttaatattcttttgggctaatagtgacatagtgtgcagaggtgtaccagggatcatgggggatttcctagcactagtatgcttctagttttagataactccctcctttattccctggccccttgtattttccttatcttcctctttcaagacccctacccattttgcctatccgtaggctggggcttgtgtctttgtcattgtctggttcttaagagtcccagactttgggagaccagctccaggtggcgtcctccctgcctctccgtcttgtaatgagttgtagtatttactcttaacataggatcatttggaacaggagttctgaggaggagagagtgagggttttgctattgactgacttgaacgatggcttctcctcaagctgtaggctccagagcttcctaacctagtaaaatgtcaagaacagacgggagatattagtgtctttccctctatcattaaaggtgttttaaccg

SEQ ID NO: 129204 - DNA, 1018 bp, Homo Sapiens
  misc_feature (46)..(46): n is a, c, g, or t
  misc_feature (104)..(104): n is a, c, g, or t
gaaggggagcccccaaaggggcttccctttcgttaggccaaaaggntccttctttcagaagtttgagccaggggctggggaggggtaagagacccctttttttncagggcagggtcaccactaccacccttccagcatgactcccccaaaaaagttatcctcctttagctcagcacttggcacttaaggaagaaaggaccaacaaaggtagcattaggaagacaagcccagatttatcaggatacccactcagccaactgctttagtgcttcttcatcttcatccactttgggagctggccctgccggcagatgagtagaaggtacactaggcaatttgactgagggttcttcttccttgtcgcccacatttaacaactcctgggccaattcctcctgctccagctcctctagctcctccagcagttcatcctcatccacatcatctccaaagcccataggccgagaaatggcatctgagatctgctgggccacctcctgttgttccgtgatgtcagtcatcagttcatctaccttgtcaatgtccatgtcctggtaggccttcttcatgctttgggcagcaagctccatggtacgaaggacttctgcattggtagtggcattctcaatggcctcacgctgaaactccagggtggataatgtcccgtcagtttgtgccagctgctgttcgaatcttttcttcctccgcaaagcctgtagggcagctctcttattcttggtcccatacttcttggctgtttgtagctcctgttgaatcttctgctccaaaaattcctgtttcttgatcagtatcttctctgtctccttcagtttctgtattgcttcttcaggggttggccctttctccttcttccccttcccgaagagcctgccgagaccactcatcgcgagctcgcctctcccgcctccgcccctcagcgtcctccagacttccgccatgctcctgcctcgtgccgatttaacaccagctctactagcttaggggggtcgttgttggg

SEQ ID NO: 129205 - DNA, 1016 bp, Homo Sapiens
ttcaggggtagacaaggcagtatagacactaggattccatctgcccagttttattgggaacaagggcattataactgctatcaaagagaagggagcccaagggctccttctgtagcaagatccttcttcagagttgagccagggctgggagggtaagagacccttttttcaggcagggtcacactaccaccctcagcatgacttccccaaaaagttatcctcctttagctcagcacttggcacttaaggaagaaaggaccaacaaaggtagcattaggaagacaagcccagatttatcaggatacccactcagccaactgctttagtgcttcttcatcttcatccactttgggagctggccctgccggcagatgagtagaaggtacactaggcaatttgactgagggttcttcttccttgtcgcccacatttaacaactcctgggccaattcctcctgctccagctcctctagctcctccagcagttcatcctcatccacatcatctccaaagcccataggccgagaaatggcatctgagatctgctgggccacctcctgttgttccgtgatgtcagtcatcagttcatctaccttgtcaatgtccatgtcctggtaggccttcttcatgctttgggcagcaagctccatggtacgaaggacttctgcattggtagtggcattctcaatggcctcacgctgaaactccagggtggataatgtcccgtcagtttgtgccagctgctgttcgaatcttttcttcctccgcaaagcctgtagggcagctctcttattcttggtcccatacttcttggctgtttgtagctcctgttgaatcttctgctccaaaaattcctgtttcttgatcagtatcttctctgtctccttcagtttctgtattgcttcttcaggggttggccctttctccttcttccccttcccgaagagcctgccgagaccactcatcgcgagctcgcccctcgtgccgaattcgcacacccaggcctcgtacctaga

SEQ ID NO: 129206 - DNA, 637 bp, Homo Sapiens
agatgtgcatgtaaatcaagaattagctgaggaatatctttttattagtagtagtagtaactcatttttagattcaagtaaagtttgttttccaggtgagatgacatttttaagaaattgaatttaagtatgtgcttttatatccggaccaggtttctcaaggaagcagaatacaagggaatgaaaggggaagggagggtagtgcccaagagaaacctcggctcctaagtgctcccctgccaggtttcccccgtgcctgcccactggcaccatcctggcagctccagcccacaccccctcctggaccctgggctgcctctcgctgaatagctgcagggggcctgctatgtgacaggtatggaatgaggtaatccttttccacctctaatttctgaagggtgtgtctgtccagtttttacttgttcattgaatttaaagccttaggaaccaacagctacagtgcaagctgtaattattgatgtctgtttcatattcatctgtaagttctggcatttgatcaagaagtcaatatatcacttcatcttcaggctgaatgtgtctcagctataaaggttttattgtttgatggatagcatacaattatgactgcccaccaataaaaagtgttttcatttgt

SEQ ID NO: 129207 - DNA, 738 bp, Homo Sapiens
  misc_feature (35)..(35): n is a, c, g, or t
  misc_feature (114)..(114): n is a, c, g, or t
gggggaagaagggtaaactgagctagcccctggcnggagttactcctgcagggctggaggaacaggttcttagaagatgattcaccttggaggaagctggggaaagtggttagngagggagaggaggaagactgagaaatctctgcatccccagaactcagcaacccagctcttttatcatgaggagaggtagccatgctgactcatgaacaggtggaggaaaggggttgcaggtgaccagcatcttcaatctagttaccaccagcttggctagaattttattgaacgcaacttgctagttatgacagagaggaccagggtgagaactaatgctcaagagagcaagattctgtaatcctcttgccctctcacatcacaaattctgatatgccaaacatttggcccaatgagaatgactgatagacttgctgatgtgcatgtggggggatgaggtgtgtatatgcctttctcctgactggccattcagtgttcaggctgtcattcaaattggataggagaaagttggtgaggaaggaatggagagagcaggatccctggactccctggtccccaaactccttgactgtcacttgtaattgtatataatttttgtgtttcttgctccatttcctcatgctgtcatccttaaagtccatctgggaaggggaaaatgctgaacaccattgtatagtttcttcaactgtcccagccatgttgtacatagatatgtcatgttat

SEQ ID NO: 129208 - DNA, 1005 bp, Homo Sapiens
  misc_feature (44)..(54): n is a, c, g, or t
aactttttttcttttggttcataacaaaacctgcttaagagaannnnnnnnnnngacaggtggacgtgggaatggaaattcttaatggtttctggagtagaaatctgtacttagaaaactagtttttgggtcagttccattttgatagaagtgaatacatagacagcttttattgacttccatatgtaacaataccgtttaagccttaaatcacagatatgtgccttctcagatacagtaattcttgttcaaccaatgtacaaaatccataaagaaacccctgttggataatgtttgatgtgtctattccttccatggaatggagcactatgtatgaatgttgggtttctttgtacttgttaagccacatttgaggtttatggtaaaaatcatcttttgagtttgctctttggtttttcttcattccttttgaggattgggaaaacagaaagattctttgatttgggtaatgaagaggtaatttgggacagtgtggtggtaccaggaagaaagaggattggaaaggccagtactgttttagttgctcggcactgttggttttgttttaatgtggttgccctgtccactacatggttctatcagtagtgtaatccattttcaatgtaaagctcttttagtttttgtcatagacataaattaatattttgagaggcatccctcacctgttcatttcttctgtgttgaaatgaagtacttaaaattaccgttatacatgaactttgtggactgtaagatttgttatatatgttcaaatgccttttagctggctttttaattaatatgcctgttttgagtgcttaatacaatgtaatgtgattgtaaatcatacctattttaaatcattccttcctgtatatttgtactcagagagccttattttattcttccagcagaattactacttgtgatagttcatttacattccccagaatgtgcctctagtgtgaattttgtattcttattaaacgtgtttgctgcagtaaa

SEQ ID NO: 129209 - DNA, 384 bp, Homo Sapiens
ggggaaacgcggggaattgtactaaaaataaattattttcaaatgcaaactcaggttagggagtagactcaagaggtatcatggactcactgaccattagggtggcaggggagggaggactcaaggactgttgatggggcatctggctgggtcattactcagacaggacatttgtagataagcccaatgagcagttggatgtccacatctggagcccacgggtatgctggggagctgctgtaccccgaagcaggtgtgattagggagagaaagtctgaaggtgaaggtgggaagagaactgaaggccaccaatagtgggagccctgctgttgagctttgagcctgagcagccccggcttgtgccacacaacacattcagcgtgg

SEQ ID NO: 129210 - DNA, 1365 bp, Homo Sapiens
  misc_feature (53)..(89): n is a, c, g, or t
  misc_feature (1349)..(1349): n is a, c, g, or t
gaataaggtgcgatgttcgggatacgtggaacggggttcgaatgagaacggcnnnnnnnnnnnnnnnnnnnnnnnnnnnnnnnnnnnnnaatgcgggaatacatccgttgtgtggagttggtaaagatataagacgaacggcggacaagttgtgtgacagagttaatgagggggaaatgtgcgatgggaacgcgtgtataaacggggggggttaagtggaagtgtgggtcgaaagtgaggtggatgggtaaactgtgttgtgaggtggaacggtaaggggcacggtagtggggaagggatgtaccaaacaggtttaaatggaggtggtggtaggcaatagggtgaaaggtgaaaaagtggaaagggggtgggatttaagtgtgatttccccgcgtaccgttaaatttgtagtgtgtgggcactgctaggcgggaataaaggtaaggaacatagggcgggcaggtagtcaaggtgaggcacagtgccgaatttaatggaaaaataggggtggtttgtggtaaagaaatgtactcccgcgcgcggaggggggcccttccgtgtgggggacacgccccctattgcgttttggcaggcactttgggttggaccgggtgcgttagttgcgagtagtgatgttgtcgcacttattgagtaggagccttttcgtacttaggggtgagttgttcccaacaggtttagagttttgattttttcacagttcagactttttaatgcaaggagaaagtcttcacttctcttcccacaggtgtgaacaagccactgcaacttcaacagtgacttcccggcaaggacagcgcccgcatccatcctcacctaatactgtatggagtgacgggctaaggagaacaaggccagttcctgcagactccgagcagcgctggggagaagctccctgagacccccgcgggaaagcctggtgggaagcccagctgtgtggtacctggtgctccacctgccttggtgccatcacagcccggacagtggccactggcctgcaaacgcacccgggccctggaggctgggctcaatggccccaggcagaggagggggaggcggcctgaactggcccgggccactgggccgcaaggttctggtttcttattgctcaacctggggccaggggcgttgtaaggacatccaagtgagctgccctcctttgctaaacagaggaggaaggaaggtaggaaatgaagggggattacagaaggggctgggttttcccctggtccccgctgtctggacatgagagcctatccagaaccacgggcttcctcttaccagcaccaagctgtcgtgaggccccgccaccgccacccaccaccacctcncactgtggcctcgtgc

SEQ ID NO: 129211 - DNA, 664 bp, Homo Sapiens
acgcttcccagtttctctcttgcgtgctcttcttgagagcagagtggaatggactatgacccagttgacagcattccactttgcccacagttcgccacagactccagggacggagcaaatgcaccacagtccccgcttgcatgccctccccaggcggttcagtggttcatgctgtcctgtgagagcccctgccccagagcggccccactaagcgcatgtggctcctgggctacccacagccagggcagcctgctggagccacagggccagggccatgcagatggaggcctctgggagccacctccaatccctcaccactcactcaaccagtggcacagtgtccttgtgcccacactgagccagcaagtcctgctgtccacacccacaagctacctggagggacaggacccacctccatccttcggaaggccttcctggaatcccacctttgcctccgccctcggttccgccccgcccctctccccccgaccttggggcttgtgtcgagcccttgggtggggccaggaggaggtgatggcgtcagaggaggtgtggtcagaggtgacttgttcccacctccagggaggacgcttcgtcttcggccagcgcagacctggtgtttgtttgttgggctcacgcttgcacaatgaaggcttgttcacac

SEQ ID NO: 129212 - DNA, 493 bp, Homo Sapiens
gcacagagagccagtcggcagcttagccagtgactgctgggcctttgtttgggccccttgccctgcacacagctgatgatgagacaccccagggccatgcagatggaggcctctgggagccacctcaaatccctcaccactcactcaaccagtggcacagtgtccttgtgcccacactgagccagcaagtcctgctgtccacacccacaagctacctggagggacaggacccacctccatccttcggaaggccttcctggaatcccaccttggcctccgccctcggttccgccccgcccctctccccccgaccttggggcttgtgtcgagcccttgggtggggccaggaggaggtgatggcgtcagaggaggtgtggtcagaggtgacttgttcccacctccagggaggacgcttcgtcttcggccagcgcagacctggtgtttgtttgttgggctcacgcttgcacaatgaaggcttgttcacacaaccaca

SEQ ID NO: 129213 - DNA, 703 bp, Homo Sapiens
tttaacttttcacttcttttatttgttaaaatagtcacatccatatacatgaaaagatttgaccataatgcattcattgattgtggctcttgccatctcgtggcatccaggatcctggctgaaaggttttaccagtgctgctgggagccactgagggttcttcctttccaaagtatggagcagaggcatggcctttaatttgagtttgaactggtggaggcaggagttcctcactggtctctttactaaggagtttttctttttcataaaaatcttggctttttattttgatttcttctctgtgtttttcattctttagtatttcctccatagtaggtggagtctttcttgttcttctaatccaagcttcccattctgttggaatatcccctgcttcatagtctacttcttttttatttgctgcttctacaattcttttctctcgaatagtttgtcctctccagttcttgtactgcgggatgtagtagtatttgttcccgaattggtccgtgcccacgtgctctttcacttcccttgacagcgatctccacaaggcgcggaacaaatcctgagaccaacccatgccgtccacccagtttccagcgctgccagcagcgggacccgcagtaggggtaatgctccagccgccgacccccggccgtaatggccgaattcccgggcatatgtccggtaccgtcgactg

SEQ ID NO: 129214 - DNA, 392 bp, Homo Sapiens
  misc_feature (257)..(318): n is a, c, g, or t
ttttaacttttcacttcttttatttgttaaaatagtcacatccatatacatgaaaagatttgaccataatgcattcattgattgtggctcttgccatctcgtggcatccaggatcctggctgaaaggttttaccagtgctgctgggagccactgagggttcttcctttccaaagtatggagcagaggcatggcctttaatttgagtttgaactggtggaggcaggagttcctcactggtctctttactaaggagttnnnnnnnnnnnnnnnnnnnnnnnnnnnnnnnnnnnnnnnnnnnnnnnnnnnnnnnnnnnnnnagtatttcctccatagtaggtggagtctttcttgttcttctaatccaagcttcccattctgttggaatatcccc

SEQ ID NO: 129215 - DNA, 741 bp, Homo Sapiens
aaatagatgagaatttaagcttttattaataaatcatgattttctattgaatacataataaagtacaattaacaataacataacattacaacattaaaaattaaaactttcagaatcaccttgatcaatatataaagctttagttccttatttcaacagtgttcttctcatatgcaaaacagcttcccaaaataagagattcgtgaatgaaattttataaagcttcctgtgtaccaaagagattgactccacatcaactgtcccctactgaaaatccaaaccatacaggcttgaaggaccagaactgagccacattctattaaagttatcaaagataaaatcttaaagatctacaaatggaacatggaactaccttctaccaccaattcaatacactgggcaaacgtggtaaatcttggcctcaagacaacataagatagaatgattcttaaatatgtagcaacagatatatcaatattatccctattacagagacacatgtataccaatttataactgttctttgcagtaagaaactcagaaatcatctaggaaatatctattttcctatgttacaactgaaatgaaaatgacaacatattttgtaaaatgatgcaatgtggtattgtcttttgatgagacatgaaaacacaactcactggctagaaatagtttgtaaaacaagcctactctcactgatatatacttactttaaaagttacacttacttcttagttttct

SEQ ID NO: 129216 - DNA, 861 bp, Homo Sapiens
tttttgagaacacattcgtattttttgacccagaccaaaaacttttggtcctttttaacggtacattcctacattaagaaaataattagtgataaatatattctctttttgtacaaattcaattccagtttttaacaccctaattcacaaaattcatgccaatgtatgcgctgataggctgaagccaagctgtgaaacttcagaacacagttaagggcagcaatcaagcccgttccaggctgacgcgcagggcgttcttacatcacatcccggggtgccagctcaaccccggcacgtcagcacctgggtgaagggagtgccgggcactgatgggatcaatacaagacacagaccccttccgtcgggagctggctagtctctacagtgccccacaccactgatttctatcaggctccagggcctcccatggaggagaagggctgtggcccctctgattcttggggacgtggtattcaggcaaaggcgcagttatttttcacaaggctcctctgacaggaactggacatcaatccactgccacccggggcttccaggttccactcgaagacccagagagattttagactttctgggaagtcttgctgtcccgctgtacacctttgttgggtttttctccattttaatgttttcccacggccaaagcagggtgtcggctgcagactgtgctgcaggggccggccaccaggctctccaggtgcgttttgctttttgaccttggcgaggtcggcctccatgccgcttgagtattccgaacgtaggatttcagcgaggctgtgtttactctgggtcttcttatgaaggtcaggccttttcacgtgtgctttcctcttctttctagcc

SEQ ID NO: 129217 - DNA, 770 bp, Homo Sapiens
  misc_feature (737)..(737): n is a, c, g, or t
cctggacagcatttcattttattatgtaactgtagaaagccttgatcaagataaaaatagggatgacttatcagaaactgaagaattttcttaggaaagcaaagtttactgaaggataccttcattccagccatgatgagcatctgtcttctcaggcaatcatgatgaagctccagggacagtataacccatctctcccactcatccctgagccttggtcctggactgaatgtggttgaggttgtggaaataaaaaaaagaaccaaaataagaacactctccataaaagccaagctcagagactggtcctcttttgcttaggtacaacaggagcaggaaggatcaacattcttgaaagcataccttctattcatttggcttttttgacttggggcgccagtgtagagctgagcactccactgccctttctccactcacaaatgtctgcataggtacacgtccggcacttccaagcctcctccacgtcaactccctggggctctcggtggcccatccagtaggccatataatgctgcaccttggctctcacctccttctctttgaaggctacaatctcagtacccagcacagtggcagtctcttggtggatatactcaatcttcaagatatcaataactgggaggtctgacagtgttagagacaagaagacaagttccatgaggtcacccaaagacttcacagagaagctccctgctgggcatgcctcagcactgatnggcccagtggcttttctagacacaactttgtgt

SEQ ID NO: 129218 - DNA, 720 bp, Homo Sapiens
  misc_feature (610)..(610): n is a, c, g, or t
aaaataatgaatcataaattttatttcaaaatgtaaacgtcactaaacatgcatacacgttaaaacaataaaatttacaatttcgttaatttttctttttgcataggacatcattacaatatagaatctatgccatacaaaatacatacaaagttttatccgagcaagccaaggccagactgggaactgtacaactgtaatacttcactgtagtgatccaggaaagatgaaacgtggccttcggaattatggtgggtgctggttaaaaaaaagttcctacagaaaagaaaaacatgagctccatggaaatggtcttggacccttggattctgccttgggcttttggcaaatgattccagagaagctccaccaatggctttggatgggaaggggttgcctgtgcgggcctggggcagctgagacccggaagcatgcacccaacacatgcacacaagcaattcccagtcaccaaggaaccaccgaaagccccaaacccgacaatgacaatgcatagttgctcagtagtgcctcctttctgctgaggctttccagccccagaggcctcagcactaggcaccaggggcctctctaggatgaggccagggagcanagtctcccactcacacacccagaggcaggcacctggagccggcacagacgctggggctaatgagccacgtggtgtctagagcacatgggagggtggctcttgctcctctc

SEQ ID NO: 129219 - DNA, 1028 bp, Homo Sapiens
  misc_feature (622)..(622): n is a, c, g, or t
  misc_feature (945)..(945): n is a, c, g, or t
  misc_feature (969)..(969): n is a, c, g, or t
gaattggatcatacgtatttattcacagcatacttttatttaccaaagtacatcgtacattatacaaatcttaattacatttacattatacatttataatattaaaattgtgcgagtagtcttcaaatatctgacaactttggggtcagtgaattatttaagaaaaaactcagaagagttttgaaaaaggagcaggtgtgattctacaaattcaatatgaggcaccagtgggagaagtcaattggatgagcacatgaaatattaggagtgctcgtgagggggaagtaacaggtctattgtgtgcagtgctgggcaggctgcatatggagaatgtgttaaaagagcatttgcaaacttaagcattacttgaagatattaaacagaatgatggaagcctggtctttgattatttattgctgacatatgcattgcagtgatggcattaatgcctaatgattaagctaacatgaattgacaatgaacaagtcatgctttataaataaaaaatgcatgttgtttgatttgactcattctttgtgaacctatgctagcttcatattctttctctcgatgtcctatttttttggtctatagtttgtgaggttcacctttttcctctttnagaaaatggtgatagctttgcttttcaactgactcccctaatgtccacttttcttcagagattacagacaatggttttccaaatctccttattcttttattgccttaggatctaattgcaagcagttgaaagattaaaatcctctaaagaaattaaattatttctaattatcccatgacctgttttaaactacaattttctcttaaagaaacttaccctccatttttcttttaaaattactccctgtgatagagaaagtaggagacaactgtctcaaaaatctgcttgctcctcttgatctattaaaataccattaaaaattntgggtttactttgctggtgtcagntgatttttgtgcttactataatagatccatttgaccctttcatattcattgatatctac

SEQ ID NO: 129220 - DNA, 747 bp, Homo Sapiens
tttagagctacaaaattttatagtttattgaatcatagcaagtatatttcctacaggatcttcatctgtgttttcctttcagaactgttaagttttaaaatgcagatggcttcagtttcttcttctgacgcctaagagagagaaaactagagagattaagagatccaaggtcactcatcagacgtggaagaatccaggactccaggcagtgtggggtcttctattcacactcacttcacaccttaatctcagttttacatttcatcttctgttttctttatacaatctgtccagcttttgaatataattttccatactttgagaagagctcaaatgatggtaatacagtctggaaatccttgtcacagatccatttcttaggattttcacttcggaattgttctttgtaagaaataggaccatacttgcttgataaatgcattgatgggatgtacttttcatttttatggtatgaagaaaatggcaaaaacatattgtcatttacattttgcagccattcctctcttctgagctcctctctggccaactttaactcatcgattggttctgccacccgcaacgttggctccaaaggcctgtagcgttgttctaatacttcggtgatatctcggaagggcccctgacattgctttctattaataggtggtagaatttcagaccgaggaaaagaacgggcgcttgtacaagctagcaatcagtagggtggtggagtcctctgcttaactt

SEQ ID NO: 129221 - DNA, 1028 bp, Homo Sapiens
  misc_feature (780)..(780): n is a, c, g, or t
  misc_feature (801)..(801): n is a, c, g, or t
  misc_feature (807)..(807): n is a, c, g, or t
  misc_feature (820)..(820): n is a, c, g, or t
  misc_feature (826)..(826): n is a, c, g, or t
  misc_feature (830)..(830): n is a, c, g, or t
  misc_feature (847)..(847): n is a, c, g, or t
  misc_feature (888)..(889): n is a, c, g, or t
  misc_feature (891)..(978): n is a, c, g, or t
  misc_feature (985)..(985): n is a, c, g, or t
  misc_feature (999)..(999): n is a, c, g, or t
ttttagagctacaaaattttatagtttattgaatcatagcaagtatatttcctacaggatcttcatctgtgttttcctttcagaactgttaagttttaaaatgcagatggcttcagtttcttcttctgacgcctttatacaatctgtccagcttttgaatataattttccatactttgagaagagctcaaatgatggtaatacagtctggaaatccttgtcacagatccatttcttaggattttcacttcggaattgttctttgtaagaaataggaccatacttgcttgataaatgcattgatgggatgtacttttcatttttatggtatgaagaaaatggcaaaaacatattgtcatttacattttgcagccattcctctcttctgagctcctctctggccaactttaactcatcgattggttctgccacccgcaacgttggctccaaaggcctgtagcgttgttctaatacttcggtgatatctcggaagggcccctgacattgctttctattaataggtggtagaatttcagaccgaggaaaagaacgggcgcttgtacaagctagccaatcagtaaggctggtggagtccttctgcttaactttaggtcttcggtgtgttaaaggctttgccttttggtattgcagctcccatggatcaggctcttttctgaagggtgaattgtatattcctggaatctgctttgtgctgaggagggtatgcatctttcgggcttgggtatctcttttcttctcttccctttcgaggttagccttnctctctctctttctttcattnctgcanactcctccagtgncttccntaantgcatcatggtctctgnaacgactttcaaagctcgtgcgaattcttgggctcgagggnncnnnnnnnnnnnnnnnnnnnnnnnnnnnnnnnnnnnnnnnnnnnnnnnnnnnnnnnnnnnnnnnnnnnnnnnnnnnnnnnnnnnnnnnngagcggnagcataagtgtaangctggggtgctatgagtgactactccata

SEQ ID NO: 129222 - DNA, 685 bp, Homo Sapiens
  misc_feature (659)..(659): n is a, c, g, or t
ccaaggatgatccacatttggggtttatctgtttataatcagagaatgggggtacacaggccctccccaagagatacattttctgtacaatgaaaaattcagtttcctatttcttaactttgtttgcaaacctacacgcctcttctctcttccaccatgtgtaataaaatccatcgcattctcttctatcttcagtcatgtagtttttgtgtttaacatttataaaatgtgttcttatgagtctgaaatctttatcagttcaaatcattcctgatttcccatctacaaccttctaggtctttcttctttctctgccgctttccttgtttgtcagtgttctgtactgaaattccacagggatggcagttagatgaggacttccatcatctctccatcagggaactcgggcttgtgcagcaagctgctgacccggcctctgtggtcaggcgacttcccatggccaggagagttctccagtttctctgcggtccctttggccgctgggtgtttcaggacggggctgtgagcaggggtcgtgctcagccggccgcggctgggaagggaggccatgctgggccagaagagctcggcactcttgtcagtctgtgtgctgctgtccttgctgcctgtcttggcgtgggcactgctggctgccgtantggaggctatggaggacagtgctgag

SEQ ID NO: 129223 - DNA, 815 bp, Homo Sapiens
  misc_feature (361)..(450): n is a, c, g, or t
aaaagacttctatattttaatgcaaatctaaggatcatcccctttcttagtttatagaagattcaaactttgtaaaacataaataacctagtactctaaacatctgaagccctttgtaatactcactgttttttcctaatttgaaaataacttatttatatatcaaacattagagcggagtgtaaacatggatgtcaatcacccttttagtttcataaatttgcttttagctttcatcaacaggcatattttcttaacctaccatgatctcaaatgagataaaatatccttcttcaaaaattgttaagaatatttattaaaaagtgcaattcaaaagttagctgggcaagcacatcattgnnnnnnnnnnnnnnnnnnnnnnnnnnnnnnnnnnnnnnnnnnnnnnnnnnnnnnnnnnnnnnnnnnnnnnnnnnnnnnnnnnnnnnnnnngtgtgctgaggaatgcacccaaaaagacaaggaaatgagaagtcaaagctagaactctatccagatgttgctgttctttccaagtgcaaaagaaggtggtgaggagagaccagcagcctccaccaccgagttctggctctgggtccaaatactactttaatatcagattattcatcagggaagttataaaaatatcctatatacatgtgcacatttgaggcattttaaaaagtcatcagaaggttaaagtttagtgtctcagcagtttcagctacttaaaaactcaattaaagcatctatcatttaaatttggattggctcagttatttgactgcagatgataaaatcaagctgtcatcttaggg

SEQ ID NO: 129224 - DNA, 1375 bp, Homo Sapiens
ctgtagagtagatcctcctttagtagaagaataacggcacagttgacgacacacaaaaaaaaccaatgatggggaggacgggaggtggagaagtaaatgggggaggggttcccattacagcagcaggatccagtgacccgggatgctcacatctctccctgacgtgggcggagtagccccttcctcccaaggtcactgtcctgtccaaccccgtgctcccctagcccgttgggaggtggacagtgagacatcttcccaggctggggagaggaggaaccgtgctgggggaaggggcctggggtcagaccatgcacagggagtgacagccaaaggccccccagtgtctccccaaagagggacttgtgggggttggagggtggacaccagaggccagtgtttgctcctcttccagcatcaggcgagagacagaacagtcagagcctcctgggcaaagtatttgacgtccacatcctggtcctgggtcagcttctctaggatgggcttgacttcactctgcaaggtgctgttgtccaggatgggccctatcttctgcagagacttggccacattgaagcggacattggcaaccgggtccccagccatgcgcagaaccgtgggtagcatgtgcttggtggtgatgtcctgcccacagacctcagacagcacattgatgcagaagagcgtagtcatgcggtgcaggtagttggggtctccggacatggccaagaccttggggatgattgtggcatgggcccactccttcccaaacttttccactagcttcttcaggttgctggtggctgcctcgcggatggcatatacatgatccacaagccaggccatgcacaaggagttaagtttctcatcaaagaactccactcccagctgtccagccaggaggggcatgtactcaatgatggccagccgcacccgccacttggcgtcctcagccagctccacaatggcagggagcagggactgggacagctgccggatgccaatcacctcgttcacacagtccaggttagagatgatgttcagccgtacctcagggcactcatccttcagctgagccaggaagaggggcaagaggtgctcgatggtgttgtctttgcccaagatgggagagagacccatgatgactgaggccagggcagacttgacatgttggttggcatcggacaccagctccttgatgcagggcaagatctgggacatgatcacattctcccgacagtcagctgagaggttttcacagaactctttgaccttgtgggaggctgcggccctcacctcggcctcacagtctttcatcaggttctggaaggcagggaccaggtctgtcttggtgatctcaggccccactgctttctgg

SEQ ID NO: 129225 - DNA, 982 bp, Homo Sapiens
  misc_feature (782)..(782): n is a, c, g, or t
  misc_feature (813)..(813): n is a, c, g, or t
  misc_feature (909)..(909): n is a, c, g, or t
aacatttaataattgcaaatatatttattacaatttacagattagttatgttatatacacaaatataattttaactataaaatcccaactagttacatttaaattattgatctgtagaagccaatttagagtcttctagtcccctaactttaccttccttaaattatacaaaaataaaatctgatagttttgatttcaagttaaagatgaagaagtgttacatttcatcactcagaaatggaacttttacctgtctgtacaaagccttttacatgctacattgacacttaaagcaccattaacaagactttaaatgtataaaatgtttaattaaaacctccaaagattttctctttaagattacgggggtttaactttgttctaactagaattgggatgaaacaagaattttgcttttttctccttcagtccaactttaaaatagtcctttctgtccttcttatcaccttctgatcacttcttccaaggaggctagtatatggaagaactcttaatcaagctttcactcatttggtagtgaggttagaatcccatggggaacaattttccaaaatccaatgaaagatgtctcattattttcaaatacacagaggtgctaggtttaagaaacaggaaacacaacgttaagtctcggaaataaaatgtttcagcctggttttaaaagaatgcctgtatgttgtcaaaaggcttttttcaaggcaaatgacgcctgctttccaaccgacattgctgttgcttgaaactagcctgttttcatgttnatagacatccctgtaatgtgctccctatgantacttaagtgggagtgacaaaacacagatcccacactttgagaggcgagggggcggtcacgaggcagagtcaagacagtctggcacataggaaccngctcgtgcgattctggctcgaggcaatcctaaggagtcgataatcgtaccagcaagtgttctgtggaatgtac

SEQ ID NO: 129226 - DNA, 669 bp, Homo Sapiens
atttgtccataatattttaatacttttccactttaaatactggttttaattctgtgattgtaacatggaagatccaactttattgtgtttaaaaaacatcatcaggatcataaagctattatagaagttactctacacactcccaaggtactttaaaatgattatgttttgagtctgtagatgaaccatgacaaaatccaaatacatcgtctgtacaactcggactaaatactggtgaaaagtgtttaattggacaaataactgataagcttaaagataaccagcacaatttcacaagagaaccagctcagcccaactaaaaatttcttaatagcaattgacactgaagttgtattaagtgtataaattagttgatgaaactgaacaaatagaaaacccattcctccttttccttattttgccttcttacacctcccttgcagatataaccctcctttggtttagctacccctgtggcaattccaaaccaagtactgcagtgatcatcctctacctcaaaaccaggagtcctgaattccaactgaaacactgtactctcttgtcctgtacagtgggcagtcagggacaaaatctccacatcaccaatatatttcaagtttctaacatagcacaaaagagtaactgagtagaaaagagagtaaagggtag

SEQ ID NO: 129227 - DNA, 1063 bp, Homo Sapiens
  misc_feature (119)..(132): n is a, c, g, or t
ttttcaattttaatagaaaagaatttattgcaaatacagtgactttttatattacagtagtacattccaatcagccatatggccataatttgcatacatttcaaatataaaactatacnnnnnnnnnnnnnnacatatagtacaatttccagtgtgatgacatttcaatgggaaaaagattgtgcatttgcaataaacaccatcattcctgagtccacagataaggtccccggagaaggggcttcccctcctttctcgctgggttgacgttcccagcgagtgaagccttttctggaatgtgtgtacgcaccctccaccaagagttctaataagctaagcttaaagcagaacagtgaaatggcaaaactgtacagagccctgactttacatttcactctgacagccagggtcggaagcaccacatggaaagtgctgtccataactgctcacttacctgctccttgctgacagctcccaggatctggctccagagagtggcaaaactgggaattttgccaagggaaattactcaggaccgctaataaaaacgccggcttctgcaacatgcatattcccccagcccccacctccatcttgcccagggcagaccattcattaactatctgcggggtgaacaaagaatcccaatcctcagatgtcccaggactcatggctcatgacccacggaatctaaggcagcacagtggcttaatttaaaagatgtgctttcgaatgaatcctagaaaataatctgtctttacacagagagggctgcgggggcaatcctactgacgagtttgttgagagcgcgaactttttcttccaagaggcggctttgtttctcggcgcctcgctgcttctcctcggtggcctgaagtgctctcaccaggtgggcgttctccacgtacagctccttcagcagcaggtcggacttcgtgttcttttcaaactgctccttcagcttatccactttctcttggaggagcatttccatattcttcagaatcatctccgcctcttccacccgctcttctgtggctttcagctgtttctcatgttcttc

SEQ ID NO: 129228 - DNA, 882 bp, Homo Sapiens
ggcttaaacaacatacatttatttctcttcgttctataggctgcaaagtttataatcagggtcagagcccttttcctgtgtgcagacagcttccttcttgctgtgtcctaacctttcgagatagctttcctggagcttccctacttttctgcaggtggagctgaataacagatttatcttttagaaacattttgtggctccccaaacagtggtcgttttgtaaaaattcttcagagccacatacacttagaatatgatctttggggagtagctggtcatttgtgcaaaaatgcagaatttctgcaattagatctttgacaagataattagcacatggcataaaatgaagaggttgtgttgagttatcaataaaaatatgtatattaaacttggtcttagaaaagagctgatacggaaatgctgtagtagtgctccagatcttcccagaattgaaattaacatcagctgcatgatatctttctctgattttttttactttgttgcaaaaagaggccagactcgtattgctgctttgaggtacttccactagctgaatggaacaacctattgactctatattcttctgccatgtactttcccacattccgggttgaagagagcctttcaaaagcatcaaagatggttccacaatgttcacatgtccactccttttattctcttctttcggcatgaagtcacttgagaaggatgaatttgttggaggaatgctactttcaaatcctatatggtagttatgattttcattttctaattctttctctagattaattttatccaaacttgtgaatgatagagctaaaatactgaatctggaatcatcagcaccatgatgttttcctatgcttccccaggagcattctt

SEQ ID NO: 129229 - DNA, 219 bp, Homo Sapiens
cattaaaaaatagtgctctttattataaattactgaaatgtttcttttctgaatataaatataaatatgtgcaaagtttgacttggattgggattttgttgagttcttcaagcatctcctaatagcctcaagggcctgagtaggggggaggagagaggactggaggtggaatctttataaaagacagagtgattgaggcagattgtaaacattattaaa

SEQ ID NO: 129230 - DNA, 574 bp, Homo Sapiens
  misc_feature (457)..(507): n is a, c, g, or t
tttttcacggttatcagcaatacagatattaataaaaggcagacgaagtcaggaggtcagcaactttgcgggcttaccaggaggcctgtcctgcctctggaagccagcgacagagagggatgcccccgacccagccagccggagaaagggatggggtggtcacgaaggtctgagctgggtctgggtgtaggctgggaagcaggctggggtgtagactgcgaaggcggccctgccgggacttctttccagtccccggcgacctcttcgaattctctgctatctctggggagcctcgggtgggagggggtgtaagagacgcagggacgtggggagaggagacaaggcaggcaagaaccacaggggacggcggacagacgggcgacatcctgcggaggacgccgtcagtaccaggaagtgcaggcgatgaggaagcgcacgtcgtccagcggcccccacnnnnnnnnnnnnnnnnnnnnnnnnnnnnnnnnnnnnnnnnnnnnnnnnnnnggatgccggggctgttccgggccctccggcgccgcaggctggggacaggggctggggctgggtttgc

SEQ ID NO: 129231 - DNA, 436 bp, Homo Sapiens
  misc_feature (320)..(392): n is a, c, g, or t
gccggagaaagggatggggtggtcacgaaggtctgagctgggtctgggtgtaggctgggaagcaggctggggtgtagactgcgaaggcggccctgccgggacttctttccagtccccggcgacctcttcgaattctctgctatctctggggagcctcgggtgggagggggtgtaagagacgcagggacgtggggagaggagacaaggcaggcaagaaccacaggggacggcggacagacgggcgacattctgcggaggacgccgtcagtaccaggaagtgcaggcgatgaggaagcgcacgtcgtccagcggcccccacnnnnnnnnnnnnnnnnnnnnnnnnnnnnnnnnnnnnnnnnnnnnnnnnnnnnnnnnnnnnnnnnnnnnnnnnncctccggcgccgcaggctggggctggggctggggctgggtttgc

SEQ ID NO: 129232 - DNA, 513 bp, Homo Sapiens
  misc_feature (221)..(271): n is a, c, g, or t
gacttctttccagtccccggcgacctcttcgaattctctgctatctctggggagcctcgggtgggagggggtgtaagagacgcagggacgtggggagaggagacaaggcaggcaagaaccacaggggacggcggacagacgggcgacatcctgcggaggacgccgtcagtaccaggaagtgcaggcgatgaggaagcgcacgtcgtccagcggcccccacnnnnnnnnnnnnnnnnnnnnnnnnnnnnnnnnnnnnnnnnnnnnnnnnnnnggatgccggggctgttccgggccctccggcgccgcaggctggggctggggctggggctgggtttgcgcaggctccggggcgccgcggccgccgcttagctgagcccccatggtctcggcgtcgggaggagctggcgccgtacgccaccaccgcgtaccgaccctcgtgccgatttcaacccagcctcgtacctagcctatgttcgcgggttgtttgggtttgttggtggtttgtggtgtgtg

SEQ ID NO: 129233 - DNA, 1024 bp, Homo Sapiens
  misc_feature (51)..(91): n is a, c, g, or t
gtataatttgttgggagacaaagccccccaaggtgattgttgtgcgcccannnnnnnnnnnnnnnnnnnnnnnnnnnnnnnnnnnnnnnnncgtttttgggcggacagaggacggttttttgcgggtggggccaggcttccccaagggcaggcaaggaaggtcccgggttcttttgttaaccgggttaagtccgaccccccaattcccagtagacccaccgggttcggggggccaaggcccaatgcaggtttcaagggagccagggggtggcatccgagaacccggccaaccccgctggagactgccatgacccctttttaggctttggcagagaaccagtgggcattgatgaacccattggccttgtctagggctcctcagtgacaagcagggctgcctccgccgtaccgtggagcaaggcaggccaagccctaggaactccctgctggagacagtgaaggggcgggccagtgaaggtcaaaaagggagccccctcagcttggggctgctaccggtaggggtgtccttctaagagcagtgtgggaagatgggcccagtgagcgaggtcagcaagggccaagctctgggaaaacactgcttccagccgagagattgagtcggcctcagagtagctggagtcggcctcagagtagtgggggcactgagcacttcagacgccctggtccccttccgaaggactcccaggctctgccagtgttggccctgcagccatctctgcctcacctaactggtgaggctgagctccaggctgcaagtgacagactggagcagagctggggacagtgacaatagaggggagtggaggacggtcacaaactcggatcttcctccagaaatggggtcagcttctgccccagctctgtagccataggagcagagctcagctactggggtgtctgggcgctagagtggccttagcagcaccttggtccttgtcgcctgggggagggccgcctcgttttgaatcgccacccaggcctcgctacttaggacttgtgcggg

SEQ ID NO: 129234 - DNA, 2687 bp, Homo Sapiens
  misc_feature (2534)..(2596): n is a, c, g, or t
cctgggtggcgttcataccgaggcaggaaactgctcctttctcaagatctcttcggagacccaggatttagggtcacatgctgcaggcagggctgtggcccagctgggtctgacaaggacccagctgtcacatcgtgaatatttaaatgtcctgtcactactgtcccattttgcaaaggctgcttgaggctttaggtgaactagaggtgactgtcttggtgatgaggccagcatagcggccctcccccaggcgacaaggaccaaggtgctgctaaggccactctagcgcccagacaccccagtagctgagctctgctcctatggctacagagctggggcagaagctgaccccatttctggaggaagatccgagtttgtgaccgtcctccactcccctctattgtcactgtccccagctttgctccagtctgtcacttgcagcctggagctcagcctcaccagttaggtgaggcagagatggctgcagggccaacactggcagagcctgggagtccttcggaaggggaccagggcgtctgaagtgctcagtgcccccactactctgaggccgactccagctactctgaggccgactcaatctctcggctggaagcagtgttttcccagagcttggcccttgctgacctcgctcactgggcccatcttcccacactgctcttagaaggacacccctaccggtagcagccccaagctgagggggctccctttttgaccttcactggcccgcccttcactgtctccagcaggagttcctagggcttggcctgccttgctccacagtacggcggaggcagccctgcttgtcactgaggagccctagacaaggccaatgggttcatcaatgcccactggctctctgccaaagccaaaaaggtgtcaggccagtctccagcggtgctggccgcgggtctcgggatgccacccctgctcactgggccctgcatgggccttgcccccgaccctgtggtctctgggattggggtcggcttaccctgtagcacagacagggactcctgctgccctgggagctgtctcaagcaaaatctcttgtcccagaggtgcccatgtgggtccgctgtgtcccctgtcatcatccttgttttttctcattttggccaagggcaggctccctgggacaggcagggaacaactgcggagatattagtgattcataggtttgtacagtgttttatactttgcaaagcactttattagctcacacctgtccactcacatgaaactcgtgttaggccctgggaggccgacggtaactctcaccgtgccctcagatgaagcacagagaggttgttacttgcccgggccatccagtgggctggctgggtcttgtgtccccatctgtggacccctctagggtctgagatgagatgagaagtgtctcctgtatccacctcttcctggcctcccttcccccacttcctggtccctgtccactcctcaggttggtgctctcacttcttgaaagctctaggcacccccgcctcccgccaggctccccattggctcctggcaggccagctgagaatgaacaggagatggaggcaggcagcccaggctgcagaggtgagggatgtggggccaggcccagagggctcagcctagaggcttccaatctcagattctcctgcctgtggtcatctgtttgtccatcaccccaggacagggcagacagaggggcaaagcactgggggccccagagcctagcttcccctcagcctgggggacatcacagcatttcagtgtcagtcacattttaaactgatcagcctttgtataatgttttttaaatcatttctaaataaaacagaaatacagagtgtgtcatttccctgggatgagggaacaaagatcaggttccaagagtaaccttaggacgctctgggaagagaaccgggtcctttggggtgtctgggagctgcccacccatctcctctgccagaccggcggtcagatagcctccctctacaacaggctggccctgggggcccagggttattggggttccaggaacacagcctgatgatgcctccttacgatccaggatggagagcagcccccccaggagtatggggagggtcactgtggcacgggcttctccatgacctgggacatgaccaggaggcctgtcctgcctctggaagccagcgacagagagggatgcccccgacccagccagccggagaaagggatggggtggtcacgaaggtctgagctgggtctgggtgtaggctgggaagcaggctggggtgtagactgcgaaggcggccctgccgggacttctttccagtccccggcgacctcttcgaattctctgctatctctggggagcctcgggtgggagggggtgtaagagacgcagggacgtggggagaggagacaaggcaggcaagaaccacaggggacggcggacagacgggcgacatcctgcggaggacgccgtcagtaccaggaagtgcaggcgatgaggaagcgcacgtcgtccagcggcccccacnnnnnnnnnnnnnnnnnnnnnnnnnnnnnnnnnnnnnnnnnnnnnnnnnnnnnnnnnnnnnnnggatgccggggctgttccgggccctccggcgccgcaggctggggctggggctggggctgggtttgcgcaggctccggggcgccgcggccgc

SEQ ID NO: 129235 - DNA, 1072 bp, Homo Sapiens
ctatttagatggattttattttgcaatatttattatatattcaattcaaatgtactcactattgtgctaggcaattgaaagtaaaaagtataaagctgcattttgcgctctcagtgaggtttaagtcagggaaatgaggcatgcacacaaaataacgagaaagtagtataatagctgtgatcattagttatcaaaataagtgaatgagctaataatcattgttagaataataattgtgttcttagatctcagatgctttaatgaaaaatgttatcttgaggtcaactttgacaaatggggagataactgaaaaacatctgacattctaggtagggaaaacagaagcaaatgcttaaaaatgggaataagtatgtattctgtacacagagacaacttgatttcaatacatactttatggtggaaataatgtttgtacttttacttacacagtccggactcatgtttctaaaacactgataattttgtgtttaacttcaatgtaaatgtgtagactaatacttttagtggggtacaagtgagaggaatgttattttagaaactttactctggcaccactgagtcatcataaattattactctcagatagaagatttaattcttgcagttagccatgtcagtttatcatgagtaatcagaaagtgttactcagaagctttattgtgaatattcagtttgttacagtgaacatggatgtgtatgggtgggaaggtagtgtgcactggcaccacagaatattctgttttcatcttatgcttgaactaatttattgatgagattctcatttctgtagtataaaaggaaaatattttgcagttatctcgtatttgaaagactttgccatagagaactttatcagaaatggatgaacttttcattatttcttataagcatattggttttggcctgcttgagtttaaaactttttttggtagacttagaatgttaatatttagataaagaaaatattttactgaagacattaccagaaagtaaaataacttcccggccgtaatggccgaattcccgggcatatgtccggtaccgtcgactg

SEQ ID NO: 129236 - DNA, 1171 bp, Homo Sapiens
gattataaagcaagtttattctgaagagggattgtcttatgtttacgcacagggaagaaataagaggaaaccctcttttcaacctcttttccccctcacagaaccgagtccccaagttctcagcaacatcatgcagtgcttcagcgcctttactggggaccaaagatgttaggatcgtgaagggtcagactggtcaccagctgttcaaagtcacccaggctccagggtgcaggtgacagattttcggggccaagagatgacctgttgtcagggcttggggtgggggaacagatggagacagaacatcatccaggcctgaggtttggaaattgccaattcctgttccccagaggacctgggtatcagttaccccaaacctctggcccactcctgcttccttggaggatcccaccagtgagtctccctgttctgtccctcccagcccgattctcctgggaacccagtcatgagatacccgccccgttcccttcctccttacggggggctgattgaaggtaagcaagagatcagtctggtactggggcagcctcagcaaggcctgatgaagtgtcacgtcctttgctacctaaggggatcagagtcaggatgcttacctggatctctgcgtccccgctaccgcccttccaggacattacacactctcgggccctcacctgctggttttccttagctatctgctgcttgccagagaggacccaggcttcttgacagcggcccctcagggccaggttctccaaactgagaggctgaacagactccacatggacagccctagccccctgcacgccaccaacatcctcaaagtggtaccgcgcagccgcttcgccccgtacgtgggcctgcagctcgagaagttccactatcaggctctggtccgtcacgggatggcagaaaacttcttgattgtccgggaccggtcggaggtcgcttacgtcaatggcccccatggggaggatggcggaaaaggcgcccccgaacagcgggcagtctctcgtgggctccatgggtctgaggctgggttatgggcattagaaaggtttaaaagaagtccacattgggtcacgtggcatcggctccctgggtttcgcagctgccaccgccacccggcctcgtgccgaattcaccacccaggcctcgtacctagccgtat

SEQ ID NO: 129237 - DNA, 1009 bp, Homo Sapiens
  misc_feature (901)..(935): n is a, c, g, or t
tttgattataaagcaagtttattctgaagagggattgtcttatgtttacgcacagggaagaaataagaggaaaccctcttttcaacctcttttccccctcacagaaccgagtccccaagttctcagcaacatcatgcagtgcttcagcgcctttactggggaccaaagatgttaggatcgtgaagggtcagactggtcaccagctgttcaaagtcacccaggctccagggtgcaggtgacagattttcggggccaagagatgacctgttgtcaggggggggctgattgaaggtaagcaagagatcagtctggtactggggcagcctcagcaaggcctgatgaagtgtcacgtcctttgctacctgctggttttccttagctatctgctgcttgccagagaggacccaggcttcttgacagcggccctcagggccaggttctccaaactgagaggctgaacagactccacatggacagccctagcccccggtgcacgccaccaacatcctcaaagtggtaccgcgcagccgcgttcgccccgtacgtgggcctgcagctcgagaagttccactatcaggctctggtccgtcacgggatggcagaaaacttcttgattgtccgggaccggtcggaggtcgcttacgtcaatggcccccatggggaggatggcggaaaaggcgcccccgaacagcgggcagtctctcgtgggctccatgggtctgaggctgggttatgggcattagaaaggtttaaaagaagtccacattgggtcacgtggcatcggctccctgggtttcgcagctgccaccgccacccgggtctggcttagctcccggatcctttaagattccccggccgtaatggccgaattcccgggcatatgtccggtaccgtcgactgnnnnnnnnnnnnnnnnnnnnnnnnnnnnnnnnnnncggccgcttcctcgctcactacttcgctgcgctcgtcgttcggctacagcaggatgcgccatatgaggtaggac

SEQ ID NO: 129238 - DNA, 1784 bp, Homo Sapiens
  misc_feature (629)..(647): n is a, c, g, or t
  misc_feature (1456)..(1456): n is a, c, g, or t
  misc_feature (1528)..(1528): n is a, c, g, or t
  misc_feature (1569)..(1569): n is a, c, g, or t
  misc_feature (1591)..(1591): n is a, c, g, or t
  misc_feature (1619)..(1619): n is a, c, g, or t
  misc_feature (1630)..(1630): n is a, c, g, or t
  misc_feature (1697)..(1697): n is a, c, g, or t
  misc_feature (1743)..(1743): n is a, c, g, or t
  misc_feature (1758)..(1758): n is a, c, g, or t
gacctgaagtgtctctgtcggcaggtcggatatgtttgtgctgaacgaactgtcctcttgcttcagaagccccttttgagtgtggtctctggtgcaagttcctgttagctgcctggcccggtgatgctcgacagcctggactctgcaacacctgtcaactccatctgcagtgttcaaggcactgtggttggcgtggacgagagcactgctttctcatggcctgtgtgtgacatgtgtggcaacgggagattggaacagaggccggaagacagaggcgccttttcctgtggggactgctcccgggtggtcacatctcctgttctcaagaggcacgctgcaggtcttcctggactgccgctcaagaccgcagtgcagagtgaaggtcaagctgttgcagcgcagcatttcctccctgctgaggtttgccgccggtgaagatgggagctacgaagtgaagagtgtcctcggaaaggaagtggggttgttaaattgttttgtccagtccgtaaccgcccacccgaccagctgcattggattggaggaaatcgagcttctgagtgcaggaggggcctctgcagaacactagcggttgccgcaggatctgtgaactttgcaatgtggctgcaagnnnnnnnnnnnnnnnnnnnatttggggtagttatttgttaactatggacacagtgaacgtagtttacgatcttgaaatgaaacttagatttttctggggaaatgttcagatacagttttgtgaactgtaaatcaaaatacctttttctacagtttatcttttattttctgcaaatttaggaacatatttactcgttttcacattgaatcttaagtttaagctcttcatttggtatttaggcaatatatgagaaaaaaattttttttgttcatttgtaattttaacaagttgaacattttaccatgattgaacatgtttttattacagtatttaacattcccccaaagaataccctgcaaagtgtaaacctttgtcccatactgtgatattactgttctgctacaataaatgtcaaacctaagcactttgcagttcactacttttgggaaaatgttctagggaactgtatcacaggtgaaactgttacccataaagtgtagctctctgaactggtgtgatcgtgtctctgctgaatggtggtggggatagctggctccaccacacacacctgttttaattaggctgggtaatgtgcacggagagcaaagatcacagactaaggagcagtcagtcggatatttgctttgctggcaaagatttaaaccaagaattaattatctttggacactataaagattttgttcccttccttatagcaatataatcatgacaggccatggttaactacatcagatacacgtagcagccgtgaccaagacatggtgccctaataccaagtgttcttgggttaaaggcaggcggcttttntattaaatcttaaagcactgcaattactggcaagacagctggtcttaagcagttttgtgactgccttttcantcactacatgactatcccgggctttctggagcacttttganatctacttgactctgtccacangactgaggaaaagtgaagcgggagatgnatcagccgggngttctgccccctcgcccctcagcagctctacagttagggagtcttgactgtctcagcaggggcccanaagtcaccttcccaggtctgcgtcttcgggagaacactctgctggnaagtgctagctactnagtcagcgtgtccacctagctagcag

SEQ ID NO: 129239 - DNA, 566 bp, Homo Sapiens
gccatggttaactacatcagatacacgtagcagccgtgaccaagacatggtgccctaataccaagtgttcttgggttaaaggcagggtggaatgcgaccagaggagggagtgctttgaaattggatgaagaccagagtcgctggaggagagggcagaggatcaaaaggtcattgttttggaaggatcgttgatatagatgtaatcaccaagaatcaggagcgaggaggagtgttgcagtgacagtgagcaggagctgagggccagtgacctgggttggtagatgacaagaacaggaaggagtaggggcggtgtggtctgatcacatgggagtcaaagctagaggtttctggaggagggagaatggtctggcccagcgctggggcctatgagagaaaacaggcaccaccagcaagactccagtgaggcagcatccgtcagggacagccaggttttcatcagaacaggctccagaaaacattctgagaagaggttgaggaactagagggtgttctgctggtgacacatgagtttcaggcatagtggaagggatacagcagtgaggggg

SEQ ID NO: 129240 - DNA, 849 bp, Homo Sapiens
  misc_feature (323)..(448): n is a, c, g, or t
catttagatttctaatttattattaaattacataccaaagcttcttctatacagtcagaaaatgcacatttagatgagaacaaaaattaagtacaaatacaataaaattggttccaagaagctattttaaaagcaaaaacttacaaagtgcatttggaaaacaataggttttaaaaatctgtattggcattttttcaagaggaaacatcttccatcacaggaaagtatggttggaattgatttccctcctcccttaagagctaacagggtgggaatggatgcaaataccttgatattaaagtgagctctcaggtatcttttannnnnnnnnnnnnnnnnnnnnnnnnnnnnnnnnnnnnnnnnnnnnnnnnnnnnnnnnnnnnnnnnnnnnnnnnnnnnnnnnnnnnnnnnnnnnnnnnnnnnnnnnnnnnnnnnnnnnnnnnnnnnnccctattgtcatggtttttcatattttttcagtgaaatgaaaagttttgagtggttacttaaaaggaccaaaaaggaaagattcattataataagacaatagttgagggggcataacttcccctaagaggtaacatttggatccagaagtagaaaattccttctgacctcctggctgtgactagcattaacaagtaactaactgttagcctctgaatctggtaactggtccgtaaggaggacagcaaaaaaggagagaaagccaaggtggttaaacaaaaaagttaaatgacatggagctgaaagagctcaaatcccttcatgggatccccacggagccccttcctgtggacacacacctctcttcccttgctggaggtttctttctgcaaagaaaccccc

SEQ ID NO: 129241 - DNA, 1645 bp, Homo Sapiens
tttaatgtttaacttttctttgtaaaaaacttattaaaaaacttaaatggtcagttaaagttaaaaatctattgctgcacaatttaactgattaaaagatttccagatctcttgactccaagagtcatttctttcatttcttacagatctcacacttccagatttctctttagcaaacatgatctgaaatcatttgtaggtaatcagcacttcaagcatatggaggctctggctgaggcagcagagtcctgggagactgaacactgggagattcagtgtcccccacagaaacctagacctgggctcagcccaccactgctaggggtcctgcacaggacccatgtggctcctgcacgggatctatgtggcgaacctgagctcgatcttcgctgtcagtcctcctggtctctcctgagggccgccgacccgccacagtgtggctctccttccaaaagccagagcttcattccactttgattctcatcagctcccatcttcctcctccacagagtttcagaaccaaggaatgaaacttctcaaggctctgccgatgtcccacactgatgaacgtcatccccagctgctggccgatgcgatagagctcgctctccacttcctctgtcagggcactggtggcttcatcaagcactgcgtacttcggctgcaggtagaagagtcgggcaaaggagagccgttgcatctcccccggggacatgaacatcataccagttccagtccacctgctggtccaggccctctgtccttgccaccaagttggacaggcctgccaattccaagaacctcaagatcctctcatcatcggcagtacatgagtcggggtagacctccttcagaggatatatcacctgctcccgaagggtccccgtcaagtgaagaatggctttttgtggcaggaaatagcacccccatggggcccaaagtccgtcagcatctgcactgagctccgtgtactcgtccagaggccacccagaacccggagccaagtaggtcttgccagtgcccgtgttgcctgtgatgagcaggctctgtccctcggagatctttaggctcagatccttgattaggggtttgtcagaggagggggcagagatggagacccgctcaaggagaaatgctgtgtctgctggctctgccgctggccacctgggggtgtgtccaagccccacttgctctcgcccaggatctcgcagtcctgtgacttcagggacatgtccagaagcgtctcccgaagctgcccaattctgtgcgtgtagccagccacatctgagagcgtcgtggacaggtcgattagctgggtgaagcagctgatgaggtagatgcacacaaaggcattcttgctgaccagggtgctaagctctgtgggactcaggtctccatagaccccgctgaaaatggggattgcgatgacaacgtaactcaggatgctgcccagatagtcaaaggtgttgatgccgactgtagaaagcagcaggctccgcattcacccgaatctgcatgtgcttgaacctaaaatctccctccagcttctcctgatgcaccagcggacgcgtggcgacgcgtgggtcgacgatatcccgggataccgaccgtaccaccgcttttttacgactgttatagtcacatt

SEQ ID NO: 129242 - DNA, 834 bp, Homo Sapiens
tttttaggcttttagaaaatttattatgaattccgagaagtctgctcatcatatacctcccccagccccaaataaaacaaacaacatgtttgtacataaagcctggatttacttggtacaaaatttgagtctttgaaaaaaatagttaatggaaaatctcaataaaaattcattttgaaagtaaccagtactgttcagaaataaggaagtcatgttacttgagaagtcacacagttttattacagaactatgtgtatatattttgggtttaaaacttgccaatagctgtttgaaaggatagctcataatttattcaaatagatattttattaatcaaatgtttttggtttatcaacataaccaaatgtataaaaaatgtttttaaatacaagacataactataaagtcatgaggctgattgaccttttaaactaacataataaaatctatatggtcaaaatgagtggtgatgctttaaggtaatgattatgcgtcccatctaaggatgctgcaatggcctagggcagttttgaaatgtctctttgcaactaccttcaaaaggatatgagcttcataatttaatcattcatttgatttggtccccaatattattccagttcaatcatcatttatattcaccagtcctggcgattttgaaaaatcttattaatcttatttgtcacttattagcctattcaaaggaatgtcaattgaggttctgatggtaattctgaaatttaagcatttacacacttttaagatgtgtaaattttagtaactactcacattatagacttgtttttggtatatgtctatcattttgaaataatgaga

SEQ ID NO: 129243 - DNA, 1571 bp, Homo Sapiens
cgttttttcggaactcagcagctctatttacataacagcgtcgcccacaccccgtggggcctctcacggcttcttggctttcttcacggaagatgagctggaggccgactcccgtcgctttctcgaattgggcgtgaggggtgcgcccaccacatcaatgatggtgtccttggggtcaggaccaagtccgggttcagtcactgccggctcagcagaggccgggcctgggcctgatgctggtgtggcagggccccctagcacaccagcccgggccagtgcctcatgacggtgccgcagcatctgcagctcatactcgcagttggcacaggcctgcttgagctcgtagagcagcaccaggtcgcttcgcagctcattgaacatgtgcaccagctcctccgtaggtgtcgggctcagctccacaccaagctccagcagcatctgttccagggccttgatcttcttctgtcccacagagcttggcagcttcatccgttggctccgcagcgtgacacctgcagacttgaagtctggaaacttgatgcctgcagtctcaggaacagccggcttctcagcctcctttttctggggtagcttctttttggggggccttgcgttccgtgcgccgctgctctgcagtggtgtctgccgctgtgatcagcttctgcaggtcctggctgcgtttctcccgctccttcttccgggcctcaatcttgcgcagctcctgtagcaggtactcctcctctgccacctgctctggggtccggttgtagagacgctcaagctgttccttcccgccgtcgttcgtgcccagcatcaaatactggtatcttaaggtctgtgcctggcacagcccgcacgttggcaagcttagcacagatgtggtagtaccgctccttcaggtcttccacagaacgcttcttgaactgctggtggtcataccggtcatggataacaacaaacgcaggtcaaagcggcggctgaggtcaaagaggtggtcagtttctgccttagtccaagcatcatcgtggagataaagctggtactcctgctccgagtacacaggcacctgcacagtcttattgaacctggcaaaggggtagtccttgccctcctccgctgcacgtcgccagtggaagaacattgctccgtccttgcgggccgggttggtgaatggcatccacttccaaggccgcaccttcttggagcccaacttggccttcactgtacggtatccctggccagtgtcactgggtagcagtgggggtgcatccttcttgtcagagtagagcaaggcatagacttcccggtgcatgccctcgggcctcttgaaagtcagtgtctcagaggacttcttggattttttcttgtccgggttgataatgtccttcttgctgatggtcccagaggctgcatccccttctggacccccgagttctagaatgtcccgtacatccgcgcccgtagccatcgcgcctgagagatgggggagccaccggaggtcaagggtcagtgcctgggtccggcagctgcagcccccactaccactcccccgtccccgcaaagccgcggca

SEQ ID NO: 129244 - DNA, 701 bp, Homo Sapiens
gagtgtgtgtcccatgactgaggctctggagctggagacagtgaagttgatcctggaataaatcagaggcaggctacagtcccaaaccctgctaggacctctagtcaagcagacaagttctttcctcactccatgctgcaggggcacaggcccagggtctggcaacaaacaggagcagctgtggtcactggggcctggagcctgctggacatgacatcatgcgggcatgcccctactgtgtccctctgtgctagtagactgtgcaggtgcctgtgtactcggagcaggagtaccagctttatctccacgatgatgcttggactaaggcagaaactgaccacctctttgacctcagccgccgctttgacctgcgttttgttgttatccatgaccggtatgaccaccagcagttcaaggtgagccattgtgtatttgcatgggtgcccagcttctgggtctagcaggccctacttttatgccatctcttccacatgcccctgaatgttcattcctctaccctgtcttgctcctcagaagcgttctgtggaagacctgaaggagcggtactaccacatctgtgctaagcttgccaacgtgcgggctgtgccaggcacagaccttaagataccagtatttgatgctgggcacgagcgacggcgcacggcacggcatgaggtgttttatcaaccgcatcacccgtt

SEQ ID NO: 129245 - DNA, 946 bp, Homo Sapiens
  misc_feature (105)..(105): n is a, c, g, or t
gatttattccaagtatttaatacacaatgacgcaactgtgatcccaagtgtgcaaagttaaagccttcgactgcagctgaggagaagggaggaatggttcacctnggggacggtggtgagtcaggaatgacaggcaggcggccatgaccagggcagtctcctacccatggccagggacaggggagcggcctgaggagcaggacccaagggtagcccagggccggggaagggggcagagacctccccttggcctaggtcaggagctcagaagtgccacatggctgaggggcagcggcccgggaagggccagaggcagggccaggagagcaccatttcctgggaggctaggggcagggaggtgccctacaggagaagccaggaggggccgcctgcccctggggtgggggccaggctggagcaggctgcagcaagaaagacctgaggcaggcgcagggcctgagagcctggctggctgggctcggaggggggctcccagggcagcctggccccgggagcagtcctgactctgcaggggatgccgagtgaggggcagcagtcccctcaggacctcccctcctctctgcctggaaaggagctggagaacccgtagtgcaaatctgtggaccactcagttatggagggaggctgtgcccaaaagtggacactggggtgcatcccctccaccacctcggcctccaccgctgtcctcagtacagccgcttttcgtaagagtgcaggccatggacaccaccctcaatctgggccgacatggtccgcttctcaaacttgagctctcctgagtacatcatggaccgaaggacagacaggctgcgggccccgatatcctggcagccgtgttggatgcctgctatgaggtagggcacgaacttctgaatggatcctttgtcccctcgtgccgaattcccacccagcctcgtactagcca

SEQ ID NO: 129246 - DNA, 1192 bp, Homo Sapiens
ttaggccggataaccagcccccaatacagccagcatccagtcaggctcacggcccgaaagcatttcacagccccacgctgcattgcactgcggttcgcaccgcaggtggaagaagacaccagcagcaaattcttgctggcccttctgaaagctggcacctgtgcgcggtataaggagtggatccgtttcagcatgacaattcctagcacagcaatgccagtgaagagcagggcgaccagcagcatgagcacggatactgcgtgtgttgcccttcggcaccaccagagcagagatccaggccactgaatccgccaacctgggataccaatggcctggaggacaaagagcacatcctggacgaagaaaatgaagaagcaaacgaagaaattgaatgaactgtcactccggaaagcccttatacatggggcggtaccagcagacaaaggagcagggagtgaaaaggaggacccagaggatagaaagcccaaagcctgcgccattgttggtttccacacagaagctggccaggcaggcgaggaagttcaggagaagagccagcgtgctgcacatccagaggtagtacatggtggatacagtcttctgaaattcttgggggatctccatggagatgtcctggaaaaagcagggctgaactggacaaaaagaaggtagagggggccaattgttctgtcgagtagctgtgccccccagggcagcatgctgcagctctcgctcccttcggtccaactcctctgccttccggttgagctcctcctgtttcttcagcagctcagctgtggctgctgcagctgaggcctgagtgctgtatgagccatagttcttaggttctgtggggctgagctttctcgagggctgcaaggagggagctgagggtggaggcaatggggcaggggctggaggctcataggctggtggtggctgaaaggggttgtcaagctcgctgggctcggcgaacgggtttccgccgtctctgctctgagccatgtttgcaactgcggcctccgcggccctctgccctccacgcccctgccgcagcagtggcggtagcggtagccctcagagtccacttcactcgcctcagttcgccccgcttctctgtgcacggattggttccatcgaccggaagggccacaaggatccccgcagcagccgtggttgcgcctgcgtcttg

SEQ ID NO: 129247 - DNA, 1562 bp, Homo Sapiens
tttttcagccccagttccactttctttttatttaaataaccgaagcaacagccgtggcacagcagagggaagctgggttggggcgtgtgagaggtggcagcagtgtggcctgatggggggactaggtcacagtgaactccccacacgcctgtcaggttcagcagtcatggccataggattgggagcactacggaggagccatcagttagtgatgtctctccaagtcccagagaccttagggacgggagctaagtcagctccctcaagtagcagggccagggcatcccagtcaggggtcacggggcccggaaggcattttcagcagccccagcggctgcattggcagctgcggttcgcaccgcagggttggagaagacaccagcagcaaattcttgctgggccttctgaaagctggcacctgtgcggcggtataaggagtggatccgtttcagcatgacaattcctagcacagcaatgccagtgaagagcagggcgaccagcagcatgagcacggatactgctgtgttgcccttcggcaccaccagagcagagatccagccactgaatccccaacctgggataccaatggcctggaggacaaagagcacatcctggacgaagaaaatgaagaagaaaacgaagaaattgaatgaactgtcactccggaaagccttatacatggggcggtaccagcagacaaaggagcagggagtgaaaaggaggacccagaggatagaaagcccaaagcctgcgccattgttggtttccacacagaagctggccaggcaggcgaggaagttcaggagaagagccagcgtgctgcacatccagaggtagtacatggtggatacagtcttctgaaattcttgggggatctccatggagatgtcctggaaaaagcagggctgaactggacaaaaagaaggtagagggggccaattgttctgtcgagtagctgtgccccccagggcagcatgctgcagctctcgctcccttcggtccaactcctctgccttccggttgagctcctcctgtttcttcagcagctcagctgtggctgctgcagctgaggcctgagtgctgtatgagccatagttcttaggttctgtggggctgagctttctcgagggctgcaaggagggagctgagggtggaggcaatggggcaggggctggaggctcataggctggtggtggctcccgggtctcaaaagggttgtagacgtcaagcgtggcatactgccggctgggtcggtgctggatcacagctgggtcctgaaaggggttgtcaagctcgctgggctcggcgaacgggtttccgccgtctctgctctgagccatgtttgcaactgcggcctccgcggccctctgccctccacgcccctgccgcagcagtggcggtagcggtagccctcagagtccacttcactcgcctcagttcgccccgcttctctgtgcacggattggttccaccgaccggaagggccacaaggatccccgcagcagccgtgggttgcgcctgcgtcttgtccaaaagctaagacgaaagtgcccccacgtgat

SEQ ID NO: 129248 - DNA, 1705 bp, Homo Sapiens
  misc_feature (1585)..(1619): n is a, c, g, or t
  misc_feature (1623)..(1662): n is a, c, g, or t
tttactgtggcgttaggctttattttaatgtaaacataaagcacacatctaaactctgagaaatacaggtagatatgctggtttacctatttgtatagtcaattcctgtttattatgaaacagcgttatctctttgtgtatcttttagctcatatagtcaaaccccatgctgccaacctcaggactaaataaactgagatggggctttactatctatgacagaataaatgtttaaggtgttgcaaagccagacatgaatcagtttttctgagtgattggaaacattttggtacgatttatatcctaactctttttgaccattagcagataaatagggactattttcctgctaacaggctattttaaaatatcattaaaaacaaattgtatgcagttgtatatcctgtttcagttgtatatctaattatatgccacattctttcaaaaaattggcttttcattcagttgtcttaaatttgcaagacgaatggtaacaatgtctttatgaagatcacaattttgaatgttacatgttgagtgagacattgaaagctgtgtttatttttttcagtgactgattttctatgtccatagatgctataaaaactgatcgaagatcaactaaaaattcaattacaatattacaaattcaactgcaggtaccaatattacattatttgacagggataataaaatgagcaaagactggaaatcacagacaataacattgctttctcaattaacagaaaggattcataacatattccttaacggtagatgtgatttgtagagaatgtggaaaagaactattgagaagtccacctgctgccccagactgaggcacattagggtggttgtgggaggagttatatttgagggttccatttttccttagggtattaaaatgcatgtcctggtttgttgtttatttgccattaagttctcttcttcaaataaaagaattaggggagaaagtatggaaaagaaacgcactaaacttctggaaaaattaacagaagcttaaaaataacaatttccaaagaatcattctcttcttggtatagagcagtacctgtcctagttgccttaactttttgtactcactggtaaagacagtgattagtaagaccagtgaatttgatacagccacttgaaagaaaaaaaggctgtactacaaatacccatgaaaacagattttctctcacccttccctctgccctcaaggagacagttaaaacaaaactatgacagcatttggtgatttcccacaagagtactgtcaaacctttgagagagtactgctgaatcttcagggaagacctgtagaaagttgaaggccatgagcgaaatgaaagtagttagtttcagagttagaacttctttatgctttctttcaggcataagtgcttttgtgctagttcaggagaaaacacttgcttacactgcttacaccatcaacaaaaataatttcagtatggtgagatttgtcgcattttagcaaaatttttaaaaagggttgagtgttaaccattctcccggccgtaatggccgaattcccgggcatatgtccggtaccgtcgactgnnnnnnnnnnnnnnnnnnnnnnnnnnnnnnnnnnncggnnnnnnnnnnnnnnnnnnnnnnnnnnnnnnnnnnnnnnnnttcagcgagtagcgcccatatgtaataacaaagttttcttttt

SEQ ID NO: 129249 - DNA, 1128 bp, Homo Sapiens
  misc_feature (396)..(471): n is a, c, g, or t
gggcggttattttgtgtatttggaagcgcccgccgctcgggccccaccctcttgtataagaggtcccccctaataatgggaccgtccagaagaggcccatatcaggagaagagttttttaaagaggaagtcctggggttgtccccacccggcgcgggttttttgttggtggtggggagatacacccacacaccctttgttgctattagcccggaaattttctcttcggaaaaaacacggcttatggccccgcgtttccgcttttcccttcctggggggccccccggccccccgcagcaagaaatggttttgaggagaaaacgtttcttaggagaccgggaggggcgggaaacaaaacaaaaggggattgtggtaggtggagggtatatgttaaaannnnnnnnnnnnnnnnnnnnnnnnnnnnnnnnnnnnnnnnnnnnnnnnnnnnnnnnnnnnnnnnnnnnnnnnnnnntgttttttgtgataatgcaagtatttattaaaatgctgacaatttaaacatcctctgaattatatgaaatacttatttacttttgtgaaatgcgttagtgaaaatctaggagtttctatgtaaggctgagcattttcaacattcctggcctagatgagaaaagaatgcattctcttactggtactcaggaaatatttatacaatacacttgggttctacttgctggtgtgtggagactaggctagcacccatgactggctgggctctagaaaacaagcatgcagtgctcctgtgccatctgggacccaagagacaaaagtctgatctagggtgaagctacatgcagagggtgaagaggactataccaacagcctcacttgtctggaggagcaaaaggaaagccgtgcacagatattgctttgaccttaaaatatttgttaagtgaggcaagaaagaagccaggagtcttctcacaaccgttccaggtcagcaatttctaagatatttctatcaaggtaattggtagaaaatataaatgcgtgctggccctgactcaagaattaaaccatcgtaacatatacatacacaatttggaggacaggcagttatcaaacagtctataaactcaagtggggcatcagctcaactaatacctgt

SEQ ID NO: 129250 - DNA, 653 bp, Homo Sapiens
aggctgtggaggactttattcattagacccagagagccatgagtgcctcccacgaagtccccactgcagggagccagggtcctagatgccaggccaatgcatgtgccgtgagctggccgaggggtctgctggtcccaagagcgcctctgtgttcttcagacagctccgggtatggtggcctcgccaggtggcttgaactatcttcgctgccatttgctgctgcctcatctgctggcggatcttaaagcccctccaggcggactggatggctgtggccgctttgtcctggcgatgcggctgcctgggactcagggcagccagctggtaggcggaggcccaagacactgccccggggccctcagtgccctggcccatgccctgcaccacacgggtgggctgtgtgcgtccacaggtatgacaggtgcgagggctggagcccactagcatcaccacgctgggcgggctcccgatcctggagctcagggagtggcagacgctgcaagcgtgtgcctggcaggactggaagcagcgatggtcagatactgtcctggctctgccatcctggaaccagcttcggtcagacatgaccccggcccggctgcccagctccacccatgtgacgggggtggagcatctgccagtgccgggcttgg

SEQ ID NO: 129251 - DNA, 2178 bp, Homo Sapiens
  misc_feature (154)..(154): n is a, c, g, or t
  misc_feature (156)..(156): n is a, c, g, or t
  misc_feature (209)..(209): n is a, c, g, or t
  misc_feature (236)..(236): n is a, c, g, or t
  misc_feature (319)..(319): n is a, c, g, or t
  misc_feature (1080)..(1080): n is a, c, g, or t
  misc_feature (2061)..(2095): n is a, c, g, or t
  misc_feature (2098)..(2143): n is a, c, g, or t
ctctgtggagtttaatgatggcgcagagtggaataaacgcaaggcggtcagctcatttctctctcgtcactaaaagactgagtttgcactcacagtcgacgggagaaagcgtgtgtagatgtacgacggagagacgcgtaggaggcacgatctntntgtgcggatgagtagtgtgacacgccgccccgtctaggatggagggatgaatnaaccgcggcgcggccccgacagtgagnagcgcgactctttatctgtgtgtgtcctgcacgtctgtgtgttctgagagtgtggtgcgctggcgcttttgtattttatttantatcgtgtatgggagcggagatgagagagtgcgtgtgatgaccagcgctctagactaggtaagcgatgagggttcagcgtaaaggaacgcgccttcgttgtgatatatacgcctccccacccgctgcggccggaaggggagttgtattcctatgtaatgatgcgtcccttccctatcacttttatttgtgtgtgggctagcgggcgcggggggcggggtgtggttctttagtgttgtaagtcagcggtcgtggtgatgtctcgcttgatggggtgggggactaagggaagggagtgccgcgcagaagcgctcttaattgggtttggtttctagaggcgaagaacagggggagccgcgcgcgccgcgacgtcttgtttctttggtgggaggcaaccacacgccccctgtcatgtcttccggcggggtgttccttcggggtaccaacagctagaacggcgggtgttggtgtttcgtgtgtggggagggcgcgcggtccgcaaaagatcagagtggtgtgagggacgctttttttgtgtggggtgtgggcgcggcgcgaaggaacgatacccagtctattcttccttgagttggtataagcaggcgttcaggtgggttcgctattgcacgcggcgtccaagagggtgtgagactgggtgttacctgagtagtggtaactattggcgtggggaagtgatgggggtaggtccagggctcgattcgcacatcacttcaagtataatcatgttccccttcctttcgtncaagaaaggatgtaaaatatttattaagggctttgcctgcagaggcacaacataaatagcattaagtcctcctgaaatgtaattagtgtacacatcaaccagttgataatttgtggtgggaaaggcaggaactcaagctgggaccaggttcccgcatccgaacttggacgagtgcgtggtgaaggctcggctccagggaccatgcctgcagctgctctctgccatcgcctctgcaaaagtctgttaggcaaatgcaaaagtgcaagcagaacttgcttgaagaacaaccacccccgaggcacagggtgcttaatccaccccttcaaatccttgagcattttccacggccatgagaagtttctctcgtaaatcttcaaaggtttcatatggaggtaagtcaaggcgattaaagcatgtgtgagctctgggcagtttctcaggactgccccattgctctattgtaaacagctgaggaccattggaaccataaagttcggcaaatccattcataggtactcgcgatgtccctgtgacaaactgcagtaaccggatacgcttttcggcgtccatgagtagcacagccttccagaaccactgaatgacggggtggtttgggcagtagccgttcttgtaaatagaatgctgtctccagtcattcacatccacatcaccgaggccgcacatgagcaactccagctcattttcatcaaaaattttaatcaaatcaataggaagtagttctgtgaatccctccaagaaggcgttcatctgcttctggaccctgttcacaaatctccactggatgactaagtcgatatattcccttttgttttcatttgtgaccattatttctgacccattgggcttcaaatccacttgatatgtctgtccaagttttcttcgtctatgcagaacatgaggtccagctcacccggccgtaatggccgaattcccgggcatatgtccggtaccgtcgactgnnnnnnnnnnnnnnnnnnnnnnnnnnnnnnnnnnncgnnnnnnnnnnnnnnnnnnnnnnnnnnnnnnnnnnnnnnnnnnnnnnaacgagctagcgccctatagtgagtctatacgatt

SEQ ID NO: 129252 - DNA, 891 bp, Homo Sapiens
  misc_feature (61)..(95): n is a, c, g, or t
  misc_feature (97)..(194): n is a, c, g, or t
  misc_feature (864)..(864): n is a, c, g, or t
gtgcctagctaaaattaaccctcaactaaagggaataagcttgcggccgcatacgcggtcnnnnnnnnnnnnnnnnnnnnnnnnnnnnnnnnnnngnnnnnnnnnnnnnnnnnnnnnnnnnnnnnnnnnnnnnnnnnnnnnnnnnnnnnnnnnnnnnnnnnnnnnnnnnnnnnnnnnnnnnnnnnnnnnnnnnngtgtgagccaccatgcccagccaaaatctgtatttttgaaagcttttcaggtgagtcttttaacccactgagtttgggaaacagtggtttgctgttattacgtaggtggttgagaaagctgtttttccttatgtctatccacgatgcagattatggttggaagtaacctgttatgtccagatacagtattgaaccaattcagggtaagggaatggggtgggcccatgcctaccatggaaagttctggaggtggttacagggtgccataattgtgcacttcccaataatatcattcagtaaagatttgtgacgatctttatttgggacaggcctatctggcagctcccacagatcagaaatcatgttacatatccatagcatgaatcagagggccataaaatcgtgctcttggaatggtcttaagatttctaggctaatcaactgcagcaccaagtcatggtacctcagttctcccagcaaatatgctggatgagtggtcacatgtgtgcatggcctcaataaggcaggcactaggaagaaggaattatatgtattatgggttaagaaggtgaatctataatggcagaattggagggaggccagaatacattagcgttctgttcccagtggtcttataggagaaagattcaaggtgaaaattcgctttttnaaaccgatatgcattatcagttttgct

SEQ ID NO: 129253 - DNA, 678 bp, Homo Sapiens
ttttctgttttttttattaaaactttattttactgttactttctgctgtcctaattatggcacatttttactttctaggttctgtgatttacagagtggtctggctatgtggacagcttctaaattgtcaccacattttggagcaagatgtattatttttacaattaatttacatttaacatgaatcatgatcctaagtgcatcagaatgtcttcataacattcgccaaagaagagagggcagcactgctgttctacagtgtggctctcacctggtccacagttaccagaaatagttctttcgttgctgtgatgtcctgggtgggcttcattctttagtaatgtactttgtctacagcaacttcctgcaactatgtgaacagatcttgaagacacacagtgaggtttggtttcctttgtcctcttaagtctttatggttgttgcttctattgtttattggtcccagtgagaactgcagctgacctgatgtcatgatctgtgaagatagtttctattaaagaagaagtaccaggaaatcccatatgccaccgtagacctgcctttctggataccatttactactccatactccagccgccatgcacaatggttgtgtatgaggctcctgtgatcattaacaggagtagaagctgggctcagacactctggcacttgcat

SEQ ID NO: 129254 - DNA, 805 bp, Homo Sapiens
attttgaagaaatgtgtatttagcaagtgaatacatgctaaaaggaataatttacagcagcagtttcattacatttttctctccagtttttctagttcccatctgaaatgcaatgataagtaaagatatggaacatatttcctacctggcaaaaaacatgcttattgaacgggcacgcaccttccgcccttaaatagtacataaaccaccttgtcacctgcgtgggaaaatcttgccttttaggatgatgttgaacacattgaaatggagtacttatagaaagttttattttacactgttcttcctctttttctcccaaattatttacatcttttttttgcctaatgtgtaggtggcaaaaatattaaacacataccactgcaaattactaaataatacataaaatgaagtgtgcatttacatgcatttacattttacatttgatatcaactgggccataatgtctctgctgtgatgcatctttttcatactttaagactgctgttgtaattttcgtaaggtcacatgagtctctcaaacagtttcatctctgatgattcatgcatatgaccaagtctatttaaagctgaattattaaatgggcccataattctttttcgtgcaaactgccccctctccatacacatgggcagagattatgactgtaatgagttatctgcacagttatatctaccattttctttgaaaacttagacctgatggtatataaagacatgcctgtagatttgtttgtttgtgtacttttaatgtgaatcgagactttttctatgacatcatccggccg

SEQ ID NO: 129255 - DNA, 828 bp, Homo Sapiens
tgttccccttgcccttgtcctcccatattgccccacgggcctctccctttctgccggtccccctgctcggatgccggctgatccggtagtgtgccccagagtgtggcctgtgcacttccgcaggcttggcaactttgttctcatgtcatatcacgcagtgaaggtcctccccctgtagggaagaagcttcccagtcccgatggacttgctgtgcagttactacaggtgaagcagtcttttgtgccagacggtcccatttgtactccacgttgttgatctcctgccacatatggccattgaagcaccccttgcacttgggggagtcctcccgagtggtgcacttgttgcacaggatcttgttgtccttggccacaaaggtctcattggccaaggggtgaaggcacttggcacagcggaagcaggtgtcatgccagaagcggttcttatagtgcacctccttggagtccgcaccgatgggcttgcggcattccacacaggtgttggcacagaacttgtcaaagcatttcaggcagcagtggtggccatccttttgcacatacttcttcccctgcaagggatccctgcagtagtggcagtcaaacttctccgccatggtgcccaccttgtagctggagggacctcacgctggatgtgtggcagataggatgtattcggcaaaggctggatatggttgaaaacaacttccaaggtgctgcgtggggatgctcgcccgcgcagctgtctcgcggcgcgccgctgcctgcaccgagccgaggcgcgcggtgcggcgcgccctcgtgccgattaaccccggcctcgtacctagcc

SEQ ID NO: 129256 - DNA, 1955 bp, Homo Sapiens
tttattcatatgctgctttatttctgtaaggatacactgaaacgttagatgataatagctaatgacagaatgtagaaatgaggcatcagcttctctaaccactcctacaagaatgttagtatgtattgtcattacatgtttacttttgatattgtctcattatactatgtcatataataatgtagaatacagtaagtaggtgatcctgcatttcaggtaagcggtaggtggaaatccagatttcctcttgaggaaaagtcctaggaatcacaacagaagggactttgcagtcctcattaacacatggacaaagagcagacaactactacgttacaagggattcaactagtcactgttgtgaaatgtcatatccatgttgatgacagccctggcgcctgctcaactccccctctagagttttgcggttacttccgtaggatgaatttcagcactgcaggaacatctgagggggctaaaatattttcatgcaagtttccaaacccataaactattttgctatcaattgatactataatattaatttgagacgtgtaaaaaggacagcagggttagttttgttaagcttccagaagtattcgttgtgacgatgttcctctgaaacaggctcgttttctcaggtctttctacacttcccaaatcacctgcatgttccatgctttaaagtaggaacgctcagaaaacatgccacacggggaaaccaaacgttagtacggggaaaggtcagtttagaattacagctaagttcaaatgttaattttctggaagttcgtgttagttatttgaaagcacaaaagaacagaaggaagggcagagttctgatgaggaagttaaaccatgcatgtcagtagggttcttttcctgctcacagaagagggtgagcagtgagttggagcagccgctgcaactcttgcatgtcgtgtgtctacacggtgggtcccagctgaggcatgagaggcatctcagtgggggttttatctcctatgcttcttgcttacatcactaagtggctaaatgattagcacttttctgctctatgagaaacatgcagaagagtcaatctacctaagttttcatttttaaattgcagccggacagaaattcactttgctgcagggttgctttttgctaaatgctaatatgatcactgtgtgcccttatttgagtaatactgtaaaatgggagaaaagacggaaggagaactttaaagaagggaaggaccactcttcccctattgatggtatagggcagaaagtaaggacacaaagaacgagattcaaatgccattttacaggacaggagcccctgtcagtttacagctttttggcacagtcgggacaatacacttgctcctggtggaaaacaaagcgcttgttggccagattcacggagcattttttgcagtggaagcagtagtcgtgccaggattgtccttcataggccaccacactggagcctttaccaaacccagtgatggggttcttgcatccagcacacttcttggccacaaagttcttgtagcaatccacgcagtaatactggtcctccacagcggtgaaacgctgcccagccagcttcttagagcaggtaacacacacaaagcaatcggcatgccagggctgatcctggtaagtgattcctccagatgtgatggccttgttgcacttcacgcaatgcttggcaaacttggtctcatggcaagtcacgcagtagaagtcctcccctttagggatccctgcagtagtggcagtcaaacttctccgccatggtgcccaccttgtagctggagggacctcacgctggatgtgtggcagataggatgtattcggcaaaggctggatatggttgaaaacaacttccaaggtgctgcgtggggatgctcgcccgcgcagctgtctcggcggcggcggccgccctcgtgccgaattcgccaccca

SEQ ID NO: 129257 - DNA, 1430 bp, Homo Sapiens
ccttgttcgcccccccgagtctcaatgggtccaagctggcttgaacacagtaaatgaaatgacatcagatgtgtacctgtgacagttacactcaggtcttccagtaattgcgtatgtggatgtgacaccacccacgactgaatttaaattaatgcgcggactctctgagacgggcatgacccaggttcattccgagcaggtatgtgctgtgctccctctggcgccccgcagacccgcagtcccagtgggtgaccagggtgttcctccatggttccacccctaggaccagggcctcagtcgccctccctacctggcactcccccacaccccgcacctcactcaaggacctttctaccagaacagagcgcactcactctctagcacacagcaggcaatacatatctcttgggtatgtccataaatgtgggcctctgtctcccagctgtcaagtgaggaggtgaacaaaactgccaaggccaactgggttctaaaacctttcagatttgtgacaaaggagccctggggggcaggctgggggtggtggaggggctcacctggcactggctgaaattgaggccacaccagcatgttctcagcactcacagagcaggacaggctgcagcagccagtcctccccttcccgctgagatggcacacctgcctatggtgcagggctggcagaggcggggccaggattctagcttccccacacaccagccctgtggcatcattcttcccaacgtccaaacgtttttccaagggggagaaatggactgggtcatgtaaagaaatactcatttttagggctttttatgtggccttcaaagcacgttgcaaacaaatccctttcactcctcagaggaggagccattaggaaggtagggggcgacaggcacagcctacagcctctcctcaggaggacagagggggtcatcgcatttgagccccctgcagtcatctcgggggctcctgagggtccaggtccacatgttcgagggtctgcagcacatccacggcgctgtaggacttccaggcctgcatgttacagctcttcaggatggctcccagctgcctgccagggcctacttcgaaagtttgggggaaccccctgccctttttcctttcgtatatggcatgcatcgtctgctcccacttcactggggagaccagctgctgggccagcagcttgtggatgtgcccgggatgcctgtatctatgcgcgtggacgttggagtagacagaaaccagaggcttcttaatgtcgactgcctttaaagcttgcgtcaggggctccacggctggctccatgaggcgggtgtggaatgcgccactaaccggcaacatcctggtgcgtctgaaatgaaacttagaggaattcttctggagaaaccgtagagccttcagcaaattccatggctccggcaaacact

SEQ ID NO: 129258 - DNA, 915 bp, Homo Sapiens
  misc_feature (246)..(254): n is a, c, g, or t
  misc_feature (365)..(377): n is a, c, g, or t
  misc_feature (389)..(489): n is a, c, g, or t
cccccaaggggcccaaaggggtctaatatccccctgggggaatttaaaggttcataaaggcccctttgggagggggtttcccggttgggccgaaatgttttaagaatttccaccctttttcgaaagaatggccgggcggggcgtaaatttatattcgagctccgcttggaatccctgtggaagatcccataaaggcccccaaactccctttgggtttttttaaaaccctcgggttcccccgggggnnnnnnnnnggggggaattccagcccttgttcttgcccgggttttcttgggaaccaatttggcccagtttcctttccttttggggccgggggcccaaagaaaggtttagaaaaatttttnnnnnnnnnnnnngggcggcaaggnnnnnnnnnnnnnnnnnnnnnnnnnnnnnnnnnnnnnnnnnnnnnnnnnnnnnnnnnnnnnnnnnnnnnnnnnnnnnnnnnnnnnnnnnnnnnnnnnnnnnccggtatccactggaagtttatttctttagggttctatcccaaccagtcgcttaaaaaccaagtaacacagacctgaggggtgggggctggggactgcacctccctcctactcatggtggacagcagtggggactagggaggggcaggagaggtggctgaagcaaggcagcagtaatggggccacgacgccacagagccagctccgtcctctcccaaaccctggtgggagtccctgtggcttggggtggggagtgggggacccaccccaggccctccctctcccttcctcagacagcctcctttcgggctcaacccatttcttccggcaggagactgaggcacacagagaggaggaagtgggagaggaggacgagggaggggcagggtggcagcacaaatgaaggcataggtgaaaggcgtgggca

SEQ ID NO: 129259 - DNA, 726 bp, Homo Sapiens
  misc_feature (683)..(683): n is a, c, g, or t
tttttggagtctagacaagtctttataaaagaaccaaaagctcaataaatacgtaacttcacagaacccagcccaagccaggggtggcctgtgggactgggaaggtgggggcagggcaggagtgaatcccactggaggccagtgagggtagaagtaggatgggcagcctaggagcccagccctgaagactcgagctgagctggtaacttcggggagtaggtgacgaggggctgcctgggcaggtggggtggtactgtggcctgggcctcctccactccatccagtccggcaaagcgcaaatcgggcccgggcgtaggcagggatcctgcccagcatccggctcatgcatacaggaggcagtagctgaagcaggtgccggcacgccccaggaggcaggctgtctgctgtctcttggtcaatggcactcttgggggcctccctctgctcagacctccgaggcagtgagcgtggagttaagcagcagggtggtcctgattctgtagagctgggccagggtcagcttcctgtgctgggcagagacccctggtgggggctcaggctggaccctgtgagaggcccccgagggcaggtctccacacctcttcctgtgggagcctgcaggttccccggccaggcagccgactagcccaggaccgctgccagggctaggggcccctcggcantcccagctgggcccagcttcctgaggggagccctgagtcctat

SEQ ID NO: 129260 - DNA, 950 bp, Homo Sapiens
  misc_feature (693)..(718): n is a, c, g, or t
  misc_feature (788)..(788): n is a, c, g, or t
  misc_feature (827)..(828): n is a, c, g, or t
accactggagtggctggcttttaattcccctgggccagacctgcagccttgccttcatcccttaactccaggactccaggggcagagtccctggccttcagccaagaggccttgccagcttgggggcccaccaacaagggaacattgccccaacctgtgccacagccccccggctgtttataggctggagaggctgtgtcagacttccctgtactacacaagggcaaccccagccaaagctcaccctgagcctagctcaacagaagtttccttgatctgcttcacattctcttttggaacttctaggggctcccagcaccctctgcagcctcccagctattctgttctcatcaggtccttcccctgccttctggggcaacccctctcctcacagtggccttaaatctaggcaagggttagtccagcacctccttgatgagcaattctttgagactggggggtggtgtggggggtaaggcctgcctcctgcagggcttggagccgagcctctgattgacgtttgtccaggcccaggcgccaggagagccggacatgggcctccagaaagggtgccagcaaagggtggaggctcttgtccccaagcagctgcagggccttctcacagcatgcccgggcctctccagggtcttccagctcctggtggcacacggccagcccagccagggtcagcannnnnnnnnnnnnnnnnnnnnnnnnntgccccagctgggcttgcagctggccaggattggccccgaagtgccagagccctcacgatagagggccantaccaggtgaaggctctgtggcccgcccgcacctcccgnnaacacaaaaaaatccctgcagggtccgggggcatggcgccaactcagggactggcctggcagtggacccaaaaaatggttcaaagggcccggcttaccgggggggaaaaggggtccccggcc

SEQ ID NO: 129261 - DNA, 1489 bp, Homo Sapiens
ttttttgtactattcgttaggcttttatttttctctatgttctgcagtaactaaggaaaatcatggtaaatgtcaatcttcacacaacagcagacacaaagggtttcagaaacgtcagatatgaagaaatcctccatccttcttcaacattttactgggtatttcaacttcaaaagaacagcttatttctataagtgctgtacaagatcatagattatgatggaacgacttcattttagaacgttagcaaaactgttatactaaatgtcaatgacaggaaacaaagaaaaaaatttgttcaattatatttttaaacatattgttattctcaacaaacggaattttaaaacgaatacaattttccattatcaaaagcaaacactctatttcgcagttgaacaatgatcactgatcacaaatatcaaatacagtgtcccccgcccccaatcgacatcattttcaacttaggaccctggcatctactccttggggtacctgtgactctcttttacacccccaagggtctgcctcagatctacttaaggggcggaataacccctagcacctgaattgaggatagcctcaacctctgcatcatcgtccgaatcccagtcataattacaaggccagtctttagagcatcggttacgaacccttggcacaaaatgcatgactttcagtttgctcgattccacgtgtgctcggggcccccagaaggactcatactccaccggactgctacggggcaccggtttataaatcaggtaccctctgcgcacaaactcttctgtgacgatcttcttcggatctccaaagatgctgtgctgacgtccaggctgcattcctaacttccccagcactttccagaccagagcttccttggcgctgttgcccatgatgaagatgagcgctaatatagacatcaggagacttttcttggtgccctgaaaattgctccggggcactgaaggcttttgtgcttgggcagtgctcgaggcttcttcaggggtggtagaggcctcctctggagtgctcgggtcttcctcggggccgctcaggtcgtcttcgggggtgctcgctaccacagaggcggccataggggtctcggaggcctctgaggcctggattttgcgattgttgcggttctcttctgcggctctcgcattacggcggcgccgactctttcgtccccgaggcatgtctcctgctagaggctcaaagcttacagcagtcctagggaaggatgcttgtagcctcttcaggaagcaacagctttataccgtaagaagctgctgccgctgaagctaccaatgtcaatagagtctttgtagcaataaacaagccgttctcagctacaaagggtagttcccacgccagctgacttgcgcgagcagccgccgccagcacttgccgcagctgcaagcccgcgagaaagccgacgcgtgggtcgacgatatcccgggaattccggaccgtaccagcctgcttt

SEQ ID NO: 129262 - DNA, 675 bp, Homo Sapiens
aaaaaacactcaagacacagacccaagccgggttttattgaaatgccaggagcaggcacatgtcaaagtagccaaggaaggggggacagtggtacaggctgtgtaagttggcagggatgggcaagcctcatgtccatggtcctggcatcccctctgccaggggataagtaggcacaactaccctcccctcaaaatggcatgctcaggccagtggggcccctacccctggaccatgaaggctccaagaagggctggaagcactaagttttctctctcctgagggggaaggaaagaaggggagatgcaggaggaaggggaggtatagcgggggatgagcgttccaagaagtctctccttctaggtgtctgcacccaactcatggtgctgggcagtggagaggagcagcattacaaagggaggctgaaggctcatccctcagggaaccggagccccccagcctgtggggcttgtgtcagccctgaacagagggcagaagttcaaggggactgaagatgcaggtagttcccaagtgacctaggagtccccagagctggggggtgtggccttcatgggacaaggaggaagacaggaggatccaaccccagcatggaggggggagtgggcagtctccccaatttggcccctctaggtcagttccacgttgttggcggccgc

SEQ ID NO: 129263 - DNA, 1017 bp, Homo Sapiens
ttttggagcaaacgcggctcatttattagaatatgcaaaagagaggactttcctccacaaatacagattgctgcttctcagtttctatcaagagcaagacaacagttgaaaactgtattcctgagaagaagcaaaaaagttatcagtttacaaacaaggataacaggtgatttcaacaaaagataaaaaacttttttttccaaaaatcaaaatttcaagtattattccagatgacatggcaaagctagcacaggcggaagccaaggtgcccctcaggctctgtagggtcttggaggaagggcccgggcagcatgagggagcggcgcgtcctgggacctgcctccagccctgggcttggggccgtggtcactcacacaagggagcagcacgtcctgggacctgcgtccagccccaggctcggggccgtggtcactcacacaagggagcagcatgtcctgggacctgcgtccagccccaggctcggggccgcggtcactcaccggttagcaaggagcgactaacttggcggccacgtcgagggttagcagttttggacattggaaggtttctttttttaataaacagaagcatatgcttattctttcaaataccatactatacccaattttagtcaatttgtaaattataaattatattatttgtgctacagtttgtgacatttaaatcttattagaagataagcaccaaacctattaaaataaaaaatagataaaatgctgtggttttcccagcagcaggatattgtgtacgtcctgtaggctgtaaacttatgctcccttctcctgaaacaatgtttttgataaacttgcccttctcccttgaaacttttcctgaaaacagacttctgctttaactgtagtttcggaaaatgtacaaaagagcaaaactgcccctctcggcgggacggccgcatgttacagaaaggcttcgtctctgctgctgatgccaccacgagccctgcccagcgctcaccaggagggcgggctgcggcccccc

SEQ ID NO: 129264 - DNA, 1479 bp, Homo Sapiens
  misc_feature (166)..(208): n is a, c, g, or t
  misc_feature (857)..(924): n is a, c, g, or t
aaaaatgtaatactgtttatttaacttcaaaaacatttcagcattctaaacatacaaaaaaaataacagaacgttgcgaatcgtgtttaagtacaggaggttcttgaactttcattgatgcagtgactctttgctttgctgacaatgaagagttctatagtttgtnnnnnnnnnnnnnnnnnnnnnnnnnnnnnnnnnnnnnnnnnnntattctcatgccagctgacccccctttgtccacagctaagatggcagcagaatgctatgtcactatatacagaaacaagacaacctgaagctaaatggatgccccctgcagagtcaacaggtccagcctcacagtgcacgccctgagctacagcctctcccaaaaggcatcttccccacagcctcaacgccgagcaaggagcatcaagggtttgtctcggttgttttgttctttttacaaactatagatatatacagttgaaaactcaggatttctagccaataaccatagttaccaccaccttacaaataaaaagaaaatgccagaaacatctttaaatgccttgtcacaccaacagcaaagtgcacagagtgaggagaacacgagagtgccttttcattttaaaaatgtttggaaatatgtacaactttgatacagtttcagggtgctccagacacccatggccacttcatgttaaccactgacaatttctagagcactttgagagactacaatatgatcgtgatcaaattttgtaattaaacctaatgagggcaacagacacttctcaaataagagatgtgtcaattacggcgctcccctactctaagtattcacaaggagacagataaacagtttctttattcannnnnnnnnnnnnnnnnnnnnnnnnnnnnnnnnnnnnnnnnnnnnnnnnnnnnnnnnnnnnnnnnnnnggcaactttagcaggaccctttgcaccatcaaactttcctttcgacttatagtcagcaacatccttctcatacttctccttcagctttgccgccttagtgatgtaaggctgcttttcactgtcatttaaattattccacatctcacccagcttttttgccacgtctccaatagagatgccggggtttgtggatttgatcttggggcggaattctgaacagaacaggaagaatccagacggtggccttttgggagcattaggatccttcttcttcttgcctcccttagctggtccataatccttcatttcccgatcatagcgcactttatctgcctttgccatttcatcaaatttagatttctctttcccggacatcgtcttccacctctcagagcacttcttggaaaattccgcaaaattgacagggacctctgggtttttcttcttatgttcttctctgcatgtctgcacaaagaaggcataagcggacatcttgccctttggtttcttggggtcacctttagccatcctgactgtattgttcgctagtctccc

SEQ ID NO: 129265 - DNA, 512 bp, Homo Sapiens
  misc_feature (302)..(314): n is a, c, g, or t
gtggtggtaactatggttattggctagaaatcctgagttttcaactgtatatatctatagtttgtaaaaagaacaaaacaaccgagacaaacccttgatgctccttgctcggcgttgaggctgtggggaagatgccttttgggagaggctgtagctcagggcgtgcactgtgaggctggacctgttgactctgcagggggcatccatttagcttcaggttgtcttgtttctgtatatagtgacatagcattctgctgccatcttagctgtggacaaaggggggtcagctggcatgagaatannnnnnnnnnnnnaagtgcggtagtttttaaactgtttgtttttaaacaaactatagaactcttcattgtcagcaaagcaaagagtcactgcatcaatgaaagttcaagaacctcctgtacttaaacacgattcgcaacgttctgttattttttttgtatgtttagaatgctgaaatgtttttgaagttaaataaacagtattacattttt

SEQ ID NO: 129266 - DNA, 1017 bp, Homo Sapiens
  misc_feature (905)..(953): n is a, c, g, or t
  misc_feature (955)..(955): n is a, c, g, or t
  misc_feature (963)..(963): n is a, c, g, or t
tttaccactatttctctattaagaacacatacatctcatataaatacatcctcaggaaacactttttacattaaatcgttttttgacaataattttgcactgaataacaatacattacaactcactgttgtacaccttcaattgctaaaacggtattctagatgtttacacagagaattataggaatatgcacgagcacttcaagaaaagttgtgtgaacaatgtttaaagtaaaaaagtgttttataaccaagctgtacggacattagggggtttaggtcttcttcgagggtggccactggaggggtcaaccgctgatcgctcactcctacaactgagaccactcgtagcactggatgtcctggaagctcttaatgggctatattggccaagagtggatctggcccgtcttgacaatggtgatgagttgagatagcccatattgcgatgatagtccatcagttgttctgaacgtttcataccaactgttggtttcacggcctcaagccttttcaataaagccaagttttctctctcaatcctttgttgttccttctgtctgttgagagcactgtgatataactttgggggatgatcagccgatctaggaattgtactttttgcttcccggcttttccgcctgtcttgacagttctttcaaaagcctctgatttttcccgatcgatctgtctcacctctttctcttgtgaaagaagtagtttttcccgggtgctactgaaggctgattcaaagtgatgtttttgtggtccttttttatctaattgcagaaaagctttcaagagatgattcagatccattgtgtcatgtaagactttctgtttatgtctgtggtctaaactggagtctacactgaagacgactttgaggagacatcaggctcatgnnnnnnnnnnnnnnnnnnnnnnnnnnnnnnnnnnnnnnnnnnnnnnnnnanatcctcancatcttcatatatttcttggctccattttcttgctttttattttcactttttga

SEQ ID NO: 129267 - DNA, 693 bp, Homo Sapiens
cagggtaagcatctgttttattcagatctgggtggctcagggcctccaggcagccagttttgcaggagattcagcacctagtgtcttcctgcctcacgctcccaagaacctgctcctgcagggggaacatcagaactcgtccttgatgtcaaaatggggctggtcttcaggcttgaagtccaggttagggctgccatcctcattgagaattctccgggcagtgtagccgacgatggggtatttggctttgtacactttggtgaagacctcatccagggcctccagttccttggccgtgagacccgtagtgtcatgggtgaggtctgcaggatccaaggacatcttggctacccctctagtggagtccttccccgtcaaggcattgtagggggctcctcgtccataaaactcctttccggaggtgacatcaaacaccactcccttcactgccaagtagatgggctgatcttcctcctccccgccatagcgggccagctcctcctcggtgaaaagccgcactgggggcccccgctcggcagggcgcggtgtctgcccggcccgggctgtgggcagccccggggccagcgccaggaccagggccagcgctgccagcggccgcagccgccgccgcggcgcggggcccaccatggtgagcgcgcagcgcaaggcaaggccgggccaggcggcacgagg

SEQ ID NO: 129268 - DNA, 860 bp, Homo Sapiens
ccttttgtaaaaatgggacctttatttttgttttgattataaagtgaacatggtcatggctgaaaatctgtcaagcacagaaaagtataaagtaaaggtcgctcaaaattccactgcccagccagctgatactgacatctaggaggtgtcccactttggctcttattgatccctggtgtgcagacaggggtccccaggtagacagaacccctgaccaaggacaacaggaggcatttgctcttccagggtaagcatctgttttattcagatctgggtggctcagggcctccaggcagccagttttgcaggagattcagcacctagtgtcttcctgcctcacgctcccaagaacctgctcctgcagggggaacatcagaactcgtccttgatgtcaaaatggggctggtcttcaggcttgaagtccaggttagggctgccatcctcattgagaattctccgggcagtgtagccgacgatggggtatttggctttgtacactttggtgaagacctcatccagggcctccagttccttggccgtgagacccgtagtgtcatgggtgaggtctgcaggatccaaggacatcttggctacccctctagtggagtccttccccgtcaaggcattgtagggggctcctcgtccataaaactctcctccccgccatagcgggccagctcctcctcggtgaaaagccgcactgggggcccccgctcggcagggcgcggtgtctgcccggcccgggctgtgggcagccccggggccagcgccaggaccagggccagcgctgccagcggccgcagccgccgccgcggcgcggggccaccatggtgagcgcgcagcgcaaggcctcgtgccga

SEQ ID NO: 129269 - DNA, 1130 bp, Homo Sapiens
cttcctgaagcatcaatttatttgacgagtaatttcaaaatgttacttttgaaaagataatgctatttttgtactaaaatggaacacaagaatttgactgcaaaattcacctgttcaaaataaatgagacatgtaatttcttacaaaccccaaaactcggggggtcctagggtgggggtagttttttgcagggcgatgacatatcctgcagcgaagtctcagaaaccctgctctgggcagtccatctatttgtccactcatgttcttagacacatcccaggggctggccctgagctactgggatgactggaggagcatccagggctgggggaggggagtgactcccacacagcaggtacccggaggtaggaggctggatccacggaaggttctgatgtcagcactgtctgtaccacaagatggctttactgaaatgccgagtgcaggagcttaatcatggcgcatgtggaaaccagccatgggctctcaggcccactcctgccctgccctggcccctctgtgatgggagaaccaggacaagaaggggctggatcaggtgactggtcacacaacctggggtcctttcacctttctgggggtccctgaaggtaggaatggagtctgtgaactggtgtcagtatttctcaaagccagctgtcagacactgtgtctgtccctgacgcggccgcccaggctcgtggaatgccaagcgcctgtctctgctcggggctgacatcacctccgcgtgggaacagagcctgtgctcatgccgagctcatcgggattggcaggaatctgcatccttgtttggtttcaaaacagggggcccagaaggaagactcatgaaagatgcccttgtcggcggaaatttcaggagcttggcccacagcccctgtctgcacttcggctgtgaagaggccagaaccacgcccgctgcccaagagctaggctctgatgaggctgcaggtagcatcgacccggtacctgcttccaccagggcccaggctgagccctcatggcacaagggtgcccattaggcgtgtggtggatggtggacatctcggctaacgctcccgtcacctgtacctgtctccccatcagtagggcaggggcagctctcacttctcacg

SEQ ID NO: 129270 - DNA, 1048 bp, Homo Sapiens
ttttttataaaaataactttgttattaatcatatacaatcataacaaaagtacatcatagtatcacatccataattgcttgaatgctaacttgactgttacatggacctgttacaaataatgaacaacagagctactccagtatatgactagtcactgtgaaataaaaacagacccatggcacacatgaaattcctaaggggacttgctttgatcccctggggaataagagggtccttttctatgatttccctagagcagtaacgtttgttgagggagcatgtgaagttcatgattatatgccttaacaattacagtcatggtgtgttttgttttccaaatggaaaattatttttgacttgttgtgagatataaatattgactatgccaggaaaaaattcatctatttccctgaactcattattaataactttagatggctctattctacttgttgtttctggggcacaggctgagaagtggggagagatagtggggaatgacacccaaaatatgatgggggagttgctacctgaaaacctacagaaatgtctggcctggagaagccctcccttgcatacctgggaacagggctcaccaggcccacagcaattatgaaccttggaaagatggccaaagccagggtgctcttcgctggtatttggtggggtaatactcacctttccttccttccaaaaccaatgaacatttattatttacttgttgggctatgatactcctgagtttatacagtagaaatgacttcctttggtcaatgaatccaatggcagatgtcgggcattaactcagaaggtgagaaaaggcaccattctctgcagccccactcacttttggcacagtatagcttataatttctccctctggaactgggaagggaggggggtttcctaaactaaaatgcatgccccatgcactattttcaacagcatatttttattcccattgctttccaagaacagaggcaacttatgaggtcctgtgaagagggtgcaaaaaatcgaagtcaacatttctactaacaggttgag

SEQ ID NO: 129271 - DNA, 694 bp, Homo Sapiens
  misc_feature (146)..(155): n is a, c, g, or t
tttttggggttaaacaatcttgattttatttttctattgcaggacttctgagagccttcggtgtgctggtttacattgcatagctctagagatgggtattatgtaggagttcctaaacttaactgaccatacatagactcccctcnnnnnnnnnnccaaaaatatttgacctactttatgaaatgtcctatatagcagattatatttctgttcaaaatgttggctgctcctccctgtggtatcccttttctgtagaaatattatccttctctacttcactggccccaagtgtggccacgtgacctgttttggccaatgtaacatggctgtgggtaaggtgtgtttcttctatcagacactcgaagagccaggtgtagttcgtctattctttgtatcctttgctacaagaccagctatgtcccaaagtttgttctgacatcttagagttctggagagtcctgtaaaatgggtatacatggaaggcaggtcttctgtgaagctcacacagcataaactttcgggcatcttctctaggcctccatcccaggccttggcaggagccttggcgatacattcacctggtcatatgtttatgtacaatttgcaaaagcaatatattgtcaccacaattagctgagactgaggtctctttccactaggactttccctctgccattttcccttctattgggtg

SEQ ID NO: 129272 - DNA, 1032 bp, Homo Sapiens
  misc_feature (84)..(124): n is a, c, g, or t
  misc_feature (220)..(270): n is a, c, g, or t
gagacagggtcttgctctgtaatccaggctagagtgcaatggcatgatcacagctcattgcagccccaaacccccaggctcaannnnnnnnnnnnnnnnnnnnnnnnnnnnnnnnnnnnnnnnncaagcatgagccaccataccgagcaaatttaaaaaatttttttgtagagacagggtctctctatgttgctcaggctggttttgaactcctggactnnnnnnnnnnnnnnnnnnnnnnnnnnnnnnnnnnnnnnnnnnnnnnnnnnncatgagcaaccacgcccagctcaagaatgattcacattttaattttcttttgaacaggtttaccactttgtatttgtgttttagtttttaagactaaatctgtgcaataatattccctagggattaaaagtaggggaaatacaaccctctccaaaagcagaaacaaaacttggggtggaaagaggaggtaaaaattacattcgcttttccaaatgagtctgaatcgtaaaaccataaagaatggttttactcattctttgtcagccatttgaaatcaataaactatgattcctacattttgtttgtattacacaaaaagtacacaacaatgaaagctgtttttaaaagaataaaaaccaccaaccacaaatagaagagaaccccagacggttctcttggggggatgtttatcaccagtgccaaaagcctcccccctctgaaatgtttctctcagttgacaactttcaaatgatttaaagaacatgaagaacaagtagaacatgaagcttggatctgaatagtaaagaataatattggagtggtatttacaaaggagaggcagatatatgtgcctagcaccagatttttcaagtaagcaagttcagccccaaactaactgaagttttacatttttaaactctctccattatttcccagagttggaagctgtgaaatgtttcagcatggtgctattcactaatggtgtgaactccccggccgtaatggccgaattcccgggcatatgtccggtaccgtcgactg

SEQ ID NO: 129273 - DNA, 669 bp, Homo Sapiens
  misc_feature (156)..(176): n is a, c, g, or t
ttttttccataataaatgttcatttttttattattataatgacaagacaaagtttttcatatcaccattacactcatgctagggataacaatacttcctctattataaatgctacttgacctttatttactatgcttggcataactgggcatgctnnnnnnnnnnnnnnnnnnnnncattcaaatttttttcttttactaatcgaagtacctaattttatacaatttgcacacttttaatgttagtaacagaaacaatgaaattattttacttcttgatacttaagagtttaactccaagacatgcactacaaccacataatagacttttgtcatcaatatgatggtcctggcatcttatatattaagttcacactttaaattaagtactacttgctaaaacgaaaacaggtaaaaacaatgaacagacggttcacgttaagaggaatacgaaaagccaataacaatactgatataacaatcttatttgtaatgaaagaaatacaaattttaaaaatgacataccattttttaattacattggcaaaaattaaaccaaaaagaatacctacaattgaccaaggagtattctggcagggggagggaagcacatacatatagtactaattagaggggtaaattgtataattaaagccctatgaaccagtca

SEQ ID NO: 129274 - DNA, 1101 bp, Homo Sapiens
  misc_feature (720)..(744): n is a, c, g, or t
tttgacctgaggattatttttggtcaaatgttcccaagaagggggcaaaagtgaaacaaaaggaggctggcagcccctgacacaagactagcaggtagtttccgccgcaaactgaaccttatcagcttaactcatccacacagcagccctgagggcatcagtgaggaggaagtacctcctttggggtcctcttccccaagaaagcctcttcccggagtcccccagtctgtcctggatctccatcatggacaatgagtgctcctctgcacccccccatttcaatggcagtggaaccaatgagaccagcagctgaagtccttctgcctgtgccgacgctggagttgacaccagaacagtgacagtcaaactgaagagttatccagggaagggaggaggacgacttcactggttgcaagaaaataaacctccgagataggtgtccagttaatttcccccaaaaagtttcccagttggaagtctgtttttagaaccgagaaccaggaactgagttacacacccacatgtgcttagacaagtaggcgggtgactttattcacaaactactcaaaaacaggctgcagagaacagaatttggactgccaaactcactgtaccctcatatcgcactctttcttctttgctgcctaccctggagcattttggctgggaggcaaaatcccagtgctattacaggcagtccccatacccctcattccatgnnnnnnnnnnnnnnnnnnnnnnnnngaagctgaagccttatgacccgcttggaggaaaacatcctgtcctggttttctgtgttccaatcagctctctaatcacatcctcgacctgagacacagacttcaagccagcctgtgttctgtcaggctgctggtcgcccttctctgcttaaagactgtagaggcgactggtgttctcacgcaaggcagccaaggtgagggagagtggctgatctttgactctggcaatctctcggaccgtatgcaaggccaggcccgggtgggcatactggcaaaggcttttgggaacctggcgagggaggaaatagggagcatccgtttccacgatgattctctccagtgggatctgcctcaaggc

SEQ ID NO: 129275 - DNA, 721 bp, Homo Sapiens
  misc_feature (198)..(305): n is a, c, g, or t
tttgaacagtagcaaggtttattatgaagagcaaaaggacaaagcttccacagcagcaggcgacctgaacaggttgccgctgctggctggggtggccagattttattcccttatttgtcccctcccatgttccgtttttgccctatcagagtgccctttttttcaatcctccctgtgattgtctacttttagaatccnnnnnnnnnnnnnnnnnnnnnnnnnnnnnnnnnnnnnnnnnnnnnnnnnnnnnnnnnnnnnnnnnnnnnnnnnnnnnnnnnnnnnnnnnnnnnnnnnnnnnnnnnnnnacagagcactgatgggtgcattttacaatcctcttgtaagacagaaaagatctccaaggccccactcgacccaggaagtccagctggcttcacctctcactaatacacaaattacatattatgttatttttacagtttgaaacaaatatatagaaaaatatgtatgtaattaatttacactgaatgatacattttcaaagcattctctggtttgggaacattaaccattaacatttcaagaggaccttgcgccactgtatgtttccagggctgtgtttgtggtgggggctgagttgcagggacctgaagttcattaaccttttcctccaggaaagctgctcgaccagctttggatcacaaggaagggatgatttttatctctatttctaccttactgcctgggcctttgctctctg

SEQ ID NO: 129276 - DNA, 802 bp, Homo Sapiens
taaaagatgcaattcaaagataggtcccagtttaacactgaattgcttgacttctgtggcttttctttttctggccacatttatttatttaagcaatttttgtatgccttgttatttcatttccatagagattatattgtatcagtgtttatgtaagctggaatcatcctcagttttttgctgataatttttcaaataaagatacatggataattgtaaaatacactaactcttagggtgttgtagtagctgaaacatggagatgcgtagctgtcatgctttttctgaatggacaggagaaacataagctacggagtattcacttctgaggatgcttttccggaaaaagaaaggctagaaaatactcgcacttcctcagaaccctctttcttgttaacgggtatcttttgttggtgtgttttgctcttacattacagatagactatcatatatgactttatgaataatttcagttattttgcttttgtataagctgtctgaagccttgctatgctgtataagttgtgtttgatggatcagtgtgagtataaaataaagcaaatcacttttcttttgtattatctatggatgccactatgaaagctgacattaagccactaaagagttttctatgaataagtgtaagtaaatgctttgatatatataaacctaaataaaaagattgtattgatacagagacattggagaaggagattttaaggcagttctttaggtttaaaaaggcttgctgtaaaatggtgcgttattccgtttattaaagatcatattaatgacaaaaaaa

SEQ ID NO: 129277 - DNA, 975 bp, Homo Sapiens
  misc_feature (488)..(488): n is a, c, g, or t
  misc_feature (516)..(516): n is a, c, g, or t
aggccatacatttaatttcagttttattaaaataagcacaatgtataaaagcaccgtggtgttgtataaacgtctgcctgacaaatgcaaatctattttctttatgtaactcaatagttccacttatctgaatggctgtaccttcatgcacacgggcagcaggcactgcattgctcaaacagggaagtgaggcttcaccctagtgtggcttcaccttaggcacagagcactatctaactgcccagatctgtgccacccacacaagacctggggacacagcagcagacaccgatgctgtctctaagttcatcacaggaacagcttaaaatcagaataatagggaactgctgattaaaacccaagtgcatggacattctagaaagaagagcaagccgttccactctctgggaagttcatgggcttgcagtgggagtttaaggtatcatctttgctggaacagcatggttaaaaacaccaaactttttttntaaaaaaacgatactactgactttagcnagcaatcacaaacaaaggggatgataaacgagggatacctttcagtcacagcaaagaaagattatgtgcttttccgtgctgcagaccggaagactgatttgatttcctgaatgaggaaggctccttgcccttcccctgaattgaggggatggctttgctcagcccaagggagaagacgggcaaagaggacatccggaggacagaggaaggtggaaggaccgccagaggagggtgacagagaagagagggaagaggcacgtgtcggcagcctctgtcaactgatgcttcttgcttctccctgcaagctgcagccccagccgccacagctacagcggtgagagcaggctggatcccagatctgcaggcgggtgagcaggtggagcccagtgaagagatgttcctgctgcaggcaattatgcaaagtgagaagtgattgctttccttttcaaagacaacccc

SEQ ID NO: 129278 - DNA, 665 bp, Homo Sapiens
  misc_feature (327)..(592): n is a, c, g, or t
tttttaatcacaattaagtttttattgtatctgctgagatactttccatacacacgtaagcatatacatatatacacacacacacattattgtacacttaatttatgtccttaatacattctgaagcactttccatatcagcacgttgagatctagctcattggtttaaacatctgcatgtttcattttatgattatacaaaaaaatttttcagcagttccctattgatggatatttacatatttttgttttgtctgacatgacaaacattgcaaatgtacatcctttgtctcatgatgaatcatgccttgagtctcactcatatcnnnnnnnnnnnnnnnnnnnnnnnnnnnnnnnnnnnnnnnnnnnnnnnnnnnnnnnnnnnnnnnnnnnnnnnnnnnnnnnnnnnnnnnnnnnnnnnnnnnnnnnnnnnnnnnnnnnnnnnnnnnnnnnnnnnnnnnnnnnnnnnnnnnnnnnnnnnnnnnnnnnnnnnnnnnnnnnnnnnnnnnnnnnnnnnnnnnnnnnnnnnnnnnnnnnnnnnnnnnnnnnnnnnnnnnnnnnnnnnnnnnnnnnnnnnnnnnnnnnnnnnnnnccattataaaaagggtttgcgggagcatgttagctctcccttgcccttccatcttctgccatgggaggacagc

SEQ ID NO: 129279 - DNA, 1200 bp, Homo Sapiens
aaaggttatggttttgtcgactttgacagccctgcagcagctcaaaaagctgtgtctgccctgaaggccagtggggttcaagctcaaatggcaaagcaacaggaacaagatcctaccaacctctacatttctaatttgccactctccatggatgagcaagaactagaaaatatgcctcaacccatttggacaagttatttctacaaggatactacgtgattccagtggtacaagtcgtggtgttggctttgctaggatgggatcaacagaaaaatgtgaagctgttattggtcgttttaatggaaaatttattaagacaccaccaggagtttctgcccccacagaacctttattgtgtaagtttgctgatggaggacagaaaaagagacagaacccaaacaaatacatccctaatggaagaccatggcatagagaaggagaggtgagacttgctggaatgacacttacttacgacccaactacagctgctatacagaacggattttatccttcaccatacagtattgctacaaaccgaatgatcactcaaacttctattacaccctatattgcatctcctgtatctgcctaccaggtgcaaagtccttcgtggatgcaacctcaaccatatattctacagcaccctggtgccgtgttaactccctcaatggagcacaccatgtcactacagcccgcatcaatgatcagccctctggcccagcagatgagtcatctgtcactaggcagcaccggaacatacatgcctgcaacgtcagctatgcaaggagcctacttgccacagtatgcacatatgcagacgacagcggttcctgttgaggaggcaagtggtcaacagcaggtggctgtcgagacgtctaatgaccattctccatatacctttcaacctaataagtaactgtgagatgtacagaaaggtgttcttacatgaagaagggtgtgaaggctgaacaatcatggatttttctgatcaattgtgctttaggaaattattgacagttttgcacaggttcttgaaaacgttatttataatgaaatcaactaaaactatttttgctataagttctataaggtgcataaaacccttaaattcatctagtagctgttcccccgaacaggtttattttagtaggaaaaggtaaacatgaaacaaagacaaaagatttttatcaaatgttatga

SEQ ID NO: 129280 - DNA, 983 bp, Homo Sapiens
  misc_feature (15)..(15): n is a, c, g, or t
  misc_feature (112)..(112): n is a, c, g, or t
  misc_feature (123)..(123): n is a, c, g, or t
  misc_feature (127)..(127): n is a, c, g, or t
  misc_feature (136)..(136): n is a, c, g, or t
  misc_feature (911)..(911): n is a, c, g, or t
cggggggggacaaanggaaagagaccaaccgttcccaaaacaggcctggtaccggaccggaatttttgggaatcgacgaccaacgcgaccgcttacgcgaccgcggacgcgnggggagaaccncaancgcgcaagncggccgacggaggtcagaaaaagagacagaacccaaacaaatacatccctaatggaagaccatggcatagagaaggagaggctggaatgacacttacttacgacccaactacagctgctatacagaacggattttatccttcaccatacagtattgctacaaaccgaatgatcactcaaacttctattacaccctatattgcatctcctgtatctgcctaccaggtggcaaaggaaaccagagaaaacaagtatcggggctctgctatcaaggtgcaaagtccttcgtggatgcaacctcaaccatatattctacagcaccctggtgccgtgttaactccctcaatggagcacaccatgtcactacagcccgcatcaatgatcagccctctggcccagcagatgagtcatctgtcactaggcagcaccggaacatacatgcctgcaacgtcagctatgcaaggagcctacttgccacagtatgcacatatgcagacgacagcggttcctgttgaggaggcaagtggtcaacagcaggtggctgtcgagacgtctaatgaccattctccatatacctttcaacctaataagtaactgtgagatgtacagaaaggtgttcttacatgaagaagggtgtgaaggctgaacaatcatggatttttctgatcaattgtgcttttggaaattattgacagtttttgcacagggttcttgaaaaacgtttatttataatgaaaatcaccctaaaactagtttttgctattaagttctctaanggtggcataaaaaccccttaaaattcatcctaagtaagctgtttccccccgaaacagggtttaattttaaat

SEQ ID NO: 129281 - DNA, 1192 bp, Homo Sapiens
tttgacaggcttaattttactgcagaaacgggttggctgaagggaacaggccagcgaggtgggctcaggacacccccaacagccaggatgggggcacggcaggatctggcgcccagaagtcagagggaggcccaggaaatttgcgccagttttcctgccttgtggctgcctgaggagccctcactcccagttctgtgggtgcccagggtcacccagagttcaagtcagggctgtgccaagcctgagagcccccacaaagacggagcaggcggaatagggtggcagctcacagccctgaacatacaggggattcctgcggccccacatgggcacagccttctcacagcacccctcaacacgcacagcggtgggcttgtgggaggtgctggtggtggcactgtctcagctcctggtggcctctggacgggctctggccctacacgtctgtgctcctggcactgaagatggatgctggggtgggatgggcaggcattgggggccgagagcctggcccccaccccagccagcctctgccttccatgccacatcttctcacgcagcctctggtacttcacctccagaaccttgttcttcaccgactgagggatgtcgggcacgaaccaggcggcgatgagcttgatgcacaaggccacgtgctcaaagaggatgacgaaggccaggcggatggccaggaggaaccagaactgctcggagaagttgtaatcggggggattgcggtagtccctgtatctgcacagagtcacgttttctgagccctcaatcccatcagggtcctggaagtccttggtgtggaagacggacaggctgtggttgacgtagcccttgaggcagtcgacagtagagttgccttctttcaggcatgggctatagcggtacttgtagaccactcgggggatgaactcagatgtgaaggcaatgaccatcccattggcaatgaccgccagcacaccgatggtctccagcacctgcagccaggtcccgatgtcccttggccttgcgcggcaccaggcgccgctgcaaccagaccatcttgatggcgtccaggcggatctccacgaggttgctgaagagcgcgagcagcggcgccagcgggaaggcggccacgaagatggtggtgaagccgtactggatcatcatctccatgactcctcgtgccgattcacacccaggc

SEQ ID NO: 129282 - DNA, 1099 bp, Homo Sapiens
cattcaggtgctgatccgattcttggattaattttttggatctatatgttataaatttggtctctttcaaaagcgtcctgaagtcagctttggctgtgatatatttgtctctgatatattcttcaaattctctttgttttttcctgtcactggaggagaacttaatacatcgaggatcttccttaatgattttttttacttctttccacgtggatgttaaggtaattgcagaagtttcatccagaagttgcctaaagtgctctctcttttttttggtaagtgcttcaatgtgttcattaaaaagcttctctttctcctctctttccaataaggatccagattcccagcggtgatcttttcggagggtcctacgagtatcagaccatgacacatctgaagaacgtaccatgtcagacagaagagctttgaaattctggatagcttcttctcgtttgtgctgctctctctctcgatctatttcttttgtttgttctgaacgggccttttgaacctccctttctcgttctcgaaggcttgcctcaatgcgggcttgcctttcaagctccttttctttttctgagtctaaattcttggctattttttcaatgtactgtttgaaaaggtcttctctcattgatgaactatctactgctttgtaacgtggatcactttctactttgtcttttactttgctccatcgagactgactgtccaagtgatgattagataatagttcaaagaaatccgatttaatcttctcacctctggtcttcgaatcttctttctctttcttcctagcagcggccacaaactcattaaacaaggcttctcggtctttcatcttttcaattgctttgaatcttgaatctttagcatgcttggctgcaaattcactaaaagttgctcttggattaaattttgcttcttccatcatttttttgaaatcttccttggcttgcattattttatttttcttttccctgcgttcttcctctgccctggtctttacatactgatcaaacacctgttttctctctttaggattgagaagtaagtaccggggatcaaaaactatcttgtgcaagccaaggaagatttc

SEQ ID NO: 129283 - DNA, 846 bp, Homo Sapiens
  misc_feature (41)..(41): n is a, c, g, or t
  misc_feature (44)..(44): n is a, c, g, or t
gccacacacaggggtttacttgtttctatttccagattttnttntagaaagttcaaaatatatacatatatacagacatatgtacatccacatgtgcagacacaggcacgcccagagttgttgctggttctgcctccattcagaatggcaggggccacccagcagacaaggagctgacctcatccatgggggtttcagacttgatgggcagggagtctctgctcagaagccaaactggaggtgatggcaagcctagcccccatccctgcccaagaccatcccctgcaggacaggcctgatgggcgagtggtggggcagggcatgcctcagtcggagtcacaggtcttttgttcggtggcagcatccactgcagaggctaggctgtcttcctggcctttcagcctttcacggatcagctcggcaatggccctctgagtccgcttttttagtttctccagcttcttggccacatctctcttgaggtcccagtcaggcttccgaggagcgaggttggccaggtccacctcctcgatgacgggctcgggcttggcggcctccagctgctccttcaccttctcctccactgcaaccggtttggcctggggcaccctcctcttcttcaggtcctcatcctccgggacatagttccgcagcctaagttccctgtgcttctcgccttcttcctcctcttctctgagatgcttggtctttggctccccatcttccttgtccttgcgcccggttttctcccgtagggccttcagccgttcctttcgccgcaacgcctcttcctctagccggcccacaccagccgtagtcgcctccatcttgcccgcgtacgcccct

SEQ ID NO: 129284 - DNA, 1139 bp, Homo Sapiens
  misc_feature (71)..(96): n is a, c, g, or t
  misc_feature (906)..(906): n is a, c, g, or t
  misc_feature (911)..(911): n is a, c, g, or t
  misc_feature (926)..(926): n is a, c, g, or t
  misc_feature (1006)..(1006): n is a, c, g, or t
  misc_feature (1057)..(1057): n is a, c, g, or t
ggttggagagacgcagtgcaactaaaataacctcactaaagggaataagcttgcggccgcatacgcggccnnnnnnnnnnnnnnnnnnnnnnnnnnaaaaatagctaaataaatctttaatatttctaattgcaaatgtacagaaattgcacagccacacagagtcttagaacaccaacagcttcctctgtacattattacatagttaaaagtcgcagctggagggaggagctccagcccaaactccaacgtttgcattttttccttttcacatacttacaaaagaggggagctgggacgcggtgtgggagctggggggctttgtggctgagtgtgtagaaaagagagaggctgtttccctggacagtctggctcccgcagtcgtgcggggcgcagggggaggtgtacctggggcagatgctctgggggaccggggcgtgtggagctgtagcctcggtcctccacccccactttctgggcagtcggaaagagtcctcactgacaggaggtttggcagtttccatcacccagaacatggaagttaagcaaaaaagtcagtcaggcctctgtgctagcagggagggcgtggctttctccagcagaggctgagtctcggtgaccagggggccccggggctgttcttccccagcagggactgtccttccctccagggcctctggcaaccccagccctggctgcaggcagggcccagctcccgggaactcaggttctctgtggcctgggcaggagccccccgttgactggcccagtgaaggcaccccagtggccactactcagacagcagctgcaaagccaacacacaaatgccacaggcagggaagacaccccccgcagacaccaagccttttcctcctgcccaatactgttctttagatttcagaatanaatanacccttgggagagcncagtccgggcagccctcggacacaggaccaaggaatgtcaccattagggagatattaatacatcaacacaagacattaanatcggagatgcatttagaaaatcgtgagagtcgaactttacagtttgacangtaataggtctcgctgaagtcaccactgcaggcactggacggcaacggtactcgagcgcgtcagtcggagctctgttgcagg

SEQ ID NO: 129285 - DNA, 1570 bp, Homo Sapiens
  misc_feature (1071)..(1071): n is a, c, g, or t
cagggtctgtttttagttttgcataatggggtttcagatcgcccataactaaaggactctgctgctaaaaccaagtttgaaagtgcctggttttgaagctagtggggccctctgtgaatcctttggatgtgaagtcgactcctagtggaaaagggacacaggtgtgaatgagaatgagggagggcagaggctaggagctggttagtgggggaagggtgagagctcagcactcactgctttattatcacagtaggtgacaaaggccgcagggagagggggaaaggtccagagctgtggagaaagaaggggctccctgtctccagggtttgtttaaggttttctccatggcctagggcccagccacttccctcactggcctcaaagccctggagttgagccctctaggcagtcaagggcaggcaggagatgggccagagaggggaggatgtgttctttaggtacagaatccctgaccacggggtccagtgcctgtgggccaaccaccaggaagctgtgcatgcccacagcccgaggcccctggtaatcgcagaggtaattatccccaacatgggctgccactactggttccatatgagcaagccgcaaggcctcctggaaaatgcgggggtccggcttgggccagccagcagcctcggaggtcagcacaaagtcgaagtgttcacgcaggccaaggccctccaggatgccctctagccgtcggtcaaagttggagatcactgccagtctcagaccccgtgtgcggcactccctcagggtgtcctcagccccatccaacacctgccaggtgcaggggtggctgaagtctttataaagctgttcagcgatgggggctacagcctgagcatcctggacacccgccaggtggaaggtctgcaggaccacatcccagcccaccactggcgggaggttaggccgtggctcaggtcgtagttggggaagctgtggctctgagccctgtatgcctgcctgaagccttgttccagggctgagggctccacctccagccccatgggcccgggccttggtggcataggcctcccctaaggggtnggcggagcctgagcagcgtgtccttcacatcccacgtcagcagtcgtatctgcagccggtgtgccatggaggaggccaagtccaccccagttctgcctcaggtcccacggtgggtcccaggggaagctgagctggataagaccacctctgcgcaacctaacaatcacctctttccaggccttgtgggtcagatttgctggctaacatgaagcacttgggaaatgtcttcacagcacaagatcccaaggtcacagtgagtcagtggcacagccaggaccagaacccaaacttccagactctctggccagttcttccacttttctccccacctccagggctcgggaaaggcgaagtccaggagcccggacctgacgcagaatgtctatagctgccgtcggcagcgtgagctggggcggcggtcctaggggccttggccgcggccgaccccttgggtccccttctcagctgtagggcgtccacggctccgggccggttcctg

SEQ ID NO: 129286 - DNA, 1034 bp, Homo Sapiens
gcgcatggaatatgaacagtgggtttaaaaaagcaggctggtacgctccggatattcccgggatatcgtcgacccacgcgtgcgagctcgcgggccttgcggctgcgttttcaatctgcttccttgtgagtcaggtgggtcctgggcccaggaaccggcccggagccgtggacgccctacagctgagaaggggacccaaggggtcggccgcggccaaggcccctaggaccgccgccccagctcacgctgccgacggcagctatagacattctgcgtcaggtccgggctcctggacttcgcctttcccgagccctggaggtggggagaaaaggttcaccaatttttaaaatccaaatatatctcatggtacagtggaagaactggccagagagtctggaagtttgggttctggtcctggctgtgccactgactcactgtgaccttgggatcttgtgctgtgaagacatttcccaagtgcttcatgttagccagcaaatctgacccacaaggcctggaaagaggtgattgttaggttgcgcagaggtggtcttatccagctcagcttcccctgggacccaccgtgggacctgaggcagaactggggtggacttggcctcctccatggcacaccggctgcagatacgactgctgacgtgggatgtgaaggacacgctgctcaggctccgccaccccttaggggaggcctatgccaccaagggccgggcccatgggctggaggtggagccctcagccctggaacaaggcttcaggcaggcatacagggctcagagccacagcttccccaactacgggctgagccacggcctaacctcccgccagtggttggcttggatgtgggtcctgcagaccttccaacctggcggggtgtccaggaatgctcaaggctggtacccccccatcggcttaaacagctttaaaaagaacttcaacccaccccctgcaccttgacaggtgtttggaaaggggccttaaggacaaccctgaagggaaattgcccccaacaccgggggttc

SEQ ID NO: 129287 - DNA, 629 bp, Homo Sapiens
  misc_feature (552)..(552): n is a, c, g, or t
  misc_feature (584)..(584): n is a, c, g, or t
tttttttcacttttctcctggctgtttattacagaacgaagaaaaaacacactggcttgaaacagacgccagatttcaaatgtagaggtgaaatacgaggtggcaattaaaatgtgattacagaaagtctggacactgagaaaagtttacaggacagtgggtgtgggttttctataacagacacttaaatatacatgacgataattgcagatagaaaccatcaaagacaaaccccaaatcaactaataatgtttacagatgttcccccccaaaccacagagccttacatcaaaacaaatactgaaaggctttaaaccaggaacagctcgccttaaccccacgagggtgcacacaagctgggctttttctctcggtctgaatggtaaagggaggaggatactctagctcctccaggtggattgctgagacagggctcggctcacacactgtctctgcgcctctcccaaatctggagaactctcccagcctcctggtaaagtgtctctgtggggcacttaacgataaaacagcttctgctgtaaagctcattangaaagagctagcggagactgaaaggttcgcanaagagattaagaatcacacaaggcaataggatttttagtgaacat

SEQ ID NO: 129288 - DNA, 1101 bp, Homo Sapiens
  misc_feature (53)..(53): n is a, c, g, or t
  misc_feature (107)..(107): n is a, c, g, or t
  misc_feature (952)..(979): n is a, c, g, or t
aaattccggggttcctccaaggttatagggattggggcctctgcggtttcatnccgtaacccctggttgccaagtggatctctaacacctcaagaccttgggagttntgaccggaggaatggcgacctgaggattgcccttagggaacattctaagcggcgtcgggagtgggcaaaaacagttttctgcttggatgtaatttctgctctttgcgggttccctcttcatttaagccgtatattgaagaaaactgtgtataacgagatggacaagaaccgatgtgaattacttagtttcttactgctcatggattacatcggtattaacttggcaaccatgaattcatgtataaaccccatagctctgtattttgtgagcaagaaatttaaaaattgtttccagtcatgcctctgctgctgctgttaccagtccaaaagtctgatgacctcggtccccatgaacggaacaagcatccagtggaagaaccacgatcaaaacaaccacaacacagaccggagcagccataaggacagcatgaactgaccacccttagaagcactcctcggtactcccataatcctctcggagaaaaaaatcacaaggcaactgtgagtccgggaatctcttctctgatccttcttccttaattcactcccacacccaagaagaaatgctttccaaaaccgcaagggtagactggtttatccacccacaacatctacgaatcgtacttctttaattgatctaatttacatattctgcgtgttgtattcagcactaaaaaatggtgggagctgggggagaatgaagactgttaaatgaaaccagaaggatatttactacttttgcatgaaaatagagctttcaagtacatggctagcttttatggcagttctggtgaatgttcaatgggaactggtcaccatgaaactttagagattaacgacaagannnnnnnnnnnnnnnnnnnnnnnnnnnngtccttcagccaaacacaatatgggctcaagtcacttttatttgaaatgtcatttggtgccagtattttttaactgcataatagcctaacatgattatttgaacttatttacacatagtttg

SEQ ID NO: 129289 - DNA, 483 bp, Homo Sapiens
tttaaacttttaaaactcaagttttattgcaatacatcttgcattacattctaataataaacggttgaagtataaattttgaaattagttaccaaaaatcatttactaaacagtagttttactaaaaatactaggattgggaaaaataaacactaatagaaagtactccaaaatgttaacaacgtttctatgggcattgggattgggggtggtttatactttctcattttctgtattaccaacacttacaattcacaatcaggagaaaaacctattatatgatacttaaaacattaaatctctgattgtcacctataggaaaaggcaactcactatccatttgaaagatccctttagacttctgatcgacctcactcgataactgcacaacctctggacacaaagaggccgaattgtccccccaatttcacctcccctattacccacaacagcagtgatatggtttggctcttgtgtcccacc

SEQ ID NO: 129290 - DNA, 925 bp, Homo Sapiens
  misc_feature (63)..(63): n is a, c, g, or t
  misc_feature (137)..(137): n is a, c, g, or t
  misc_feature (140)..(140): n is a, c, g, or t
ccggggtaccggtaaaagtggggccccttcggggggaaacttttagagggggccccccccggncccctaggggaaacttgggagagcggcccgccgggctgcgcgatttctgagcgaggccacgggcgctgtgctcnatntttttgggtggtagcgccactttactgccaatagctgacattgccctgggttaggggagaataaataaaatctgtggcatcagacaggtattaccgaggcgaagagtggactgggctttcgtgggcacttaccctgggaagggggtatgaggtggctggagaagtgttcatggagagtgtctctctcctgcccccaaggccacggaatcttctattccttctttgtacccaaagggcaaagtggaggccagggtctctttgctaaggagctaagtaggggaaagaggcagggggagctcccagcaggaccaaagggagaccaaggtttggaccccagaacagagcaggaacccagagtcctgtgcagtcacaggatgacgcagggaggacggctgttggtgatcttttctagggtttctccattactggctcttcggatggcctcaatgagatctttctcatagggaaagcccccattctccagcttggagaacaccagctgtccatttatctctatctcaaaggcacctgtgcccccgaggcgcgactcgatctcgatgcccggatactgctccttcacagcactggccagctccaggtaggtcgcctcgaagccgcagggttcacagtactccaccacgatgcggaccccactgcccggctcgacctcctcgggagggggcgctacggacgtctgccccggctccccgctcatcgcggccggctccgctcgggcccctcggacgcgtgggtcgacgatatcccgggaattccggaccggtacc

SEQ ID NO: 129291 - DNA, 908 bp, Homo Sapiens
  misc_feature (848)..(850): n is a, c, g, or t
tgagcggggagccggggcagacgtcgtagcgccccctcccgaggaggtcgagccgggcagtggggtccgcatcgtggtggagtactggtgagcggccccggctggaggacccgcaccctggtcccgcgggccggacggaggtgggtccacgggaggccccacccccgaatccccagcccagccccatctcttgactccccagtgaaccctgcggcttcgaggcgacctacctggagctggccagtgctgtgaaggagcagtatccgggcatcgagatcgagtcgcgcctcgggggcacaggtgcctttgagatagagataaatggacagctggtgttctccaagctggagaatgggggctttccctatgagaaagatctcattgaggccatccgaagagccagtaatggagaaaccctagaaaagatcaccaacagccgtcctccctgcgtcatcctgtgactgcacaggactctgggttcctgctctgttctggggtccaaaccttggtctccctttggtcctgctgggagctccccctgcctctttcccctacttagctccttagcaaagagaccctggcctccactttgccctttgggtacaaagaaggaatagaagattccgtggccttgggggcaggagagagacactctccatgaacacttctccagccacctcatacccccttcccagggtaagtgccccacgaaagcccagtccactcttcgcctcggtaatacctgtctgatgccacagattttatttattctcccctaaccaggggcaatgtcagctattggcaataaaggggcgctaccagggaaaaaaccacacaacacaaacccnnncccttgtgggcccgcctcgggcctccagaagcttttctagacctttctttgggcgcgc

SEQ ID NO: 129292 - DNA, 603 bp, Homo Sapiens
  misc_feature (483)..(499): n is a, c, g, or t
tcgagctcggctacctttgtcgaagaacaacggcaggagcccagcccaagatggccagcctgaaactgttggccagggctcctcttgtggccatgtacccagggctggctggcctgccatttgcctgtccccggagacagccgttcttctgcaaccacaccccgtgcctagccacaaccccaggctgcagctgctcagaagctccaggcattttgtttctggtgaccgcccctaatgggatatcggtgatcactggtccacccttcctgtcagggcttttctggggctgctcttggaaatgaagtcttaagtactgaataactcccctggggatagctggggcatttgtctagctgggctactttctaacactttgccatagctcagaccacttctcatcgttcagggatggactgcaaccttaatttacttgccggagtgtacattctagtgtggtgtatactggtggctgttgatgatgannnnnnnnnnnnnnnnnacacaattctctgtagactaggagaagaatgcttgtgtttttcggaagtgtgatgcttctctttgactgccaaactcttttatggaatatatctttatattaaa

SEQ ID NO: 129293 - DNA, 459 bp, Homo Sapiens
taattttctaaaaactgtaggcttttttattcagttaagaggtagacaaatgaacatggaaggctgtcccatttaacttgcccaaagttcacattccacttcattcatccatcccacactgccagaaatcttaaagaaataaccaagattgccaacaggctttttctttcttacttcttcttagcaataacagtcaataaactgcttgcaaaaaagttactaatttaaattttcactgtgttcaaagaacctcatccctctaagaagctcccgaatatgccaatagatcctgccactactgacaggagggcagagtaccaaggactctacttatataagagactacaagggaagttgtagttatatttttgttgttaaatccctgtgcatgtgagggcagaagctggtgaaaccaacaacgcagagcatgctctgtcaaacgactttccgtatggatgc

SEQ ID NO: 129294 - DNA, 1305 bp, Homo Sapiens
  misc_feature (562)..(697): n is a, c, g, or t
taaacctccacctccagtggctgtgactggtcccagtgattatacgttattggttgctgtgggtctgggcgggcctggagccagaaggcgacttattttttctctcctatgccaccccaggtggggagggagggaggtttcagactccagtttctcccttgcccttttattcccaagcctccttggccccagtataagtgttgggaactctctgccagcttcctgagttctgcctaaagatggccccccagcactggttggggacaagggccaaattggtgaccaccagtcatgcctaggacctggggcccaaaagccgggcaacctctggctacaggggccattgggtgccctcccagttgagaggggccgctgtttcgccttgtccgtcagtgccagtgcctgtgccagaggtggcgaggtgagtcctccagagcttcctggccgggccctcctcctgcctgttctggctcctctgctcccacgctagctgtcccttttctgattctggtggatcctccctcccctaattaaagtctctttttgcccctttggggctgcnnnnnnnnnnnnnnnnnnnnnnnnnnnnnnnnnnnnnnnnnnnnnnnnnnnnnnnnnnnnnnnnnnnnnnnnnnnnnnnnnnnnnnnnnnnnnnnnnnnnnnnnnnnnnnnnnnnnnnnnnnnnnnnnnnnnnnnntaccccccagcggggggcaccacggacaagaatcccgcccaccaccttatttggtgaggaggaaacggggcctcccacaatggaaggggcgacttattaaatacgacacacacgaggccagcacatacaaaacactgttgcagagccgaccaacacgtggctggggcataatttggaggagagaacccccccctttagggcgagggcgaccaatatggagagcaacccccccatgcgaagtatttaatcgccccccggggaataacacacaagggaggttgtagtgctggaccccccagccacttattctcggcgcggggaacaaaaattcgtccccaaggaatttatgtaggagaacacgaatactcccgccgccgggtttaaagacaaaggggagtatactatggccgaccctgcgccgcagagacgccgcgccacgccccgagcgtccgtcaactaggccaacgagcgcgacggatgacgaggtatagctggtagaaacacaccccccccgcgtcaactatgcagcatgtatacgatataccagactatggtaacgagccctaaccagcggcgtccagtctacgaaccacatccggcgtggtgaa

SEQ ID NO: 129295 - DNA, 1243 bp, Homo Sapiens
  misc_feature (373)..(394): n is a, c, g, or t
tgagggcacccaaggcgcctgtaggcagaggttgcccggcttttggccccaggtcctaggcatgactgggggtcacccattgtggccctgtgtcccccaaccagtgctgggggccatctttaggcagaactcaggagagctggcagagagttccccacacgttatactggggccaaggaggcttgggaataaaagggcacagggagaaactggagtctgcgaacctccctccctccccaccctggggtggcaaaggagagaaaaaataagtcgccctttttgggctccagggcccgcccaagaccccccgcccacccataacgtataatccctggggaccacagtcaacagccaacctggaggtggaggtttnnnnnnnnnnnnnnnnnnnnnngacaaaaagggttaccagtatcctacaagcacagagtttaagtttcaagacgttaaaaaaaatctgtcccggcccaggggactgaacatcagaagccagcctgaccaggcacgtgtggccttggggcaggtccactgctgctttcttgcccagctagcaagcacaccacccacctcccgcatcaaatgcccaccccaacccaactccctgccgccgccgcgctgctcggggagtgactccaggacgccttcgtggagacatgggtagtctgagggggaaggccacgagatccagccagatggtttaaaaattcttaaggaactcttcagccacaatgcgggcacgggcattgactgacagcttcatctcactgatctccttgtcaatctcctccatgaagtggatcacaaagtccaccaacttgtgtttgtacatctgctctgtgtggaagttggtgatcagaaagctgatatcatacccctccacaggcttccttcgaaggataaagaagttctctgctcgcatcatcatgaagcgcatgaacttgtggcacaaaatcttctcgatctcatcagcctgtttcacagcaatgctgacccggacagagttgatggagccctcaatcagaaccttttccttctcattcctgctgatggtcacaggttgtaacaggagctctttgctactcctgacttccacttccggcttgttgtgtcgttccacaacctgggaggagaagttctccaggcagagggcagcctgcaatgtggcccgcacggcactcaggtaggggcggagagtggcagtcatcgcgggcgctggctgggccggaaagcggcggacgcgtgg

SEQ ID NO: 129296 - DNA, 1708 bp, Homo Sapiens
  misc_feature (437)..(498): n is a, c, g, or t
  misc_feature (1426)..(1454): n is a, c, g, or t
ttttttcatgcaaaatctttatttggaacatgtatgttactgagcaggccagccgccatcctgaaatagcaaggatatttacactgtgcagagaaatacaagagcttcttgaagacattcatctgtgctttgccggcattttatctgctactttgtcctgcttctctcttccctgtgctcattattcttcatgcaccctcacctctcatcaccttaaggcatcctgtaccagcctgatctgggggcgatgactgcagccggcaatcggccattaccaatggtgtctttctgggaccctttctacctgtcttaggtattaatggtgcccaaagaaaaaatgaagagatgaaagtttctgtggttagctgggcatggtggtgtgcacctgtagtcccagctactaaggaggttgaggtggggatagtgcttgagcccannnnnnnnnnnnnnnnnnnnnnnnnnnnnnnnnnnnnnnnnnnnnnnnnnnnnnnnnnnnnnagaccctgtttcaagggggggaaaaaaagtttctttggagttgcaaggccttgtcttcactaaattttagaagtccccccgagatgtttctgcttaacttctctgacaggcctgactgtgagggctcgaatttcagctgacctaggtggagagtacttcattgatttttataatctggaaatgactgcttttccccttgctgggacatatggttttcatttctgtttgctgccatatgcttctcaacttgaacttgcctttgtctccttgctccgtgacagtgaatgtctcacatctcgtctctgctgcggggcaggggtgaagggaggtggaagaaagaagagatggtcctttggcttggttgtaagccctagtagggcctgtctttcatacggaaagggttcctcctaacccctatcaaagcatggggatgaacggccagacaatctgggcttgcctttgggtttaagtttcagtcactaaacagagaccacagaacaaggacctccctgtcctctgctgtattcgtacacacaagtatcgcagaggctttccaaggtcgatgccaggaatctgcaggagccttggctgccttcccacactgctgatgaaccaaggactgtttcgacaggcaggttgctagcccacatcaaccttttcaagaggcctcaatctgaatttatggtcttaatgactccctttttatttctttccaacaaaacctgcaggctggaggccattcttcctttaatgttattttatcatctcccccttcttagtgtggtgggtcccagagtggaccaacccacactcctggagaaggacctcccgccatgcagattcttaaaggtcactggaatgtgtctcttaaatcctgtcctgagtagcaactctcctcccacagacagatgtacagaatctgcagtcnnnnnnnnnnnnnnnnnnnnnnnnnnnnntcccccagcctgcaacagcttcggcttaagaaacacactcccaccccacatcccgtcttttaagcttcatctcccctgcataaatgggtctggtagaacaatgctccccaacgctaaagtaattgcttctaagaacttaggacatgggaaatgtttctctaagctcaaatatggatagaaagacaattctgctgcactggtcactttgcaagagatgctatcctgacatttaattgtgtattatttaatcattt

SEQ ID NO: 129297 - DNA, 901 bp, Homo Sapiens
ttttttgagctttggacaaatttattgaaacatacaggcggctgttagcagagaaatcattccatgattgatgtgttacatttggccactaccttgaatgtataatttaaaaattatatttttcacaactaagcctttggccaaaaaagtcatttagcacatctttaaagatcaataagaaatggattttggacattaaaaagatcaagtcactgaattaaacagtagcaacccccattaatctagaatcccatagtgctgaaggtagaggtgtctgtgcaaagctagtcatttgttaacagcaatcagaagagatgggggcaggcacacctgtcagaggtggcagcagagctggcaggacaggacggctgggctggtctggtcaggtgagcatgtcccagagacagcagcaacagagagccgtccagcaggctgtgaggcaggtggatggtcctagctcatctcttctttggtcttctaccacatacactgtggttttaggaggctcctgaggtccaccctgccagccgtactgtgggtatccttggtaggggtacccttgaggaggtgggtagggtccccccataggtcctggacccattggttgtggtggataaggtgggtatggggccgttggaccagggcctggatatggtggagggttctcttggttcatcggggacctgtaaagtgcacctctcctctccacgaaccgactggataacggtcgggtctgaacctgaggagcccggaccagcccgcagtagacttgccgcacctgtctcagagcaagtgaggagcagccgggcgcctgacgtcacggccgctcccagcgccgcgaaccgggagtcacctgatcaccctggcaacgcgcgcggcgcggggcgaggcgaggcttgcg

SEQ ID NO: 129298 - DNA, 466 bp, Homo Sapiens
  misc_feature (99)..(108): n is a, c, g, or t
cccaggaaactttcaatatactttattaaaaagtttctttgtataaatttcctaaacattttaaaattaaaattaaatcccctccctccagcacacacnnnnnnnnnncacacaacattagaggaatgccaaaaatattctctattacaacttttttaaattctttaattaaggcattggtcccaacggtgcacatagattaagggattttgcttccttctgaactagatcatttgttagaggcttcagaaaaagaaaattagcttgaaatctagtctgggaaattgggggcagggaatgaaaaagttggtctcttgtttctccacgatacacaggcttcccatctaaagtcatgcttaactaaaagggaaaaaaaatgaaccaagcaaaagtatatagagtagccgtgacatttgcattattttctaggactttacatttgcctgcaacaggcataacatgaaac

SEQ ID NO: 129299 - DNA, 771 bp, Homo Sapiens
ccggcctctgggcataggggtggtgactgaaactgtgaaatcagaacaaatctcctgggcaaagctggagtggtgggaacgtggatgtccgcacagtgtccctgctcaggacaaaaggcggtggatggagctggtataaccatgtgacttttatgctcaggcaaaggagtggtggctggaacttggatttctgggtggccttgatcagagaaagttgtaagagccggcacctggaggtgcagggggccttcttgcttgggcaaaggtgtggcggctggagcctggacatgccgggaacctccttgctcaggcaaaagggtagcagctgaaacgtggatgcccggaaggtcttgcttaggcaaattggaaacatgtagaccctggccatccgggctgcctccctgctttgacaaaggtatggcagcttgaacccagacagcaggacccagggggacagactcctgggcacatgtcagtgggaaggccagctcacataccagcacgtgtccaaaggcaggcaggagccctgaatgcgaaaagaggatcgagtcaggaccactactccagcggggaccacctctgccaaccacatacccggacctcacctggctctgcctgctcctggggcagacagggggatggctggggttgggccagaacccgaggccggcggcgcggggcattggctgatgcccgagtctccgcccgctgcatctgctggatccgctcgctcctcgtgccgaattcgaacccagcctcgtacctagcctt

SEQ ID NO: 129300 - DNA, 929 bp, Homo Sapiens
tgcctttgtccaggggaatatggggtggggttctccctttctagggtgccttcttgcttgggcacaaggggtggggaccgaaactgggaaatcagaaacaaatctcctggggcaaagctggagtggtgggaacgtggatgtccgcacagtgtccgtgctcaggacaaaaggcggtggatgggagctggtataaccatgtgacttttatgctcaggcaaaggagtggtggctggaacttggatttctgggtggccttgatcagagaaagttgtaagagccggcacctggaggtgcagggggccttcttgcttgggcaaaggtgtggcggctggagcctggacatgccgggaacctccttgctcaggcaaaagggtagcagctgaaacgtggatgcccggaaggtcttgcttaggcaaattggaaacatgtagaccctggccatccgggctgcctccctgctttgacaaaggtatggcagcttgaacccagacagcaggacccagggggacagactcctgggcacatgtcagtgggaaggccagctcacataccagcacgtgtccaaaggcaggcaggagccctggctctgcctgctcctggggcagacagggggatggctggggttgggccagaacccgaggccggcggcgcggggcattggctgatgcccgagtctccgcccgctgcatctgctggatccgctcgctgtaaagccgggccagctctcgcactcgggacgccgtcctttctgaactcggggctcctgccttcccgctcccgctgtctccacccagatccgaatcctccaggatcagcagtggctctgggaagcctggccgggccagctgtccctgttccaatgcctgccaggcgctccggatttctgagcaagagcggaatgcccctcgtgccgaattcgccacccaggc

SEQ ID NO: 129301 - DNA, 612 bp, Homo Sapiens
  misc_feature (564)..(564): n is a, c, g, or t
  misc_feature (598)..(598): n is a, c, g, or t
gatttaaaaaagatttatttacttgttgaatatttattagtagtagtagtaataaatataaccccgaagccacaaataaccttaggattctctcagctttaatggcagtagagtccagcttcttaatcttttgcacaaaatacactcaaggaggagctatccataagactaatagaagacttttgtctccctgacccagctcctctaatttcatatgggaaacacctaacagccataaagtgatgatctgggagtcctcattagagatgggctggacatgtcagaaagctgaagaaagaaatcaacctatttgtgaaccttaccatctaaaattgttagtctgtgtcttctaaataaacagagacctttttctcttggttgagcctttcctcttcttttgattttatctccaccactttatgagctctttcggcccatcgctttttccggttatgctggaagaggaccactacaattactattatgatcatcagtgcacaggcagagccaatggccagagccaggaagtggatctcagagaagcgtacagtgtgcacgacgctnagccggatctcccctatcaccccatcaacatcanggtgggttcttcac

SEQ ID NO: 129302 - DNA, 727 bp, Homo Sapiens
gatttaaaaaagatttatttacttgttgaatatttcttagtagtagtagtaataaatataaccccgtagccacggataaccttaggattctctcagctttaatggccagtagagtccagcttcttaatcttttgcacaaaatacactcaaggaggagctatccataagactaatagaagacttttgtctccctgacccagctcctctaatgttcatatgggaaacacctgacagccataaagtgatgatctgggagtcctcattagagatgggctggacatgtcagaaagctgaagaaagaaatcaacctatttgtgaaccttaaccatctaaaattgttagtctgtgtcttctaaataaacagagacctttttctcttggttgagcctttcctcttcttttctgtaacaagcagaaaccaaatgtcaggtgaacaagacaagaagcaagtgggtaaatcccacagaagcttcaggtaaggtatttttcccccatatttttggaagaattacatgcacttgggagtagattgaagtttacacagagctaaactggtgccatctaattaataatattcacacctctgaacttagagacttttcagaatgtaagggaatacagtttgggttctgattcgggaactccagagttttaaagcagacaccttattttaccatcccggccgtaatggccgaattcccgggcatatgtccggtaccgtcgactg

SEQ ID NO: 129303 - DNA, 1286 bp, Homo Sapiens
  misc_feature (1212)..(1246): n is a, c, g, or t
taacagacaaattggcttttatcccttttgataccaatatatgtgtatacaagtcataacactgtaagtagtgtcttaagggcaaaaatgtagcttcttgtttataaaacctaatgagcacttgaaaaaatttacactctgaaattaaataagaccttaataatgaggctgtgtatgactggtgatatggaggagcactgtgctggctccagaggggtgttgcttgtctagaatctaatatgctgcagaactggttggaaaacgggtcacaactggaaaagccaaagaaaagtttccattaacttcaagaaatactagggttcttgttcttggaaatcatctcagcttccatctaaaattgttagtctgtgtcttctaaataaacagagacctttttctcttggttgagcctttcctcttcttttgattttatctccaccactttatgagctctttcggcccatcgctttttccggtaatgctggaagaggaccactacaattactattatgatcatcagtgcacaggcagagccaatggccagagccaggaagtggatctcagagaagcgtacagtgtgcacgacgctgagccggatctcccctatcaccccatcaacatcaggtgggttcttcacctggcaggtgtatgtcccattgtcgtcgaactgcagtttccagagaaggatggaggcatcgtaccgctcaggattcccatcccaagacacccggtccttaaaccgcccactcatgggttggaagggatctatgtggtagtagaatacaaactgctcaggtcccccgtctagaggacgaaaattccaggtcactgttagagcatcacccacaggggcaaagctggagaaagtgcattttaaccgagcatctgtcccattaacagcctccagcacccgggaggtataaatttccacagctgctataggccaaagagctgtgagctgtatgccaaggagaagaagcaccgcacgagtagagctcttgccatacatgagggaaacccagccttggccccagagaccggacggggcagaccgagggctccaacaccctgccaaggccactccgggaggagcaagcaccgcgttttcccagagagaggagtttgagttgagttcctcacctgtgcctgtgactcagcccccccggccgtaatggccgaattcccgggcatatgtccggtaccgtcgactgnnnnnnnnnnnnnnnnnnnnnnnnnnnnnnnnnnncggccgcttcctctctcactgactcgctgcgcatacaggg

SEQ ID NO: 129304 - DNA, 1072 bp, Homo Sapiens
aatgtttaccttttaaaacatccaaatgtttattttcacaagcttagtagtacaagatgcaacataattcaagaaaatcaaccacagtgctaatactttaatatattattccaaatattagacgttacagtttaaatctttttaacattagctctaatgttggaataacatttaagttaataaataactgtgaatataaccatatgttcagtctattctccccagtttatcctaaatgacaattttattgtgatttgggtcataaaagtgataaataattgtttatatgttttcataaattgcatgtttatttaattaatcctgaagagaacctagaaatacattccaatgggttacataaattagacgtattttttagctcttcgattttttttaaacatgagtgagtcacactgttaactgctcttaaatttagtgttcattgcacataacattttttgaaatgtattttcacaggctataggtagtcatttgcaaagatggccacaatttttgatccttgaattaaatgtctttcatttatttcagagaattatgagtttcaaaagctactgctcttatggggcaatctgtagagtactaaactcacaaaatttgtggtaacaaaagagagttttgttacattacactttccaaatagtaaccacatcttcctactaattttcatgttaaaaacactttaggaaagacagaattacttttaggtataaaatgttctgaatttgcaaattctatagtgcttatgagaatttatattggcttttatattgtttgataaggttgtctgtgccccccagacttccatcttcagttgccacaaaggcaaattctctgtgaattgttcgtaacgtgaggttggtgtcaacatgctgcaatcagaggccttctaggattcatcttaccatttgaatttactgctctagtttggaattttcctgtcattatcgagtttaaaccaatacatgtgttgtctggtttcatggtctgagaacagtattctgcccggccgtaatggccgaattcccgggcatatgtccggtaccgtcgactg

SEQ ID NO: 129305 - DNA, 531 bp, Homo Sapiens
  misc_feature (427)..(427): n is a, c, g, or t
  misc_feature (496)..(496): n is a, c, g, or t
  misc_feature (501)..(501): n is a, c, g, or t
ttaccttttaaaacatccaaatgtttattttcacaagcttagtagtacaagatgcaacataattcaagaaaatcaaccacagtgctaatactttaatatattattccaaatattagacgttacagtttaaatctttttaacattagctctaatgttggaataacatttaagttaataaataactgtgaatataaccatatgttcagtctattctccccagtttatcctaaatgacaattttattgtgatttgggtcataaaagtgataaataattgtttatatgttttcataaattgcatgtttatttaattaatcctgaaggggaacctaggaaatacattcccatggggttacataaattaggacggtattttttaggctcttcggattttttttaaaccctggggtgaggtcacactggtaacntgctcttaaatttaggtgttccattggcccataacctttttttggaaatggtattttccccgggctatnggggngggccatttgccaaggtgggccccccattt

SEQ ID NO: 129306 - DNA, 787 bp, Homo Sapiens
agtaattcttatggtattgctgggtctctcaggaatatgtatcatttgattttgagcatgtggggttaaggtattagattactaccacaaaccgtagacccctgcatggcaccacatttattttcaggagtagatgttacatggcaggtatcaaaatgtgatgatcaattctgtgttttctgttgattaaacctcctcatttggttaaatagccagtgtataccagagagttctacacaggtcaaaattatatcacttttagagcagcaatacgtgatccaaggttttcttgaaggtagtgcaaaagatgcagttcataatgttctcccgattcaggaactcttatgctgtgtctctcctgaggatagatctgtaaatcatatggctttccagccctcactaaaaaactcagtaatatactggtatgtgcaaaatggacattctcatccaggaaaccatgtaagagcagtaaacgatttggttcagaggggaacttttctgcttgcatggccacagatcctaagtaatagccctgttcattctggtcagggtgacccatataacgttccgtgtatcctgtatcatagaagatccacagagtgactggggccccagcaatagcaaccctgaagatatctgacctctgcattaatgccatcagggagaggtatcctccataggaccagccgtggatgcccacacgatctaagtcaatgaaatcatatcgagaagctagatattggagtccttccacctgatcgtcatttctatttgaccattttatatt

SEQ ID NO: 129307 - DNA, 689 bp, Homo Sapiens
  misc_feature (667)..(667): n is a, c, g, or t
gactgtgcatgatgtttattagtgatgacagtgaggtgaggcaggggcttgtggagcatgctctgtaggtcacacactagagccataaggcaagagtagccggggagacaggtcctctgtgccctgtctctccccatctaaccctaacctaacaagcggcagctatgagtcagggaacaaagtctggagcccggttctccaaagatgtatgagggacaagaacagaaatgacaggatgcagggcaaaagaatgagaaaggcaaggaggcccccctaagttctctgctacacatgccctccttccccaaacccccatccaggttggctcccatctgccacttggcttcaccatgctcctggtccctggtcctgtcacatgttaagaagcttcctggcagggtgaggagagcccttccctccaagagcttcagctgtgagctctctctggcccgagcgtggccagcctgctgctccagtcttggatgtggctgccacaccccagcaaacggatgggtgtgccaccctgggggggctttgattgtctcatttctaatgtatggcagtgaggtgactggaggccctggatgccaaagcagtcccttgactgtcaggacttgtgcctgctcagggaccttgtttcttcctcatgccatggtgccacacccanccttttgtcacttttatggggc

SEQ ID NO: 129308 - DNA, 1956 bp, Homo Sapiens
  misc_feature (51)..(51): n is a, c, g, or t
  misc_feature (103)..(103): n is a, c, g, or t
  misc_feature (849)..(901): n is a, c, g, or t
  misc_feature (948)..(957): n is a, c, g, or t
agatgctgcgggcggcgcgcggagagagtgactgcgtgaggtgaggctagngggggatatggtgctttgcgcgagtgtgcacagcggacattggtgcggacanagtagactcgacgcgtgcgggatgatgagcgatatatagctttgtgatcgtgtggcgtgtggagtcgtgtgggcggcgtgacgtacgggtgtagaggcgacgatgcgatagtgagaggggtgtggatcggaggtgtttgtagatagtgtcgaagtggagacgaggtgtaaagaaggggagtggtgtgagcgagattggtcaggtttcgcctcctgcgtgggagctgggatggagtgaggatgggggccgtagagaggaggcgtggcgagcgcggagtgatgattttaagaggatcccctcggtgcacgtacgtatgcctgggtctgcacctggtgataaataatttacagtttgaagccggagcgttgtgcgggggacgggtgtgttttggcgcggccgctggtgatgatgggtcgcattggtgggttgagccccgttgtgctggtgagaaatgagttgtttattgctggcggcgcgcgaggtgttaaaagtgctggaggagattgttcgcgcgcgtatgttcccgccccgccagggtttgagtgtctgtctgtctaaaattacacgcgagctggcgggttgtgtacgtgctgtagtcgggttgagcaaaaaggtcgcccgcctgccgaggtgttatttggctggctccagtttggggccccgctttttgcgcaaaagaaggggagttggtgggggataaggcgcccctgctcgggggagttgtaggaggcgcgcgcccgtcttgnnnnnnnnnnnnnnnnnnnnnnnnnnnnnnnnnnnnnnnnnnnnnnnnnnnnngctgtctttttggctgttcggtgtgttgctgtgcttcgttttcctgnnnnnnnnnngcgattgatctaagaaactttattgctcagaaccttccctccctgggcaatggaaagagctttggagaccagcccatggggacagagtcagaggcactgggtgtaaaaaagagcgagcgtgtggcacatttggtccattgtcatgtgcgggtatggcaggaggagggggtaatctagaagccccacatctagggccttctagggacccagatatgcccccttaggcaaggctcacatgccaaagcaaagcagatgaggtcagcctggcttgggttgagggctcagtgcctcttagccttgccctggggttcttggaccttccggaaactgagccacatcaggctcacgttgatagcataggtggtgatacaaacaatgcagaaatcatagagcacgaagaacaggatccaggccaggtagacagaaccagcgagagacaccagggagctcagcagcatcaggacagaggcccagcgtgtccgcaggcaacctaacaatagctgtagtgtgtagaagatgcaaccgaatatgctgttggattgattgaggatgctgtcctgtcccagcacatgctccaccagcccgaaacccctgccccacctggaggagaagacgcgcgaacagctgatggcggtgcccacgtcgcagagcgcgcggtaatcccggtcccgggcgcgcgccgccttcacgtgcagcgcgtagagcgagagcactaagcccgtcaggcaaagagcgagccgcacccagccagggctcccccaggtgctgcccattatctccaggttccgcccgaggcgcccgcggagaaaaccagccacggagcaggggccgggcggcgaatggccgcgcccctcctggccctctgactcggcgattggccggccgtgctcgcactccacgacccaaatggctgttccagggcgctagtcaagcgggcgagttaggaaaacagcgaagaatgccgggactagtgaagcgggtaagggacgtgcggaatcg

SEQ ID NO: 129309 - DNA, 702 bp, Homo Sapiens
tttggttccatttaaacatttttataatttgtttcattttcaaggcacaaagagtttatgtcaatcattttaatgtctaagaatacaaagttagcactagtaacatctggtagtctaatcatttatcatgcttaaatgtaacattacaaaactacattttaaaatctgccccctaaccagatgtgaaacaacgtggacaagggtgacatgtgctagacccaatctccaaaaacgtatggttgacaaagacagctgactgctggggtaaaactgcagcagtcataatcgaagagcgaaagaggccactctattaaagactttgtttcttttgctagacatttttcacctaatcccaggatagtttctgttaatgcatcttactctctttcaaacgaatcgtccctagagcaggtgtacacattaaaaatgagctttatagcatcaaacacataccacaaccaactctacaaggagggttttctgtaagatgtgtacgactgtccgaagaacacattctggctgataagtctcagctcctgtgaggtcctgatgagtatctaaacaacctcacattttctcttccacgcctagggttaaggccagcactcagcccacacacaaagctgtgatgagaggttggttagggatggtggaggcaaagcacagatcagccagaaactcttttgagtcaatagtttctac

SEQ ID NO: 129310 - DNA, 662 bp, Homo Sapiens
  misc_feature (343)..(383): n is a, c, g, or t
  misc_feature (547)..(547): n is a, c, g, or t
  misc_feature (645)..(645): n is a, c, g, or t
tttaataaaaaaggttttactccccaggagcaaataaatcattttgaactactgataaacactgctgcagtgaaaagaaagatggctacatgtatgcaatagcacaaattcagtggaagaacagctgtgttgacgattagagataaaaatcacttatccattccctcctttcccacaaaccaaaccgaggattcccatagggaaaatgtctaactcaatagctcctcccttacatgacagggggtgtgtcattctcttaacagtggaaaacaaatgccaggtctccgcccagtggagatgctcttaacaccctaactggtagcaagacttctgcaaatgaggnnnnnnnnnnnnnnnnnnnnnnnnnnnnnnnnnnnnnnnnngactcagacctccttccagcagccatagagctttatcccagtgtcttgtccactaactttagggctccaaagctaagggagcgaggcagcagggaagggaaagatctaactgaaggaaaaagctcctcctcgccccagtttctgcagggagcagagggcttcangcaggccatgctttcctgggggccctggggtgagggctgacacggctggattccagggcacttctggttctactcccacctctcacccctagacctangaaactatattaccccc

SEQ ID NO: 129311 - DNA, 775 bp, Homo Sapiens
ctttctctttcttgttatttgttcccagccaaattttgttgaatgaatgaagaaacaagaggaggggctggggaagggctggaagggcgggcagatgtaggaccagactttcccgaggctccagatgaggcctttggaatacaacgctcaaaactcatcttgccgctcttgccttctgctcacaaggtttcatagccaggacggggaccgccacagtgagcacccaggctcagggcacctgtacagagcaagaggatagctgagacccagcccaggtagaaggaccaggagaagaaggtctggatctgggggtgtggaggctggtcccaccgctcgctggtgtacaccgccatggccaccaccatggagatggctgcagcaaaggctgcggtggttgagacaagcgggccgtggcctggggggaacagtgaggggaagcaggacaggaccaggaagctcacggacaccagggcccacagaacagccataatgctgaaggtctgcgtcacgtggatgtagcctgatatgatgtccccatgccctgttggccagaggcccgagtgagctgagtgggtgggacccacagcctcaaaccagaaatcggtgctcaaagcaatcaggcagaacatcaggcccagggagccccccagcagggccagggaccggcagagctccatggggataagctcagggcttctgggtcctggaggaggaagaggctgctgatcagactcttgaatctcagagagaaggaggctgtgcacccagactcctg

SEQ ID NO: 129312 - DNA, 845 bp, Homo Sapiens
  misc_feature (47)..(110): n is a, c, g, or t
  misc_feature (113)..(147): n is a, c, g, or t
  misc_feature (155)..(175): n is a, c, g, or t
  misc_feature (310)..(327): n is a, c, g, or t
ggcccgccgggttgtttttcttttttgggggagcacaagcttttttnnnnnnnnnnnnnnnnnnnnnnnnnnnnnnnnnnnnnnnnnnnnnnnnnnnnnnnnnnnnnnnnccnnnnnnnnnnnnnnnnnnnnnnnnnnnnnnnnnnntttttttnnnnnnnnnnnnnnnnnnnnncgcggacacaagggaaaatttttggggtttcgtttgcgattggtttggagaagaaaattcgggtgtttggtgggggcaagggctgttaccggagagtgatggacacgggcgggcagtcggtgttgtgtagttggnnnnnnnnnnnnnnnnnncccagccaaattttgttgaatgaatgaagaaacaagaggaggggctggggaagggctggaagggcgggcagattgtgggaccagactttcccgaggctccagatgaggcctttggaatacaacgctcaaaactcatcttgccgctcttgccttctgctcacaaggtttcatagccaggacggggaccgccacagtgagcacccaggctcagggcacctgtacagagcaagaggatagctgagacccagcccaggtagaaggaccaggagaagaaggtctggatctgggggtgtggaggctggtcccaccgctcgctggtgtacaccgccatggccaccaccatggagatggctgatatgatgtccccatgccctgttggccagaggcccgagtgagctgagtgggtgggacccacagcctcaaaccagaaatcggtgctcaaagcaatcaggcagaacatcaggcccagggagccccccagcagggccagggaccggcagagctccatggggataagc

SEQ ID NO: 129313 - DNA, 1036 bp, Homo Sapiens
  misc_feature (92)..(92): n is a, c, g, or t
  misc_feature (136)..(136): n is a, c, g, or t
  misc_feature (158)..(158): n is a, c, g, or t
  misc_feature (219)..(219): n is a, c, g, or t
  misc_feature (638)..(650): n is a, c, g, or t
  misc_feature (974)..(994): n is a, c, g, or t
ttggatccatcttcctacaggctgagaccgattgattaagtttgttgcagagtgaaaaacagttacttgatgtctggctagtgcatatttcntaagctcaccaaactgacagtagagagagaggagacaaagaccntcttatgacctgtcctctgtcnaccagtttcttacaggatctcactttgctagcctagccaggctactcccaggatctaaatnagatgccctagtccactttatctttgttcccaaggcactcatttttattttgattttgattgaatgtgagcaggttgacctcaggtcacactttgttccaaaaacttttggaattattccaggacttgtggtggagttatggtactctagggcagtctttctcaaactatgtatggtaaaggaccaggttttttgttttccagtccttcacttatcaatatgcattcctattgccgatgacaggtatggagttcacactgtgtgctgccgacccggcaagtttgacagcacccaaactggccagactgttctgtaggttaagtccattgatcatgtacttggatatcacagcaacattgaaatgctaaaaagtttttaaacactctcaatttctaattcaccatgtcacagactggtgnnnnnnnnnnnnnggtgttcactgaccagcacaagtctgcagatcatctttgagtagcactgttttggggccctcggtctctctgaagaccctagcagaactgatacctacctgtatctcttgttctctcctatttgagtttcacttccagagaacttgttcttcagcaagaatgtgtcactagtaaggacatctctagcatttctctagccttccttttctgctgctcaaaaataatcgttacaaagcttaggtttaagctgtatatgaaatatttatgcgactctcaaactttaaaggagttgctcctttgttccaaaattaaatgtgttagatnnnnnnnnnnnnnnnnnnnnngcctacagccgcggccgcaagcttattccctttagttgaggg

SEQ ID NO: 129314 - DNA, 909 bp, Homo Sapiens
tttgtatgaaacttggaggcttacaggtatagacagctttcagctacagcacattctaattttttattttgtttagttcttttgtattcacttctggtctctttaagactgttttaaaagaaatcaatttagggaaccccagttatataatataaactttgtaatctgagagaaaaaatgtatagtaaatctaagtcttgatttttaactttctattgtaaaaaataataatatacagagtttaatagaaggtgatgttttggttttgttttcccagaggctgccatatggtctttgagtacggggatgtcccaaactggcccaccaatgagcatggcggctccggccaggaatgccagagttagcctcccaggcttgcgggtggacatgcctgctccctgccagcctccagtggcctggccaggccctcccgagcctgtctgccctccccaggggtggaggagtctctgggccccaggaggattccctcccggagactcgcacggtgctccctgctcacgcgttgtcacagttagtccggaaatgactgaaaccaggcattctcccggacctcagcgtgggggagcctccaggcagacgctgggtatggagctgtggtgtggtctgtcctgtatggtggccagtgctttctgccagcatttctggatggatatagggactatcattagtatcctaatacacggtgattttaaaacaaccataaaattgattcagagtccactgacccttacagatgtaggtatacccttactggagagggaactctgatgaggagatgctggtaaattatcattttttaaattgctggtgagtctgacacttggtgagttttcagcccagtttgttaaacttttaattaagttttgtttataataaaaatataaatgg

SEQ ID NO: 129315 - DNA, 1721 bp, Homo Sapiens
  misc_feature (1001)..(1132): n is a, c, g, or t
  misc_feature (1287)..(1296): n is a, c, g, or t
  misc_feature (1362)..(1406): n is a, c, g, or t
  misc_feature (1553)..(1553): n is a, c, g, or t
cagtcgacggtaccggacatatgcccgggaattcggccattacggccgggtacaatgccctgtttgtacttactggttagggtcagggtaacttgccagcccaagataaatactttaatcgttaaaagtcagaagagacagaatatgtaggaaatgtttttgtttattatgtaaacatggcttacagaattatgaacagtggatagattaaaggcatttaatatttgtaattcataataactgtagaaatggccctaaagcatgctgcataattaataatttatattttcattattataagtgtttatattaatgatcttgcatttgattatatcaaattcgtcatttcatagcaacagtattgttttctctgtttttcttctctaacttctctgaaatcatctcctattaagggatagaaattgttactagaagagaatcacatgttctgtgttcattatccctacacatgtaaattaattattttatcaatactagatagagttcacatgctgactccctggatacctacagttgagaagaaaatgacagacaattatttttcctttaggtcaaaataatgtcactgctatctggataaattataagttcatatatttgaaataagatcctggaaacgaatttaaatggtgtcaaactgcagaagcaacagggcttcagtaatattcacatctaatagcgttaatattgtacatttgggatgatgatttttcttgataacattaaccattaattttattttttcagacatactgtaatcttaacaattaatgtgagcgtttgttttaagttcacagaaaacttaataattcaaattctcaggaattaaggactcaccataacattgtcagttctaatgaaattttgtaaaagatggcaagtttgttacctcacttgagtggggttttccttttcccccaattctaagagaatataatgtgtatactaaaacattaataaacataattttgaaaatttcnnnnnnnnnnnnnnnnnnnnnnnnnnnnnnnnnnnnnnnnnnnnnnnnnnnnnnnnnnnnnnnnnnnnnnnnnnnnnnnnnnnnnnnnnnnnnnnnnnnnnnnnnnnnnnnnnnnnnnnnnnnnnnnnnnnncttgtccgcccccctccgccccctcaaaagtttttccaaaaccttttgtttttgcgcgcgcggccccctaaagagaaaaggaaactggggcacatagtttttttcccaaaaaaaaccctggcgccagagaaagagggtttggatacctccccccnnnnnnnnnncccccccgggggggaaaccccagaagggtttttgtaaacaaaaatcccaaaaaagtgagcttcttnnnnnnnnnnnnnnnnnnnnnnnnnnnnnnnnnnnnnnnnnnnnnaagctcccaaagcgggaacgctctccggaataattccgaataatttcccaccgcccccaccccccgcacgcatgagcaaaatctaatatattcagagaacagaaaaaccatgggtgatgggagagaatatctgtcctattataaacncgcgttctttttcgcgcgccacaaaatatgggtgtaagaacccctctctccacgacacaaaagcgggcggaggtgtggagggagaacaccctggtaaaatactcccccccaaggcggggataatattagggaccacaccttcttttggcgcgccgcctttggggcgcg

SEQ ID NO: 129316 - DNA, 1356 bp, Homo Sapiens
  misc_feature (61)..(77): n is a, c, g, or t
ctctttgaatttaatgtatttacatcaaaaaattaggtagtcattttacatttaaggaatnnnnnnnnnnnnnnnnncaatacaaagagtgaaaggattttaaccaagtttacatttctttttgctataatttttaacaacaattcgtctcatcataacttaatgcaatgtgcaaatgcagcacccattacaatcattaaactaaatttaaggaagtacattgttaatagtgaccctcggaggaaatggatttctcttctattaaaaactctatggtatataagcattacataataatgctacttaaccaccttttgtctcaagaattatcaccaaagttttctggaaataagtccacataagaattaaatatttaaaaggtgaaatgttccttattttaactttagcaagatcttttctttttcattaagaaacactttaataattttaaagcaaaagctgttagagtctagatagctaaaactgtactcctgagttcaagcttacagataaatcttttgttaagtagttctcaataaaatatcttccctcccccatacccctacccgaaatcttatattgttctttacaaaactttggtcaagagtagaaatatatccaggcagatgtatatgccatacaatagcaagaacagtaaagcccaactaatgattttgagttttaaaaatagaaggcaattaaaatgtactcaaagttacattaagaaaagctttcacgggggtaatattgaaacagtcacaaaggttaagaaaatactgatatcaaagtacaaatgactacaatgttaaaatagacaaaaactgctatacaagagcctctttgaaaattaaaaataaagaacacaacacatgagtcaggatgattttcctgttctactcatgaattttagtctttataaggttggttatgttgacatctagaagagtttcttatcacatctgatggtctcattccaacttcgtagggtgggtcttccccaaggaacctctgatcctggtcgcatcttggtcattgtacgatttcaaagtagtgcaatatcgccatgatgtgctggggcatgaagacgtatcctgtgtatagtgccatccccacaatggaaaccagcatggaattgaacaccgtccgctcccagggctccagcatgtagagcgccgtgaccagcaggtactggtagtagaaccaggacatctgcttccaggcccgcgccagcgccatccccgccatgcgcctcccgcgatgcagctccggacgcgtgggtcgacgatatgccgggaattccggaccggtaccagcgtggtgtgaggcggggaataaaaagcagaggcggaagacaaa

SEQ ID NO: 129317 - DNA, 1659 bp, Homo Sapiens
  misc_feature (1526)..(1560): n is a, c, g, or t
  misc_feature (1641)..(1641): n is a, c, g, or t
gtgtacaccccccggcaccatgaacagggccgcgtgtaaccctccacggccacacggtgggcccgagggctcgaaaattaccggcgccccaggttggcgggacccgcctttgtaccgggggaagctgcggtgcagggtaagactggggccccctcgaggggtaactataagggcggcccgcccaattgggctgtgaatgtcgccgagagttaatctacttccctcaaaaaattaggtagtcattttacatttaaggaatagaaaccttaaaaaaaacaatacaaagagtgaaaggattttagccaagtttacatttctttttgctataatttttaacaacaattcgtctcatcataacttaatgcaatgtgcaaatgcagcacccattacaatcattaaactaaatttaaggaagtacattgttaatagtgaccctcggaggaaatggatttctcttctattaaaaactctatggtatataagcattacataataatgctacttaaccaccttttgtctcaagaattatcaccaaagttttctggaaataagtccacataagaattaaatatttaaaaggtgaaatgttccttattttaactttagcaagatcttttctttttcattaagaaacactttaataattttaaagccaaagctgttagagtctagatagcttaagctgtactcctgagttcaagcttacagatgaatcttttgttaagtagttctcaataaatatcttccctccccatacccctaccccgaaatcttatattgttctttacaaactttggtcaagagtagaaatatatccaggcagatgtatatgccatacaatagcaagaacagtaaagcccaactaatgattttgagttttaaaaatagaaggcaattaaaatgtactcaaagttacattaagaaaagctttcacgggggtaatattgaaacagtcacaaaggttaagaaaatactgatatcaaagtacaaatgactacaatgttaaaatagacaaaactgctatacaagagcctctttgaaaattaaaaataaagaacacaacacatgagtcaggatgattttcctgttctactcatgaattttagtctttataaggttggttatgttgacatctagaagagtttcttatcacatctgatggtctcattccaacttcgtagggtgggtcttccccaaggaacctctgatcctggtcgcatcttggtcattgtacgatttcaaagtagtgcaatatcgccatgatgtgctggggcatgaagacgtatcctgtgtatagtgccatccccacaatggaaaccagcatggaattgaacaccgtccgctcccagggctccagcatgtagagcgccgtgaccagcaggtactggtagtagaaccaggacatctgcttccaggcccgcgccagcgccatccccgccatgcgcctcccgcgatgcagctcacacgtcagtctccccggccgtaatggccgaattcccgggcatatgtccggtaccgtcgactgnnnnnnnnnnnnnnnnnnnnnnnnnnnnnnnnnnncgccgcttcctcgctcactgacttcgctgcgctcgtcgttcggctcgagagccttaagggcctggccccctcaatcttagnggttagcgtttcaagtat

SEQ ID NO: 129318 - DNA, 863 bp, Homo Sapiens
gagtcttagatagctaaacggtactccggaggttcagctacagataaatctttgttaagtagtctcaataaatatcttcccctccccatacccctacccgaatcttatattgttcttacaaaactttggtcaagagtagaaatatatccaggcagatgtatatgccatacaatagcaagaacagtaaagcccaactaatgattttgagttttaaaaaatagaaggcaattaaaatgtactcaaaagttacattaagaaaagcttttcacgggggtaaatattgaaacagtcaccaaggttaagaaaatactgatatcaaagtaccaatgactacaatgttaaaatagaccaaaactgctatacaagagcctctttgaaaattaaaaataaagaacacgacacatgagtccaggatgattttcctgttctactcatgaattttagtctttataaggttggttatgttgacatctagaagagtttcttatcacatctgatggtctcattcccacttcgtagggtgggtcttccccaaggaacctctgatcctggtcgcatcttggtcattgtacgatttcaaagtagtgcaatatcgccatgatgtgctggggcatgaagacgtatcctgtgtatagtgccatccccacaatggaaaccagcatggaattgaacaccgtccgctcccagggctccagcatgtagagcgccgtgaccagcaggtactggtagtagaaccaggacatctgcttccaggcccgcgccagcgccatccccgccatgcgcctcccgcgatgcagctcacacgtcagtctccccggccgtaatggccgaattcccgggcatatgtccggtaccgtcgactg

SEQ ID NO: 129319 - DNA, 980 bp, Homo Sapiens
  misc_feature (445)..(858): n is a, c, g, or t
  misc_feature (864)..(865): n is a, c, g, or t
  misc_feature (875)..(875): n is a, c, g, or t
ccactgtgaaatatttatttttgttttgtagtattaagcatgattaaaccagtgcagaaaaataccaagtacattgggtgaacgatgagctagctgttctagtatttgctttttgtaatccagttaagaccatcagcatatacaacatcatcactaactcaacaatgtagctgcagggtaacctgtggataccctgtgtgctctactggcctccaaaggcattcaggggatcatcaaagatgttggacaccttgtgttcaaatcttggttcaggtgcggcctgtgcagatcggctttttggtttggttgtcttagcctggataccagaggagaagatgtcatccatatcatcatcaaatatagacttggcttccactttctttttggacttttcttttggttttacagttaagtcagcaaagatatccctcgtgccgaattcttnnnnnnnnnnnnnnnnnnnnnnnnnnnnnnnnnnnnnnnnnnnnnnnnnnnnnnnnnnnnnnnnnnnnnnnnnnnnnnnnnnnnnnnnnnnnnnnnnnnnnnnnnnnnnnnnnnnnnnnnnnnnnnnnnnnnnnnnnnnnnnnnnnnnnnnnnnnnnnnnnnnnnnnnnnnnnnnnnnnnnnnnnnnnnnnnnnnnnnnnnnnnnnnnnnnnnnnnnnnnnnnnnnnnnnnnnnnnnnnnnnnnnnnnnnnnnnnnnnnnnnnnnnnnnnnnnnnnnnnnnnnnnnnnnnnnnnnnnnnnnnnnnnnnnnnnnnnnnnnnnnnnnnnnnnnnnnnnnnnnnnnnnnnnnnnnnnnnnnnnnnnnnnnnnnnnnnnnnnnnnnnnnnnnnnnnnnnnnnnnnnnnnnnnnnnnnngggcanngacgtaaaanggcgcgtgctggcgttttccataggctcgccccttgacgagcatcaaaatcgacctcaatcagaggtgggaaaccgacagactaaaagatccaggcgttccctgg

SEQ ID NO: 129320 - DNA, 2027 bp, Homo Sapiens
ttttttttgtgttccaataaaattttattaacaaaatatgacagtgggggggccacagtttgccaaactttgccttggaggacatgcagaggcaccctcagaattcagtgaaaacctgctcccatattgctaagactcatgaagtataatctctcaccttctttctctttcccctgcccaagccctaagttagggttcccatccatataacaaagacttctggtcaggtggcatttgctatctctgagattccctgcccatgaaagccacaaagagatttcttcttttacacaccctgaagcatattatggccccagcaaggctaactaaatcaaactgtggtttaaaaacaaaacaaaccaaccactgtgaaatatttatttttgttttgtagtattaagcatgattaaaccagtgcagaaaaatactaagtacattgggtaaaagatgagctagctgttctagtatttgctttttgtaatccagttaagaccatgagcatatacaatatcatcactaactcaacaatgtagctgcagggtaacatgtggataccctgtgtgctctactggcctccaaaggcattcaggggatcatcaaagatgttggacaccttgtgttcaaatcttggttcaggtgcggcctgtgcagatcggctttttggtttggttgtcttagcctggataccagtggagaagatgtcatccatatcatcatcaaatatagacttggcttccactttctttttggacttttcttttggttttacagttaagtcagcaaagatatcaatgttatcatcaaataaattagattccaatgttttctccttctctctggttttctgagagggtttaattgcttccgtagcaaatatatcatcctcaaaaatatcttgtgttgttaatatgacatcctgctgactactggattttgtctcattcttcttgactttctgatctgtaaagaggtcatcctcatcttccaggagaggaaagggatttgttttctttgctggttttggtttagcagactgaaagagatcatcatcactgctggcctcgcctagagcaggaaacatggggctctttgctttaccacccactggtgggttggcaggattctctgctatctttgccttgggttttgttctctccacggactgagatccagtgcccgtggaaaaaatgtccccagaatcaaaaaggtcagcctcccctctggaatgacccagagactttgcaaaggggcttgtgtccactccaggcacaggaccaccttcccaaggtgcagcggcagctgccagggcctcctcagtgctgtcttctccactggctgctctgagctgtggccgatggccatttggggaaatggcgccatcagcccactgtgcaatgggtcctctggggacgctcatgtcctcagcctcgctggactcctgagcagccagccgcctagctgcacgggtctgcggtctacgcttccctctcatcttgacacggctcttgtttgcactgtgtaaggtgtctgcctgagctggaagatcaaaactcacaccggcctccccactcccgggaaggacaggcacactttccagaccgtggctccttctgtgttcagatgaaggaaaagccaattctggcaaaacaggctttacttcagagatctgggaagccgctgtgggcagcaaggccgctgggttgatcgctaaatttgcttgtatcttcccgatccgagtggatggttctttggttttaaatggagcgagacctgatgagtcctgaggtgtttccggcttccatatgcctttttctttactaccttgaatggattcaggatgtttctggtttttgaaagagttaacagagtggtcttttttcactactctctttttctcttgtaccaaaggctgggacttggcagagctgaaaagatcatcatcttcatcatccccaaacaggctcccaacacttggctctaacagcttggtttttttggtgccagcaaaaacctacagccgcggccgc

SEQ ID NO: 129321 - DNA, 1203 bp, Homo Sapiens
  misc_feature (735)..(735): n is a, c, g, or t
gtttgtgtgttttgtttccaattttctcaattttattgagttaccaccaaaagtgttaatttaacaatgtgatagaggttgacagtacgtttcattagtacaaacatgcctatgttttatataaatttatagctgatcaactagagaataaatataattatccttttatttaggtctcttttacattcacgtttctttcacaggttggaaaaacaaaccttcacacaggaattgacaaatcaaaggaattgagaagctccttactggctggtatccatttttggcacttgtcacagaagtaggacagctgctcctccatccaagacacgtctccttcatcactgttgagggaatccccactctggtcgtgcgataagtccactgatgcctgatcctcggattcgacgatcaggagcgtctctccctccacttcaccttcctccagtccttctgaggtcgatgttctcgtggcttcgtcatcatgccgactgatcagactactcaggtggatgctactatccatcccttccttctcacaagctcggcagtgcttctcagtaacaaccctaagcactggacagtgaccctaatggggcttctaccaggatcacccagacagactcttccaaaaagtgtctgcccacactcctttattcagatataagggaccctgaaagcagtaacttatatgacccactgtcctttatttgatcaagtttaaaaggacagtgaccnaaaaaaaagatgaagatactactaagctactctccatcaacacacacacacaaactcgtgttgtctgtccaacagatatttcacattcaagtcatgatttttgagatccttttgccaataacatcttctctctttctgcttcaagttgctcagtcaaaataatctgttctcccaaaagacgaatgttttcttttttccgaatttgcctctcaatgtctctgataactccgtcacgaagcctctgctggtcccactgctgcttcacatgtacgccggccactgtggccgccgtcagcagcaccgagaggcccagcaccaccttcgagctcctagacatccccacgctggcggccgcggcctctctctcccgcccgcccgaggcgcagaggccgccgcagagtgcgcaccgccgcctgtactgcccaggctcctcgtgccgatttcaccgcagcctcgcaccgcttaagc

SEQ ID NO: 129322 - DNA, 1311 bp, Homo Sapiens
  misc_feature (269)..(269): n is a, c, g, or t
  misc_feature (283)..(292): n is a, c, g, or t
tgggaactcccgggttgaagagttccccggtgaaggggccttcaagacttccccttctggaatttgtttcaagaacccttcgggtttcccgcccgggcggtttttttattgggggaggaattccaagccacttagttcatggcccggaatcttccttgggaaacaggttaagaacccatgttccacttaacctagtggggcccgggcggccaaaccgaaatggtttaggaaagttttttcgagggccggagggcggccgaacagggttntttttaggtgggtnnnnnnnnnngtgaaacaagtaaatcattggctttattctgggtcctggaagctccactgtgagtctgaaaaaaagacacaacaggggcggcagccctgggggctggtgcagaaaatagtccctggctcctctggccctgggagcctaaagggcagtgaggagaaggcttagcaagaggcctggagcaggggaagtcaggtccctcaggaacccctcctcccccagaggaaggaggaagagggctggagagtctgctggagagtctgctcagttcctcagcaactgcactgcaggagggtgcaggccatgggttactccttgcccttctcaggggcagtgggctcccagagccacttggtagtccccaggggctcagtcccagggtccagccgtgactcccctaagggcccctcgccctccaagtccagctcctcaaaagaggagccgctggcacctgactcgctgtagctgtgctcgctgcgggtgtcaccgtcatcccagccacggctgctcgccccaggtgacagtgtggcagctgaagtctcccggctgccagggctcacttccaagcttacagaactcgtgtcactcattgtgtcagctcctgtgccatccacctgggtgtcaatggcctccacaagcccccgccatttccactctgtctccttcatctcaggcacatagaagtctccctgccgtgccagtgggcacatgaaatggatctggtcttcctggtagatctccagccgaggataggcacacagcttccgctccttgatgtaggtgtccaaggcaggatggacacggcgggtagccagccagatggacagaatggtggtgtaggggaaggtggctgtcaccacatggctgggtgccgggaaggagaacaccttgaagccaaatttctggtagaggtcgatgagctcaggggagggcgattcctcaccttcactcaggatgctgcccacggcacatcggcacttatcagggggcacctcagcagccgcccgctgcggacgccgatccgc

SEQ ID NO: 129323 - DNA, 990 bp, Homo Sapiens
ggtttcagtccccaggggtcccagcccgtgacttcccctaaggggccccctcggccctccaagtcccagttcctcaaaagaggagcccgctggcacctgactcgctgtagctgtgctcgctgcgggtgtcaccgttcatcccagccacggctgctcgccccaggtgacagtgtggcagctgaagtcttccgggctgccagggctcacttccaagctttacagaactcgtgtcactcattgtgtcagctcctgtgccatccacctgggtgtcaatggcctccacaagcccccgccatttccactctgtctccttcatctcaggcacatagaagtctccctgccgtgccagtgggcacatgaaatggatctggtcttcctggtagatctccagccgaggataggcacacagcttccgctccttgatgtaggtgtccaaggcaggatggacacggcgggtagccagccagatggacagaatggtggtgtaggggaaggtggctgtcaccacatggctgggtgccgggaaggagaacaccttgaagccaaatttctggtagaggtcgatgagctcaggggagggcgattcctcaccttcactcaggatgctgcccacggcacatcggcacttatcagggggcaccatgtgggggttgtcatagtagacagcgatggagcggagcttgggagagatgctgcagctctcagtgaaaagccgcccagtctcaccatagagccccatgtggaacttgtaggccacagtgacgttgcggatggggggtgacccagcactcacttccaccccagccagtagccctgagtacccggcaaaggccagcagcgtcagcagcagtaagagagtcaggcccccaatcaggcccagtagtagcaggtccgacatggctctggatccccaacactgcacctcaaggcagctcagcagccgcccgctgcggacgccgatccgcgcaggcggctcagggttcggttacg

SEQ ID NO: 129324 - DNA, 1383 bp, Homo Sapiens
  misc_feature (629)..(638): n is a, c, g, or t
tttggttttaaagtaatgactttattaataaatatacatccatatgatgatgtagatacaaatcatgaacactactccattcccatacacataattgcacacgagtagctcaagttcatggacataaaaacatacacagtatctattcagactttttacagcagaggacagcgtgcttattatcagttaattggtaattattttctccaaaattacctgtggaaaaaagaaattctgaaaacttaaaagaatcaaagtgatctgattactttaaatcacacacttgatttactatatagcattaaattttccaaaaattaaatacattacatgtgagagcacagatttatatatttggaggaggggggaaaaaaggaaagattcagatacatcctagagtttaacagcatacagttaagctgtaataaaaacaaaaatagaatagcatcaaaattttttatgtccaaggaaaaaaatcttttgaaaaactgttttgaattctttatattcctataaagggaccataaaattttactgcatatagagacaatgaccgacagagtagcagttatcaataacccctgaattgttcttttaaagcttcttagaatataaaggagaaatttacnnnnnnnnnnctttagctcacacactatggttatttttacactgaatgggtcaactttaacctaataaatggacccacatatatatttttttctcctcaactcaaagaaactctattcttagttcatgaaaatagacatgtaaattcacacaaacatcagtttggaatcaatattactttgacagatgtttctttaaaaagtaaataaaaaatataaagaatttttagtctaattaaaacattgattttttaaaatgtccctaaatattaaaaattaaaccagatactactcattttcttccaatacattgtgccaatatattttttaatatccaatgcaaaactctaaagatagtatcaaaatcaccctaaatactacttatgcaaggttatatctgtcaaaaaatgaaaatttcatctgttattagctcatttgctaatataataaataaaggcatgttaaagtactttttaaagaaaaaagtaatgcagacttacttgaattgcagatcattttctgaccaacagtttaaatatagaataatgaaacctattttgtgaagaacagaattacactgtataaaattagcaatttacctttcaagaaacaatcatacagtgggggagaaaaggccagttttccccaactgattatattaaagtataggcaactgtttaacatgctatttcagtgtttatcataaccccggccgtaatggccgaattcccgggcatatgtccggtaccgtcgactg

SEQ ID NO: 129325 - DNA, 994 bp, Homo Sapiens
  misc_feature (761)..(761): n is a, c, g, or t
  misc_feature (781)..(781): n is a, c, g, or t
  misc_feature (849)..(849): n is a, c, g, or t
  misc_feature (925)..(926): n is a, c, g, or t
tttctgtgtacaaaatgtttaattttgacaaagcagttaaaaggctagggtggcccttctgcagccactggtgactgggaagagtgctctagggacactggccacccccctgctcctgtcttcagacctctgctctgggattgggtccaaccctgtcctttgcagccatgtggcgatcctcagcatggagctccttgccactgtcccccaaaggggctcagtcgtccatcttcacgaagactttgggccgagaaaagatcttgatggcctcctctacctgcaccagcttccggtccagctcagcacggtggctctgggctctcagtgagtctgccccagcaggcagcagtaccagctcacgcagcagctggctctggctctggagcagcttggtcagtgtttccagccgctggttctcaggcatgcgcgtgtggcctgggggcatggcagggtccggctggctctgcttgcgggcctcggcctcccgccgccacaggtccctgcgctccaacaagtaatgtggcacatggcccttctgcgtggcattgtagtgctcctgggcctgccgctgctgctctagcacttgtgccaggacctgcagtgagcaggaatgcctccggggggctctcttggcagctcgtgcattgtgacgaatgaagtccacccccaggcctggctccttagcttcgggacctggtggggttggctggggactagatacatggggtggtgggaggcacggcgcacgggatgcgccgcangagtgggaactctgtcccangcaggtcagctctggactgggctgaccggactcactgtcgtatggggtacgcacaacttcaaggctgngtggctgtccggtggctctgtctcttacgtctatctctatcgccaggtctctctgcgatctggccaggcaatctanngagcgatatctacagtcactgtctggtgatgttcgtcatcaaacaaagcgggaaatgtacggggtaga

SEQ ID NO: 129326 - DNA, 639 bp, Homo Sapiens
  misc_feature (519)..(519): n is a, c, g, or t
  misc_feature (603)..(603): n is a, c, g, or t
ttttttccacactagaatactttattcaagagaatctggcttggcagtcagatggccctgcagggacagcttgtgggggtgccagggcccttggggaacctgctcccctgccactgccttcagctgggacgcacaggctcctcccctggtgacctcatccccactggctgagctgtttctcatccaggcagctctttctccagcccggggcccactctgtatgtgtctcttagggggggcagggtggtggcaccttggccggaaagaacaatgtcccagtacaagcaaatggcaaagtgtgaggggagatcacgggggacaaggagtggcaaaagcccccaggcaaccactgttctccagagctgaatgttctgatcttcagaagaagagggggaagtggctggatcccctccgcccgctgccggccttcccaccagccaggccgtggcggccccagcaggatccgcatccctacttttggacaggagctccgaaagcaagggctgcttgactgtgcanagcctgaggcccaagaacaggtagcagggcccccttctttccttctgcaggcccctggagacctccagggcctctggggcctancttgcccctcacgaggccacgtgtcttgcttctttc

SEQ ID NO: 129327 - DNA, 663 bp, Homo Sapiens
tccacactagaatactttattcaagagaatctggcttggagtcagatggccctgcaggacagcttgtgggggtgccagggcccttgggaacctgctcccctgccactgccttcagctgggacgcacaggctcctcccctggtgacctcatccccactggctgagctgtttctcatccaggcagctctttctccagcccggggcccactctgtatgtgtctcttagggggggcagggtggtggcaccttggccggaaagaacaatgtcccagtacaagcaaatggcaaagtgtgaggggagatcacgggggacaaggagtggcaaaagcccccaggcaaccactgttctccagagcttgaatgttctgatcttcagaagaagaggggggaagtggctccgaaagcaagggctgctttgactgttgcagagcctgaggccccaagaacaggtagcagggcccccttctttccttctgcaggcccctggagacctccaaggcctctggggcctagcttgcccctcacgaggccacgtgtcttgcttctttcaaagcggaagctcccaggggtctgtggctggcttctctctttctctcacgttgttgaaggcactgaattcctgagggtcctgtccttccctgcccctcgtcttgaagggagcgag

SEQ ID NO: 129328 - DNA, 1028 bp, Homo Sapiens
  misc_feature (89)..(101): n is a, c, g, or t
  misc_feature (812)..(812): n is a, c, g, or t
  misc_feature (887)..(887): n is a, c, g, or t
  misc_feature (926)..(926): n is a, c, g, or t
acactctacatgctttttattacaagactactgaccatacgaggaaaattcatcatctggtaactacacctaaagcacaagtatttggnnnnnnnnnnnnnggataaacagattcattaaattatatgattaaatcactgacccaatagaaaatttatataataaagccagaaaaaaagttgtaaaatatagtttacaataattattcacattcaaggctgtacatcaatacatacaacaacgtggccccgaacatgaattcaattcaaataattcatatattagaatttaaataacacagactgaactagaggccaacaatagccagcaaataaccttatataagaataaaaatacaaaagtgtatatcctagtatcattgcatttgttttcataagttcttttaatttttgctttgtctgtacatcacagttacagctacagaccaggtagagaatattacgcatgttctgcttgccacccacctgaaagacgtactagtcatttatcctattttatgttgtgaaggaacagctacagcagctctaaatactgtaacaatttaattttgccaacatccaacttacttacagtcgtaatagaggcttttaccagcacaatgacccctattcgtagtcattctgccaggtggttaggctatgtgggttacacagcttaaaaaaggtctgccttttgtaaaaagttctctgtacatagtttggtgtttcttcatatggaagaaatgagttacggggaaaattcaggtacacacgtaggctcgtaagttgctcacacagcatctcacagatganagtgtctttgttggaacagcttctcctcacaccattctcacaggcagctcatctacaccttgcaatttgggccanagtgggggcctcaaaggtctgagtgctcagcccgatcangactgcacgttgctgcgtaggggacccaccatgatcacaagccagtcagttgaatactgggaatgccctgccatctggctcaggcaatccaaggatcgatat

SEQ ID NO: 129329 - DNA, 655 bp, Homo Sapiens
gaattcggcacgaggaacgatgtcatttttaaaaatcagattcgcaaattttaaaagttgctaacactggaatggccagagtaagaggaaacgtgacacaggcacagattgctggtagacatataagttggtacagccctctctatgtaattttgtgtttgtcaaaattacaaatatgtatgcccttaacccaggaattccactcctcattatatatcctacaaataaactggtctcgttatgacacaatgtaatgaatacatagataagtactgaaatacttggttatcatagcgtaaagatggtaatcaacccaaatgactattaccagaatagaaattaaacaaagtatgatatatccataaaacacaatactatgcagctgttaagcagaatgagacagtcctctatatatcaatatggataaagagtaagtgaaaaaagccaggagagaatgttgtctataatatgctgttgttgtgtacgggaaaataaataatataaatacctagaatatttgtgaaggtacagccaagaaactactatcactgattgtcttaaggtactagatggggcacaggacaggacgaaagatttacttcttattgtttcttctgtataacttttgaattttatgctgttaatgtaatttttc

SEQ ID NO: 129330 - DNA, 964 bp, Homo Sapiens
  misc_feature (285)..(285): n is a, c, g, or t
  misc_feature (317)..(317): n is a, c, g, or t
ggttttgggagagtcgggcagccaaatggtccaaaccatagggtcaagagatggggatcacccaaaccccggagacagcgcagcttttcccatggattttggtcgcaggcgcaaaggcagggaagcatccagcgggtagtgccttcggtacaactggttccaaaaggcagcagtgcaagtgacagtccaggcattcttacaaatcagggaaaaattcacaatgtcctcaggacggatataggaggccagcaatagccaaatatccatgggatactcttctcctcncagccccgtccagttctttgtgtctcttgctnttcttttttctggagacagttctctcatggatgctttcctcctgggcatccatctcatcactgctgtcgatgatgtcacagggctcaccagccccagaaagagcttcctctgcaggaacctgagaggcttccaagccacaaagagattttacttcctgctgaacagcgttggctacggctttcttgactcgtccagacctcacgaccgccggatccgagttggcgtaatccgccacggtcactgcaacacagcaccaaccctcaaggaagaggccttctctcgtcagcgtcttccccgccaacacctcctcctcgctgcaggcccccggaccgagccgccctccagccgcgggcacgcgagcgctcacctcggcacggtccagccccctcccagccgccagcccccaaaatgtttcagcgcccctgcccccctcgcccacctcggccggagcaggcgtcgtgggcccggaacttgagtcgctttcctctcttgggcatggcgaccgtatcggggcgaggcctgcctagcgggccgggcccccgggccatgtctccggccggagagccggccccgggagccgcaagccagctccgcccggctccgcggccatccccggacgcgtgggtcgacgatatcccgggaatcc

SEQ ID NO: 129331 - DNA, 2565 bp, Homo Sapiens
  misc_feature (429)..(457): n is a, c, g, or t
  misc_feature (734)..(792): n is a, c, g, or t
ggagggtgggaggagagacaagcagcaaggttttctccttagcaaaacagaaaaacgtgattctcttctcagagtacacctgaacaataggagtcatctaaacaacaggaggacataagcatttctgcatggacggaagaccaggcttctgtcggcacacaggatgacagcagaagcagcacagtacagggcagagcaaagtcgctaagtgcttatggttcaagaggctggtttcaacatgcaatgcattttgttaatgacgttttagcctaataaatgcccttctaacagttcaatgaaagggtcactatccttcctgaaataactttcttggttttacattttattcagaaatacatatttaaaagatcatttcatcaatcttctaaacttttttggctgattagaataacatataccacaatcaannnnnnnnnnnnnnnnnnnnnnnnnnnnntctatgtacactctgcctactcctttttaccaccatctaccacaagaaaaatgagactcatcttttaaacttatggtacaacaaaaagacctgggtcagaatcttggctctgcatttactggtgttataggtacagtcactaattccgttttctcaactataaaatgggaataatatcacctactttgcaagactgtgagaagtagagatactatgtaaagttcctagtatagtaccaagggtataaagtcatcatcaccattatcagcctcatgcnnnnnnnnnnnnnnnnnnnnnnnnnnnnnnnnnnnnnnnnnnnnnnnnnnnnnnnnnnnttattttttaaaaaagatacacaagtcaatatggtaagattctgaaaaccctgtcacctgctttatttctggagaagggtaaagggagaagggaaaatattcacttgaatttgaggggcagctaaactggaagcaacaatttcaggcctctaaggttcctctgatccataagggaatgctgaaacttccttgtttggagattcaaagagtttaatttttccctacagcaagatcaacaattttcactgggataaaagaataaagaacaaactcaatagcaccaaatggggttttaacacagaaaacagggccactccttttaaatgcaaatttttacattaaaatatgtttataaatcatagtagttgttttccctcttgattcaacatttctccctcccctaacaggagccctagaacctgaagagcatgtacattactaacgagatatacaatccagccaccctgtccaaactggaatctgattactaatggactacactcgaggctgcccccaagggatgggaagcagtaactacgctctcagggagaatgggtactgaggatgccaccagtcaaagagccgaacgctgtgcactgggtccaggatgacttgcacaccctgttcactgcgcagtttccgaccaccatggacaggggaatcttggaacaccagtctcactcgatgatgccgcatgtccgtgctcacattgatagtaaacagagtaaatatcattcccatgacaatcggaataaagatgaaattgagggtggtgacctgcagtaggcagcagtcctggtctggattggtatgaacatcttcgtactgaacgggaggctgcaatcctcctgtacacttgctctttaacctaggggactgttttttgaacttgaagttgaattcccacattggttcctgtctgttcccaacaatctttctgcaccagaaaagtaagcatttggaattctttaatgtgctgggggtgctttctggaatggctggattcttggagattcgagcagcaaatggctcatacatatggtacagagatcggatcacacaagcccggagacagcgcagcttctccattgactctggtcgcagacgcaaaggcagggaagcatccagcgtgtagtgccttcggtacaacctggtccaaaaggcagcagtgcaagtgacagtccaggcattcttacaaatcagggaaaaattcacaatgtcctcaggacggatataggaggccagcaatagccaaatatccatgggatactcttctcctccagccccgtccagttcttctttgtgtctcttgcttttcttttttctggagacagttctctcatggatgctttcctcctgggcatccatctcatcactgctgtcgatgatgtcacagggctcaccagccccagaaagagcttcctctgcaggaacctgagaggcttccaagccacaaagagattttacttcctgctgaacagcgttggctacggctttcttgactcgtccagacctcacgaccgccggatccgagttggcgtaatccgccacggtcactcggccggagcaggcgtcgtgggcccggaacttgagtcgctttcctctcttgggcatggcgaccgtatcggggcgaggcctgcctagcgggccgggcccccgggccatgtctccggccggagagccggccccgggagccgcaagccagctccgcccggctccgcggccatgacgcgtgggtcgacgatatcccgggaattccggaccggtaccagc

SEQ ID NO: 129332 - DNA, 1296 bp, Homo Sapiens
ttttggaagaagaagcttgtttattgtgttacatacacagcacggggctctggcctgccagccatggggacctactcaaactcaggaacaggccggtctcctgaacctcagtttcacttgggggctcagcccagtcgccagggccttctgctcgttgttcctccctccaaggtcctgccctggaggctccaggagaaatccaaggagtgggagggtggagtcaggatgaggagtggacactggtcagctgccccttctgctggaagtagaactggaaccgagactgggcatagtccaagtaaccaaattctatggtggacatggatgcctggaggatggaccacagaccccagaagaaatgggatgccagagcataccgactgacttctaccagcaaatcttcttccagttttctctgctcctcttgggagagggtctcacctttctttgcctctgccaggtaatgacgaataaaatgcaactgctgttcttgagtggggtagtctgtgggccttgctttgtagaaaggccattcctcgtgagtataatcataaacccactcacaaaaatggttcccaatgtcaaagcccctatagttataactgctgtactcgaagtccaccagcatgaggctgtcagcattttctggctctgagagcagcaagatgttccctgggggaatggggtgaggttctgctcactccagagccctctggctcttccatcttgggttaggagactcagatgccttctcctaccttcctggatgtcattgtggcagaagacgactggcgatggggtagactctagtaacttcctgaggttgcccatctcatccttcaggctgtacatctccagcaggttcatctcagggaggccagttgggggcaggtcctggatctgttttaggtaccgctccatggtcccaaacagccagtggggctccttggtgaaaggcatctccatgccatgaaattgcgccatcttcgtggcaatggctgctgacaacactggctctcgaagctcttgagttttcaatggccgacttgggatgtactgttccagccggccctctgggaagactccgtacagctggggccccagcgaccgctccgcaagtatggcgaacatcacgctttctagcaccagggagtccacgccctgcaagatggctccgtacagccgcagaagcacctcccggggctcctcgccaacgctgggcaggtggtccgggagcgagcagcggaagagcaggttgctgaggcctccgctgcagacccacaccaggcgcgctca

SEQ ID NO: 129333 - DNA, 627 bp, Homo Sapiens
ggaagaagaagcttgtttattgtgttacatacacagcacggggctctggctgccagccatggggacctactcaaactcaggaacaggccggtctcctgaacctcagtttcacttgggggctcagcccgtcgccagggccttctgctcgttgttcctccctccaaggtcctgccctggaggctccaggagaaatccaaggagtgggagggtggagtcaggatgaggagtggacactggtcagctgccccttctgctggaagtagaactggaaccgagactgggcatagtccaagtaaccaaattctatggtggacatggatgcctggaggatggaccacagaccccagaagaaatgggatgccagagcataccgactgacttctaccagcaaatcttcttccagttttctctgctcctcttgggagagggtctcacctttctttgcctctgctgttcttgagtggggtagtctgtgggccttgctttgtagaaaggccattcctcgtgagtataatcataaacccactcacaaaaatggttcacaatgtcaaagccctatagttataatgctgtactcgaagtacacagcatgaggctgtcagcattttctggctctgagagcagcag

SEQ ID NO: 129334 - DNA, 842 bp, Homo Sapiens
  misc_feature (140)..(164): n is a, c, g, or t
ccataggaaaaaaatattttgtttttttaagaacaaattcagtttgaaacagatgtggaatgtgacttcacggatttcattttctggggctaactgcaatgtgaaactaaagcagatttaaaacctatgacaggctattnnnnnnnnnnnnnnnnnnnnnnnnntatttataactcaggcataatactgtgttacttacaaattggacaacgaaattttaaataaatattcatggtacataattacggcacaaatatgcagcaatttggcaaccttttataccattttttcctcattacagtgcaaaggggaatgacactgccgttaaacaagctgtagctaaatacattgcaaaattcagattttatacaaaacatcttgcttagactttataaaaaaccaacattgctctatgtacacaatctgggtaagaaaagccatttctttcttgttttcatgtgtatttttattaaaaaggtgaataaggctactgtaacaccccaaatccatagacagtaaaatctgaacctatttacagcatcttcactgaaacatgatggtgcaaattccaaagtcgggtgaccagggacgatcatacaagcaaggcatttacagtaactttccaaagctaaaccaacttcaaacaaagggacagttggtagattgtcatattctgcaccagacacaaaacagacgcacagaacacttttcaattggttgcagggaactcttttatcaattcatctgatttttcacagtttagcatagaaccaaaacgtagccaactgatgatacatacatttgatttcattaaaatcagactatttcccatttttcccctt

SEQ ID NO: 129335 - DNA, 792 bp, Homo Sapiens
  misc_feature (699)..(699): n is a, c, g, or t
  misc_feature (768)..(768): n is a, c, g, or t
ttttgagggtgagcaaagagctttttattcaaagaaagaggcaaattgcacccaatctctctccctgtaagatctcatctggttttgacatcagttgcaatgctttcagtttgaggctaagcagaatgttatgctgtgaatggtcaccacagagagaccactgtgttgctggtgtggggaggcgaggctcagggttggacaggttaattacctacataaccctggctgtggcccagcccagcacctcccagaacagggactgacatggctgaggtctaccttggagatggggtcagtgaagaggggaggcagggtcagcctctgtgcaagtaaaatgccccctcaccccagccttcctttccagagcaaccaatctgaaaacagaattgcctttggggctggtgttgtacctctgctttcaggccaagatggattccctagaagaggagtttgaagcccaatgtgcaaggacatttctcaagggccatgtggttttgcagacactgctgtcctcaggcctgaactcaccatggaaacccatgtcagcaaacagtgaccagcaaatcctcttcccttattctaactgctgccccctaggagactccagggggcaggcattgcttcctccctagtgtgaactctctggtattccatccaccatcctggcagcccagagctgcttctgggttaggacaacanatagggggccctacagtcagagcagctcttacccaaagtggtgagcgtcacttcctgtccagattgcangttaaatggctttacagctgactc

SEQ ID NO: 129336 - DNA, 688 bp, Homo Sapiens
  misc_feature (425)..(443): n is a, c, g, or t
tttttgaaggtcatggggcacaaggctgcaattcttttaatggtgatgacagtaacgtaagtctgatacacaagcattatgtattcaacacactgatacctgatagcatgtcaggaaaaaagaataggcaatgcagtttaaggggggaaaaactgagaagtcataactactccaaagatgtgcaggaaaccacaaaagacatggacctgcttctactataaaaagaaaatgaagcacttctctggggttgctataccaactgtttcagcccattgtagtcttgcctctttcagggctttagccactatttcatttcatggaaaagcagacatctcctaacaaacagagtgacatttaccaaaataaagagggcttctcagtgagaagcttaataaagaaaaatatttacctatgctttgcacaannnnnnnnnnnnnnnnnnngagacggtgtctcgctctgtcgccaggctggatgtaaagtttatgcagtaaaagcttattgaatgaatgaatcataggataaataatacaactagtaatttcttaagatcataaattccattacagtaaccctggtaggcaactctataaagttctgggctccaagaagaggtcagtgcatgccatacatgtgtttgatctgctgtgaagtatattcagtcttcaaaatgtaatgcttacatgag

SEQ ID NO: 129337 - DNA, 1560 bp, Homo Sapiens
  misc_feature (412)..(420): n is a, c, g, or t
  misc_feature (1453)..(1487): n is a, c, g, or t
caccgtgcctgggccctgctttgtgcaatttcaaaagccattatttctattcaattttgggtacttaactacagtggctggatgtaaagtttatgcagtaaaagcttattgaatgaatgaatcataggataaataatacaactagtaatttcttaagatcatacattccattacagtaaccctggtaggcaactctataaagttctgggctccaagaagaggtcagtgcatgccataaatgtgtttgatctgctgtgaagtatattcagtcttcaaaaatgtaatgcttacatgagataaaatcggttggttaccacccccaaattagcatatgccagcctgcacaaaggtaaatagcaaaaactttaactgctcaatctgaattaaccaaagattccttctaggaatcttnnnnnnnnntaagggtacgaacactccaagcacttattttcagatgcatcaactgacataaattaaaaatggtacaaactaataattgaacaccagtagcgtaacaaaatagaattttcactctttctgctttcagtcaaagtggtttgctcatgtttgctgaaatcagaactgaaacaatgaataaaaagaatagataaaagtggttcttccattaaagttccattccctgccctcagctgatgagggcacgagaactcaatggagcagttagggcagactcaaatcatctcagctggaagcactctccacttaaacatactcatctggcccaccctcatttcaaatttaggcaaaaatggcctccctgaggctttatgacttgctttcttctttttcttctgatagtgtttcccagattggctccttgatgtgttctggtaactgttctaattgtgtctttgttacttccatggcaaccccttcaggtaagtttcgctgaatatattccaagtagacatctgctgtgcttccagttagatgttctaactctaaacatctgtaaagtgttctcatttcatactgaactctgtgcttcttgtaaatatgcactgattggagaagagtaaatcgctctattttccttggaggttcatgtactttaatagagataccaagttctttagcagcaagcacagcaaaatattcataactgtccaatacagccttatcgtgacctttcaccaaaaccgagaggcgcttatataatatgtctggttcatcagagattgttaccacaggtttggtcaaatcctttggaacatcaacgtgtaggtttgaaaactgtacccacttcatattggtactgagaagcaagccaccatttttggctgtattgcccttagaagtgtttacagaaaaattccccaatccctgccagaggcgccggcacacagcaccgaacgctgtccgcgccgccatcttgccggtccccggccgtaatggccgaattcccgggcatatgtccggtaccgtcgactgnnnnnnnnnnnnnnnnnnnnnnnnnnnnnnnnnnncgccgcttcctcgctcactacttcgctgcgctcgtcgttcggctgctaaagctaggccctatatgatttaatt

SEQ ID NO: 129338 - DNA, 815 bp, Homo Sapiens
  misc_feature (160)..(160): n is a, c, g, or t
attgggggaggaaatcccaagcccttagttcatggccaagggattttcctagggaaacaggtttaggccccatttttcccttacctaagtgggccccgggggcccaaacgaaagggtttagaaaagttttttgaggggccgagggcggccgaacaagttnttttcttttacgtgggggggcctggcgccattttaaaatttatttaaagtcttggttgttcaggtcctaggggttccaagtccccagtcaccttgaggactcagacatcaggaattcagtccccagcccagagatcaacgaaagaaagacaacttttcttggagccaggcctcagtgaggtcatcagtggtgcggatttcgaacacctttgtgagctctgctgtctgcaccagcctgtttttactccctgcatacatcatctgttgttccggcttgcagcccacagggctggagaagatgaaacacaaagggtaggacactcggccatcgtcatgcacgtacttgtagctgtaaaccacgaacctgggctgtctctccggcaactccattttgagctcctctggggaaatgttctgaaattcttcctccagcaccaccatctgccggtctttgtccaccttcattatgatggctgcattgtctgtctcttttcggaagcggaatttcctcagcttttctgttagctctgggtctacctcgcacaccaccagggagtcagacatgattgttctgtccacaggcctcttcttttcttagttccgctgtcttctaggcgtggggaccggggctgtaggggggcgggctgtgccctcgt

SEQ ID NO: 129339 - DNA, 768 bp, Homo Sapiens
ttccttctccctttgtccgccccccccacctctgttccaaaaccttctccgggcgtccactggcctcacacaggctctttcttcgtatcgcttgttttgtttcttttagacggattctcccgagtctttggcatgtgtaaaacgttacttctaaaggtctttgcttgttcaggtcctaggggttccaagtccccagtcaccttgaggactcagacatcaggaattcagtccccagcccagagatcaacgaaagaaagacaacttttcttggagccaggcctcagtgaggtcatcagtggtgcggatttcgaacacctttgtgagctctgctgtctgcaccagcctgtttttactccctgcatacatcatctgttgttccggctttcagcccacagggctggagaagatgaaacacaaagggtaggacactcggccatcgtcatgcacgtacttgtagctgtaaaccacgaacctgggctgtctctccggcaactccattttgagctcctctggggaaatgttctgaaattcttcctccagcaccaccatctgccggtctttgtccaccttcattatgatggctgcattgtctgtctcttttcggaagcggaatttcctcagcttttctgttagctctgggtctacctcgcacaccaccagggagtcagacatgattgttctgtccacaggcctcttcttttcttagttccgctgtcttcccggccgtaatggccgaattcccgggcatatgtccggtaccgtcgactg

SEQ ID NO: 129340 - DNA, 700 bp, Homo Sapiens
cacttgggccattttggaacccatttatattggtgggtgttactctgggcttcatctagccccatactagcctctgagactgcctcagaccgtctgaacattcatggcttccttgggccaagtgtagctgtccagtgtaaaggagtcatagtctggagtgtagaccagggatcttacaaaagcctccttgtccttagtctctggttagtaggaagccagtttgtgtttgtacgcgtagtcgagaactttgatggcaattctcaaagacacgtctcggatggtgctgattggtgggtagagtctcccctgggacagatgctgctcagagacttcctgggcaatttgctctgctgtcaggaggaagatctcatctgggatgtgccggatcccgccggcgatgactcccagtgccaccccggggtacacgtaagcattgtttccctgcccaggaatgaaggtcttgccatcttccagagtcacactcttaaaaggacttccactggcaaaaatccctcggccctatgatggctgtgggcttcaccagcctcaccacctcctccagggagttgacttcaggatggtcttgggcaaacatctccttttcatggttcaggtggctcctccccttgacaatgagccctttagagtcaccatccagatctttcttgtggcctctgccttcggtacccttctttctcta

SEQ ID NO: 129341 - DNA, 803 bp, Homo Sapiens
  misc_feature (765)..(765): n is a, c, g, or t
cagagacaaggcttttattcactgtatgccttggcatctcctctcacaccagaaagtttaaaagaaaaaacacagcgacaaggattcacttgggccattttggaacccatttatattgtgggtgttactctgggcttcatctagccccatactagcctctgagactgcctcagaccgtctgaacattcatggcttccttgggccaagtgtagctgtccagtgtaaaggagtcatagtctggagtgtagaccagggatcttacaaaagcctccttgtccttaggctctgggtagtaggaagccaggttgtgtttgtacgcgtagtcgagaactttgatggcaattctcaaagacacgtctcggatggtgctgagtggtgggtagagtctcccctgggacagatgctgctcagagacttcctgggcaatttgctctgctgtcaggaggaagatctcatctgggatgtgccggatcccgccggcgatgactcccagtgccaccccggggaacacgtaagcattgtttccctgcccaggaatgaaggtcttgccatcttccagagtcacactcttaaaaggacttccactggcaaaaatccctcggccctcggtgacccggtagcacttctcagccgtgcactcggccttgctggtggggttgctcagggcaaagatgatagggcgctcgtggaaggaggccatgtccctcagaatctgctccgtgaagggcttctgcgatggcagcaacacctatgatggctgtgggncttcacagcctcaccacctcctccagggagttgacttc

SEQ ID NO: 129342 - DNA, 612 bp, Homo Sapiens
cttacccttattcctctctgtccacattttctgccccaccttacttctcctccctgacagacatccagcccctagtaatacttaaggcactatggcacttagctttgaagtgacacgaccctgtcttccttccgcccgctggtgggtaaccagtgccttccctgtaacggtaatgctgcagaactgcaaccttttgtacctttctttggggaatggggtgggggtgggagaggaggtagatggggaagaaataccccagacccaacaaacctccagccagaaagccagctattttgcatttgaaggaattgacttcctcattcattgagctttttaaaagatcacaacctcaagatggttaaaatccattgacatttgcactttcaaacatgacaagtctcggagctgctgagatgacaggcccctggcttttccacttatgcctccttttctccttattcctcctacctcccgccccgcccaggtctggagttactttcatagcatttttcactcttggcttcttttctcccttgatggtcaagtctcttatgtttcaatatttcttaactggggtgtcttataacaaaaaactcttaggtctaaaatgag

SEQ ID NO: 129343 - DNA, 681 bp, Homo Sapiens
taaatgtgcataaactatagacagaatttatttccaagtgtttttctttgattgtacatatttttttcagaaacttttgtgaagtttaaaaatttactcaaagatatcatgctttgccacatttgtaaagaaatactgccaaaagagacattttaagatgctgaattacaaatgcatactgcatgttttcatgaggtagttgttcaagccattctacatttcctgccctctacctgatcattttgattcaatggttaaaattagttgaacgcagccctgagcattcaagcaatacacagtgccatttttttctcccgtaacctcaggccgcactgcagataacgcaaagcatacacgctccactcagacttgttgattaactgattgattataaagcaggctagaagttcattctggtgtatatcactccataaaattagtgatcatctcaaaagtgattctagtgtgcattcaacagggcctaggcagtaattcgcactcaatttgaggtttttctctgattaaaaatagacttttctgtcttccttgaagttgaatttcaaagacaagtagctgtggttggtctgtaagaaggaagccagtcagttagatttgcatttgcgacttaggaaggactttcgtgcctgatggtgagggaaaggggatgtgggggtgtgttgg

SEQ ID NO: 129344 - DNA, 1043 bp, Homo Sapiens
  misc_feature (767)..(767): n is a, c, g, or t
  misc_feature (833)..(833): n is a, c, g, or t
  misc_feature (841)..(842): n is a, c, g, or t
  misc_feature (867)..(867): n is a, c, g, or t
  misc_feature (1011)..(1011): n is a, c, g, or t
ctccatgaagggcatttaatgtcagagagaaaccgtacacctggggcagagatgatgagcacgccgggcccgccagcctgacccgttgcagcgtcctgtggtttgtgaggcctccctcggtggaggagtgacagcagcagctcaagcttcccctccccgggggtgggggaagacagtataacgtccacgcagcctggtcatgcaccctggcttctgcagcccaggcgcaaacattcagtttagggctttcctgacatgtcaggtcaaatggccccctttcctcttcaggtaggagctagtgaaccgtggaggatgaagaattctcgctggaaaggcaggcctgaagtccgggaggtgcagatctctctgtggtcactgggccagagatgaccttggacttctcattttagggaaggagccgttcctgtaaactgcagatgccgcacaagtgcacgtggatgaaagagtaagagagcaccaggcctcttacggaacccatctacattctggacaagaccctgaagacatcgaggttgaagctgagttcccgccaccttcatagggcctcttggcctagtggccaggatcacaggcagtcctctaaccaaacaaagactctagacttccagacaagatcatctcgtccatcgcgaccacaacctcccgtcctccaggccgtggtggacagacagtaaatatttcacaagtcccgtacatcctgagagtcctcgccagagggagagaaaaagcctgtctcccaccaccangaggagagaacagcaagtcactcctcagagatctcagcgtctcttaatagctcttctttccatttncatcttcnnctcgtgcgatttctggctcgagggncaatcctatagtgagtcgtataatcgtatcagtcatactgttcctgtgtgaattgtatcgctcaaatccaacacatcgagcggagcataatgtagctgggtgctatgatgactactcaatatgcgtggctcatgcgcttcatcnggacttctgcactgatatgatcgcacgcgggg

SEQ ID NO: 129345 - DNA, 1122 bp, Homo Sapiens
tttagctatccaataattatttattgaaagaaatgacgggatgaatcccagactccggagtaagccaccccctcacacacacacccctcccctgactctcaaaatccacagcctgccacagcagatttgctaaaaagcaaaggcaataataaccctggggtccgtccaactcatgccctgtacccaggccctaggagggcgagggcttagtaggtatcttcagggtcagagcctgagtcctcgccttgttggttctgaatctgactttgcttccggtacaaacaggccacctgagcactggtggtggcctgctccggctgcttgtcttcacggactcgaataaaccgagggaagcgaagggagatgcccttgtcactatccaccaggccccgcgcagcagggtagatgggagagagggagaggtcagcgcacttcacctcccacacagcgctggggtccagccagtggtcgggaatcacagcgccatctatccgcacgtaagggcgtgggctgggcagcaccagggccttgaggctctggtgatgctcctccagctcctcatcactgaagccagttccaagcttgcatatggcctgcagctcctcactgtcctcgtcgtaggaggccagcaggaagcccccgtaccggccggcccgcttcccccggcccaggtaggcgccgatcaccaccaggtccagggtgtcacccacgccatcaaggtagtccttcttcagcttgagccagttgtgcgatctcttggcgatctcgtaggtggcatcaacatccagggtcttcaccatcagcccctcgcaggagtctttcactgactgctccaggaactcggcgatctgctcgatgtccttggtgtccagggaggtggcgaagacaaactcgccctctgtctccacaaagttctcccggagcagctgccggcgccgggaaaggggctcacgtaccagggactctccattgaggtagatgaggtcgaaggcgtacaaacacacctgcacctggatctcagacgcatccacctccttgcgtttgcgggtggtgagcacttggaatggctggatctgcttcttcctcgtgccgaattcaacacccaggcctcgtacctaagcc

SEQ ID NO: 129346 - DNA, 294 bp, Homo Sapiens
aaagactttaagactttattggaaaagatcattcttttgacacaaaaaataagaccagtggtcacgtatcacaattcaaacacgcaaatatctgccaatctaggagtgtcacactttccacagattatagtttccaaatgctagtgcaacatactactgaacctatgtgcacatacatagcaattgcaaatatgtaatgaaaagctcaaatgtttcccaataaaattttactgcttttctttagcctcagcaataaaaggagaaattatttgcttgttcttgtaattatttatg

SEQ ID NO: 129347 - DNA, 930 bp, Homo Sapiens
tttttaagcttcatggcacagagtttaatgtgaatcatgagatgagacaaaagcctcctccagggcgatgggaagacccagccccaaaccagactcttgagcacgcagccctaaaccagactccgggaaggggctgcgtggtcatgcaccgcctaagactcagaggtgaagatgggaagacccagccctaaaccagactcctggaaggggctgcgtggtcacgcatcgcctaagactcagaggtgaagatgggaagacccagccctaaaccagactcttggaataggctctgtggccacccatcgccgtaaggctccgggatggagacagcatggacagggacctcgcacaaaggcatgtcgggagggcctcctttccaaggcacagccccacctgctccttctcagcccacgacgggagcagagccatgtcgaagccgtgccccacacagggtggacaaggacatggcctgacagctcctcagaaatccttagagatttttccaaacgcaggttaccagggcttctgcagagagaggggcagcaggacgtgctgctgacagtccctggggacttacactgacttgcagtgagagcccacatctgccaccaggatggctcccagcaccaccgcgtcacaagcaccacactctccaccgtgggacgcccagatggctcggcaggcaggccgggctggggagctgacagcagacgcctgggactctgcccagcgtcctcacccacaaccttttaactgtaactggcagaggagacagcagggagggcagaaggtacagtgatggctaggatgcagttctaggttttgccagacatactttcaggggccactcctggctacctaattaatctacctgtgtataagaattttttagcttattaaatattccaagaggccaggcatggtggctca

SEQ ID NO: 129348 - DNA, 693 bp, Homo Sapiens
  misc_feature (77)..(85): n is a, c, g, or t
  misc_feature (600)..(600): n is a, c, g, or t
  misc_feature (640)..(640): n is a, c, g, or t
ttaagttttccacaaacgtttatgtacacgccaatgtatgcatgagacatctttcaattaaaaatgtttaaactgannnnnnnnnaaataccactataccaatgaggataagctgattttttaacttagattttatagctctagttttgcagttttggaaaatagcaggttttaaacaaaattaatatatgagctatttaaaatggtctttttagagtaagtcttacacataatggtcatttgctacttggattttcttgtccaattaatagtgacatttgacattgtatttagtctttccttccattcattaaacaaatcttactgtgcatgtagggagtatagaatgctacatttaatcttacgagatcatgctgtttaccaaattttatgatgaaattaatgctttcttcagtaggcagtcttacattgtaggcagactcctgtcaagttttgtctttcaaaatggtcctcattagcaagttaccaaaagtaaaaatagggcaataaagtaacagaattccttttaaacccatagtaagctcttctggcattgaatttatagccctcttctacccttccagccaaaggtcattccanatgctatatgtggaatttgtctgaagggtaaggagtccancaagaaaggaaaggctgaatcacttatacactgctcccaatgtgagaatagtg

SEQ ID NO: 129349 - DNA, 1602 bp, Homo Sapiens
taatttgcaaaaaaaatcttttattggcatgaaaataatgttgtaaatggcaccaaatattccacttaaatgcatatacagtattagagtcaaaaactattttatccctctttgctgtttttcccccttctgcccactttcctgggtgttgggggggcccgctgacaacagtcacaaatccagcgacctgatggaatagcaccaaggcccacacaaaaagtatgataacctctgtcacacatatcacagaacatcatttcttcttcatggtggggttgtccacatataatgcatgttttacattccatacactgccatgggtaggtcttaatcatagaaacaagctccattgtcatatccaggcaagaaggatggccactattctcacattgggagcagtgtataagtgattcagcctttcctttcttgttggactctttacccttcagacaaattccacatatagcatttggaatgacctttggcttgtacccaggaactgacttggacagtacagaacgtttgggaccatcttttcttggagtggcagctttgtcttttgatttctgtcttccctggaaagagtcctcctggctgtcaggagggctttccccttcagatacattgccagaggagctgtccgaagtgcctttatttttccgtttctcatcacctcgaccatcttcgccatcatctgaatcaccatcactgtctagagcagggagctcaggatccagagggggctcatacagggctgtgtttaatggcagataccgcagctcatctggtgagtacctcttataatattcctggaactgtccggggatgagagccactgggtaagaactgacctttgttcgctctgttggcaaaactttgtacttcccttgaggtacctggataacatgtgtctgcaagtcaaaataagctcttctttcttccatgcgttcccggtttaagttgctattaaattctgctgcttttttggcagctttcttaatatactcaggcactttactggcttcaactttctgagtattctgttgttgcatttgggaatactctttataatggtctgtaattcgttgacgttctttttcttgtagaataacagaatactcagcatgtttggctggatattcttttatcattaaatcaatcacttcatcactgcgcaatgctgttaagcctagagtgcactgagtttcagtaatgacatttagctctctcaggtagagtttctccttgtgagacaaatctcgtcgctctaaatctggatatttccttttaaaggaggtcacacccaaatattcactgacttgttcttgaagcatatagtattctcctgtttcatcaggtggccatttgtactctatcaagttttctgctggatagtaactaaaaccaagatcttgacttgaagtttcacaactcctagaactatctcctgagcccattcgcctccttttggatggctgggtcccatcatttgaattatcttcattatcatccttcggggactgcgctccgggggtggctgggtcgctgtcgcacggccgcggggacagcgcagccccgggcccggccgccgccgccatcagc

SEQ ID NO: 129350 - DNA, 1079 bp, Homo Sapiens
  misc_feature (637)..(667): n is a, c, g, or t
  misc_feature (804)..(813): n is a, c, g, or t
  misc_feature (940)..(940): n is a, c, g, or t
gggtaagcgtagcttttaacagaaataactgcagattttaagctcataatttgcaaaaaaaatcttttattggcatgaaaataatgttgtaaatggcaccaaatattccacttaaatgcatatacagtattagagtcaaaaactattttatccctctttgctgtttttcccccttctgcccactttcctgggtgttgggggggcccgctgacaacagtcacaaatccagcgacctaggaaaaaaattgttagtatagaatgaaaaattatctttactggactgaattttaagcccatctaaactcttctgccttagctatcatgaatgatattcctctctggattttgtggtgagaaagggcactatgagttcccttaatttaaggaaaaaatgtaaacttaatcaatgggaatcaatgccatgcccaaattccttgcaaggtcaagggggaatggggagagaatgcaaattgcccataccggtggcataccggaaccctttttaaagaaaaggtaaccaatcccttttccccttggaaaatttcccaaaaaccagcctaaatccaataaacctttcgccaaaacacggggggcccaaaaaacaagaccccccaagttttcgcccggggggaaaaannnnnnnnnnnnnnnnnnnnnnnnnnnnnnnaaagcaaaccccttgttttgttctcccccccttccccctggtcctctcaccccctgggtacaagagccttgggggggaaggcgccttctttaacaacaagctcgcaattttccttttttttccaacggcacaccctnnnnnnnnnnaataatttccttgggcctgtggaacacaggcgctcacttttgttaacagaaccactcttttttaacccagggccacccttgtatgaccatctgcccccgcctatcatacctgctcgcctgcgtgctncagcgccgaactgcctctctgtgttcttgggggtccgggctcctctctcgggtctcctcctcgaagaggaaaaacgtctttttctctcaaaaaacaccattttccacatttctgggccacaccccagagagcgcccaaa

SEQ ID NO: 129351 - DNA, 527 bp, Homo Sapiens
tttttttcagatgatcaaagttttatttaacattatagaacacttaaaaataaacaatatgattgcatttctgttgtgtaactttgaaaaatgttttcaagcacacataaaagcaacaagttttacccccaacaagtatgctatgcagccagtccctaactgctggggtcagcactgctctcaacagacagctggggtaggaggtaggctgctggtgtccctgcaggcaggtggcttttcctactcggaatgacgatgtcttttcttgttatggttctcaattgcccttctaagtgcttcatcctggataagatctgactttcttatatccgtgtggctacagccaatttgagggcaataggcctttttcttccgcttttgcctggactcaatcatgcgaacaatggcgtcctcttcataggtgtggccacacactttatttttcactggcttcttcatttcctcctttgtaatggggcaggtgaagttggtctgactttgggtcacaacctcgtgccgaattcttg

SEQ ID NO: 129352 - DNA, 1112 bp, Homo Sapiens
  misc_feature (69)..(103): n is a, c, g, or t
acatgggcgctgctcggcctcgtctgaacgaccgagcgcagcgagtcagtgaagcgaggaagcggccgnnnnnnnnnnnnnnnnnnnnnnnnnnnnnnnnnnncagtcgacggtaccggacatatgcccgggaattcggccattacggccggggaagctaagagaagggcggaacatcattgggctgcagatgggcaccaacaagtttgccagccagcagggcatgacggcctatggcacccggcgccacctctacgaccccaagctgggcacagaccagcctctggaccaggcgaccatcagcctgcagatgggcaccaacaaaggagccagccaggctggcatgactgcgccagggaccaagcggcagatcttcgagccggggctgggcatggagcactgcgacacgctcaatgtcagcctgcagatgggcagcaacaagggcgcctcgcagcggggcatgacggtgtatgggctgccacgccaggtctacgaccccaagtactgtctgactcccgagtacccagagctgggtgagcccgcccacaaccaccacgcacacaactactacaattccgcctagggccacaaggccttccctgttttccccccaagggaggctgctgctgctcttggctggacccagccaggcccagccgaccccctctccctgcatggcatcctccagcccctgtagaactcaacctctacagggtttagagtttggagagagcagactggcggggggcccattggggggaaggggaccctccgctctgtagtgctacagggtccaacatagagccgggtgtccccaacagcgcccaaaggacgcactgagcaacgctattccagttgtccccccactccctcacaagtgggtacccccaggaccagaagctcccccagcaaagcccccagagcccaggctcggcctgcccccaccccattcccgcagtgggagcaaactgcatgcccagagacccagcggacacacgcggtttggtttgcagcgactggcatactatgtggatgtgacagtggcgtttgtaatgagagcactttcttttttttctatttcactggagcacaataaatggctgtaaaatctc

SEQ ID NO: 129353 - DNA, 1018 bp, Homo Sapiens
ggggaaacgggagcctgggccctagggaatttaaagttttgcctgttgtttgtgccggctcaccagttctggtactgggaatcagacagtacttgggttcttagactggcgtggccagcccatacacctgtcaatgccccgctgcgaggcgccttgttgctggcccatcttgcaggctggacattgagcgtttcgcagtgctccatggcccagccccggctcgaagatctgccgcttggtccctggcgcagtcatgccagcctggctggctcctttgttggtgcccatctgcaggctgatggtcgcctggtccagaggctggtctgtgcccagcttggggtcgtagaggtggcgccgggtgccataggccgtcatgccctgctggctggcaaacttgttggtgcccatctgcagcccaatgatgttccgcccttctcttagcttccccggctcgaatttccgctcctgcttctctgcgtacttcactcccacgttcaccttgtttcctttcgtcttcgccatgctggccaaagccaggagggtggactgcacctgtgtatggttggtgttctcaaacaggtcgttggcctcaaaaatgtcgtggggcttcaccccatacttggtgatggccttgatgaagttgccgatgttctccagctggtgccaattttgggttgactcattgatcttcttcacggagcctggctgcagcttattgatgaattcgcaaagaatgatgccatctttgaggccgtccatgaagttgttgccgatgcgacggcctgtcaccccctcgatccactctctcagctcctgctcccgctggtggtcatacttctgggccagcttgttcttaacctcggctgacagcccgtaggcagggcctcggttgaagtgagcagaggacatgctggccggtgggctctggcgggggcagtggcggcactgacgctgagaacagaggcagcggctgaagttccgtctgcacactcttccctcctcacatgttttgaagctc

SEQ ID NO: 129354 - DNA, 1476 bp, Homo Sapiens
  misc_feature (49)..(112): n is a, c, g, or t
  misc_feature (117)..(131): n is a, c, g, or t
  misc_feature (1157)..(1157): n is a, c, g, or t
cgtggggagggggggaagggaaaatgaatgattaagatcatatagccannnnnnnnnnnnnnnnnnnnnnnnnnnnnnnnnnnnnnnnnnnnnnnnnnnnnnnnnnnnnnnngcccnnnnnnnnnnnnnnncttacaaaactgtaacctttatttgttgatccaacagtacgttaaccacttttaccccatccccactttacacggtacaccaacctgaacagattttgtgccacaatttcattcaaagggtttgtcattcactttatgattgtgctggataatctagatgtaagcaagtctggagattttaaaatacgggtcccctgtatgagagtagcatagtttatagcatacttttaaaaatggcattcggtaattttgccttctggacagaaagatatcttcaaattgcaaacacatctatttccacaaaacaatttggtcaggaaattttatttgaacattctaaagcaataatgctttagatgttacttaagtgtcccagacaggattaacaaaattaagtgtctctaaattacaaatttggctcctgtaggagtctcagaaaataaacagaagaaaacaacccccctcccaaaagaagtatgacacacacattttgaagaaaccccaatgtttcatgcaatggtaggcaagatgtaaaagcccacccaaatcacacatttctacaccaatcatcataagaaaaaagtactctgtagtcgatctgtacatccaaatgcatttgggaatctacacctacgttacattatttaatgttatatacatttattacccaccccccttgtttttaataatttcttatgtaaaaccttcattcaaacccaaaagatttaagactaacttggggggaaaaaagataatcactttagacattcagttaaaatgtagtttatctaaatctcaaaatgtttaataaaaacaagtatcttctccatttaacactttgctttctaactgtacagtaaattgcattgtagagagtacacttctgtcttcaaactgtatcttctttggatggaattaagatgtaactgtatagttttaagataaataaatgggaagttggtccaactaagatgacagcagatatattacatgcaggatttaatattttctaattctctcttttanaaaacaggatgctgttggattgggacacaaaaaagtcacaaaagaacccagattcattatataaactgtctacaataggtcgacaatgggagtacaaactagaggacaaagtatctgtctggaaatcatttttcatcacatagaacatacgtgcaggaagattctattcatgtacgttaggatccagtttcctctattattgattggacaatggctaaaaaacatttgccctctcgggcgaatctggctcagggcaattcctaatgagtctgaaatcgaccagtcaagtgttccggtgaatgtaccgtaaattcaaaaa

SEQ ID NO: 129355 - DNA, 1966 bp, Homo Sapiens
  misc_feature (420)..(439): n is a, c, g, or t
agcccacacccccccttggttttttaatagaatttgttagggtaaaaagccttcatttccaagaccccaaaaaaatttaaaggcttaactttgggggaaaaaaaagattaattcccttttggcccattccagttaaaatgtaggtgtattttaattctcagaaatggttaaataaaaacaaagtatcttcttccatttaacagtttgcttttttaaatgttccagtaaattgcattgtagagagtacctttctgttttcaaactggtatcttctttggagggaattaagatgtaactgtatagttttaagataaataaatgggaagttggtccaactaagatgacagcagatatattacatgcaggatttaatattttctaattctctcttttaaaaaaaaggatgctgttggattgggnnnnnnnnnnnnnnnnnnnngaacccagattcaatatataaaaatgtcccacaataggtcgacaatggcagtaaaaaataaagaggaaaaaagtaatctttctggaacatcatttttcaataacatagaaacactaagtgccaggaagattcctattcatgtaattttagcatccaagtttccctctatttattttattggaacaaatgctttaaataaactatttgtcctcttcactgaagagagctggtctatttcatctttaatgagctagtttttgggaagattagccatgtactgtagtaatgcctactgcataaaatccaagcatttgctgtgaacagttggagaaagcagtcaggaagaacctaggatcaatggaaatagatgttactttaagccaccgacgaaagagagacccacaaagtacccagtgtgttaaagcccaaatctcttcttgcgtttgtttgtttttgctgtgcaagttccacccctatgaaaaagaaattgatccaaagttccaggttttcttgggtctctagtcaattttcacattagtatagatttttcggacaaaggcacttgttcccatgtaaccaatcgctccacacattatccccaaggctgtgctaaataccgccatatatccaaagtaaaatgatgtttgaaataagccatacatctttgttttgaaaaaatagtagtaaaaggaatacatgtaaacatagattgcagttgatgcagcagagagaaaacttgtccattgccacctgtaatcttctgcatttagtagaaaatatgtgcacacaatagtcacacagacagtcacaatgcacaggataaccagcacccagcatcatgaagccatagacataatagatcttatatgcccagaaagacgtgaagatgaaattcatttcaataaagattgaaccaaaaggtaaaattccacccaggcaaacaataaccgcaggctccatgaaccattttttctccggtataggacgaggcacagcattgacacgacaaggaaagttgggctgacctgacagatttcggccaagtattgtaccaacaagatttagaggaagaataacaaaaaaacagatgcaacaaacggccaccattgttccaaaaggaatggctcttgaagcatggtaataaatggctatgaaattgatgaagaaggcagtgccacacaccatagctgggataaggaatgccccaataaacatctgctttatccatctccttcctccttgtctagcatacagacttcctccaaaataaccattcactggagacgtagcagcatagacaaatatggctgtactgagcattgatcccctctcagtatataaatcttctatcattgcaacaataataacgatgagagacacagcaaatatctgacatccagaaccaatcagagaggaaaatatcagtgggtgacttgatggtctaaatacatctccatgcacctgtttccatccatattcatctcctaggtctctatccatatcatccatttcttcccggacgcgtgg

SEQ ID NO: 129356 - DNA, 657 bp, Homo Sapiens
gttttgtgtgtccattggattacaaactttattaaaaaatataaaacacaccacagtgtgagtgtgattgtcactttgggtgggaggacgaaccatgggtccttggcttatgggaacagtcagccctcatcccgcttttgatccccatgccaagtctgtacatgggaactgtttcccttctgcctcctagtcagtcagtcctcctccccaaggataattttatcttgtacaaaggagatttttgtcacggacactgaacttaaccatttctcactcttgtggtgtcttcagagtcctaactggttcttaggtaatgtggaaggaaggcacttccaattttgatacagaatataaccacaccccatgccatctcagaaacattttagcaagctttggtttcttgtctctctcttgccccctcttcccttctcccagtgtgaagcaggctgactcctgcagaggcagtggcctcctggggcccctgggggctcatttgatcccgtctctgcctccagacaggagaatgggagttggggacaggcttcccctgcagctggattctctagaagctgtggagttgggacagggacatggggactataaagttggtggtctcacttggaataccaatgggctcctacaaatgggcctgtcctg

SEQ ID NO: 129357 - DNA, 652 bp, Homo Sapiens
ttttacagatataagaggcgatttattatgggaattggatgacaaagttatggaggctgaaaagtcccacaatctgccatctgcaagctggaagacctggaaagccaatggtgtaattcattccaagtccaaagacctgaggaccaggtgagccaatggtgtaatgtctcggagtctgaaggcctccaggagctctgatgtctgagaagttggatgtcccagctcaagaaaggagagaattcaccttttcttcacctttttgttctatttgcgccctcagtggattcgatgatggccacctatgttggatagggtggatccttttactcagtctgattcaaatactaacctcttccagaaacactctcacagacatacccagaaataattttctaccagctatccgggtattccctgggctggtcaagttgacacatgaaattaactatcacactggtcatgcgtcaatggacatttgggttgtttccgccttttggctattgtgaataatgccgctatgaacactggtgtacagatatcaatttgagttcctgctttcagtagttttgagtactatgaaatttctggatcatgtgttaattctggtttaattcttttgaggaacgccatactgttttccagagcgactgca

SEQ ID NO: 129358 - DNA, 1438 bp, Homo Sapiens
aaaaatccacaaagcagcatatttattccaggctctagtagacagccccctgatttcattcccattcatcatcaccaataaaatgaggacggatcctgggctggctgaggctctgtggtccttggctccttgccctgtgccttctcagcttcaaggcaggcagtctgtgtcagaggtagagatggcacccacagagggtaccagagctgcgcagatacatgagcccagaggcagaaagagcagggagcaaagggtgcacatccatgagtccagctggggcttcacttgctgcctgcctggtggttgcagagccatgacacacagtggccggctgggtggacagttccaccaggcactggcagagtccactcaggctcagctcctcaatatccaggtagctgacgtgaaaggcctgctcctcagagagctcactgaggacacggcagcaggcagggcccagggcacccagggagcccagggagcaactgcggagggacaggatcttctctcctactgaatttcgtagagaatcccaggtgcaacctgggccccggtttcgaagaccatccaggcgggagcccacacccaatggagaagtggtcatcatcaggctccacctcattggccatcccgggcatccagaggcaccgtgtgcactcgaagcagcattttggccgccgcattccgctttgccaattttttggaagtgccactcccaatctcaatgaacgctccactcgacaggtcatggtgaattctttgcggtggctggcccagactcctgggtcactgtgtactccggcaaccgccagcctttctgcaccaccagctcctgcagagcaccaacggggttgcactcagactgctgaggggagacagggggctgcagttccatgggggggctcctggttaggactacagatggaactggggtagcagctgctgcagcagtaaaaaccggaatgtcctcaggcagtgaagagtctaggggagaaaaagaactgctgtcctccagggccggctccagcatgctcccccctttgaggtgtttgagggccacctcagctgccttgtgcttggctgccttcttgctggggccctgaccagtgcagctggtgtcgccaacggtgacccggaaggtgaaattaggctggtgggcttggccctcggctttgagaaggtcgtacacaggcgtcttccctattctggtcccatactcctgcagaaggctgatcggggtcttgcctgggttggcggccagcatttgctctatactaggcagcccgcagcccgtggtagtgccggagccttgctcctcttcactcattccctcctccgtccccgcgggcgccaccgtgactgcagcctccacgcgccccaatacacagccgacgagctagggccggggccaagcccggagtcgcggccggtagccccc

SEQ ID NO: 129359 - DNA, 1072 bp, Homo Sapiens
  misc_feature (651)..(651): n is a, c, g, or t
  misc_feature (680)..(680): n is a, c, g, or t
  misc_feature (697)..(697): n is a, c, g, or t
  misc_feature (703)..(704): n is a, c, g, or t
  misc_feature (717)..(717): n is a, c, g, or t
  misc_feature (730)..(730): n is a, c, g, or t
  misc_feature (748)..(748): n is a, c, g, or t
  misc_feature (776)..(776): n is a, c, g, or t
  misc_feature (864)..(864): n is a, c, g, or t
  misc_feature (903)..(903): n is a, c, g, or t
cgccctttttgttttgttgtggttgtgtatggttgtaaaatccacaaagcagcatatttattccaggctctagtagacagccccctgatttcattcccattcatcatcaccaataaaatgaggacggatcctgggctggctgaggctctgtggtccttggctccttgccctgtgccttctcagcttcaaggcaggcagtctgtgtcagaggtagagatggcacccacagagggtaccagagctgcgcagatacatgagcccagaggcagaaagagcagggagcaaagggtgcacatccatgagtccagctggggcttcacttgctgcctgccatgatcttgaggtactgcagggcacggcgggcagcctcaccacgggctgcctccctggtggttgcagagccatgacacacagtggccggctgggtggacagttccaccaggcactggcagagtccactcaggctcagctcctcaatatccaggtagctgacgtgaaaggcctgctcctcagagagctcactgaggacacggcagcaggcagggcccagggcacccagggagcccagggagcaactgcggagggacaggatcttctctcctactgaattcgtagagaattcccaggtgcaacctgggcccggtttccaangaccatccaagcgggagccacaccatggngaagtggtcatcatcangctccnnactcattgcatcncgggcatccagangcaccgtgtgcactcgangcagcatttttggcgcgcattcgctttngcatttttgggaagtgcactcccatctcaatgaacgtccatcgacagtcatggtgattctttgcggtggctggccaactctgggtacngtgtatccgggaacgcagcttttggcacacagtcctganagacacggggtgcactcaatgctagggaaacagggctcattcatggggggtctgttagacaaaatgatgggttcactgtgacataaacggagtctcagatgaataatggaaaaaaagggtctcagcggtcaagtcccttagggttggggaccatattgtttgtctttct

SEQ ID NO: 129360 - DNA, 1463 bp, Homo Sapiens
  misc_feature (157)..(164): n is a, c, g, or t
  misc_feature (166)..(167): n is a, c, g, or t
  misc_feature (169)..(172): n is a, c, g, or t
  misc_feature (174)..(179): n is a, c, g, or t
  misc_feature (181)..(184): n is a, c, g, or t
  misc_feature (186)..(198): n is a, c, g, or t
  misc_feature (200)..(217): n is a, c, g, or t
gggagaaatttcaaggcccttagttccattgccccggggttttccttaggaaaccaggttatggcccatgttccctttccttactggggcccgcgcgcccaaacgaaatggtcttagaaagctttcttgaggggcgagggcgggccgaccatttttnnnnnnnntnntnnnntnnnnnntnnnnannnnnnnnnnnnntnnnnnnnnnnnnnnnnnngggtgttgtgatctttattccattaaatgatcttacaaattggagtaaaacagaaacatgcttttaatatactaatagcataatctcatcccattgcactttttaaaaactatattaagtttcaaagccactcaaaggcaagggtctagcagacagtacttttaacaaatcattttttaaaataaaaaaacctgaggaaaatttgtgtatgtacaagattagtattaactcctttaaggcttacatccatgacagcatgtatctaattagaaagctatgggaatcaatgctaccttcccttgctcataaaaacatttaaactgtagttctggcacacgaaatttgccccaaagaaaaatgtctttcaaagcccttctgtccctagatctgttttgcaaagtttctgatatggggtacttaggtcactaatgacaggaattaggatcttgtcttctttcttgttcattatttttatttgtggcttaatgtttcacctgtatgtgaaagatttgggggttcaagtcacagtgctgaattttactttttaaaagaaaaactatcaaaaattgcttttaaaaaatcctaattacattagaaaataggatacctgtacattcatttttcagagaaggcactatgacaatggagaaaaacagctttaaagagcttagataatcctctgaattaaaggcattcttactacttctgaacacagaaaacgcctggggattgtactggcaagagaccacctattctaaacctcaggtacaaagtgtccacttgcctccagacaatactgaattgtactttctccttggtacttcccattcgatgaagcagtctctctctgtggtctctgaaccactatttataaaagtgatgactccaggaccacagcccataccacctgaggcaatccctgggtacaaagctaggaatctgaactttttaaacaagcctgctaggtaagtcttatgcactccaaggtagatgagaaccactaccctaaacatagctacaacaggacttacagcaagaaaaaccatttgactgcaaatattattttacaatgggcttcttaatgtcatttttaaaaattaatcacacaaatagtttgtactttcataactgaagcttgtcttcattatgcccttatcccttgactagaattttgttaaataaaacatatgtaagcccccggccgtaatggccgaattcccgggcatatgtccggtaccgtcgactg

SEQ ID NO: 129361 - DNA, 815 bp, Homo Sapiens
  misc_feature (629)..(629): n is a, c, g, or t
gaggctctgtacatgaaaggtatcattttattatagaggtaataaaataaagaggtaataaaggtataatgtcattacagaaaaatcagtggaagagaaaagaccaccaaactgttctttgctataattattatttcatgaagtcttatcagacgtgtatttctctcctctcatgtgcaggcaccttcctgggcaggaagcagacctagcagaactgcagtggtggccctcaaaccagcaccccctcttcctgacagcacaggcactccccccggggcctgcgccacagtgagaccagctctatgcagatacagctctgtcctgtgagggggtgagacacaggctctgctggggactgaggctccggctgcattttcttacctattgtagttgtccatcctccccaaatatggctgggggcagaagagagtggacacattcacagacgggtgggtcagtaccaggacatccaggattgccttggttccagcaagatgtctcaggatgggctttccacagggaagaaccagagaagccagggcagagttggggtctctggactaccagggctcagggcatagaggtggggtttggctcgcccctgacaccaaccccaaggagaataaatnaaataaatagtgtataattgtgcagtcccctagcctggcttacccctcaacaaggggtcactagtcactgtcgatctcagttcctctgcatgtcatcctcccagaaacagaggctggctgccagtaggggtcctacccgacctggggattgaaaaaccagggctgagagtgcccatacagttcagg

SEQ ID NO: 129362 - DNA, 1040 bp, Homo Sapiens
tttttttgcctgacaattgttatcttttactttaataggcaattaatacttgtcagcttggacattttatttccagtatcatgctaaaaatctccttgttgtgtgattcttttatttcttgacatgcacacatatatggatcaaaaagtatgtacaactagaaaaacggactccaagcaaaaatggaaaacatgtttccatgagcttagatttccgggtatattactcctaaacctaaggtagaagtaatgcattgttcacttacatgtccacttttctaacccaagctaagggctggaaaaagaaagtcagaacagtcccaagtaaatatgggaaaccatagcagtgataaaacctaagatttctcagaaatagttttaagtgggaagcctctaatcctacctggacagtgctttcctgtgggtttctcagcatgagtccaaacctcacaaagcaccttcaaagtctgggctacccagtatcacaagtatagcagtaagtccaatatctggatacaggggccaaggaaacaatgaaaaaaccaaatcaaggaccagatgctgagactccccttgtgttccacagttggaagaataagcagttggaccctaggtagttttccgcttcttggcagatggccgctcaaatacatctcgtaccccagctgccttttgtttgaagaactttgtgttctgggcactctcttggccccaagctgagtcaaaggaggtggtatcttgatccacaaggtgagtgtatttggtgcgacctgagcgtccaaagttcttgacctgcatgactttaggaagaatggttttattgaaatgatcctccagggtaggagcgctgaaatctctcttgtatacttcttcatcctcatccatgaagaaggcaccccggtgataatacttctgtaagaacttgtatttgcccttaacagctttgttggtaatgactttgccgtttgcccgaagttcagctctcctctcttcctcagtcaggtttcgcatgcgttcaatttctgctttctccttctcaag

SEQ ID NO: 129363 - DNA, 728 bp, Homo Sapiens
aggagaggaccatgtttatgaaagaagcagtattcctcttgggacttccaatggtaacttcccagggatggagttctggaacccacttatttgaggccatataaaggcaggccatgcatttaattaaaacagaaaaaggctccaagaggttcagggcatcgtcctccggccaacagaagcaggtaccgtgtgaggagtttcaccatgagattgagacttaagaggtaaatcatctacacgctttcttttctttttggggcagattatagacatctagctgtggtgagaaattaagtaacagagatgcttacttaagaaaaaggaaattctgaaaagaactctgttcactaaattgcttatgttctcaaggcactgtggctctcctgggcaaccgagggcagcttggtgatgggagagtcggcgtcgtccgtgtaccgaacatctgtttccttcagatacgggtctcatttccttttatgatgatggtttttaacacataaacttgtggtgaggaggaattataagtttgtgagcgtcgtgggtagattttcactccagcagagtaggagctaagtcagagtgtagaagctttggggtaaggtttccttcaaaacagagattggggcactcggctttcgacgtgggctgcctgtggctggagctgccatctttgtccgagaggtagggtaagttctcaggggcctcctcggcattggggtcagtgtgga

SEQ ID NO: 129364 - DNA, 1007 bp, Homo Sapiens
  misc_feature (866)..(875): n is a, c, g, or t
ttgagttgcatcatttaattttaagctatttattttcataaacatgaggtatttcaaagtgctataagatgcagcactaaatatatacattttgaagaaattaaacacagaactttgcatttacccagttctatgcaccaaacatgaacaaatacattaacaggaagaaacaggctaggaaaaaggcatatatatatagtaaatttctttacaaaagtttcttagttcaaaaagtgataaagtaatatctactcaaaactttcacaactcattttcatacgaaaatataagtatcaaatttagttatgtatcagcgtcatactaaagtatacaggcagtgtaagaattagtacagtacataacagagattaacaatatatttgtatacaaaacatgctcctcaaacattgaggtattattacagtacttaggtatgaacttccagtctaatactggccgcaaaagccacctctcattacccaggatgtatacaaaaggcggatgtgtcaatggtatttacagaaatgttccccaggggtatcaaatggcaaaccccttatgtggcatctgctggaacttaagcaccattttaaaaagaaggaatgactttctgttgtttggaaacttggaacacacaaggtgacttcaacagccccagaggctcccaaccgtcaccaacgtttagcgctgtcatggaggtgaggtggaggaggctgcagggccacccagcatcctgggatgcaggctctccaaggtcccagcagaaccccacactggtggtcctactgcccacccagagccgaactcgacaggggaccgatttgaaagtaaaccaacattcttaatgtcaacacaatgtttgtttnnnnnnnnnntcaaaatgtgcaaagtggcagtgactgtccagttttgagaagcgtctagcaagtccgagcgtgttcaattttctttagcaactgctgctgtcttgcctcgtgccgaattaacacccagcctcgtactagcta

SEQ ID NO: 129365 - DNA, 958 bp, Homo Sapiens
  misc_feature (61)..(61): n is a, c, g, or t
  misc_feature (173)..(173): n is a, c, g, or t
  misc_feature (189)..(189): n is a, c, g, or t
  misc_feature (201)..(378): n is a, c, g, or t
  misc_feature (475)..(487): n is a, c, g, or t
aaaaccaaacgcctttaagtctgctttgtgctttacaattttcctggttccgtgtcttganacgacaccctttgatggtgtaccctcccgcaccgaagacaacgaggatatttagggagagcgagagcgccatacgcaaacgcctttcccgcggttgccgatcataatgcagntgcacgacagtttccngactgaaagcgnnnnnnnnnnnnnnnnnnnnnnnnnnnnnnnnnnnnnnnnnnnnnnnnnnnnnnnnnnnnnnnnnnnnnnnnnnnnnnnnnnnnnnnnnnnnnnnnnnnnnnnnnnnnnnnnnnnnnnnnnnnnnnnnnnnnnnnnnnnnnnnnnnnnnnnnnnnnnnnnnnnnnnnnnnnnnnnnnnaagaattcggcacgagggggttcagacttgggaagaatctgtcagtgtgcatggagtaaggtgtgtgtgtgtggatggatgtgcacgtgtgcatgcnnnnnnnnnnnnngccgtgaggacagttgaatttggggcatttttctacaagaagcagtcagccttctctcccccataaggactggctgtaaccttaagcccatcaaagttacttccagcctggagagaacctcaccaaacagctggtgtggcctgagggtggccatggtgggaaatgggcatgagaataaatacctccccaaattcaatctgagcccagcaggagaggatggtagggttgccagggctcagaagtgcaagctgattactcaccccaccctgcctcgccgcacctttcctttgtttccttgggtgaatgcaggagcagcagtggctgcccttcccacctggacagtggtgtgtgtagaaagccagctggatgtttgtggtggggcctcatggtgcctaggaggagataaagatgaggaggtttttccttattgtataaatgaatatttgtatgattaaattaacacacacacca

SEQ ID NO: 129366 - DNA, 2790 bp, Homo Sapiens
  misc_feature (115)..(127): n is a, c, g, or t
  misc_feature (133)..(179): n is a, c, g, or t
  misc_feature (2575)..(2629): n is a, c, g, or t
ctccaggctggaagtaactttgatgggcttaaggttacagccagtccttatgggggagagaaggctgactgcttcttgtagaaaaatgccccaaattcaactgtcctcagcggcnnnnnnnnnnnnngcatgnnnnnnnnnnnnnnnnnnnnnnnnnnnnnnnnnnnnnnnnnnnnnnntgacagattcttcccaagtctgaacccctctgtctccccaactgggttcagaccctatcacctaaccatggtgtctgcctcacctcctgggtgccagacgcaggtggtcctgcccagaggtggcctgccacttggtgaagattctaagaggagcagggactattggggctgagaggtagccactaccaccccactaggcaggggagcagagaggggccctaggcatttgtctgaaccccataccagtgaggggagagagaatgaatgatcctgataccttccctgggctggggaagccatggacccctctgcctgcactccatgacttgcacttactctggccctctgcaaggagctcatctcgcctccaaggatgtgcacagaaatggtttgttcttgggaagggagacaaggtgcttgggacatttaacttgccaagtgtggttgcctagaagcaagaggaagagcaagacgactctggcaggcccagacccactgacggtggcccatgaagcccctgctgggaaactgggaaggggcacccagtgttgggcagaagaggaagtcaggaaagcaggggttgtgaagcctcccacaatcgtgccagggaccagtggagatgtgctgcttccagggctattaagcagtaagaacagctgggcatgcatgggctccagggaggcagtgtctcaggagactggtaccagcagcagcagtctgggcctaatgaggccctcagacaaaaagccatcctgaggcctgtggcgtgggtacctggcagagacttccctctgctctgttagggagtggagcactcccatgtgcacagaaaataggtgctccagagtaagctctagtgaagtcccagaccccagctgcaccacgcttctcagcaggctggctccagccacccccagggcttctccagtggaataaagtttatgcccccttttattttttggggggtggggaggtgaagagggaatttcacacaagcttttctcccacaatcaagctctaaaaaaacaacagtctcagaagaggatgaggaggaacaaacaacacacattttttggaactcagacacccagacagaaacaggcaggcagaccctcacccacacccaggctatatgactccttgcagccactcattacctggtctccctgcctgtctcacaccctcacccaccacccagctggatgggggtgtggtaacaggcaggtgaccctgcaacagcaccctggatccatatccctggctctcaaaccaactaagacttgagggaaggaggggggtaagagggactttgcatattcttgtatctttggcagacagctgttctagcctggttcaagcttcccatggagatatccacatctcaacctgctcagaatctacaggatgccagggcaggccacctgcctgagtgagcagccagtcaatcagcctcttgcttcagctgggctgccacttgcccacctcccagccaataatctagcatcctggcagggaggcggggctgtggaggtcctctcatttccatctaaatgtggtctccaagatcaagtagtcagtggctggccctttcccatgacaaattccccctttggggctgtattttcatacctctacagatcagccgccactaacaggctgtgaaaatatcagaggacaactgaagagaaacagggaaaggtgttgtgtgacaacagagaagcatgggccaccttcaagcttgcctactgcacacctgctggtgagttgcaccgacacccgtgtgtgcacatgtggtgcatacatataaccagcacagaggcactgttcccagagcaaatgggaagccactgcatgaagaatccaaaagagcagtaagcatgatggcatttctctctgccaagagaaacatggaagaaaagcaattttaattgttacaagggtgtgcagaaggacacctctcaggcttagaaaatcccacgtcacccgagatctatcctcaaggcttcctctgctggccacacagggaagtttggtcttcagagaggttctgatgctaacaagccacagggttgacgaatacaaatgtcaaaggtgtaaatcaacagaagattaaagagaaaagaggaggaaaagggtgataactcattggctgatgccattaaaaacaaatggggtcagagacttctggagtcatgtggcagggcagatgtactcctgtagcactgatccgcagagtcctcaaacatgccacgccaacttttcacctgaatctcttccagaacaagcactattctataaagaatatgttatcccttatttaaaaaaatacaaagtggggaaagagggaaaaaaattaacatgtgctcaaactacaacctttctgtaggcaaaataannnnnnnnnnnnnnnnnnnnnnnnnnnnnnnnnnnnnnnnnnnnnnnnnnnnnnnccgagtgacctcaatgacttgttagactgatgcctataactaaacccaagtggctgcatggatttcttcttggtagcctcaacacgacgcgtggtcgacgatatcccgggaattccggagcgtaccagcctgctttcttaaccactgtcatattccatcgc

SEQ ID NO: 129367 - DNA, 841 bp, Homo Sapiens
  misc_feature (265)..(265): n is a, c, g, or t
  misc_feature (267)..(267): n is a, c, g, or t
  misc_feature (269)..(270): n is a, c, g, or t
  misc_feature (272)..(287): n is a, c, g, or t
  misc_feature (641)..(641): n is a, c, g, or t
  misc_feature (784)..(784): n is a, c, g, or t
aatcaacaaacatttatttctcatggtttgggaggctgggaagtccaatatcaaggcactggcatagtccatgtctggtaagggcctgcttcccggttcaaagatagctatcttctcactgcaccctctcatggtgaagggcaaagctagctctctagggattcctatcaggaaactaatcccaattacaaggcctccatcttcatgatgtcctccaatcctaaaaaccaccagagacagggcctccaaataccatcacattgtngntnnannnnnnnnnnnnnnnntaaggtttcaacatatgaatctgaggtggcatacactcagccaaaacattacacctctggcccccaaaatccatgtcatcacatgtaaaatatattcatctcatcccaaaggcctcaaaagtctcagttaattccagcatgaagcctaatgtttaaactcaaactccaaagtgtcatctcaatatcacatcactcagatatggatgagactcaattcatgctgaggcaaaattcttcttcagctccgaaccggtgaaaaccaaactagtcatgtatttccaaaatatgagacaggcacaggatagagattcctattccaaaagtgagaaacaggagaaaggggtgagctcccanacaagtctgaaacccagaaagcaaactgaagactttccatattctttagatatgtagatacttgtagacctgtcctccactattcattttcacaggtattcgaaggttgtgtgataatgaaagctttccacattcttacgtanggttatctccatatgagctcttcatgtctttgaaagggactggatactgaacgtttt

SEQ ID NO: 129368 - DNA, 1112 bp, Homo Sapiens
ggcagggaagaggacttggaatttattagggtcacaagcacccctgcttcccatattcagcattcctgaaccatacactgccaccccttttgtatcctgggaacttagagtcctcatcagcaggaggccaggcagagtggtgggggggtgagcagagtccagggtccttgaggcagttacatgaaaagacctccagtgacttccactgaggtccctgtgatgtatccactatcttcagatgccaagaatgcgaccacatctgccacatcctcagggtcccccaagtgtcccatcgggatcatttcagtaatcttgtccaaccactttctgtggcactttctgtgtcatgggtgttgcaatgaaccctgggaggacagagttacagcggatcccatgtcgtccaagctcccgggctgcggtctgggtcagcccaatcactccagccttggatgctgcatagtttgtctgccccacgttccccacctttcctacgatgctactgatgttgatgatggaaccacgacaaccattggacaccagggcttgtgctgcagcctgagtgactaggaaggtgcccttgaggttgacagctatgactttgtcccagtcatcctcagacatgtgcagcagaaactcatcctgggtgatgcccgcacaggacacaacgacagatggtgggcgagaaaagcaggcctgcacttgttccagcaggcacctggcggccctggcctcagacacgtcagcctggaaggcagcatggttccctcggggcggcccctccttgctccctggcccgcccagcagccgcaccgtctcctgtgccgctgcccggtccaggtcgcaggcagctacggtggccccctctccggccaggcgtacactgaccgctcggccgatgccgctccccgcacctgaggtaggacagaacacgccggaccgggcacggggaggagagggcagggatcagaggtcacagggcagaaagtaaaatgtgggtaaggggccagaggtcacagcggccgcgcactccaagggcacgcccctgacctcactccaataccccaaaccgcccggggaaagaaccccctcaacctgtgaccaaggccagtccc

SEQ ID NO: 129369 - DNA, 1070 bp, Homo Sapiens
  misc_feature (217)..(235): n is a, c, g, or t
  misc_feature (509)..(912): n is a, c, g, or t
  misc_feature (918)..(918): n is a, c, g, or t
  misc_feature (921)..(921): n is a, c, g, or t
  misc_feature (923)..(923): n is a, c, g, or t
  misc_feature (928)..(928): n is a, c, g, or t
  misc_feature (930)..(931): n is a, c, g, or t
  misc_feature (937)..(937): n is a, c, g, or t
  misc_feature (959)..(959): n is a, c, g, or t
  misc_feature (987)..(987): n is a, c, g, or t
  misc_feature (1042)..(1042): n is a, c, g, or t
acaggaaaatacttttgaagtatgcatgtaactgcccattcttttaaggaaaatctactgcaagcaaagttatcaacctccagaaaaatcacacgtagcattactaagcatatccccaaaaaagtgtacaatatgcctctcctttgtatattatttctaggaagaattttaaaaatgaatcctacacacctaagggacatgttttgataaagtagtnnnnnnnnnnnnnnnnnnnctttactaagatgacattgctaagatgctctatcttgctctgtaatctcgtttcaaaaacacagtgtttttgtaaagtgtggtcccaacaggaggacaattcatgaacttcgcatcaaaagacaattctttatacaacagtgctaaaaatgggacttcttttcacattcttataaatatgaagctcacctgttgcttacaatttttttaattttgtattttccaagtgtgcatattgtacacttttttggggatatcctcgtgccgaattcttnnnnnnnnnnnnnnnnnnnnnnnnnnnnnnnnnnnnnnnnnnnnnnnnnnnnnnnnnnnnnnnnnnnnnnnnnnnnnnnnnnnnnnnnnnnnnnnnnnnnnnnnnnnnnnnnnnnnnnnnnnnnnnnnnnnnnnnnnnnnnnnnnnnnnnnnnnnnnnnnnnnnnnnnnnnnnnnnnnnnnnnnnnnnnnnnnnnnnnnnnnnnnnnnnnnnnnnnnnnnnnnnnnnnnnnnnnnnnnnnnnnnnnnnnnnnnnnnnnnnnnnnnnnnnnnnnnnnnnnnnnnnnnnnnnnnnnnnnnnnnnnnnnnnnnnnnnnnnnnnnnnnnnnnnnnnnnnnnnnnnnnnnnnnnnnnnnnnnnnnnnnnnnnnnnnnnnnnnnnnnnnnnnnnnnnnnnnnnnnnnnnngggcancananggcangnnacgtanaagggcgcgtgctggcgttttncataggctcgccccctgacgagatacanaatcgagctcagtcagagtggggaacggacagactatagatacagcgttccctgnagctctcgtggctctcggtcgactgcgg

SEQ ID NO: 129370 - DNA, 1738 bp, Homo Sapiens
  misc_feature (459)..(470): n is a, c, g, or t
ttttttttgcaaaataaaggaaacttgagttgctttatttagcttccaatttctgggaggctcaagaattataagtattctggacaacaaaagaaaataagactgtgcttacagatcttgttctgccatattcttgctttaggattgctattttattgttgccctttctgttacatgggatgtacacatcaggtgttaaaaggtacaatacattctacaactgagcaccactttctgtaactgaacaggcaaagaaattacactgaacatcagcatctggcagtatttttttggaaaaaaaaagtgactaaaatgggtttaaattgattaacactattaaatcacatctaatatttgatactacatgattcaatacagctatacgatacaattatacaaaatgtgttaacatcaaagaatacaaccaaaattaagatagcaaacaaaacctatataacnnnnnnnnnnnnacaggaaaatacttttgaagtatgcatgtaactgcccattcttttaaagaaaatctactgcaagcaaagttatcaacctccagaaaaatcacacgtagcattactaagcatatccccaaaaaagtgtacaatatgcacacttggaaaatacaaaattaaaaaaattgtaagcaacaggtgagcttcatatttataagaatgtgaaaagaagtcccatttttagcactgttgtataaagaattgtcttttgatgcgaagttcatgaattgtcctcctgttgggaccacactttacaaaaacactgtgtttttgaaacgagattacagagcaagatagagcatcttagcaatgtcatcttagtaaagtgtttgatagtaacctgttactactttatcaaaacatgtcccttaggtgtgtaggattcatttttaaaattcttcctagaaataatatacaaaggagaggcatatttattcccaatcacacttctggaagatgcttcccgtggtcgagaagggtcttctctcttcttttcactggttgtttttggccttagcatgtgttaagatgtgagatttcaggttagttgactgagcaaacttcttattacaaccatcgaaggggcacacatagggcctgtctccggtatggattcgcacatgtgtgcgcaaattgaagtccagtgaaaagcgtttcccacagccttcgaacgtgcactgaaagggcttctctccagtatgaaccagttggtgtcgttttagttttgaactctcaacaaaagctttgccacattctgcacagacgtggactctgggaccgtgggtgtgcagatgttttctcatggccgagttatccctgaacatctttgtgcagcctttatgagggcaagctattgttcttggagcatcatcttctttaatttttcttggcttcattctagcaaattctgccagttgtttgggatctgagaggtcaatgccaggtattcctccaggaggaagtttctttcctgtcatatattctgaataatcaggaggtgagttctctccaatgatctgttcttcaaccactgtctcatggtcaatatcttttttttcatctgaggaccacatggtgaccgagaactcgccctccagggtcttgatctgcacctgcttctgctcccacttcttgttgcccgggtcggcgccccgccgcccgccgcggcgccccgccgctgaggtaactcttcttgccgctcttcttccccgcccttcttgacgcggtcc

SEQ ID NO: 129371 - DNA, 1043 bp, Homo Sapiens
  misc_feature (185)..(193): n is a, c, g, or t
  misc_feature (467)..(484): n is a, c, g, or t
  misc_feature (493)..(503): n is a, c, g, or t
tttttttacacgttacctcatttattctcacaacatgcctgtgaggtagggaggggcagggactgtccccgttttacagaggaggaagttgaggcacacagaggtcaagtgacttgcccaaggtcacagacggcggccaagctggaaatgggccccggagcagacccttggttcacctggggacnnnnnnnnnttcccccctgcagcaagcgccagccaagaggatgtctcggatgccagagaggcgcatacacagcatagagcagcccctcaggtactgagctggcttcggggctgagcccctgccctcccctaccccgccctgcaggcccgggccattgcagctcagggctcgtgacaccctgggagtgggatgcgggggcaggagagagagaaggataattggggttaagaaagaaatagaacagaaaactcagaggctgggcagatgggcccttaggagtgcnnnnnnnnnnnnnnnnnntggagaccnnnnnnnnnnngggctgcttacacacaaggtatatatttttacacacacttgtacacacacctagatatagtacatgtaaaaatatatgctattcacacacccgcctcctgccaggtgccccgagagccagcggcggcggcgctgggtgggcatgggtgagcagatgggcgtttgttaactatacactctaaggtctatgtgcatatgtacacatacatacagacaccgccgcccgcccctcgggcaccggacacaggcgcggctgaggactgacggccccctggaagccactcgggagtcctagattttgctgaaggaagaaggggctggagaaaataaaagggcaggagtctggagtgtgataactgtggcttcgtctcatttccacccgccaagactaaaacttctctcatctgctcagcggtgagtgagtcctgcctgacactgcccagggctggcggggcacctcccagtgaggcgcctccatctgcgtgtgtggttgtgtgtgagcacttggcggggggagggaggggacgcatgtccatctctc

SEQ ID NO: 129372 - DNA, 1061 bp, Homo Sapiens
tttcaaataggtagaaactttatttcctaaatccctccctggacctctttcagaaggcagttcaaatgcactgtaggtagaaggcagaggaagcccttatttagcaatgcagaacttggcagaggccccacatctgtcattcttcacagcagtcccttcccacatgctagagggaaggggaagcatgatagggaggtccacttttgtggactcaaaccttgatggggatgttgagcagtcacaacgcttctcagaaaaggcacaagcaccccagacattcaggcccggagaacaggctggctcagcaggtcttcacgatcgggtgtctcgagcccttcttcgggaacgagggccacagctggagctgggcatggaacccaggccagggggtgctcctgggggttggtaaccacactcattggggtccagggggtcccggctgagcagcacccacactgcaggcacatggcggcgcactgtgagggggtctagccctgtgtcaggtgaggctgggacccagctgtcctcagtctgaaggaaacgtagcttggtgagctggtgcaggcctgggacccgccgcttgacaatctcagcgcagctgacagcctttcctgcagccctgccagaacctgagaacactacatgccgagcactgccgccctccaaccgacccagagccaaccccagcaggttgcgaattttgctgccatctcggacccgcatctcaagggtatcaggaggtagctggggcattggggaaggcgctgggagctctacagagccagctttccggtagtgctccatcctgcttgctgtcttgtctgtgactctcgctgcccacgaagccgccctcggtgcgaattcttgggctcagggccaattcccctatatgagcgtataaattcgaatccgtcaaaacgtttctgtgtgaaatgtatccgctcacattccacacatacgacctgagcacaatgtaacccggggtgctatgatggacacacaataatgggtgcgcacggcccttcaacggaacctgcggcactgattataacggcacgggg

SEQ ID NO: 129373 - DNA, 481 bp, Homo Sapiens
ttttgtatttctatctgaaatgaaataattgcttttcttccctggtaaaggctggatggattggtaggagatttcatttatcacataaataatcttaatcttaataatttatcagtgtgtttagattttgaatattgtgtttcctaaaaattatttttaagcttttaattcttttgtgtgaactattagatagttgcaatagttactgctttctgtaatagttaaatggaagatcagttctaatcatgaagataaaatgacagggaactgggagcttgtgacaggcaggattcctaggattgttaactctcactgtactgtaccttgtttatagcatatttatttcctaaattctccttttctttttgcctaccataactctaacccaaggttcatttcactgcttggcctttatgccagcaaggagggaacctaggtagggtggaaagggcagctattcttgacactttcagaactagtt

SEQ ID NO: 129374 - DNA, 1487 bp, Homo Sapiens
ggccttctcattaaacttctgggctttatttattgtttttaatacgatcattacatattacacaaaaataaaagtcaaatgaacttggtatttataaattattaaataaaaatacaggaatatagatttatatttatagagctttcttttcttctaaactaaccaaatctgttctgccgttttatgattttaaaaaagtaaaatagtgtttgtgtgccctagaataagtggggagtgggattaataatcgcaggaccgagttgccctacttccgctccttccttggcctaaacaaagtccctatttgtccctttgggctctggagagcaagaaacccctctcctcctacttaatctttgaaaaatggcaattacatttatttcccttattttttaaaaaatgaaatggatttaaaaattgggaaccatactcagccttcttggccaagagctaatcccaaggaactatatggctctagaagagagtccctagttttccctgacagaagagtctctggggtttcccttcaagctaagaagggcaggacaggtcaaaattgcccactgtggtcccatctaagctatgcttctgggaatccagaccaagccctttaccctttcagaaaacagcctctctttccacccaggtgtcaaggcttcagagcagggcattttggtaacctggccatggtccctgcagctcctcttggctaaaggtcccggggaatgctaacagggatatgtgtcctgtggtagagggtagggtgaagagtgtgctccatacctggggaaggaagcacagactccaatttggagccgatggtctagtcagtggttttccaactttttttcagcagcaaccccttaatgcaaataaaatcttaccctgaaccccgatatgtaagacagctacaaggggagctgttctgtttgagggcaaattgcccagcctgctcagctccccacccccttcatctccccaaggactcctgaggcaacccctaggaaacttcagggctctgccaagcagtttgaaaaccactggcctagtttgtcctgagcaagtcagagaccccccaccccaactgcttgccacaagctggctctgagtttctggtgtcagcatactcactacaagaccaagtggcacatgcagcctaccacctcccctagaaataccatgaaaaagtgcagccctctctcaaaagcagaagtctggactcaacacctgaggccaatttggtcccacgttctggcgagcacaactacgttgccacattctaggaccaagtgaaaatctccaagaagagtcaaccatggtctagctaagctgatcagtgctcaggaccacaggcagggttctagagcactgtgtcagaaagttagcattggagagcagcaatcttagcaccttggaaagtgcagcagtgaggtctggctcagggcatgcatctggagtgaataatttcttcctcaaaagaaaaagcc

SEQ ID NO: 129375 - DNA, 709 bp, Homo Sapiens
ttttaataaccaacttttttttattagagcagatacagttgtgaaaactgtacattatacattttggtttcaagaattataaataaaggaactcacaggtagggagttctttttcacagcaagaaactttaaataaacaaagtcatgttttattaagtacattggcagacttcatgtgctgtccaaaatgttgagtacagtataacaacccattagaaagagccttcatgtaaaatacagctgtgcacattttagaaaaataccaacaatttgagctttgttttaaaaaagcttataaatcatacatatatttataaatgggaccaacatgctcactttataaacatatcctctcgctatctgttacccattatttccaaagcattacgcattttaaatgaacacttaataagattaaatattttattattatttttttaaaaaaccagctttcccagcgtaaggagctatagggtttgggaggggcagtgagagtactgagagtgacgcaggaactttaaacatttgttctcaggtaaaaacggacttcctaaatttaaaagtcaaagcaaaatgtaaaaaatgaatatacaagttgaaatttttcatttgctctctttctgccttcttctttattccatattggtcacacccaggattttcaacatattgtgcttctgtaagaaacatcactgggttactaccctgc

SEQ ID NO: 129376 - DNA, 961 bp, Homo Sapiens
  misc_feature (863)..(863): n is a, c, g, or t
  misc_feature (876)..(876): n is a, c, g, or t
  misc_feature (891)..(891): n is a, c, g, or t
ttttttctttgtgaatcattattttattaatgatgatgtttaaaatttaggagcaaaacaggcatttccaacaattcaattacagatgccattttattcagctttttctgtcaaactgaattgttcattccaaatccttgcttttagagaagagctgagtgtgtaggaaaaaaagagggaccacttgaagtctgttgcaagagaaatagagatcaaagttcacaacatacaaagaatttatttatgcaatacaggccttttctcaaatatttttcacagaattccacacagtaatctactagaaaagtagaattatacaccaccaaataacattgtttcgtttcttagtacaaattgctaatcaaaaggaaggtggagatgatagtttaataacaaatagtaaaacaggtgttgctgaatacagcacccggtagcctctatttgcaaacccggggagggaagggggtgccccaacagtggctccgcctcattgtccaggcacaggcaaaccgcagtagtgagctttggtacttgcatttactttaaaagaaaaacaaatgttgtgagctcaagagcatttccatcatttcgttttgttgtgctatgaagatgacagatcaggaaaaaatggtaactatttcacacttgctataaattagattccttgtgctaaccacacaataaaatagcctcccccaaaccatacttttctaggtctaaaacatgcttgaagaacaatattgatagacagacttaattgagatgttttaaattacatttaccataatttaaacattactatttaaatcccagaaatattagtgctgaagaagcacagttgtttggaaaaatacaggacccanattacagcatcanattttcctattccantattgtaacccacttccccactgtgaaaatcctatttctcaagcttgtagatgcatgggaaatgttcttt

SEQ ID NO: 129377 - DNA, 425 bp, Homo Sapiens
tcacaacatacaaagaatttatttatgcaatacaggccttttctcaaatatttttcacaacatacaaagaatttatttatgcaatacaggccttttctcaaatatttttcacagaattccacacagtaatctactagaaaagtagaattatacaccaccaaataacattgtttcgtttcttagtacaaattgctaatcaaaaggaaggtggagatgatagtttaataacaaatagtaaaacaggtgttgctgaatacagcacccggtagcctctatttgcaaacccggggagggaagggggtgccccaacaacagtggctccgcctcattgtccaggcacaggcaaaccgcagtagtgagctttggtacttgcatttactttaaaagaaaaacaaatgttgtgagctcaagagcatttccatcat

SEQ ID NO: 129378 - DNA, 2878 bp, Homo Sapiens
  misc_feature (55)..(55): n is a, c, g, or t
  misc_feature (58)..(58): n is a, c, g, or t
  misc_feature (120)..(120): n is a, c, g, or t
  misc_feature (131)..(131): n is a, c, g, or t
  misc_feature (173)..(173): n is a, c, g, or t
  misc_feature (287)..(287): n is a, c, g, or t
  misc_feature (882)..(977): n is a, c, g, or t
  misc_feature (992)..(1048): n is a, c, g, or t
gtggggcgatgatgtagacgacggcgatcgtggtctatgtgtcgattctcgaganaangtagatgtgttcttgacggcgaagaggagattattatatattgtgttgcgtgtattctcacnacggcgtacgnttcatcgtgtgcgtggtgagtcgctattgctgctgcgcatcnatttgttgtagttatatattatgatggtggtgagccctacaaagtgttgggactacaatgattgtgtattttatttgtgccgggattagtttcgttgtgtgctcttatggtgtnagaaatacttatatttatatatatcgtagaggcctcgtagctatgttagtcgcgtgcgcatagtctctatcttccgtctgctgcgatggtatattaactatgtattcttcgctagcgccgagacagtttgtgtcattgggacgttttccttacgtgtccttggtcgagtatattgtgtgtgtttttgatatatgttatcctcccgacttatgtctgtcttcatggtttctgttctgctggccgggcgtgtggtcaatttatctttatgaattatgatgactaccatattgtgttgtttgctgcttgtgtggtgatgttctccgtatatacagcccctcgacagacttcgtttatgatgtatattttacgtaacaccgactttggtttttcaccccgcgaggtgcttttatttttatttgtgtggaggatatcacaacaccctctgtttggtgcccactgtgctctctttttgtttgaagaattgaagaccccgtttgctacttttttctcttattggccctctcgcgccccacaaaaaaatgttttttataagaattttgttgtgggggtaggggcccttccacccacagtcaannnnnnnnnnnnnnnnnnnnnnnnnnnnnnnnnnnnnnnnnnnnnnnnnnnnnnnnnnnnnnnnnnnnnnnnnnnnnnnnnnnnnnnnnnnnnnnngtgtctgttctatannnnnnnnnnnnnnnnnnnnnnnnnnnnnnnnnnnnnnnnnnnnnnnnnnnnnnnnnttgtgagcaacagagatagtctttattcaaacgcagagagatccataacatggaaacactgacgcttccgaaaccgccccatttattcacttctcaagtggcccccgcttggatgcgccctcgggagagtgggctcagcacagcctagagcaccaggtctgaggtatctgcaaccacgtgggagccaggcccctggacgatgaaggacaatctcctggagcagcaataacttataaggagacataatttagagtagctggagccttggggatgactttatcctgcaggaggaggaggctgagagcagacgggacacgggggcccctaagaagcaaggttgggaaaggaggaggctgtttcccaatgcccgtgccggccaccagagggcccttcagtgcagagatggtcggcgcggcctcaccgcggtcaggagcagcgcgaaaccccctgtgccctcggccgcctgcagcatgagcctgcacaggagcccccgacaccccatggctccggggggccccaggggctgcggggctctggtcttagacgcagttatcagggacgcactcagcctcttcttcgagctcggggcaggggctcccgttgttggcgggctggacccggacgtagcgagtcctgctcttggtcccgagcctcccacagtggcctccgcacagtccccaggacgaccacagggagacctcgcagtccagcggcgtttctggaactgaggcgctgtctacaatctcattgtccctgctgggcaggactggggcgggagggatgaaggccctggggctctgtcgcagccgcaccagtgtcaccctggcgatgggaggcagggccttcagccgcgggtagtagaaggagttggccgggtggctgggagaggaggacgttatctcggtcaccgtgtcctgcgggatggtggcgaagttgggggaggagaaggtgaagccgctgtccgtcccggcgtcgtaggggtacaggtccagcgccgcctgttcccgccaacggtccccgtcgcacaggtccaggctgtccacgcccacgaaccagtcggggctgggcacgatgcgcaccacaaacgagaccagcgagtgcctgcgctgcacctccagctccgccgacgtctgcccggtgccgctggggacggcgggcgccgaaaacaccgcgtgcacgctctgcagcgcctcccccgccgcctcgatctccttcatcagcgcccaggcctcgccgcgctccgcaaagtcgcgcagcccgttactgacgtactggttcttcctccacatgctgtagtcggagctatgcgcggcccccagcagcgaagaccactgcgcaggggggcggaacagggggtactgcttggggaaggccgtctggctccacttgcccgtgaaggtgatgctgtatttggccggggctctggcggaacagatggattctcccccaagaggctggccggcggcgccgagagtggccaggaggagagcgcagagggccttgcccagggcggcggccgggctggggttttccatcacccggcaggagcagcgggagcgcggccggcagcggtcgggtcccagccagagcccggagctcctatttaagcccgaggccggcgccccgggccggccaatgaggctccagttcctcctgtcttcgatgctgcacggcctggcctccagcgagaggcagataggacgtgggagaaaggaggagaaggggctgcgggggcggcgggggctgccgctttcccaactcgccctgcccagcgaccttccccgggtcggatcaccctcttcccctggcagtgctgccgcacccctttct

SEQ ID NO: 129379 - DNA, 1397 bp, Homo Sapiens
ttttttttctcataccagctcaattttaattttaaagtgacaaatgtacaggtggaataaaattttaagcgacaccctccaaattccttttatatgacaagaaggagctgaatgtaattttacaccattaccaactaaacagtagttctttagcaataattaggaagtcacagcacaaaaacgacaccccagagttgtggtccatttataaatagattttcacctaggcttcgttggaagaagtgattttatatctatcctcaccaatggtcaaagtgggcacaggtgggctgtttctatactttgagcaaattatgcctcactagctggcaatgttttgcgggaacctggtccgtgcagctggttcaccttacctgcatggtctgatctgcactttgaccctcctaaggaagatccctggtctgagtgaaactctcaggtgccatgtaaccaaataagggtagggtagatctgacaggtggcctctgctttaacccagcagcttacaagttttttgtgacttggggaaaagaaataagcagtaatggctaaagactgaggtaaccctaagttcgaattgtagtctacctgtcatgaataaaataatgactaatatccctccaaacaagctataatttacagtagtagtccatacaaactgtaatccacagtggaactcagcgaagttcttaccaaaacatcacttgagcaggaaaccctttgtaatatggctgtgcaatgagaggaacgatcctttggaagggagctcaatctgggagaatgaggtgaaaacactggggagttctatgcctttgcagaccctcaagtcaccccggattactggtcagagaagctggctgtgccatgggccaaaccagcagcattctcccttggcttctgttgctgcactgaggctgccggggacacagaaggatttagttttctttacaagtaagcactttggtgggaaagcattgcaaaagttgtcaacagaaaatcattaaaaccctgaagaacaaggtgtgagggtcacaggcaaacagttatcagcatatgattcaaacactggtttgtcctcaccacagagcttggaaggttcagaaaacttccaagagagatgatcagacactcacgttccatccactgaagggcacagaacagtaggaactaagttggccctgttaagcaggcacatgcagccatgtccgatccacggatgtgcttttattctttaagaggatcatctagaatcctcagaaatgttatcttagcagccctgagatcatgccctcaataactctgccaagggaagaggggagaaaccacagacctagagatgagtcaggatgcccactttgtgccttggggtttgctaggggggctaagctgctaactgg

SEQ ID NO: 129380 - DNA, 728 bp, Homo Sapiens
  misc_feature (13)..(13): n is a, c, g, or t
  misc_feature (684)..(684): n is a, c, g, or t
ctcacccgctcgntgatgaagaagtgcacctgaggccggatgaggacctgaggaactgtgagagtgacactgaggaggacatcgccaggaggaaagccctccacccacggaggaggagcagcacctcctaactggcctgacctgcagtggccgccagggaggtctgggcccagcggggctcccttctgtgcagacttttggacccagctcagcaccagcacccgggcgtcctgagcactttgcaagagagatgggcccaaggaattcagaagagcttgcaggcaagccaggagaccctgggagctgtggctgtcttctgtggaggaggctccagcattcccaaagctcttaattctccataaaatgggctttcctctgtctgccatcctcagagtctggggtgggagtgtggacttaggaaaacaatataaaggacatcctcatcatcacggggtgaaggtcagactaaggcagccttcttcacaggctgagggggttcagaaccagcctggccaaaaattacaccagagagacagagtcctccccattgggaacagggtgattgaggaaagtgaaccttgggtgtgagggaccaatcctgtgacctctcagaaccatggaagccaggacgtcaggctgaccaacacctcagaccttctgaagcagcccattgctggcccgccnatgttgtaattttgctcatttttattaaacttctggtttacctg

SEQ ID NO: 129381 - DNA, 1426 bp, Homo Sapiens
  misc_feature (479)..(489): n is a, c, g, or t
tttttgatagtgctttgtctttatttctgatgcccatcttcttcagaggttaagaagaaatgacactgatgtacaaatgactcaccaagggactctcacctgactctacccttgcaggggtggaataaatcccttctattttcaagtctatttgtcccatttctgtttagacataatttgaaagccagcttggaccttgtacttttcaattatgttaacgtaaaatactcgtaacgaatgtagtatgagtttaaagtgagcttttcagatcctataagtgcatcctaagtaatgacaggctttaagataaggaatatatgcattttgttaaggcagaaatctcataaaatttcatgaaaaaccatggtcaatccaatgatgcactttttaagacaagtttgtctggaaactggaagggtcaaaagacaacaaaaaagcacacaccaaaaaacctcactttaagcaaatctataacttgnnnnnnnnnnngcctaagaatattctgagagtggtacatagttttatagtagccacagtaacttccagtgactggcaaatttctttgcatcagctggcatgtgtggtgaatggaattcccatgaacagctcttacatccttccgctttccttctacaggcctcggtcttgtttccaaaggtgactgcagtgaggatgtaaggtccatgacctctagggataatgccatccactcaggaagaaagatgctgagaaactctagggatatctaagtttacatcacagggggagaatcaattgtggaggttttaagaagacatttgaatttttgcccctaatcaagaagtgttttgccatctggtttacattcaataactagttggctcatcatttgcagaaataaactttcctctagattaggaaacttcatcatgagatctgagatatactggtttggaaagtttcctcagtttctcttggcttcgaagtccccggcctcggagtggggtaaggcccattggaggcagatgaattggccttgggtaaggaatcttgtaatgcagtccaatttcaatcctggctgtgcattcatctatacactgtttaattaggtctgtgtccgtgagatttttgtttttccggaacagcgttctggcttcatttagtatgtactgtttttctttgatggtgtcttccatctgccctgatgtcgcctgccatttcctcgcaagcctgaaaatgctgcggtagaggccaaggacttcttgtcgtgttgccgttgtcatttggcgacggcttcgtacgtctttatgtgcgtcgtgacgcaatcttccactcgttccctccttgcccctctcccattctccctcctggagctggcggccggcggggttaccggaagtgatgatgcctgaggcgatggagggggcggggcttcggggacggccgc

SEQ ID NO: 129382 - DNA, 1129 bp, Homo Sapiens
agttataaagtttgtaataatttatcacagcagccctaggaaactaatatagccaagtttcctgtttcttctctatatcacatctgctggggctacatgtccaaggtggcttctttcacccacttgtctggtgcctgggctgagatggctgaaacatttggggcttctatctccaacatggcattttatacatgagtagcttgggcttcctcacagcatggtggtctcagggcagtagtacttttacatggcaaccagcttccccagagtgagcgttcgtgagtgccggtggctaccagacattgattcatggggcctcggcagtcaatgaggaaagtctcttcagaggagcatccatgggtgctgttccccttgcagctgtaacactggcggccattctgcggcagattttcaagctccaggattgggccctcgttgcatttggtggtgttgcagcatttcaggaagtggaaggtgtcgttgttgtggaaaccattggagcccgggcagccgggaaggtagccacagccacggaggtggcggtcatcctttggacgcccttcttcaccttcctggatccagtgggtcaccacatccaggcactgttcttcagggctgcggcactgcaggctctggtgccggcccctctcacagctcatgtctgatgagccacaggaaatgcattcgaggtaacggcttcgggaataggtgacagcccggccagagttgccctggttgcacaagtctaacccacacacaacctcggtaaggctggtgatcttcaagccagtccgatagctcagggtcctgttggtcttctctgagtgggtacagcttttctccaccagctccagctcttctccttcttcccacaagcgcacgatcgtggtcctgcagaggtcctgtcccagggcgcactcttccacacggcaatccccgttggtcttacactgcatgcaccgcaggccccaagaggctgggacgcaggtgtggagcagcagcagcatgcggcagcagcggcgggtgacccatgtcgcgagggcagctcctgtgcgcggggtcctgcacgtcttctctcccccggccgtaatggccgaattcccgggcatatgtccgctaccgtcgactg

SEQ ID NO: 129383 - DNA, 1550 bp, Homo Sapiens
  misc_feature (1287)..(1310): n is a, c, g, or t
tttttccactggtacaaaatctttatgtaagtataaaataaataatatgaatattaattaataacaacaacacaacagcggcaacaatattaataataacaagagctctcccattggcccacggccttcctccagcttttctcttctgcttcacacaactttgtgagatagctgttttcatagctgggaaaactgaggcccagagaggtcggcacactggcctgaggtcacacagcaagtctgtagggctgggagccgagggaagggcaaaggggtcccccggatccagccagggcagagagggggatttcaggtttaggtccagaggagagtgcctccccacagtctggcagtcattagcagggtgatggtgaggctgagatgggcagggccaggctgaggagcagccccactgcggtactggacatccaggtctgggtggttacagccacttttagtacagcaggagacatcaatgtggttcatgctgaaggcgtcacccaggtgggcatgttggcacattgaggcggttgcacagcctcttaccatatagctttggtttttcggttcgtgagtgccggtggctaccagacattgattcatggggcctcggcagtcaatgaggaaagtctcttcagaggagcatccatgggtgctgttccccttgcagctgtaacactggcggccattctgcggcagattttcaagctccaggattgggccctcgttgcatttggtggtgttgcagcatttcagggaagtggaaggtgtcgttgttgtggaaaccattggagcccgggcagccgggaaggtagccacagccacggaggtggcggtcatcctttggacgcccttcttcaccttcctggatccagtgggtcaccacatccaggcactgttcttcagggctgcggcactgcaggctctggtgccggcccctctcacagctcatgtctgatgagccacaggaaatgcattcgaggtaacggcttcgggaataggtgacagcccggccagagttgccctggttgcacaagtctaacccacacacaacctcggtaaggctggtgatcttcaagccagtccgatagctcagggtcctgttggtcttctctgagtgggtacagcttttctccaccagctccagctcttctccttcttcccacaagcgcacgatcgtggtcctgcagaggtcctgtcccagggcgcactcttccacacggcaatccccgttggtcttacactgcatgcaccgcaggccccaagaggctgggacgcaggtgtggnnnnnnnnnnnnnnnnnnnnnnnnggcgggtgacccatgtcgcgagggcagctcctgtgcgcggggtccctgcacgtcttctctccttctggcctcaggaaggaggcagttttgtggccccagggactcctcccagacgttttgcgaaagagcgagtcagccccagatgcgtgggcgcctccccctcctcccgtacgaacctcctccgccacaaacttcccttcccggggcgcggccggctggtggtgaaggggctggctcggc

SEQ ID NO: 129384 - DNA, 814 bp, Homo Sapiens
tgtagtgagaggagcctgcgtgggatgggtgcatctgagtcacgtgccccctgcgcctgtgcaggacggtataaactgcagagacgcaatctgcaggggcctggacctctacaaagtagtaaggctccatcagacgaggagtagccatgaggaaggcagagtagacgactctcctggctgtggggatgatctggcccgcgccccggtgcaggggctcctgggcaaccaccgcatccaggatcttaaacttgacattccgaatcactgtaaaggaggtggagggagtgactggggagaggttctgggcctgtcatggggccatggcagagtagcagtctcctgcaacactgcagctgtcttgcagtcatgaaagacatggtacagaaatcaaatgggaggtgggcgttctaactgaataagcaaggcccatggcagaggtcagaagttaagcatatgttcttagtgtttgcttcaggccatgctcagacttagagctttcctagaagtttatttccttcttctgcacatatttacatttttgtggatgtagaataaattccagaattgtacatttggtccatgaagcccaatcagggtctataaaccattccaatctcatcatcctcttgatatctcttctcaaatacgtccaacgccaaacccttctcagaaatgaggagcaaatgacagtttagaaatgacttaaatttccatttccaggctacaccaccaggataaggaaggaaaagggaagaagctggcccaggacttgggatggtcctgtgtaccccaagctgcttctcctgccgaatcc

SEQ ID NO: 129385 - DNA, 3485 bp, Homo Sapiens
ttttggaagcagaggcagtgaagcctcttgggagatgacatatattcagaatgtaagcaccagacggggcaggggagacgaggatgaaaggagcagagcaagacagaggtcagaatgttctgttcacttgcaaaccatggctaaggtcaaacttgtagaaaataaaattccatgtaaatcccaaagatagggccccttggggtttcatccccttctctttctgtgagcccaagctcctctcttttccttgggaatggagcccggcagaggccacagaaggaagcaggaggccaaatgctcctctctcactggggctctgggttggaggttggtgagttgttcaagatggcaacagcagcttccagacactctctgacaacacgaaggccacgtcatatgaggtctcagcttcaagtacaggagttgcagcccactgtagggagcaggagctcccaggagtccacgcactcacatggggtaattgagcacaacatcctgtttggcaagttccagcaacataggatcatcgaagaatttgctgatgctcacatcttcactgaggcccttcctacggcgggttttgatcatgaattcccgggccaggtgaggagctggctgtggctccaaggggcggatgacaatgctcttgtccaggggatcaccaggcacaatctgccagtggtggaagacagacagagaaaaggcttgtccctgggtgtgagtccggagatcagtctcaaagccaaaagagtcgatggccgggataaaagctttgatggtgtacagaggggagcctgggatgggtgcatcctgagtcacgtgccccctgcgcctggccaggacggtataaactgcagagacgcaatctgcaggggcctggacctctacaaagtagtaaggctccatcagacgaggagtagccatgaggaaggcagagtagacgactctcctggctgtggggatgatctggcccccgccccggtgcaggggctcctgggcaaccaccgcatccaggatcttaaacttgacattccgaatcaattcatcacagagggggccctccctggttccccactggaaaccttgaacgatgctgtccttcactgaaccaagaagagccttgtccacctcagagggcagagtatcatccaccagaatgttggggccagtcgcatcagggccaaaagcccagatggaacgggcagccagcagatcccaatcgtacttggtctggaagaactctcccagcttcttcctgttccacgtaatctggaccacctcattctctatgtcctctgccaggcccttctcaagaggctcagcaatcatggtgatcttgttcttcttattaggcgtttcagcaaagcacttgagggaggatgtttccaccaccgtctcacaaaacgtgacaactgggtcagccaccttgatgtctatctctgagtacatcttccgcaaatcatgcatcacacagtccaggtagagctccccagtgcccaggatcacatgctcgccagactcctccaccttggtggtgagggatggatagctcttgttgaccttgcgcaggccatcaagcatcttgggcagctctgaggggttgactggctccacagcaatcttgataacagatgtggtattgaacttcaagggtcggaaaatctgagcctcctcattgcctcggggttcggttatggttgctgtcttcacaattggttgatcaacaccttcaatcagaacccagttgccagcaggaacacggttcacctcgatgtggtacctggccacagagatccaaaggcggcccacggtgcatatctgggagtcttcctcatcctccagggtgtagttctcccccagtaccttcacaggctgcccagcatgaatggtgccactcagcacccggccaaaggcgtgaaactggactccatcatctgtgctgtacatcttagtagtgtggcacatcagggggccatcagggtcacagtcactcatagcctcgccgaggtcggagtccacaccaccggtgtaggtgtgctcaatcttgggcttggcgcccacctttggagaagggatatgctgcacacacatgtccacaaagcctgtgaactcgccaaagaactttttgcagaccagcctgagcaaggggcggatgttcagcttcagctcctccttcgtcaggtggatgccaagctcgtctagggtccgtgggaggctggtgtccacgtcacctacaacctgggcgaggatcttataaagaggctccaagataaactccacgaaacttctctgggagctgctagttggggcctttttggtgaactttcgcgtcttagggttgaagtagatgtcaccccagagtcttttagcaaattcttggtaattaatgtcaccaaaggtgtcggcatagatcttggcaaaggagcccagcgtgaagcagatgctgtactgggagctggagaagcagacgttacccaggagtggggaaaggatcaggttctcatcagtggaatacatgcttattaatccattgacctcatccacaatgtggcgcagcttgtaataagcatcagttggaggcagcttcagctccaggatcagccggtcaatcttgttgatgcacacagtgactgccagcctctcctgcaccgcatgcttgatcagccgctctgtgttcagcatcaccccctcagcagcatcaatgaaaaggaccactccatctgagatgcgcaagccagctgtgacctcatcagagaaattcacatgtcctggagtgtccatgatattgaagagataagattttcctttggtgtctggcaagaccactgtcacaggagtgcttttgatgcctacacctctctcttgctctgtgaagaggatgtcagtatagcacagatcttggtcatagcgctttctgatttccgggtgagtctgttcaattaaacaatccacaaaacatgtcttgccatggtggagatgtccacaaagggtcacatttctgatgagctctgagttatccatcagatccgccaagaaatccatctcatacaccgtaacaggtaatgtctgctccatcagagtgaatttcttggttttcactggcttaataatgggttctgtgagaggctgagtgtcttcctcttgaactatggtctccacctcaggaccatacacctcctcggctgttgggtagtacttcttgtcctcatgcagcaccacctccatcccagggtggtcatcgtcatgatctcctacgtcatcgtcgtcgtcatcatcatccatctcatcaagatctttggtctctctacccaattcatcatcatcttcatcagaatcaagctctggtccaatataattcccaaactcatcatataagtcggtatccatgatgctctcgcctgctcagctaagagttcccaggccgctgccggagatcgtgcttccgcctcgtgccgaattggcgcgcctcgacttcatactcttcc

SEQ ID NO: 129386 - DNA, 1057 bp, Homo Sapiens
  misc_feature (176)..(186): n is a, c, g, or t
atgccctggagaaaagcctgtgcgcctaaaatgggcgaattgttacgcgccgtggtgtctttcctccccgtcgccgtgtgtaccagaccctttggggcgtgctctccctatatgggcccatcacccggattcccctgggcgcaggttacattctcctggctggggggatgtttggnnnnnnnnnnngacagggctcctgggcaacccccgcatccagggattcgtgaaccttgacattccgaatcattcatcacagagggggcctcccctggtgtcccccactcggaaacgtgaacgatgcttgtcgttcactgcaccagaagaccttgtccactcagagggcagagtatcatccaccagaatgttggggccagtcgcatcagggccaaaagcccagatggaacggcagccagcagatcccaatcgtacttggtctggaagaactctcccagcttcttcctgttccacgtaatctggaccacctcattctctatgtcctctcgccaggcccttctcaagaggctcagcaatcatggtgatcttgttcttcttattaggcgtttcagcaaagcacttgagggaggatgtttccaccaccgtctcacaaaacgtgacaactgggtcagccaccttgatgtctatctctgagtacatcttccgcaaatcatgcatcacacagtccaggtagagctccccagtgcccaggatcacatgctcgccagactcctccaccttggtggtgagggatggatagctcttgttgaccttgcgcaggccatcaagcatcttgggcagctctgaggggttgactggctccacagcaatcttgataacagatgtggtattgaacttcaagggtcggaaaatctgagcctcctcattgcctcggggttcggttatggttgctgtcttcacaattggttgatcaacaccttcaatcagaacccagttgccagcaggaacacgattcacctcgatgtggtacctgccacagagatccaaagcggccccgtgccctcgtgccgaattcaacaccaggcctcgtacctagctaatt

SEQ ID NO: 129387 - DNA, 1298 bp, Homo Sapiens
  misc_feature (934)..(934): n is a, c, g, or t
tttttcactaatggggttaggggggaccagcaaaaaaagctggtccggtccggattccttcgaatcgtcgacccacgcgtccggttttaccgtaaaataattataatctgaagcagagccagccatgcaacccgagcctatctttcttcattaatttgtatacagttcttattttaagagaacaaactttcagagggtactcacatggggctgctgaaccagctgtacaacttttattttgaagaaaaaaagttgagcctcaaaacagtctgttttaaagacagggagggacttagcctttccgagcttgaccagcatgtggaaggagagctctcatggctgcaataacttagggagttcctacctggatgacactggggtaggaagttttctgtttgttttgtctctgtttcggagggtcccgtgcacttctcttgcctggatcaacgcgactcttggtggtttttgcacaccctgcctctgtgggggagcgcccccaggtgccctgcctatgtggccttctaagggacacgttgtttcacgctggccagagaactggggaagttcttctcccacgtgcccacgaaacgaggaacggcggacaaacctcctttgttccctttctgggcgctccttttgccaacgacgtattaagaatccccggattaaagcgttcccacatttttctccctcccactgggaatctctccacgggaaccgggcgtctccctagtgaacacaacagttcggccagccctttttgaccctattacaacagtggcctggggatgcaaggggtcagagacggcgttcagctcgggaaaagcagaaggctcgtcgcttttgccgtaaaggaacacccaccgactacccgtcctttaatgaacctcgcacacaaaatggcgctccccgagctcggcgaaaccccccgacntttggggcaacaaaaaagacaagtcggcagatatgtgtatatccatatgggctccgactcgcaacatctttgtggtgcatatataagccctcacccgatctggtacgatgaactattgctccctccgctcgatatactttgtgtagcgcctcgtgccgctaccccctatggacctctgtgacatgccgacaggctctctgagaaatctcctcgcgtcataaccgaacctcgtcttcgcttgcggagagaaagacgtgtgcggcagacatgcaattgggcagtcctatcgcgctgtgggacgagacaaccatatcgacaagtgaatcgtgtgcaccgtatcccctaccctgtatctctttatcta

SEQ ID NO: 129388 - DNA, 596 bp, Homo Sapiens
gcctttgaaggttcctcaagtatcgagatctttttctcacgagggataagggctggtttttcgttagcagaatctgtggacgagctgtccttctcgcagccattcatggggccgttttgaatctgtggtggctgcggctgcaggggccctgcctcaggcctctccaccttgtctttagcatctttgttgccttgatgctgcttggacttgcttctttttcttttattgttcttcttttttcctgtcatattccattcttttagaacttgaattgcactgccatccacaaaggcttgcacggctttatccacattaaaatcaaactgttggagcaccaggactatttcattattgcttttgttgggaacaactgatctaactgcatagatcttttccttgacattcacatgagtattgagttcagccatcttgcttctagtggaataggcctttttaaggtttcctcgtgctccaaatcagggctctcagtccagtttccagcgactggctttctcaggaggcacataagctctgttcccccactggccacctttatcaacttgcttttactgtgaccagtaagtcatctcaatagt

SEQ ID NO: 129389 - DNA, 1168 bp, Homo Sapiens
  misc_feature (1049)..(1100): n is a, c, g, or t
gcgatatctagttagagaaacggtgcagcgttgcaaatccttcactgatttctcaatatttgggcctcttttctttgccaactcatctggctttatttcaagatgagctgcaggggtatttggacttaacaggagatgtttttgccttaggcttgcttgggttacaaggctgctcagctgaccactgtaggccatctgacctctctgttgttccatgtataggtttggggttcccatctaaggatagtttctgttgcagtagtctgttgctttctgtgacccccacgaagtgcctttgaaggttcctcaagtatcgagatctttttctcacgagggataagggctggtttttcgttagcagaatctgtggacgagctgtccttctcgcagccattcatggggccgttttgaatctgtggtggctgcggctgcaggggccctgcctcaggcctctccaccttgtctttagcatctttgttgccttgatgctgcttggacttgcttctttttcttttattgttcttcttttttcctgtcatattccattcttttagaacttgaattgcactgccatccacaaaggcttgcacggctttatccacattaaaatcaaactgttggagcaccaggactatttcattattgcttttgttgggaacaactgatctaactgcatagatcttttccttgacattcacatgagtattgagttcagccatcttgcttctagtggaataggccctgggaatccacagcaatgttcctgaaagcagcctggtttctgaagagctctctgtgtcgagcgccggctcctccgtcccgggccggagccggggcccgggggcgcggtcgccaggggaggcgccgcggcggtggcggcccctgcggctcggagggcgggccgagcgggagccgctgcctgggccgcgcgccgtccggagctcgccccgcgctgccggcgcttggcggagggcgcagccagctcggcccccggactggattccttcactgacacaactccggctcggccgccccacgcagggacactnnnnnnnnnnnnnnnnnnnnnnnnnnnnnnnnnnnnnnnnnnnnnnnnnnnntgtcactcaccaggagcacacaccccagccggcgcccctcgctcccgcatcccgggaattccggaccc

SEQ ID NO: 129390 - DNA, 2192 bp, Homo Sapiens
  misc_feature (1785)..(1837): n is a, c, g, or t
caagttaatttttttacttttgtaggggagctttcaaaatgcagcatattttaatttgtttcaaataaagcaatatatgtatatatattttttcagaaaaacaccagatgttaaattctacaaaagcgcatgtgtcctcagcagatcatgtttgtctgattattaagaattcttttttgtaacattaactctctaaagacaatcaatggactgacatcactgctacaacacaggttgctaactgagcctctgatcttcagccacatcttgattttcctaataatgagtaaatactgcctggctaaaatgctgcaaagtcttgatgagagaaagcatcaacagatcaagcaaagccatgaaaattatgaagcaagctagagctgattattagaattagtaaaaatgattaagagaggatgacacaaccatacgggatttgtatattctgattgacactcttttggcagcgaattgggtcagcacctcgggcagggaaccaaaactgagtgaaaactgctctttttcctcctagctcaggccaccaacgtcacagccgggactgagagaactgctgcatctgtggaaacttctattctcgtggggcagagattgcactgtgaaaccctaccgacactaaccccggaagggcctggcctccgaggtgtctgcagcgtgctgccttcgccggggcttttcagaatgggccggggcctcgggggtcttcatccccaaggaagcctcttgatttttggcaccgctttgtttttgggccggaagcgttgtgcggctgtcttctgtgttcgtggcggctgttgccctttcccagtggctcggcttcattcccactgccctgcgacttggcaggcccatttagcctgttgttatgatactgtggattaaatctccgtctttggttagaagatccattctgcttgttggccggcatggtctggtgagaggggtcggcggtgctggggagactgctcaccattttggggtttgccgctttgccttcagagggcttattgtgagtggatgattttcgggaaaagttactctgtttcccagaggttgctgcgtgcgcattcagcagaggcagcagggagctgcagggagttcttgaggaatagttgttctttggatgtgtaatttctccgcagagcatgatttgggccttcagctgttcgatgtcacaggaaaaccgggcagctttcccgagctcctcgtcatatttacgctcgctgacaaagtgcttaatttctgccctgagttcggccagctgcatctctgccatctgactggcaaggtcagtgagtctctttagttcttctgctttcttctgacgagcagtcaggatttccatggcttcttctttaactttatccatttctgccattaatggaacttctttgtcaatgatgcagttgtgtaattcagcaaaggcagctttgatcttcttcacggaactatccacttcttccttaatcatgacgcgatatctagttagagaaacggtgcagcgttgcaaatccttcactgatttctcaatatttgggcctgtgaccccacgaagtgcctttgaaggttcctcaagtatcgagatctttttctcacgagggataagggctggtttttcgttagcagaatctgtggacgagctgtccttctcgcagccattcatggggccgttttgaatctgtggtggctgcggctgcaggggccctgcctcaggcctctccaccttgtctttagcatctttgttgccttgatgctgcttggacttgnnnnnnnnnnnnnnnnnnnnnnnnnnnnnnnnnnnnnnnnnnnnnnnnnnnnngaacttgaattgcactgccatccacaaaggcttgcacggctttatccacattaaaatcaaactgttggagcaccaggactatttcattattgcttttgttgggaacaactgatctaactgcatagatcttttccttgacattcacatgagtattgagttcagccatcttgcttctagtggaataggccctgggaatccacagcaatgttcctgaaagcagcctggtttctgaagagctcaggagcacacaccccagccggcgcccctcgctcccgctcgccgacgcgtgggtcgacgatatcccgggattccggaccgtaccagcctgctttttacacctggtatattcactatt

SEQ ID NO: 129391 - DNA, 1377 bp, Homo Sapiens
  misc_feature (235)..(263): n is a, c, g, or t
  misc_feature (751)..(761): n is a, c, g, or t
  misc_feature (1252)..(1286): n is a, c, g, or t
  misc_feature (1352)..(1352): n is a, c, g, or t
  misc_feature (1356)..(1356): n is a, c, g, or t
ctgtaaacaataaatttatttcatttcttttaaagatttaatgatatacaaaacgtatgtagtatgtttaagtaatacagtttttctttgtccccacccccaatcaatattaaacactatttaaacagcttatcgtgtcttgccttgtctgtatctatgagatgcactactaaatacaaataaggtttatactgctcccttccaaataaaaattaaaattggtaccaaggaaacnnnnnnnnnnnnnnnnnnnnnnnnnnnnnttaaagcataaaacttagatgaaaagcttttcttgttattgttgaatattcaacaatatctggggctgttaaattacattttattggcataaggttgcactgcaatctgccagtatcacataatgataatccaactgaattaatttcttaagtaccacaaacagcattcatgttcaaatgttccaacacaattttaaatatatgcaagagttcatgtttacattctgatttgatataacaatcaataaaatctttggagaaagtttgtaagttctggggttgtttgctatagaataccagatagggaaaaaaggtactgttaactttcctccaaaaggtaacttcgccttgacgagtgagttaggtttctgcttttataatttaggttatgtatcagtttaccatggctttcttctacttaacagtgacttgataaaacaatgtttaaaaaaccccattaacagttgacacaatttgggttctatttnnnnnnnnnnnctggctctatctttaaatatggagcctaaccctgattcataaataccgtccctcttgaaaatggtcttcagttcaggcttctcatacctctgtgaacctagaattagaacaagtcatttcccttcccgcggccaacaagcatctagttgggaaccagtgatatcatcactgaacacactaaatacactgaggaaaattttgactgccatttaaccaaaaggctgcgtgatttctttatttccctagttgaatggcaataaaacagctgccaataaaatctgcatggacacctacctttggttaatggtattgtaccacataagagagagcatcaccctcatcaaaacaaagtcaaatgagatcctctgctatacaaagagccctttaaaaagttataaatactaattatcaattacctttaaaatttctcagctgccagccccggccgtaatggccgaattcccgggcatatgtccggtaccgtcgactgnnnnnnnnnnnnnnnnnnnnnnnnnnnnnnnnnnncggccgcttcctcgctcactatctcgctgcgctcgtcgttcggctgcagcagcgatgcgccatatngagnggtcaagtataggttttgttt

SEQ ID NO: 129392 - DNA, 482 bp, Homo Sapiens
aagaagataatagaccagcaattgcagcacttacaatcactaattcccttaaggttgaaactgtaatgacataaaaagggtcgatgatatttcactgatggtagatcgcagcccctgcaacgtagcctttgttacatgaagtccgctgggaaatagatgttctgtctctatgacaatatattttaactgactttctagatgccttaatatttgcatgataagctagttttattggtttagtattcttgttgtttacgcatggaatcactattcctggttatctcaccaacgaaggctaggaggcggcgtcagaggtgctgggtgacagagccatgagccagccattttataagcactctgatttctaaaagttaaaaaaaatatatgaaatctctgtagcctttagttatcagtacagatttattaaatttcggcccttaacccagccttttccagtgtgtaacccagtttgaaatcttaat

SEQ ID NO: 129393 - DNA, 659 bp, Homo Sapiens
  misc_feature (633)..(633): n is a, c, g, or t
  misc_feature (645)..(645): n is a, c, g, or t
ttttttagttctacccatgtttattgctaccagctggtctccctccaccctctcatatttacacccaaccccttccccaaagctagcttttaccaaagttcctggtaggaggtcaagaagtgtgtccacttagccggcagtcctagatgtagtggacgctgtttgtccccaggccagttgggcaccaggaagggctactctggggattcagggcatagacttcgtactggggtcaagggaggcccccactcacagatactctcctttccttctggggctcaatgtacaccaaaaccttcagaaagcaaagttggagtggtggacccccaatgtcaagtttagtgctctctttgcttgtgaggacccacacaagtggccaactctggactcagatccacagctggcttccgagaggcaattctgtccttggaagccaggtttgaccatctgtaatcagccttgtgagaagtctcgtttgagggggccagggatggaacgggagggcgcatatcgtatgaggtatgggcattgtgttaagctgggggaagttgcagcttgtcctgaattacatggagaggaataaagtgggtgagtaggaggagccatttcatctgaaagcctgaggcccctctnggtccctcgatnaaccccactggtgt

SEQ ID NO: 129394 - DNA, 914 bp, Homo Sapiens
  misc_feature (855)..(855): n is a, c, g, or t
agaggattctcactttcatttattttcaaggcatatacaaaagtctgacatggtgcaatgatctcatcaagagataacagaacacacaggagagggttgggtttcctccccggcccaaccccctcaggaaggcacagaaaagtgaggcttgggttcgggggccacctgctttggaactaatctgctgctcagaaggccaggccccttctgaagagggatctcttcctcacatccagaatctaggatctggggaaggtaaactgaggccaccagtaagcatgtgctccaggccaaggctgagtctgtgctgcatccatgtcatcagccacccaagaaaaaccagttactccacctagctcatggtggcggcatcctccctgcaatggtgcatggggggcagtcctttcccctgcagggttgtcattgccacccccatcctcatcctggagggcagtccaggctccgatatgagtgactaggggtgaggtaggggtgggcagaagggaagatcagactggagcattccagatgcctactactggcctcacacaacggggcaactgtggtctccaactcctccccttgggagagaaactggtcctgcagtttcaggactatacgagcgtggggtattgggaataagggggttgtttgaaaatgggtttcccctcccacccctaggggaaaaagtggacaccaacgggccaaatcacaaagggaaccttcttcccccaaaaaagggattcttttgcattcacccggccgaattttggggccgagggcaattcccaaaaggagggttaaatttggaacagtaaaagttttctgtgggattgttgccccaaatccaaaaanaggggggaaatatgtaaccggggggcgaaaagaggaccaaaattggtggcccccccctt

SEQ ID NO: 129395 - DNA, 481 bp, Homo Sapiens
aaaaaacaaacccttttagtcactttaatcagaattttaaatgttcatgttacataccaaattataatatctaatggagcaatttgtcttttgctatattctccaagattatctcttaagaccatatgccccctgttttaatgtttcttacatcttgtttttactcatttctgactggacaaagttcttccaaacaattctgagaaacaaaaacacacacgcagaattaacaattcttttccctgtgcttcttatgtaagaatcctcctgtggcctctgcttgtacagaactgggaaacaacacttggttagtctcttttaagttacaaaaagccaattgatgtttcttattctttttaaattttaaatattttgttataaatactcacaggataccttatttccctagctatcatctcctgacttaatgttttttaaacccaccaatataaatttaattaaagatatatgttgtaaggat

SEQ ID NO: 129396 - DNA, 521 bp, Homo Sapiens
  misc_feature (246)..(271): n is a, c, g, or t
  misc_feature (321)..(341): n is a, c, g, or t
tttttttcaccagaagtatttattcccaaaagaatgacatatcttgagaacaaagtaacttttgaaattcattttgtgtttaggtaccaacaattgttaatgacgctcagttcatattttcagaatatcacattgataatggtactataatatatcctggcctaccagagttccatggatttaaataaataaaatttaattctgccttttataacatgcagggttgttttatggttgttgagtttnnnnnnnnnnnnnnnnnnnnnnnnnncctctccttcttattgaaggattcagacagctataatgctaaaatgtttnnnnnnnnnnnnnnnnnnnnnatttttaaaacaatgtctatacttctgcctctattgatgccattcttttgttgaacctgtaaaggtaaggcccagattctgaaacctggttaaagtcactaatatttctctgtgaggccccttgttagctaccagccctcccctatccacactccctatcttgctgacatgtgtgtaagc

SEQ ID NO: 129397 - DNA, 807 bp, Homo Sapiens
  misc_feature (392)..(400): n is a, c, g, or t
agaaaatgaaaaaatatttttaatgacatttacaatactttcaaaagatatgagtatctaggaataaatttaatgaaagatgggttaagtctacactgaaaactatcaaatagtgcttagaggagttaagacacaaatagatgaagatattatttcccattaatttatttatttcccagggactacaggcctttcttcctttaggcagctagggtgaaggtaatttctaagcatcatcttacatatagctaattcttttactaataacagataattcatgtctttattaagaaccttcaataatttaatataaatattttattcattttgtctgagttatttgaaaaccattctattattcaaggacttttcactaattcatgctactgtcnnnnnnnnnttagtgaaggtttattttatatctgttctatcaatgagcatgcatgctttcatggcctcagaagttttcaaccacttaaagtaagaaaaagaaattatacatcagaatagtcatccaaaatatatacaggtataccttgtgactggattgtccctgagacttcaagagattccagggaaggcagggtgagaagcagttcctgttcggctgcgctgagttccaacttgcttatggagcacttggtgacagaggccttagacagctcaagagctgggcggatgctttctataaagcctctgctgtggtttaaatggagttcgatgcgctgtgaagctgagaaactgtcattagatctcaagcatatctggctacacatcatatcatcaatcgactctaacagggatctg

SEQ ID NO: 129398 - DNA, 965 bp, Homo Sapiens
  misc_feature (82)..(82): n is a, c, g, or t
acagttttccagccccggcgctgttcttcttcttggcggcgcctctctttctcctcctccaaggtgacgggcaaagtcctgngccagcttcctctcctgtcgttccttcatcttccgctggcacgatgtgcgcaggggcttgtcctgaagcatctgggagaatcttttcttggagcggtccttccacactcgccccgatttgggcttccccttcgggattacaggaagctcctctttattcaacttcttggacgctggggcctggggatgaaagaactttttcgcttcttttgccccgaagccgccctgtcaccgtctccccagctggaggtggcttgctcggctcatgctgaccccggggggagccaggtgccctgggtgtcagctccagtagtggctgagagggctccggaccgggagcttgctgaccggggtaaggctctggtgatcctgggaccggcggtagctgatgctggggggcccccggggtcagctcctccttattctgggccaactccgaggccagtactccctggtcctgagaacacttcggtgcctcctcacttggcttcggctgacatcgtggggattcaggactgtactctggctgtctttaggcgactccaggtgtaggtcttgctgacgctggggggacgctgcgcctggctctggctgcccttggggtgactccaagcctgcaccctgctgcagacggggtgatcctgggcttgtcttcggcggcctttcgggggaccccaggccagcccgctgcacactcggaggagacccgggctccctcgtttcttctgggttcgactcgaactccacaagggcccgtctcgtccgcgaaactgaggtgaggctctcgggggattcgggccttaggcctcccagccgtcggctgcgccttaacggtgtatccaggccctcgtgccgaaacgccacccaggcctcgctacctagga

SEQ ID NO: 129399 - DNA, 2166 bp, Homo Sapiens
actcttgagatcttggtcctgtgttttttctgccaccaaaggccagggtcactgaaggcctggcccacagcaggtgctgagcaaagggaacagtgaggtgcccagctagctgcagagccaccctgtgttgacacctcgcccctgctccctcccatcccttccccctttactcatagcacttcccccattggacacgtggtgcattttgcttgtttattatgttttctctccatcagaatgaaagctcctcgagggcagggactttggtctattgtctgtatttgccggtgcctaggattgtgcctgtatgcaacaggcactcaataaatatttttgctgtagactggacaggcatgagttagattctctggggcttctgcagagactggtttgggaaagtgggtgctagggaaaagctctgctccctgcaacctccccattttaatctttcagtattgaaaagtggagaggaaccggattcagtttgctggggacagaggcagtggggtgtggaggtgctcagagcagcctttgggaaggtgtgggggaagctggattcccaactgtcagcctccaggcctgggatggacctaggatgctgagaaagggcatacactgctgagggagtcacctgccagtcaccagctcactgaggaaccagaagaatgtacagttcttggtttgaaggcacttggagaaggagaggaaggagggatgggagctgaatctcttcccgcccccatctctgccaggtcccaggccccctctgggcttctgtcccacacagacctgcctggaagccttcaaaggctgaggagccccggtcggggtgggggtccctgttctggagccatgggtttggagtgccagctccagcagaggcatctgagcagcggcctgaggtgctgtgtctgacatggttgttggccatggaaggcctcgggccgtcctgagctcagatcttggctgccggctgctggggcggctgcttctgcagcagggccagggtgtcccgcttctcaatggagcgcagctgcttcttctttgcccgcttgagcttggcggggtttcggatcacttggacgacctctgccttccgctcattctccaggcggcgtttcaggttctcagcccggcgctgtttcttctcctggcggcgcctctccttctcctcctccaggtgacgggcaaagtccttggccagcttcctctcctgtcgttccttcatcttccgctgccacgatgtgcgcaggggcttgtcctgaagcatctgggagaatcttttcttggagcggtccttccacactcgccccgatttgggcttccccttcgggattacaggaagctcctctttattcaacttcttggacgctggggcctgggatgaagaaccttttcgcttctttgccccgaagccgcctgtcaccgtctccccagctggaggtggcttgctcggctcatgctgaccccggggggagccaggtgccctgggtgtcagctccagtagtggctgagagggctccggaccgggagcttgctgaccggggtaaggctctggtgatcctgggaccggcggtagctgatgctggggggcccccggggtcagctcctccttattctgggccaactccgaggccagtactccctggtcctgagaacactttggtgcctcctcacttggcttcggctgacatcgtggggattcaggactgtactctggctgtctttgaggcgactccaggtgtaggtcttgctgacgctggggggacgctgcgcctggctctggctgcccttggggtgactccaagcctgcaccctgctgcagacggggtgatcctgggcttgtcttcggcggcctttcgggggaccccaggccagcccgctgcacactcggaggagacccgggctccctcgtttcttctgggttcgactcgaactccacaagggcccgtctcgtccgcgaaactgaggtgaggctctcgggggattcgggccttaggcctcccagccgtcggctgcgccttaacggtgtatccatggctcagccggtaagtttccacacccctgcgcacgtgcagcccccgccgaaaccggcgccttcctatgacgtcaggagtcgccgcgtccgtgacgcacaggaggggggctgttgctgaggcggccatg

SEQ ID NO: 129400 - DNA, 558 bp, Homo Sapiens
  misc_feature (378)..(497): n is a, c, g, or t
  misc_feature (522)..(522): n is a, c, g, or t
ggaatcatccattctacatttattggtagttttcctaaaagaagatcttcactattttttcccattttatcatttattgtctgtagcactgtggattctcagatttttagttatttaaagtataacaatcagtgcatttgtcaagcttaaaaaattaaaaatattttaatataatctaggacttagtccacattcaaatttttacaattattgcaagaatattttatgctttttttcattcaaaccaagatccaatctagttttgacccttgcaattgattgtttcatctctttaatttcttttagtctagaagaaagaagccaataatttgcttattatgactttgactttttgttgttgttgttttttgagacaannnnnnnnnnnnnnnnnnnnnnnnnnnnnnnnnnnnnnnnnnnnnnnnnnnnnnnnnnnnnnnnnnnnnnnnnnnnnnnnnnnnnnnnnnnnnnnnnnnnnnnnnnnnnnnnnnnnnnnnatatgccaacataccgggctcattnttgtattttttgcagagacggagttttgccatgttg

SEQ ID NO: 129401 - DNA, 576 bp, Homo Sapiens
  misc_feature (228)..(445): n is a, c, g, or t
aaatttctattttacaaatttttcagggaatcatattcttaacttcactgagaaaaatgtgttactcttttggacaatttatcttatttctatcatataagatgtatttttttattgtccttaaaagaagctctagcatgaaattaaaggaaagggaaagaaatagatctggtgcacccgaacattaggagaaaatgaaaaatatacaaccaaccgttcgtgagtcannnnnnnnnnnnnnnnnnnnnnnnnnnnnnnnnnnnnnnnnnnnnnnnnnnnnnnnnnnnnnnnnnnnnnnnnnnnnnnnnnnnnnnnnnnnnnnnnnnnnnnnnnnnnnnnnnnnnnnnnnnnnnnnnnnnnnnnnnnnnnnnnnnnnnnnnnnnnnnnnnnnnnnnnnnnnnnnnnnnnnnnnnnnnnnnnnnnnnnnnnnnnnnnnnnnnnnnnncaacaacaacaaaaagtcaaagtcataataagcaaattattggcttctttcttctagaccaaaagaaattaaagagatgaaacaatcaattgcaagggtcaaaactagattggatcttggtttgaatgaaa

SEQ ID NO: 129402 - DNA, 690 bp, Homo Sapiens
gaggatccccgatatgtattttttatttccaaaacaaaagccaaatttattcagcagacattttaattatgaaatcctataaatcaggaccaccacaatttcagacactccgttgcgaagtgtacatcaatagctacatctggaggatgaacaagccattgaatcttttaaaaattggtttagctaccttaaagtttgggggtggcaccttacaaaagcgccgtcaagtttcatacagccagcggcttcttctctgggagagtcacattttaaaaccggtttcagacacaaaagaagggctggcacgggaggaggaaataaattgtgagggtgaggagccgccgaggccgaggcccatggctccatggagggccagaagagagcagaaaaacgtccagggtctctcatgcattcctatagacaccagaaagggtggaataagaaagctcagctgggaggacaagaaagagactcaagagatcgtttatgactgtttctgagaaagctcctggcatggccatgagtggccttccgggagtcgtgttaaaaggaaagcacagaaaacaggaaagaactctccctacacgtccctctctgcctgtttgtgtcctcgggagactccaagcggtggtaaagcaccaacagggctcttcttggggcaagagaaagaatagactccgggggtgagta

SEQ ID NO: 129403 - DNA, 1348 bp, Homo Sapiens
cctgaggaacagacgttccctcgcggccctggcacctctaaccccagacatgctgctgctgctgctgcccctgctctgggggagggagagggcggaaggacagacaagtaaactgctgacgatgcagagttccgtgacggtgcaggaaggcctgtgtgtccatgtgccctgctccttctcctacccctcgcatggctggatttaccctggcccagtagttcatggctactggttccgggaaggggccaatacagaccaggatgctccagtggccacaaacaacccagctcgggcagtgtgggaggagactcgggaccgattccacctccttggggacccacataccaagaattgcaccctgagcatcagagatgccagaagaagtgatgcggggagatacttctttcgtatggagaaaggaagtataaaatggaattataaacatcaccggctctctgtgaatgtgacagccttgacccacaggcccaacatcctcatcccaggcaccctggagtccggctgcccccagaatctgacctgctctgtgccctgggcctgtgagcaggggacaccccctatgatctcctggatagggacctccgtgtcccccctggacccctccaccacccgctcctcggtgctcaccctcatcccacagccccaggaccatggcaccagcctcacctgtcaggtgaccttccctggggccggcgtgaccacgaacaggaccgtccatctccatgtgtcctaccctcctcagaacttgactgtgactgtcttccaaggagacggcacagtatccacagtctctggggaatggctcatctctgtcactcccagagggccagtctctgcgcctggtctgtgcagttgatgcagttgacagcaatccccctgccaggctgagcctgagctggagaggcctgaccctgtgcccctcacagccctcaaacccgggggtgctggagctgccttgggtgcacctgagggatgcagctgaattcacctgcagagctcagaaccctctcggctctcagcaggtctacctgaacgtctccctgcagagcaaagccacatcaggagtgacctcagggggtggttcgggggaagctggagccaccagccctggtcttcctgtccttttgcgtcatcttcgttgtagtgaaggtcctgcaggaagaaaatcggcaaggccatcagcgggcgtgggagatacgggcatagaggatgcaaacgctgtcaggggttcagcctctcagatcttgaatcattttattggatttcctacattccttggactgggtttcgagtttctcctgaatctccgtgatctttgttgccatccaga

SEQ ID NO: 129404 - DNA, 1128 bp, Homo Sapiens
gttttttagggtaagtcagtttattgatgtgttgtgatccatcacccagatatattaaacacaaagtacttaagtaattcaggatttcctttccagaaacaaagcaggaataaaaaccactatgacaatataaaacctttgtacatttttaggtatttttcccttcaatatttaaataaacatgatttcttctggcatgtatttaatgttaagtgaacatgattttaattagtctttttttatcgttatttcagccattataaaagccataaatgtgtttccagaaaaagtgcttttgatattattacagtattctctcataaaataggaggtacgcttgtgagtttagtactttagttgtaggcacagcttgcacatgtgtgtcgctgatgtgaaaccactgcccttttgattccatttcaaaatcttgtggaatatcaccgtgaagaacaagattagagagatgactatttgcggttcttgccttggcataggcagtgtaatgccccgacctcatagtaccactgtgttcaacaactccatataaggaatagagtacccttgtattttcttctgcaacattcttacatttaagggtgcaaaaaggagccaaatctaagatttccggaaactttatgtgtttgttaactttgcgtaggttaaaaccagcctgctgaaatctctttaaatgaagagtaagaacaggaggagcaagagaaattagcatctgctttttggcattggtgtaaacatgcttcctttcacctaaagaaaagaagaaatttttaacagggagaaaatcattttagacccctaaagcattcagatttgctataaaatcattccaaacatctaaagcaaggatcagtaaactttttctatgaagtactagataacaaatattgtagaatttgtggagtaagaggcaaaatcaaagatattttataggtatttatgagattaaaatgtccataaattcttactgatgaaatcaaaatacagtaataactgagaatgattacaatcagagcaaaattgaattactgtggagagacacaatattttggttaatgaggttgaaagtttagtatattccatcacatcaaatcatttgcaaatgctcatcta

SEQ ID NO: 129405 - DNA, 999 bp, Homo Sapiens
  misc_feature (160)..(160): n is a, c, g, or t
  misc_feature (173)..(173): n is a, c, g, or t
  misc_feature (899)..(899): n is a, c, g, or t
aaccaaaaacccaatctcctttactggaacaggccataccttcctcatatgtatattattcgaaatattactaaaccacaattgaaagatcacccatcacccttgtttacggattacattttaatatcccgttactctttcccgactttccaaaacatanatagtatacaaanatataaaagtatcgttaaatagtttataaaaatcacaagaaaaaaatagaacgtatgaaaatatttttatctgagttctccctcattgttgagaggcagcttagtttgccttgagttcataactgttgagtgggtaggagtatgccctgcctaatactattctgtcccggagaagtttaaataaaacatagtagttgcagaagaggatgagagccatggaaagtgtgtggttccacttctccgaccgcagcaaggaatagagctgatagaagacgacactgccctcaataaggatgagcagatttaacagccttaatggtcgatgaaataagaaataaaagcgggcatgagatacatctgaaggcactgccacgttgtaaggccccatggctctatataaacatctgctgtgccgcaccagcaccccttgaggccatattgtattttctgaccaaatgtgctgtggagcattgctgtaggacccatgttccaacttctgccacttgcccaggtgagcagctgatttatgtagcaaatcacagtatttggatggcaacagttgcgtggtgagcatgacaaaagcattgatccacaccataatgaggtgctcacatgaccagcgcatgtcatagtactgggtactcttcacaaaacacagggggagaaatgcaacatagtaggcactgaagagggagttgaagagaactccttgattctgtggttganatctgctttcagacattctacttcattgcgaatgaggtctggagataggggacactgtgggtggggatgggtgtggcatttataactgttctttagcgac

SEQ ID NO: 129406 - DNA, 901 bp, Homo Sapiens
  misc_feature (75)..(75): n is a, c, g, or t
  misc_feature (766)..(793): n is a, c, g, or t
cgagatttttatcacaataatcctactgtgaagctgtcgttgagaacttaggttggcacgtagcgtctcaaggtnatgcgttctctcaaaaggaaagctatgcatcgctgcttcgttgtctgattttgcttagattttgctttggttaggttgcgttttggggtttgcctttttttgttgtcgcttaaatgcaatttggttgtaaagatttgattcctttgtgttcatctgttccgcttctcagcggtccatctcagcgtctcccttcaggaaccgctgagtgtcctctcttaacatccaagccttttaatgaaatcgtactgaaatctgtatcagctaagagtcctccaatcctggtcccattaactccaagtgcctttttgacagtgacaacagacagtccctcgctttttgttgttgttggttttcttaacccctttaatggaactgcctggattttatacagttattaaaggatgtctcttttgctttaaactgcatgctgccaagtgccatttggggtcagcatcctcgtttcaacacagtgtgctctctagttatcatgtgtaacgtgggttctgtttagcgaagatagactagaggacacgttagagatgcccttccctgctccatccctgtggcaccattatggttttttggctgtttgtatatacggttacgtattaactctggaatcctatgggctcatcttgctcaccccaatgtgggagtctggtttgagcaagcgagctgaatgtgactattnnnnnnnnnnnnnnnnnnnnnnnnnnnntcttatgtactatccaaaagtgccagaatgactcttctgtgcattcttcttaaagagctgcttggttatccaaaaatgaaaattcaaaataaactctgaagaaaagga

SEQ ID NO: 129407 - DNA, 2378 bp, Homo Sapiens
  misc_feature (579)..(619): n is a, c, g, or t
  misc_feature (630)..(630): n is a, c, g, or t
atacaggttttgattgcactgatgaaataattcaaaaactttattgacctataacctgattagaatatgccagatgggaatcaatattgtacagaaagttgtacagaattttttacatagaaaactttacatctgtaccatatacattttgtccatctgaaaaaattttctacatccactgttaatacggaatgcttgacaatcttgtcttttaaccatcagagcacaattcacagtatgaatacatttccagtaaatctaacctccgcaaaccatgccagatttgttattttaatatattcaacgttaaattctgtacatagagtaaaatctacatcaagccccaccacccaaaagaaaagaaaatgacagcaatctggattcattttgcagtgattcaagttttggtccataaaggatcattctattttaatggctcatctttaaaagtcctaagagaaatatgtgacaggtagttactgtcagtagggatattttctacctttttttccctattgttgaagtgtcggccacaacagcttctgggcatgttacagcctcaaaatcaccacctaccannnnnnnnnnnnnnnnnnnnnnnnnnnnnnnnnnnnnnnnngttccacccanatgtttagtgcatttgacacaatattatgggtatttagcaaatgaataagacaatacagaacacagtgcaggaagaactatataatgttttaagatttttatattacagacctgcatctctgtacatttttcacaggatgattaccagtatctcagatagcctgagtgtgcaaaatcttcagaataagaataccatagttgctaaatatcttttaccatgaacaataatttcttcttctctccccactccccaattataaacattttatccttcaaaatacagctctcctgagttgtacttcttgtagaagttcaatctttacatctatagttctttgggtaagtttcacttccacacctgccaaaaacgtggggcttttcctgccgtggaagacagggaaggacccgtgagcatgagctgacactgtttaaacaggctttctgctcaacatgaggccaatataacacacaaaatccaccagcactaaaagggactggagtgttgcaagtttgagtaagacttctaagcatctttaccagtaactcagacactgcaatccagagaaatcatttttcaggtaggaaacctcagctccagcgtccttttaaagagcagagggatgtaaatgccaacaaaaatattaagttcccatcattgcttgtttattccaagttcctgttcaggtggttgtgatatctgaaaaactactccgattcgcagaaaaaatcttctaagaacagcacgaagttcaggaatcaagtcaaattgcataatttcacataagagagggtagtagaatgatgcatgagctttaaacctattatcacttatctttagaactttagttagaaacaaaagcagtaagttagtccaggcttctcgatgactttctgatgttagagtgaggaagtaacttagtgcttcactgcagacattcaaaagcctctgctggacctcctcccaggcactaacgcggctctcatccatgtacatccggaagagaatgcgcagcccacaggccaggctgctggtctcctgcttcagaaggttgggcttggatttgcctttgaatcctgctttccacagggcagtcctctgttcgttgttggaattaaacgcttttgcaaatctatgtgactctaataagcagtccagtagcttaaaaagttgttgtgatgttaaaaagcggtacattccttggtcttgagtatcaacgcgaacatcaaagtccaccgcatctctctgtgctgcagctaagttttctgcatcttctttcttacttgtggctgggaagaagacaatgttgtcgatagtctggatgagttccagctgcacaacacatttaatcaacagggcagcaaacaatttttgttctggaaattttgctgtagatttaattttgctgacttcttcattaacagcagacgcagaaaccagtggtgcttgtggtctgttatccacagaccttggttgaatagaatcatgaatatctacagacttctgtgatattgtatccaatggcttttcacttacaggagatggaggtgggggggcagtttctccagaattgggtcgccaggtcaacagcgcatgtgggattgtggttttgaagatatccagtgtgcagttgcaagttttatcccagatttctagggtaaatttttcaccattcagaataacaacattctctaaacagtttgtaccagatcgcgctaactgctcattgtcttgctgcacacaccagtag

SEQ ID NO: 129408 - DNA, 1004 bp, Homo Sapiens
  misc_feature (436)..(436): n is a, c, g, or t
agcagacttttctggaatcaacaaaaccatgtttttattgctgcagccttggcgaggaatccagaagtttcgggttggctttgaggtagccattctgttgtctgcacatctaacgtgcattcccatgcctgtttaaggtggacttttaataatctaaatggccccagtagaagacatttcagtaaattggggaatgcctatacaatgtaacagcatgtagccatgtcaaagtcccgttgaggaagaatacttagtgactgacatggcttgcacctgttccctccaaacctcatgttgaaatgtggcctccagggttggaggtgggcctagcaggaatgtttaggtcatgggggcagatcccttatgaatggctttgtgtcgtcctcacagtagtgagtgacttctcactttgttagttcaggcagagttggttgtntaaagagcctgggaccacctcctctctcgccatgagatgtgtgggctcccccgggccttccactgtgcgtaaaagcttcccgaggcctcaccagaggccgagcagatgatggtgccgtgcttgtacaggctgcagaactgagagccaaagtaacccctgttttctttgtaaatgatccagtctcaggtatttcttcatagcagtacaaaacagactaacatagagacactggaaagtgtttaataaaaatgctgggtaatagttactgagcataaacgatgtgccagacacatatgttcatagatttcatcctcaaaaactacatgcgtgttttcccaagttcacagagtgagtggtaaccactaggcacctctgcctctgtaccatgtatcacctcctttttattttctaaaacaatgcataggataaccatcacagtttctatccaacattacatacacatacgtgtgtgtgtatgtctggctctctggaggcaagatgatgggtgattttaatttttttctttgtgcttcccagtttttctgcagcatagatggataaatgttat

SEQ ID NO: 129409 - DNA, 1273 bp, Homo Sapiens
ttgacagaatgagaaaattatgctttttattatagtcacataaaataaagtcagttacatcaagttgtccaaatgcattggtgaattaatgccgctaacgcttacaaatttttatacatatatctatgcatttataaatacatacatatgtaaaagatatatattttctactaaaataaagtacccaaatcttgatatatataggggcataatgggggagaaaagaatcataaggttttatcagttgtagactgtactttcagaatacaagagtctgttttagacacatttattcagctgtaatgaactttaatcacccattcttttctgaattctcctaagtgagttaatgtatccaaaatatcaaaataagtcatgtggcaaacttaatgaatcagaggctaatttttcttactgtacctggctcaaagtctagacttccccatggaggcatggttaagctcccattcttaatttgcttgtcttttggactgtggtttttcctgctaaggtgataaacaaatcagatgtctctaatttctacatcttctactagcattcaataaagtcagggtttggtgaaaagacttccaatgtttttatatcagcctgacttgatgaaaaaaaggcccagcaggatgtgaattttgtgtcctattgcctttgttatagggaaaatattgtttgagccaaggaaggagagttagggtgtaatgatcaatagaacattgagagaaccaactcaaattgaaatgaattctctgttatagtgaaaaacattagtgagaagatgcttgaagctgaagaacgaaataaaattttaaagaaaacctagatgatattagataattcagaaaatcctcacttcaaacagaaactagagttccttctatttcctgttccgatagctcagcttcttctcctgtgtttttactgtattttctgctatcttagacttttaagaaaattatttgtagtatctgacaagaaattgaatttttaaatgcctttgcaaaaacttcaacctacttaaagcaaggtgaagatgcctaaaaatagcttaacataaaccagtcatttcagaatctctggtgattacatgttcaaatgccattagagtgtatcttattcaagcaggaaaggaagaaattgttagcactgaaattgcataaaacacgctaaaacttcccaacctattagaggccagaaacaatgggaagccccccggccgtaatggccgaattcccgggcatatgtccggtaccgtcgactg

SEQ ID NO: 129410 - DNA, 3217 bp, Homo Sapiens
  misc_feature (2421)..(2430): n is a, c, g, or t
ggcaagaggtttcaggcaagagcactttatttacacctctgaaaataaaccacaattgacaacaacaaaggagactgtgcagttcaactttttattttaataaaatcagaatatgcacagcacatgcagtgctagcatctaaactaatacaataagcaattactaaagctacagtgacttgaggttcaatctttacattcagcaagtttaaatccttacatgatttttgaaaccttattaactgaaaatattgcttgctgataaaacttgctcaaatgctattgctgaatgtacaagtcactgattatgccaatacaacaaagataaccacatgtttgaggattgcaatgtgccagacattcactgaaaatcaaacacaacacaccacttaacaaaatccacacaacaaacatctgagaatctggacacttcacatcagtgttttgaagtgtttcattaatatcttaagacaagtgtatcaaaaccttggcatgatttaatttcaagtcgccaattttgtttttactaacatcagaaagttatggctacactgccaacgccgggtctgcttaatttgacttaagagtttaatatgacttaaacattaaaagctcacactaccccgaaatatataatttcacgcatacggtgacattcaacattcaagtgccagtgtttttgtactgtcttttggtcaagtttctttaaactttcaaagaatcacttttaggcttacaaaaataaatatttgtcaaaatgttcaataaatattacataaaactagcagcaaaagtatctagaaatctgtcgtgtgcaaatagttttcttcccaactatcattcccatggtcccaaataaattttagaatctagtcccatccccttcctagacagctgcgttcaacatctccaagagacaagtaagattggaagtttaaggacacgcacacaagacatatatataaaattctctgaatgtgcaataaaagaagtactttgtaaaaagttatgggcaaaatgtacaagggcctaaacctagactaattgaaatagcaccataacaaatgacctcaatactgtcaagtgcacctacttaataaaagttttagaacaaggcacaatacacttgaaaatctattgcactttaggaaatttttgccgtcttcctatgccactgtaaaaagatggagcgttttgatcaccgcattctggccacaaaattagcacagaattcaaagtggcagaggcattttagtggtggacaatgctcatctttggccagatttagcataaacagactataaatacaatggaaacctatgcaactaaaactgactaaaactgcactgtagagcagaattgacaccttgtgcagttatgtacatatttccaacctgtgtgatctcaaagatttcagtttgttactcttctggagccatttttacgaagtctatagtaagccagtttaacatctcaacgcagcttgaacagagtaatgtgaatcggcatttaaaataaagcctgctgcatttaattcttcctgttcataccctcttgaccaaaaaacatcaacactagcatgcgttattagaccaaaaatcatccagggccctaatgagggctggtcattgctgtggtcagccattctaccatttcaatttcatttatggcaggcatttaaaaagtctaagtagatgaattctcctaaaaacctatttcaagttatcagacctttaaactttccctgtaatagtatgcccacatttggctagctcataattaatgatctgcctaaacgttgaaagaggaattgctgtatttacttgcattaactttgaaaacagtgctttgaatgtatgcatgtattcatacatcacctcatcatgactggaatggcttaaagactatcaggttctaaatacctatccaggatagagtgagcaaatcagaactttaacttaatacagtttgccacattagaaactaattccattaatatgcttcaagacatttgttgttttcccccaatctgcaagtatcaaaaagccctaatgcaggctaccgcataagtttttccttatattatttatggatgaatcgatgattcctgttaagttgtatcacacctgtgtgccaaggtttgattttagcccaagttcagtaaatttattttgtcaaaacaattgatatcttgagcattactgagccaacaggacatcaaaataaaaagttgtctaaagttaaaggcacagtacattaacaaacaaatgatcctcagtcacaaaattataaatgcagtttgggatgggggtaggcgggaggggagttaatccaaactacagcaatgaagtcttcaaaccaccttctgaacagggctgctgattgttcctttcatttcttcttgtgaccttgagctcccttnnnnnnnnnntttcagtggagaatcacagctggtaatgtactgcgagttcttgaagctacacaaggtatagtctggctaagttacatgtggtttccatattagcttgtttggcagggtgaccttactgcaaagcaggctcagttaccccaccagtcaaccccctgggagttataatttcctccatatccatcactgttgtaaaagcctccatagccacctccaccaaatcctctgctgctaccgtggccacctccgccactgcggctgctgcttgcgcggctgctgctgaagctggaactgctggcaccgctactttgtcggtagtctctggcaccaaaccctccactaaatctgctactcttagaacgtccacgactgctacccttgtagtggtgttcataagccatgttttctaaccaagacggcacttcttgtttagcttcaacaagaagatccaacaaatccttagtaatatttatgttcctctctgttaaagaatgacggttagccagccaaggtttcctacacgttcccgtacgacccatacgatgtacatattctgtcaatatcacttggcaagtcaaaattgataacatgttttcacatttgaaatgtccagtcctcttgctgctaactgctgtagccactaaaattgggctttttcctgagcggaactggtgaagggcctcttctctatccctctgagaaacgcggacgcgtgggtcgacgatatcccggaaattccggaccgtaccagcctgcttttttaaccacttgttctatagttcacctaatt

SEQ ID NO: 129411 - DNA, 833 bp, Homo Sapiens
tttaaaagtcattttattgcaaaacatgaaggactgcctctcattaagaaatatgtttgcccttccaaagttggtgtaacatctattgagtgcctattttgtactgggtcctctgccaggtgggggatcttaacaatttcttaaattagataatgtgttaaaatacagtgaagatatagctttttaacaaaattctgccgtcaaccattccgtcaaacaagtatcatacttcctcagatctaagatgctgccaattatagaatgcaccatcattttttgtaatcccaagaaagaaaaaaatgctgcccgttaaactctgacatcaactgattaaaagacacaccctaatttcaaagatgttgatttctaactgtatcttagactcaatggaatattctaagctatttctactctaactgaccatcttttaaaatctaactgcaaagttcaggttggtttttaactgtgacacacctctaaacatgccttcatttttgaacagaattatgcttgcacaccatttaatggtgacccgtccccatagaatcctctgtcttggaaatatgttctcatgtccagaggtcttcaaagccacaattcccacatgtagaatcaaccaccaggttcagaatctgcctatgggtttccctgaaacccaacaaaagcagaatcactctgcactcacccatcctgcctttattctaccactgtcagggcttttgctgaatgtcaagggaaaagatcacaaaatgaaagaccccggacgcgtgggtcgacgatatcccgggaatccggaccgtaccagcctgcttttttaccacgttcatattaca

SEQ ID NO: 129412 - DNA, 1060 bp, Homo Sapiens
  misc_feature (189)..(190): n is a, c, g, or t
  misc_feature (199)..(201): n is a, c, g, or t
  misc_feature (203)..(207): n is a, c, g, or t
atttggggtggaggagattctccaaaagccaccttagttccattggacccaggggtttcttccctatgggaaaccaggcctattggacccatggttccgctttacccttgctggggccccggcgccgccaaaacgaaaatggttctagaaaagcttcctcgagggcccgagggcggccgacatgttttnnttttttgtnnncnnnnnttttttgggggacagctcggctgtttattaagtcagtagaaaaatgactgtacaggtttaaggtgcaggaatgaagatggggcagactgggccccagcatctgaggccccacccccatgccagagagctccagtccagagcctgaagtgtggtcagcacatgtgagctatctggatgtccaggaatatctaagtgtgctgcccccgtaggaggcactggaattccttgcccagcagctgggcctaaagagaagaggctgaggaagccaggccctagaaacggcccagcacggtggctaacagagccatgcggatgtacatgccgttctcagcctggcggaagtaggctgcgcggggatccgagtccacttccacgcttatctcgttgacacggggcatcgggtgcatcaccaccatcttcttcttggcccgggtcatgatgtggggagtgaggatgaactgaccaaagcaagcttcgtactcctgggtagagccaaatcgttccttctggattcgagtcatgtagagcacatcagtgtcaggcagcgcctcctcaatgctctcgaattcctcctgcttggtgccgcgggaggccacgaaggcccgcacagtgggtggcatgcgcaggctgggaggtgccacgtagcgcaggctgacacgatactgggtgagcaggcaggccagggaatgtactgtgcgtccgtgcttcaggtcacccaccatcgtgatcgtcatgccattgacagttcccagctctcacggatggtgaagatgtccagcagggcctgggtggggtgctctccgaccccatccccagcattgatacacctcgtccggcagtgcttggcggccgc

SEQ ID NO: 129413 - DNA, 1963 bp, Homo Sapiens
  misc_feature (379)..(428): n is a, c, g, or t
  misc_feature (1336)..(1336): n is a, c, g, or t
actgtgaggcatctgaaatatttattaaagccaggcagcaagaagaataaacaaggatttttctatctacaatcatcaataagaagctgaaaagaatgtatcagctgcatctatcttggatggtcttctgactagttgctactgtccaaggaaagaggccatggggtcatctggcctctgacgtttcattctatatgcctccatttcctcttcagtaggttctcgagtttcatacatgctattgtaaggccgcttcctctcatcaatctgcatggtctccttgacatgaagaaggcgggcctcctctgcgttcagtgcctttttcaatttttcatgcttcttttcttcatcatcactatctgaactgctctttcgatgnnnnnnnnnnnnnnnnnnnnnnnnnnnnnnnnnnnnnnnnnnnnnnnnnngatgcagctccatgagggtttgaggttttttcacagattcttccccagttatctcatttataatacactcctcagagttaacaatctccttcccagcttctccagtacaataggaatacttgaaaaaagagtgacagcatttgtatccccatcggccttctttccagtacgatccccagatatgtgtgtgattgtggatcttcacatcctcctcatacttagagcaggcaacagcccgctcctgtcctttgatgactgtcccatgtcttgagtactccacatagtcttcagtctgggctaaaagcaattcagctggaggggcatccaaatgttcttggccaccatacttttccaggatgctttctttctgctgttctttgaaatcttcttttttgactttgaaggacttatacaacagctctagctttgtaggatctgcctgtagatgcacttcagatcccttgtcataggcttcccatgcaaacaactgtgtctgagccattgaaatggtatctcctgtgtacctaacaaagttatctccagcataactcacttcatctggattctttcctgcattggcataaggattctctctcattgctctagtttttggatcatagtaggcagaatttggatctaaattcctcaaatattttgcaatatcttctcgaatcctgagattccggacagtaattcgtctcttggagtcaaaattctgttcagggcatgtcaatatcatctgcatatttatcttcatcctcatcttcactattatgatctttttccgtctgagaatttggttcctcttctccccactggtgttttggagaattagcctgttccactaattttcctgaggctaattcctcttggagtttctgggctttcaatgttcgttttgccaaatncaactttggcatactcttcaacaattttcatgtgttcttctggattgtagccattccaccgatccctcttcccatcatagtcaaacatcagttgaggctggacatgttcatctggagctatattagtacctgtaaatttggctccaactcgcctaggtctctcaaagcagtctttctttttgtgtgtcatggccccacaattttcacatgctcctttgcggtacttagtaattatggaattctcttttacacccctcttgtaccattctccagatgagctgaactgcttttgtttttctggttgtggtctctggtgttttaaagtaggtctttttgaaggatcaatataccatggcactgaagaaatatactgaggaatatgggggttgatgtcttttccttcttcatcaacttctgcaggagcattgcccaattttcgctgttcttctagctccttcttctttctccagtcctctctggtcatcttctttggttcttccaaactcatttctttggaccccgataggggtgcagcattaactgcatctacaactgtggctgacatggttatctggcctcctccagccccgccgcagctagccccaagtccatccgacagaatccaag

SEQ ID NO: 129414 - DNA, 980 bp, Homo Sapiens
  misc_feature (17)..(17): n is a, c, g, or t
aaccccctggagggctncctcgccaggaaggattcaggggctcaaccccagcctgagtgcctgggctgggtggatccacagcggggcgaagggtcccacacacagcatcgatgggggctcagggtgctcagccctgggcattacataaaagctgtttattgacattacgttcttcagagtaacaaacccccttggaggactctcctgccgggatgtccatgtccgcctttgctccgagctggggtctcatgtctgtggtgctggaatccagagccctgacggtaggggagtgattttgcaacacagttgcatttcacatcttctgacaggattccttgagggagggctggaccctggcacctggccagctccaggaagggtggccaggcccctcactgccccatcaagagtacttggtgttggagatcttcttccagagcagagtcttgaggtggctgagcaccagcgagtgatgggcctccacctggctggccagcccgctcagcgtggtacaggtgcgcagctgtgtgcccagctcctcgcggaggtcggcgggcgcgccaggcagcaggtagccccgtagcagtgcgcacaccttggccaggttgggctggatgaggtcgcccttgcactgcctcatgagcctgtcacacggggccctgcagtcgcgcccgtaggtgcagtcggtgctgtgctcgcagcggcggccctgcaggaagcggcgcacggtggcctcgggtgccacctgctgcaggtcggccatcttgaagtcgtaggtggctgtgtagcccacattggccagtgtggtctcacacatgtagaaagtcccgtaagagccgtggaagagctcctccacgaactccagcaggccgatggcgatcttggcccgccaaggccacgcaggccccagccactgctggagagcaccctgcagggcaggcggcagcagtgggcgcaacaggggtgggagggcggccgca

SEQ ID NO: 129415 - DNA, 697 bp, Homo Sapiens
  misc_feature (573)..(613): n is a, c, g, or t
  misc_feature (679)..(679): n is a, c, g, or t
gaaaacttcacagttactttaatctgcacgggttccggggaactcctctgcccctccccgctccccttcaccagcctcccaccgacctggcgtccccaactcagcccaaggagctgtcagggattggaggcggctgggtcctccggcagaacactaagacgggcccccggggcggcccggctctgcccggggccgaggcagcgacagcagatgcccgaccccgaggagcccactcccagtgcgggctgaggttcagcagccccgggaggtggccccgagccccggcggtcgcagggcggggcctccgccagtcccgggagtcctctgcggcgcagggctgggctccagggcagcgggaagaggcaggccggagaggcgggcctgggcaggcagcagctcccgccgcggcgcggggagcaaggtccggaggggccggcgacgctgccaagcgcccgcggaggcactacgggcggtacatggcaaaggccaggagactgaggagcagggtgaagccggccaggcccagagtggcggtcaggggaaagaagggccggtactggatctggcagtacnnnnnnnnnnnnnnnnnnnnnnnnnnnnnnnnnnnnnnnnngctgccgatttccagcccggaggggccgggctcggaccccggcgggcaggggggatttgggggacngactctcgtggacacgtg

SEQ ID NO: 129416 - DNA, 1248 bp, Homo Sapiens
ggtggaaacttcacagttactttaatctgcacgggttccggggaactcctctgcccctccccgctccccttcaccagcctcccaccgacctggcgtccccaactcagcccaaggagctgtcagggattggaggcggctgggtcctccggcagaacactaagacgggcccccggggcggcccggctctgcccggggccgaggcagcgacagcagatgcccgaccccgaggagcccactcccagtgcgggctgagggtcagcagccccgggaggtggccccgagccccggcggtcgcagggcggggcctccgccagtcccgggagtcctctgcggcgcagggctgggctccagggcagcgggaagaggcaggccggagaggcgggcctgggcaggcagcagctcccgccgcggcgcggggagcaaggtccggaggggccggcgacgctgccaagcgcccgcggaggcactacgggcggtacattgcaaaggcccggagggtgcggggctgggtgacgccggccagggccagggtggcgtttgggggaccgaagtgtcgtgtacacgtggctgtggcagtacgcagttgggagggaggtgaaggctgcccagggtctgggtgtcgtcgcctagcagctgcccttggtagatgagtcgcacctgctgttcccggccgggaaactgggtccttttcaaggagccaatggtgtcgtggggccaggccctggccacctgctctgaatcattgaggaatttcagccgtagcacgaggggctcctgcggggagtccggggctggcggtgttgctgtgaaccccgtgctgggctctggctgtgcagcttgacctctgtgtctcaggctgggggtctctgcccctggggcctcccctctcatgctgtcggtagctgccatggctgcgctgggctgggatggcgttggggtccctgacggctggggcagtgggtccccgccctcagcggtgtgcgttgagacccaggcaagggccagcaccagaaggcaggcaagcaccgagaaaaggacggtcacctcatcacccaccccttcaatcagggtcatggcgcctgccttgcccgccgcgctaccgagcgcccggctcccccagctccatcgcggcccctcgggcacttccgggcgggagcggacgcgtgggtcgacgatatcccgggaattccggaccggtaccagcctttgttggagaggggcctccgggggggccgggtacgggattat

SEQ ID NO: 129417 - DNA, 1038 bp, Homo Sapiens
gtgtgagaaagagacctttattcagcaaacaggaagcactacagacgctgggaatccccctccctatgacaggggcagctcccgccccctcagccccgtgactctggggctgctctaggtgtttcctgcatctgccccctcagtcataggcctcatcttcatcctcttcctcatcaccaaagaagaaagtctcttggtccaggttctcagactcatcgtaggagaagctgtcattgtccagctcctcatcaaactcatcctgctgccactcgggcacatcatcctcatcgtcttcctcctcctcttctgcctctggccctgaggaggcctggggctgactgccaggcatgttgggtccttttgcctcccaggcctctactgatggactctgaagaccaacccggaaatcctgggcagaatgctgcaggatggcaagcagcctctcctggatccgccggagcagctccatgcccgtgctgaggcagtcggcccgcaggaggcgcagggaggaggccaggtctctgcaccgcagcagggtttcctccaggaggatctgcagggcattggtgtgcagctccaggttctctgtctgctgctccaccacatccatgtactctgcgtcctggctgtagaagctgtacacgcaggcgtaggccagcaccttccgagcctgctccagtccctggcaggcatcattgaggaaggtgaaggatctgggcgggaggcacttcatggattgcagacacccggttccgcaagttcacagcaaactcccgcgcctggtgatggaaagtgcacctctcattatagtcctgaaaccgcttctcctggcgagctgccttgcttaccatggcagagcagttgtaatagtctttgtgatttggcttccaggacttgaggcagcgccagcagcaatccatggttacatttggcacaggtcatgtgcaggcacccctcgttcttctcgattggagcctgacagctgggacagcgcttggagatgagcttggccaggtgcttgctctgcgcctccacgct

SEQ ID NO: 129418 - DNA, 1815 bp, Homo Sapiens
  misc_feature (429)..(445): n is a, c, g, or t
  misc_feature (1174)..(1203): n is a, c, g, or t
tttttttgacatttcaataaaaatttattgaaatttcagtgatgttttaaagagagggggaaaaatacagaaaaccaaagaactcatcaacaactataacacaaaatataccttcatgaatttgtctttaaaccatctctcagcacctgacttttgaactgtgaatatatctctataggcaggcaccaattcaaaacaccgatactgacaacagtagtaaattccacttcgttttgaggaaatcagagactagcaaatacaaataacaaaagaaaaattaaaaagtcaaaccgcagcctctgccctcctccctccccacagcaatctcagttatattttaaggaatttgaagtggagctggaaagtggcactccttccccaattttggtgaaaataggaaatagcactttcccccacttttggacattnnnnnnnnnnnnnnnnntgttgcagacaactcttttgaaagggtattggtgttggtgcaggaagtgtgttttctagtgttaacagcaattctgtgacctggaaataaacccaactaaaggaaaacaagaacacaaaacctgacagttgcaattctatttacacagagctatgtacaatgtcaataaattaaagtttaattttccaagcattcatattccacctatttacaagagttatcaaataattacataaatactttgtctaatagtctcacttctttattatttttttaaaaccttgttattgcatatacaggaaagagaaagaactgtcaaagaacgacatgaatcctgctacagagcttagatataataaattcattttatgtgttttgcccactccttccctttaaatccccccctcccctgggtcactgatttgagggcaaaggattgggaaaagggtagggggctatattgttttctctctaaaagcaagcgttcaaaataaaaaccacaaatacattactgtggacatgcaagaagagacctacagcggctctgaaaacatcacaagaatattaaaaagacacagattttcttaatatagactaaacaaggatggtagggacttccctccccaaacaaagctgctcagtaatttattgagaaccgataatgcaagtccctataaagtttttaatctgcacaaacagaatcatgttaatgtgttcacttgtcccgannnnnnnnnnnnnnnnnnnnnnnnnnnnnnccacttgacacagtgaaggaaaaatatatatataaatccgcactgagggagatgtctttgaacacctccccgcctggtgggcagagacccagaccagccttgctggaagttgctctggacataaatgttggaactcctacccccagtagctcaatgcaaccgacgtttctgagcccccagaatctgatccagatcccggacatataaaccacgccaagaagacaggggctgtctctagcacattctctcgagggagtccggggccccttcccagacgcaactgcaaaaggaagggctaacgccatggcgggcccgtggtttattttatatccgacaaagtgcacggcagcctgaactggactggaatgaaaagacgtgtctgggacgggtctacggggacgcgctgcgggacctgtccggcttggcttccaagccgctaaccaaccgctggatgctctgcagttcgctggtggccgcctctttctccgcgcagagtttgggcgacaaggacatggagctggaggagagcgtggaggagcggctgttgagttcagagcccgagtccactgccaccgaggccgggctggcggccagggcggcgactttgccgtc

SEQ ID NO: 129419 - DNA, 1188 bp, Homo Sapiens
  misc_feature (207)..(259): n is a, c, g, or t
  misc_feature (1113)..(1147): n is a, c, g, or t
aaagtaaacaaatcttttatactgtaaataactgttcctcaatggaactttttgtatccagtttacttcttttctaaagctgggatattcatattaaatacacaacaatctctataaagcaaagagtctatctctgtgaaaacacaagtaattcttgatggcaatatttttcttaattcacctaaccaaatgcagtttggaaggccnnnnnnnnnnnnnnnnnnnnnnnnnnnnnnnnnnnnnnnnnnnnnnnnnnnnntaacatatttaacaatgtaggtgggaattttaaatacaagatcctgttgaaaatattgatattcaaagaaacaaacagctttggatccatagccacaatttaggttttcctagattaaaatcagaagtgattttattgttggaagatacattaattctttgaagtcagaataagaggcttgacaatttaatttctaattaagtgactgaatagacaaaggatcaaatacaaacagtagtgcaggaagaaaataaattggaagaaataattgttcaaccagtagtaataattaagaccaccattttaaaattttctatacacaaagaatgagaaaatattgttattattattatacttctttcttcttcagtattagtggacccacattatctcctgtcaattcattgtgtttattatgtgaaccatcgcaggcaggaaacgttttagaacgccaacacctacaataagctgctttagtaagacacaaatcttcaatgtttatttcattcactactttcggattttccttttgtattttaagattaatcaagctatccttctgttgtttcttcttcgggaggaatggacgaactgcaaggtagccaagaagtgcgagtacaccaaggaaaggcaataaccgaagccattctgaaactgtgagcctagcgaacccggtaatgctttcagggactgggagccgcttcagatatgcagggagctgcaccttcacgatacgggccacgctctccagcaccatcctggccagcggcgtccactcctctcccgagccccctccgctctccccggccgtaatggccgaattcccgggcatatggtccggtaccgtcgactgnnnnnnnnnnnnnnnnnnnnnnnnnnnnnnnnnnncgccgcttcctcgctagctgactcgctgcgctcgtcgttcc

SEQ ID NO: 129420 - DNA, 892 bp, Homo Sapiens
  misc_feature (44)..(109): n is a, c, g, or t
  misc_feature (224)..(298): n is a, c, g, or t
  misc_feature (489)..(523): n is a, c, g, or t
tttaaagattctcctgtacgtttatttcacaaactttttgtggnnnnnnnnnnnnnnnnnnnnnnnnnnnnnnnnnnnnnnnnnnnnnnnnnnnnnnnnnnnnnnnnnnatgcaggtgaggtcacacagatcagcatttgtgcatgggatgtgaaactcatgtgtacggagggtcaactggagggccaacttttctacatatgggttctgcaagactttctgtnnnnnnnnnnnnnnnnnnnnnnnnnnnnnnnnnnnnnnnnnnnnnnnnnnnnnnnnnnnnnnnnnnnnnnnnnnntattttaatggtttatagtgttaaaaagagaaaaatatccacataaacacaattttgaacactgaactattttaatatgaattaatgtcttatgtttattaccaattatcttcaaattgcagcagcccatgagtttggttgtaagtgttcttgccattccaccccagctgtcactgagtcagtttaaaatnnnnnnnnnnnnnnnnnnnnnnnnnnnnnnnnnnnagccttttgtaaagtaaacaaatcttttatactgtaaataactgttcctcaatggaactttttgtatccagtttacttcttttctaaagctgggatattcatattaaatacacaacaatctctataaagcaaagagtctatctctgtgaaaacacaagtaattcttgatggcaatatttttcttaattcacctaaccaaatgcatttgggaaggccaaaacgagaaaaaaacacttcagattatcaaaaccaaaagagatatgaaaaaataacatatttaacaatgtaggtgggaattttaaatacatgatcctgttgaaaatattgatattcaaagaaacaaacagctttggatccatagccacaatt

SEQ ID NO: 129421 - DNA, 537 bp, Homo Sapiens
  misc_feature (21)..(21): n is a, c, g, or t
tctatacacaaagaatgaganaatattgttattattattatacttctttcttcttcagtattagtggacccacattatctcctgtcaattcattgtgtttattatgtgaaccatcgcaggcaggaaacgttttagaacgccaacacctacaataagctgctttagtaagacacaaatcttcaatgtttatttcattcactactttcggattttccttttgtattttaagattaatcaagctatccttctgttgtttcttcttcgggaggaatggacgaactgcaaggtagccaagaagtgcgagtacaccaaggaaaggcaataaccgaagccattctgaaactgtgagcctagcgaacccggtaatgctttcagggactgggagccgcttcagatatgcagggagctgcaccttcacgatacgggccacgctctccagcaccatcctggccagcggcgtccactcctctcccgagccccctccgctctggccaagctgcagcgcctgcgccgggagcggaagcggccggcgggcac

SEQ ID NO: 129422 - DNA, 1737 bp, Homo Sapiens
  misc_feature (182)..(182): n is a, c, g, or t
  misc_feature (208)..(208): n is a, c, g, or t
  misc_feature (288)..(288): n is a, c, g, or t
  misc_feature (318)..(318): n is a, c, g, or t
  misc_feature (346)..(346): n is a, c, g, or t
  misc_feature (431)..(431): n is a, c, g, or t
  misc_feature (496)..(497): n is a, c, g, or t
  misc_feature (533)..(535): n is a, c, g, or t
  misc_feature (577)..(577): n is a, c, g, or t
  misc_feature (602)..(603): n is a, c, g, or t
  misc_feature (660)..(660): n is a, c, g, or t
  misc_feature (678)..(678): n is a, c, g, or t
  misc_feature (695)..(793): n is a, c, g, or t
  misc_feature (796)..(796): n is a, c, g, or t
  misc_feature (803)..(803): n is a, c, g, or t
  misc_feature (805)..(808): n is a, c, g, or t
  misc_feature (810)..(812): n is a, c, g, or t
  misc_feature (816)..(836): n is a, c, g, or t
  misc_feature (839)..(841): n is a, c, g, or t
  misc_feature (844)..(853): n is a, c, g, or t
  misc_feature (856)..(900): n is a, c, g, or t
  misc_feature (1434)..(1688): n is a, c, g, or t
agtcgcagtcgctccgctacccatcgaacgcagaatatttcagtatctcgacgtggggcatgttgttcagtagccaaaatcctcactatgtgacccgactactcttgtctatgttgtgagacaataattgttttatgatgtcacctcctccctctaccgacaccaaaccacatgtgtatggnggcgcgcgggtgtgtgtgttgtgagnactaccaatagggtggtgcgaccacaagactagcggtgcgcggcggagccgcatttggggatctatcagcttcatcgggntccgccggcctggtactctcttggcatgtncggaacggtgtattccgattcgggaagncgtgcaccggcgctgggcggtttgacgagaaacgtgacgctcgccatgacgtccgtctgtcgcgactgcttttgcaatcaacgangcgggggcgccggggaactggcggaataaaagcgggcgcggctccaagggcggtcctcctctcanntacgggcctccccgttaatggtgcttttatacacannntctccaaggaggggccgggttgggtagactggtttgctggtngccccccacgagcggtctcctcttnnttgctttgtgggttttccgcgtgcgcctggcggggcggcgcgcagttcccttggggngcttccgtgtggtgtgcnccctatttgagttgttnnnnnnnnnnnnnnnnnnnnnnnnnnnnnnnnnnnnnnnnnnnnnnnnnnnnnnnnnnnnnnnnnnnnnnnnnnnnnnnnnnnnnnnnnnnnnnnnnnnttngggtttntnnnntnnntttnnnnnnnnnnnnnnnnnnnnnttnnnttnnnnnnnnnnttnnnnnnnnnnnnnnnnnnnnnnnnnnnnnnnnnnnnnnnnnnnnnatcattcaacattttatatcagaaaagatcagctttccaacatttattccatggaatgagtgcacagcattttcatgaactacctcagggctacatcagtacaaaatagtttaaattagtaaaataaagtagtttcaaagggaaatcattgacgacttcaggataagtgccaccaccatttgggaacagaggatagaaggtagccatgtggttattccatgatgcaggaatcaggtcggcaggtggactgtcattgctgtcttgcggcagctggcctctgccttcagggtaccaccgtctccaggacacaaatgggcagcagaaaaatgtcaccttgttgatactcagcagctcatctattgggacaaaacttccatctcggccaagggaaatactctgttgagtgaccagcggggcccagcccccagccctatttatctcatcaatatggttcagggaagataaaaaagagtgttctatgggatagaaaggtgggaataagaaaaaactaagtggctgggcatggtgagtcannnnnnnnnnnnnnnnnnnnnnnnnnnnnnnnnnnnnnnnnnnnnnnnnnnnnnnnnnnnnnnnnnnnnnnnnnnnnnnnnnnnnnnnnnnnnnnnnnnnnnnnnnnnnnnnnnnnnnnnnnnnnnnnnnnnnnnnnnnnnnnnnnnnnnnnnnnnnnnnnnnnnnnnnnnnnnnnnnnnnnnnnnnnnnnnnnnnnnnnnnnnnnnnnnnnnnnnnnnnnnnnnnnnnnnnnnnnnnnnnnnnnnnnnnnnnnnccggccgtaatggccgaattcccgggcatatgtccggtaccgtcgactg

SEQ ID NO: 129423 - DNA, 853 bp, Homo Sapiens
  misc_feature (359)..(393): n is a, c, g, or t
tccatctcgtttcgtactaaggtgaggtgattcagatctgttgatggacccataaataatcatagtagatttgctttgttcctcagaagcagcagtttcttaggaagaggaagaaggcccttttaaactgtaaatcactcccgttccctctcagctcctgtttgcttagggtgtgtggttccccgacgtcgccatgtgggacacagcatatgagccacactctggctggaatatcagcacacgcatttgagaacactgccttactgttctgtgggcatatttaggtttttctgtttcctgactgcaaacggcattactcttttctttctgcttcaagatttgactccaaattcttgcannnnnnnnnnnnnnnnnnnnnnnnnnnnnnnnnnncaagaaaaaagtgatgaatagaagcaaatcagaccaagaaaaagatgggactgggctctgttttcaccttccctcggggtgccaggcacaaatgagaggcgagttcaatacccatgcattgctctctccctatgaaaaaatagatttccccatgaagtcagggcactctccctctgactcctgccctttcagagcatgctctgcctcctctggttgactctttgctgctgtaaaaaggcttcactcatccatagggctgtgagttggcagcagagagaggatgctgaggggtgagggctgggggtgtgcagggagatgacacatttcaggtaaatcgctgtcagagacgtggcattttcattcatagccttgtcagagtaacctttgggtgaaagggggagaattgtcttctcccacctaagaggttgccattcatgttttaatttgctgttacattttc

SEQ ID NO: 129424 - DNA, 620 bp, Homo Sapiens
caccccatggctcttccaaaggatttattggtcctatttacatctattgcaaattgtgagaaggcagcaggggccaacccctggacctcatctctgtctagaatgtgaggtcgcagggatgcttaagtcttcctctggcagagacccgaggtgcagagatgattcttctcaccccttctctcagggtcgtggagccccagcaggggttcagggcccagaggctgccccctcagctgaaggcacaaacactgtggtaggggtgggcagacaacgcatggactcactcctggcaggcgccactggccaagtgcaccttttccccctgctcctagcctccttcttccttcccgtcccggtcccacactggccagggcctggatgggtggccacttaaaccccagacccaagcccttaactcctggaccacggccagccttccttaggctggaatccaagcaccatcagtgccctggaccaggccagcttccctgtcctagagggatgggacagagagtgcccagcgggggctgaggggctagagaccggctgggcagggccagtctcccttccccttcccgagcttccctgtcctcatgtggacccagagggcggagctgggg

SEQ ID NO: 129425 - DNA, 1397 bp, Homo Sapiens
  misc_feature (1298)..(1314): n is a, c, g, or t
catgaaggtggagactttaatcatctacaaagccctcagacctgttttactttatatgtttaatcatacagatgccatctacagtattttgtagttagtaagcagcaataaagtttattctgtactactttagcatattaactattacttttaagttgaaatagaaaaattatatcactgtcttttcatcttgaagcaataacaatgaactcataactcaaatctgtttaccagcttaagagaagcatttaaaatcatataggctttttctatgctttattagaaagatttatggagggggaaaaaatggtagaattattccaaggcatgttcaggaacaacaacaacaaaaagaatttgtaactgcaattccagcgtttcataaatgtcctctatttccatttaaaaactctctaaaattaacataattaaagcagctaataaaacacaatccctgcaacttttatatataaggaaagtcctcatacagtatcagtagaccatggcttataaataaaatatactgtatttgttatcaaatatagaaacaacagttccagatttatgttttttgaaaaaattaatttattttaagttaaggatctctacgtaaatttattttggtatcaaacaactgcaattagtgatggggggataaaagcatccctaattgtggaaggatggtaatttatttacaaaaactatacaaaattagattaattataacaacaacttatcaaaggttcctgaaattaattttgcttttgaaaaagtatcaaaagtcttcagatccagaatgatagcattttattatttctgattcatggaattatagcacatcagatctttaagcaactacatcagataaaatcctagataataaaatattcttcatttcctgacagcttggaatgtaaatgaaaacttgttccatttttattaaagaaaaaacctagaataatgcatccaatggtatcaaatacctgttagaatggcgtgtctgctataattaaacatgggcaattagttctacatagttaaaaattgccttaaattaattccttcctttaataaaaaagtttttctcagtcatttcagatctctgttattcggttttaactaggaaatttgcatttacataaggaatcttcaaaatagtatatatttaaaaagtgcatataagcaaaactaaatttctcaaattaaataatttaatattgtattgtaaaatacaagtagccttaagagaaacatgcttcgtcaatcttttgcttttaggtttggtgcccaaacatttnnnnnnnnnnnnnnnnntaccacgactctttgctaatggcttttaagatttgcagacacagctaaatactcatctaacaaagtatccaggctatccaact

SEQ ID NO: 129426 - DNA, 1056 bp, Homo Sapiens
  misc_feature (21)..(21): n is a, c, g, or t
  misc_feature (44)..(64): n is a, c, g, or t
acctcaactaaagggaataangcttgcggccgcatacgcggtcnnnnnnnnnnnnnnnnnnnnnagagaataaacaaactttattttataatagtattacaggaagcaaaatatcatttaatacaacttgaggctgctataaatctaatctggcatcgtaactatacatagggtcaaaggcaaaggaaaaaatgttcaatatagttaataagtccctatcgggtctctggtgccagctttaaatggtataactttcttgtaaccaacagaacaccaccacagccccctccccctctccccagcatcctcaaacctgtgtgaatcataaaactatctgaaagagataggcctgctcaataacaaaaggtaagttttacatgtgtagacaaagaggtttaatacaaagcaagagttctacccaagtgttcaaataatggaaagaattgaaatttgggtatgttaagaaagaaagcactaaggttttaagctgcctgaatcttttagtagaagggaagaaagttttctctttctcttccctcctgttctggaatgctgccgaagggcatgtgtctgacaagcattggcactgtggtgcggcagggtctctaagcacagtgcacagtcagtgaacttcttcattattctccagtccagagattctgactctctactaaaagtagaaagtcacaggactggaaagtcaaaagggtccaatataaaaaacatccctgtgaaattctcaaatattagaaaattttcaagatgttagaaaggcttttaatctgtattaatattttctcatacagtatatttgctgcaatttgaaaactccgtaaatatttactgtgagaattcaatgaaaagaatccagaagaaggaaagccactatctaaattagtcacagagtttcctttctgcgcaacagcacctgttcaagtgaacagcaccttaccagcttgggctggctttgttcactgtcatttgatcaaagtgagtcattaaaagcaggtagttgcacacaaagtaaacagaaaacaaaaccaaaaccccttaatt

SEQ ID NO: 129427 - DNA, 433 bp, Homo Sapiens
tagaactctgcttttgtattaactctttgtctacacatgtaaaacttccttttggttattgagcaggcctatctctttcagatagttttatgattcacacaggtttgaggatgctggggagagggggagggggctgtggtggtgttctgttggttacaagaaagttataccatttaaagctggcaccagagacccgatagggacttattaactatattgaacattttttcctttgcctttgaccctatgtatagttacgatgccagattagatttatagcagcctcaagttgtatataaatgatattttgcttcctgtaatactatttaaagctggcaccagagacccgatagggacttattaactatattgaacattttttcctttgcctttgaccctatgtatagttacgatgccagattagatttatagg

SEQ ID NO: 129428 - DNA, 775 bp, Homo Sapiens
attcgggggcagatttttattgcaaatatttactcaaaaactactatatacagcagagtattttaatcgccatttaaaacattgaacattcagtgaaacaaaatttaagaatccaaagcacattttaagaagtaaaaatgaagcattttaaataaaagtttattagtatttcaaagcaaactactgttcttcatattattcatttctatatctattatattctagatgataaaaagaactgaaaaatcaatttagcagccatcttatagataaattaggctaaatttccaaaaccagttcttttacatcactgttttaggtcccatttgaagtttttattttacaattacagaaaagtcacttaaacatggctgaatacatgccaggacatgttttcagtttactgctttacaatatctacattataccatactttggtttggcttccagaccatttttatgggcctatttctaaggaagatcattaaaacaatattaaaagcataatagctacaggagtttcaacaatgggtttctactttacattaatacaactaatacatcaaagaatttctacacagcttacacactgacaaaaagcacaaatataaatttatatcttaataattccactttcactgaaagtttaattaaggtaagcttacagcctggcaggctaacacttgtatggaggtacaaagattcaaatattctgtttacatgcgcccggccgtaatggccgaattcccgggcatatgtccggtaccgtcgactg

SEQ ID NO: 129429 - DNA, 480 bp, Homo Sapiens
tttttgccatgagcttgttttattggagtgaccttggctccctccctctgcccctactccaacactgcagcaaccccatctcttacgagactggcaggtggagcaggagcctctacacagcctctggttcttaggtcccagtcatgtttgcaccccctcaaaggggcaggaccagcccttcctttcagtgtccataccaggggccttccatgtgctgatgggtgatgtgactgtggtcagcaggcttgggaagtgctgctgctgtagcttgagttgggctggggtcttggtaggacgctgatctcagaagtccccaaagttcactgtgtaggtctctactgttgtgaaggggaatgcctggccagtggctatctcctcctcttcctactccatctcctcttcctcaaactcggggttccagctgggtctcaaactcagggctctaactgggtcttcaaactcgggctccaccttgggtcc

SEQ ID NO: 129430 - DNA, 731 bp, Homo Sapiens
  misc_feature (601)..(629): n is a, c, g, or t
taaacatttgagtgcacattttggagtgcacattcttctcaggtccaaccatgagacatctttggagaaaaggaaaagaatgactgatctaatctcatttttaaattcccctggtttgtacacgcaagtttataccagatacagctgaatctagaatactgtccttctctttacttgtcaagagcagcagcattttatttaattatgctcaacagcacttgtatatcatagtagtagttttagaaatagaaaatttgcataagacccggtcacattatccataaagtctgagaggaaaacaaaaaagaaaactttatcctttaaaaccaagcttcattgttttcggttttgagccacacggcacacaatgagagatttcgttctcgcttccttcgagactttacctgtttgatgagcctttgttgtggtgcatgtgtactgttccaagcatttagtgatggtacaaactacatggttaatggcacaagaaacactcccttcttgtgatgaaacctcagtaaaatcacagtacatctcaatatgagaaaggactgcttcaaaaggatacaccgatttaaagaggctttgttacagctcagtnnnnnnnnnnnnnnnnnnnnnnnnnnnnnaataaaggctcttctggaatgtagaaaggtaatgcttaactatacaattcatgaattaaacagaacagttttgattaaaaaaaagcctacagccgcggccgc

SEQ ID NO: 129431 - DNA, 1957 bp, Homo Sapiens
  misc_feature (66)..(66): n is a, c, g, or t
  misc_feature (87)..(87): n is a, c, g, or t
  misc_feature (109)..(110): n is a, c, g, or t
  misc_feature (234)..(867): n is a, c, g, or t
  misc_feature (1736)..(1865): n is a, c, g, or t
  misc_feature (1867)..(1913): n is a, c, g, or t
gatcccatagttttttaggtaccgtagtagcaccattaaagacttttacaccgccaaatcctcgtntgtatcttgtaccagtggtgngccagtgcgatagtcggctacnncgggttgactcaagacgatagtaccgattaagcgcagcgtccggtgaacgggggttctgcacacagccagctggagcgacgacttacaccgactgagtacctacagcgtagctatgagaagcgnnnnnnnnnnnnnnnnnnnnnnnnnnnnnnnnnnnnnnnnnnnnnnnnnnnnnnnnnnnnnnnnnnnnnnnnnnnnnnnnnnnnnnnnnnnnnnnnnnnnnnnnnnnnnnnnnnnnnnnnnnnnnnnnnnnnnnnnnnnnnnnnnnnnnnnnnnnnnnnnnnnnnnnnnnnnnnnnnnnnnnnnnnnnnnnnnnnnnnnnnnnnnnnnnnnnnnnnnnnnnnnnnnnnnnnnnnnnnnnnnnnnnnnnnnnnnnnnnnnnnnnnnnnnnnnnnnnnnnnnnnnnnnnnnnnnnnnnnnnnnnnnnnnnnnnnnnnnnnnnnnnnnnnnnnnnnnnnnnnnnnnnnnnnnnnnnnnnnnnnnnnnnnnnnnnnnnnnnnnnnnnnnnnnnnnnnnnnnnnnnnnnnnnnnnnnnnnnnnnnnnnnnnnnnnnnnnnnnnnnnnnnnnnnnnnnnnnnnnnnnnnnnnnnnnnnnnnnnnnnnnnnnnnnnnnnnnnnnnnnnnnnnnnnnnnnnnnnnnnnnnnnnnnnnnnnnnnnnnnnnnnnnnnnnnnnnnnnnnnnnnnnnnnnnnnnnnnnnnnnnnnnnnnnnnnnnnnnnnnnnnnnnnnnnnnnnnnnnnnnnnnnnnnnnnnnnnaagaattcggcacgaggtggcaatacaaaatcctggcagtgggagtggaaaggttctctctctcaaatacttccatactatgtcgacccaaaggcaggacttggcagcaaggctcacaaaccacccaaacaaatatttattgagcaccttgactactacaggcctagcattttgctagggaccatgggagatgtgaaggaagttatctcacacatgatatgtcttcaaggagctaaaaatgccagtggataaaagcaaaacacatggaaaaacaaagtacaaataataatccgtgtatattgtcaaaaggaacattttatcaaaaggtaggattgtagctaaggttggcttgccttcttccctcttttattcaacaaacatttaatgaaggcccactatgtgccaagcacttggtacatgatggtgaataaaaccaacaaggtttctgccctcatttacagcctggtaggggagacagaaatgaacaagtaaaagtagcatatatataaactgcaataaatgcaatgaggggaaaagacaagatgtggtgacagacacagaagtagactgctcagggactgaagggcccgggaattgtcaagacttgaggaagaaggacaccacctgagtcaagagtggtgggggtggagagctgagaaggcccaggaaaagggcaggaaagagcacaaaattagaagctgagaggagaccactcgggctggagcttagcaagaaatcaccatttaatgaggttcaaggggaaggcaagaaccagttctcataaaccaaggtgaagagtttacattttaaatgaggggtaatagaaagcagaagggttctaagcaggggggtgatcagatttatatttnnnnnnnnnnnnnnnnnnnnnnnnnnnnnnnnnnnnnnnnnnnnnnnnnnnnnnnnnnnnnnnnnnnnnnnnnnnnnnnnnnnnnnnnnnnnnnnnnnnnnnnnnnnnnnnnnnnnnnnnnnnnnnnnnntnnnnnnnnnnnnnnnnnnnnnnnnnnnnnnnnnnnnnnnnnnnnnnntactctgttatgtgagaacagactggaggaagaaagaatggaag

SEQ ID NO: 129432 - DNA, 1278 bp, Homo Sapiens
  misc_feature (55)..(65): n is a, c, g, or t
tcacattttttttggatttatttaaagaacacacaaaaaagtgcatctaaatgannnnnnnnnnnaaaaaacaatgtctttaattcctcatatgctgacttggcaatccatatgcagcctaaaaggtggttgaaagatgtctgtggacttctacacaaattgtttaagattattgaatttgatacaagaatacgtgaagtgtcttcttgagtggtaatgggcaccctgtagttatttgctcagaaccactcacacacccttcccctccccacacacacttttgccagttccccctggtgaaccataatacacacgtgggagacagctggcatcatctgagtcttggaatagctttcttgtttgttatctgcaaaaagctaggtggcctttttagtatcaaatttcaatcttggcctcactggaaccatgctctacagagctttcccaacagtttagcaagtaagcaaaatcagcttttgctcttcatatttcgtaggtgagactggggcttttaaaagaaatatttcataaaaaagacaaaagcataaatgagaaattagagggattttagttatcattaaaggaaaaaactcacaaattgatcccatttgttccatggggaagaaaagtattataaaaggaaataacttgatttttaggtttgaagggggtcccaatctaataataaaagtcttttgataaaaccatcataaaaataaaaactaatttacaatataactgccagtgttttttaggatttaaaaaggtgagatgttccaggtttaagcaaatggttccttgggttgccaaatgcattcccatgagtgtttcttaggctgagggaatagagagccatgctcaatctgtttacccgtaaggactgaaattcaactacatgtacacatttaagacttgccctagttcaatggtcagctcaagtactggagatttaggctactggctgtgtaccggcatgggaagctgtcttcaactctttcacaactcacgccagaacagagaagcttgacagggcaggaaaagcgagcaactgcgtgtcaaacctgcaggtgaaacccctagtgtagaagagcaactatttatttgtcaaccctacagattttgtttttaaaaattaagcttagtactaaaaagtcaaaatttttttgcatgatagaggagtgtaaataaagttccataaaccagtatacatatgcttatgagccaataatcttaaaaagacaaaaaaagctgcatggatcctaaatgactcctcgtgcc

SEQ ID NO: 129433 - DNA, 707 bp, Homo Sapiens
  misc_feature (32)..(32): n is a, c, g, or t
  misc_feature (43)..(43): n is a, c, g, or t
  misc_feature (181)..(268): n is a, c, g, or t
ctacagagaggcaggcatttgagcgagctccnccgagcctgcncaggaagcggcgcatcacccctcaggagaggtgtgcctccagttccaccctaagcactgtgccgtcaacccctcctgtatctgcatctgcagggcttgtagtatgtacgttcaattccttcagcaacgttcaatgaannnnnnnnnnnnnnnnnnnnnnnnnnnnnnnnnnnnnnnnnnnnnnnnnnnnnnnnnnnnnnnnnnnnnnnnnnnnnnnnnnnnnnnnaatggacaagtatttgttgcacccttctttagagtctgacagtgcagagtaggggagatgaatcgctgcagtgagtgatgtcaaagacctcacccaagactagggagacaccatgtttgcataaataccttggtctgcctttgagaaaaacatggagtgagttaaaggaattcagatgtgggagcagtgaaaggcatccgaggtaagatcaggaaaagctccctagggcaggtggcaaatgcggtgggtctgcagagatgtggagggtgaggctgtgtgtttcaggtcagtagagtagaagggcggtttgacgtttgaagaacaggaatttagactagaaaaagcctttaatgactggttgtggcatgtgcacttaatctggtgagaaatgggtaagcattaaatgttttttctatccattaaatgttttgaaccaaag

SEQ ID NO: 129434 - DNA, 518 bp, Homo Sapiens
cctgccctagggagcttttcctgatcttacctcggatgcctttcactgctcccacatctgaattcctttaactcactccatgtttttctcaaaggcagaccaaaggtatttatgcaaccatggtgtctccctagtcttgggtgaggtctttgacatcactcgctgcagcgattcatctcccctactctgcactgtcagactctaaagaagggtgcaacaaatacttgtccatttagactgccggcaaaccctgagagcaggaattttggccttttgtatctccagtgcctagaacagtgcttggtacacagtaggcactcattcattgaacgttgctgaaggaattgaacgtacatactgcaagccctgcagatgcagatacaggaggggttgacggcacagtgcttagggtggaactggaggcaccacctctcctgaggggtgatgcgccgcttcctgggcaggctcgggggagctcgctcaaatgcctgcctctctgtagcccaaacgctggaaaa

SEQ ID NO: 129435 - DNA, 1555 bp, Homo Sapiens
gcacgaggttttgcaccaaaatacatacattcatttatttctcattgcagcaacaagataaacaagtataattccatggtcaaggagttacaaatagtagcaagcccagtaaccttgagcatatctataaggcaaataaaacaaatatttctttcatagtgtgggcatccaactttagataatctggaaaaaaatcactctagcccctgaataccatgatgtgcatgatgtgcaaaatgaaagtatcacccaaaatattttcaaagctaaaaagaaaatatttaaattcaaatactttaaccaaattggaaatgcaaacagtacacttagagtcatccttagccagctgttctccaaacaaaagatcgagaaacaaaaccaagaacaatgtaaaaaagaaaaggtttatctagaaaaactggaagctcatcaaagtcacatttcttcttctgattcttgttctcgttcagcatttttcagaagtccaacttctgaggagcagagcctcttaagtctagatttaaccaaccaggtaatgaaagcataattcattccaacgatgacaatggttactgcagtaatgccaacaaaagcatatggtgagaaacaaaatattttcatgatccatcagatcccatgcaggacctccactggggggatacaggacaaatccaatctgaaagaaccagctcccctgaagcagaatgagacttgaccgcaatagctccagaagtacatttttccgaacaaggaactctaggaaggcaacgaggcctgtcagaaagacgaccaaaaccagcagctggtgcacaaagatgtccagcatttcccggccatgagtgtggttgtagaagataaaggcctccacaaataaggcatttgacaacattaacttggttaaggacacaggaagtgaactgatggtgaaacataagatatctgccacacccaacagcccaaagaagaaatacatggtgaaatgatgccagcccaggagttgattccagtgaccttgtttatagtcatataacatcagatggggccctccaggaataaactgctccccagccatgccagttaaagccatgccaactattgtaattccctccaaaatttccaatcgatagaataatgttttggaaccaagatagcaggttcgcttttgctttttgcagatatacttcagaatactctttgtacaccaccaaagaccaataataaaaaagaaggttccagggagggcatgacctctgaaattccccatgatccaacttggtctgtttactcaacactttatttttcccactttgccagcttaaaatcagacagcggctgggcttttgttgttgctgtttctgttcttttgatcccagagccccatgaaaattaaaccgtgtgttggatgggatctggccacgtctcgcattgggtggggggaggaatttttaaacttgggtccctagtcgcttctttgggaaaacgaataaataataagtggcgagaaggagaggacgtgggggacgtgctcggctgacatcccgggaattccggaccg

SEQ ID NO: 129436 - DNA, 1145 bp, Homo Sapiens
  misc_feature (1069)..(1103): n is a, c, g, or t
tgttccggaacaaggaactcttaggaaggcaaacgaggccttgtcaggaaagtcgcccttaaccagcagctggtgcacaaagatgtccagcattttcccgggcaatgagtgttttgtagaagataaaggcctccacaaataaggcaatttgacaacattaacttggttaagggacacaaggaagtgaactgatggtgatacataagatatctgccacacccaacagccctaagaagaaatacatggtgaaatgatgccagcccaggagttgattccagtgaccttgtttatagtcatataacatcagatggggccctccaggaataaactgctccccagccatgccagttaaagccatgccaactattgtaattccctccgaaatttccaatcgatagaataatgttttggaaccaagatagcaggttcgcttttgctttttgcagatatacttcagaatactctttgtacaccaccaaagaccaataataaaaaagaaggttccagggagggcatgacctctgaaattccccatgatctttgggtgtttaaatcccattttcccttctgagtcattggtcatccttggtctcagtagatcaggcacgttagaactgtggcagaagagataagaatgaagcagccaagaattgagcctttgcttcttaggtaatgctgaaaagtttccaacttggtctgtttactcaacactttatttttcccactttgccagcttaaaatcagacagcggctgggcttttgttgttgctgtttctgttcttttgatcccagagccccatgaaaattaaaccgtgtgttggatgggatctggccacgtctcgcattgggtggggggaggaatttttaaacttgggtccctagtcgcttctttgggaaaacgaataaataataagtggcgagaaggagaggacgtgggggacgtgctcggctgacgtcggcccgcgaggaggccgcacagctgtccagatgtgcttcatctgttccccccgcggggccccccggccgtaatggccgaattcccgggcatatgtccggtaccgtcgactgnnnnnnnnnnnnnnnnnnnnnnnnnnnnnnnnnnncggccgcttcctcgctcacaaactcgcggcgctctgtcgttc

SEQ ID NO: 129437 - DNA, 870 bp, Homo Sapiens
catgttccgacaggaactctaggaagcaacgaaggccttgtcagaaagacgccaaaccagcagctggtgcacaaagatgtccagcatttcccgccatgagtgtgttgtagaagataaaggcctccacaaataaggcatttgacaacattaacttggttaaggacacaggaagtgaactgatggtgaaacataagatatctgccaacacccacagcccaaagaagaaatacatggtgaaatgatgccagcccaggagttgattccagtgaccttgtttatagtcatataacatcagatggggccctccaggaataaactgctccccagccatgccagttaaagccatgccaactattgtaattccctccaaaatttccaatcgatagaataatgttttggaaccaagatagcaggttcgcttttgctttttgcagatatacttcagaatactctttgtacaccaccaaagaccaataataaaaaagaaggttccagggagggcatgacctctgaaattccccatgatctttgggtgtttaaatcccattttcccttctgagtcattggtcatccttggtctcagtagatcaggcacgttagaaccaacttggtctgtttactcaacactttatttttcccactttgccagcttaaaatcagacagcggctgggcttttgttgttgctgtttctgttcttttgatcccagagccccatgaaaattaaaccgtgtgttggatgggatctggccacgtctcgcattgggtggggggaggaatttttaaacttgggtccctagtcgcttctttgggaaaacgaataaataataagtggcgagaaggagaggacgtggggacgtgctcggctgacg

SEQ ID NO: 129438 - DNA, 1042 bp, Homo Sapiens
  misc_feature (582)..(582): n is a, c, g, or t
  misc_feature (731)..(731): n is a, c, g, or t
  misc_feature (759)..(759): n is a, c, g, or t
  misc_feature (792)..(792): n is a, c, g, or t
  misc_feature (795)..(795): n is a, c, g, or t
  misc_feature (802)..(802): n is a, c, g, or t
  misc_feature (838)..(838): n is a, c, g, or t
  misc_feature (852)..(852): n is a, c, g, or t
  misc_feature (857)..(857): n is a, c, g, or t
  misc_feature (862)..(862): n is a, c, g, or t
  misc_feature (873)..(874): n is a, c, g, or t
  misc_feature (888)..(888): n is a, c, g, or t
  misc_feature (963)..(963): n is a, c, g, or t
  misc_feature (978)..(978): n is a, c, g, or t
  misc_feature (1022)..(1022): n is a, c, g, or t
  misc_feature (1027)..(1027): n is a, c, g, or t
gccagggcggaccgtctttattcctctcctgcctcagaggtcaggaaggaggtctggcaggacctgcagtgggccctagtcatctgtggcagcgaaggtgaagggactcagcttgtagcccgtgcctgagtagaacttgttctggaattccacccagtgcagccgcagggcgtgcaggaaggctgagagtccctccatcaccagcaggatagccacggtcatcacggcaaaggcggcaaagatggggaccagcaccacagccgccacgcccacctcccggcccaggcccaggcctatgcgcatcaccatggcccacagaacctcggacagctgggcgtgggccaggctcagggcccacaggcgcaggtaggaggcggtgttggagacgcagcccaggcagaactcgatggtgtggatggcctggtgcatgagcacctcggaggggacgagctcggcctcctcttcatcatccaggccccctgccttttcctcatcggagctccagccattcacagatgcgtcaggcaggtccagcaacccggccttgttttcctcctgtcggtcagcgggcctcctccgcangcggcggcggtggcggtgcaacaggtgcaggggtgtgccaagcagcaggatgggcaccatggccaaggccaggaccaccagcgtggcctggacacctcctgccacggagagggcgagagtcagggcgtctctgctgtgcacacctgcanaggaacctgagtcacagcagtcacgggngcccagagagcctgcggtcgctcctccctccanggnccccggnggctccgtgccctcactgggtgagggtctgcctccnataggactcctganggaanggacncccggtcccanntgcagtttgtgcancctgctaagatgcacacaatcactctgacgggcctgtctgcacggtccggggctgcatcccgtttctcggacgangatctgcagctccantggcctgtgacgcggggtcccatagcgtgtgagccggcccacancgcancactgcggggtaaga

SEQ ID NO: 129439 - DNA, 738 bp, Homo Sapiens
  misc_feature (694)..(694): n is a, c, g, or t
gccagggcggaccgtctttattcctctcctgcctcagaggtcaggaaggaggtctggcaggacctgcagtgggccctagtcatctgtggcagcgaaggtgaagggactcagcttgtagcccgtgcctgagtagaacttgttctggaattccacccagtgcagccgcagggcgtgcaggaaggctgagagtccctccatcaccagcaggatagccacggtcatcacggcaaaggcggcaaagatggggaccagcaccacagccgccacgcccacctcccggcccaggcccaggcctatgcgcatcaccatggcccacagaacccccgacagctgggcgtgggccaggctcagggcccacaggcgcaggtaggaggcggtgttggagacgcagcccaggcagaactcgatggtgtggatggcctggtgcatgagcacctcggaggggacgagctcggcctcctcttcatcatccaggccccctgccttttcctcatcggagctccagccattcacagatgcgtcaggcaggtccagcaacccggccttgttttcctcctgtcggtcagcgggcctcctccgcaggcggcggcggtggcggtgcatcatgtgcaggggtgtgccaagcagcaggatgggcaccatggccaaggccaggaccaccagcgtggcctggaccacctcctgtcgggggtanagcagctgttgctggggctgtgggagaagaggacatgttgatga

SEQ ID NO: 129440 - DNA, 1696 bp, Homo Sapiens
gccagggcggaccgtctttattcctctcctgcctcagaggtcaggaaggaggtctggcaggacctgcagtgggccctagtcatctgtggcagcgaaggtgaagggactcagcttgtagcccgtgcctgagtagaacttgttctggaattccaccgggcgtgggccaggctcagggcccacaggcgcaggtaggaggcggtgttggagacgcagcccaggcagaactcgatggtgtggatggcctggtgcatgagcacctcggaggggacgagctcggcctcctcttcatcatccaggccccctgccttttcctcatcggagctccagccattcacagatgcgtcaggcaggtccagcaacccggccttgttttcctcctgtcggtcagcgggcctcctccgcaggcggcggcggtggcggtgcatcaggtgcaggggtgtgccaagcagcaggatgggcaccatggccaaggccaggaccaccagcgtggcctggaccacctcctgccgggggtagagcagcctgttgctggggctgtgggagaagaggaacatgttgatgaagtggatgaggatgctgggggccgaggcggccctggcagcccagacacacagccactggtagatgactaggaacacgaggtaaccgaagagtcccagcaggaaggtgagctccggcagcgtctccagcagcagccggtgcctctggccaaagtgcacgtggttgaagactccgaggacccaccccaaaaggccatgtgcacgacgcccaggatgacggacatcttcatcttgaaggagttgaggaagctcaagtggttggcagccaggctccaaataggatcgatgccaaaggggtagggtcccaggaagacaccggtgacgttgggatccagggtaagcatcgtgtgctgggccaggaatgcatcactccagccagactggttggccatggcggccacactccagcccgaggggaagatgctggtggcgcgactgaagcactcgttgtagatgaagccggtgtagatggagaacaggcccataagcaggagcaggtagcggcccctgaagaaagtctgccagatctcgttctgcgcggccttcacagccggtcggttctccgcaaggaccatggccagggcgaagaggaacatgagcagcccgtggcccacatccccgaacatcacagcaaacaggaaggggaaggtgatgatggtgtagggagcggggttgacctcctggtagcggcccacgccgtaggcatccacgatgccctggaagctggccgtgaagcggttggtgcggatgagtgtggggggcatgtcccggcaggggatgcggtgagccacggcactcactccctcctccatcgagctgtcccgcagggcctcctgcagggcgggcaggtctcgcacagagcaccaggcctcggcaatgaggcacttgtgcgtggtgctcacgctgcactggttcagggccaggtacacggccttcatcttgtggacctgcacctgccctggcggcagcagctgcagcacccggcctagcacctggctcaggaaccgctctgtctccccgaggacctcctgcagctcctggctctgctgttgcagctgctgcagggccccgaggcgggcctcctcctgctgcagaaacgggaagacgtgatcccgggaatccggaccggtccagcc

SEQ ID NO: 129441 - DNA, 1127 bp, Homo Sapiens
ttttttttgccagggcggaccgtctttattcctctcctgcctcagaggtcaggaaggaggtctggcaggacctgcagtgggccctagtcatctgtggcagcgaaggtgaagggactcagcttgtagcccgtgcctgagtagaacttgttctggaattccacccagtgcagccgcagggcgtgcaggaaggctgagagtccctccatcaccagcaggatagccacggtcatcacggcaaaggcggcaaagatggggaccagcaccacagccgccacgcccacctcccggcccaggcccaggcctatgcgcatcaccatggcccacagaacctcggacagctctgcaagcaaaggagacagtgggggccaacggcaagtgggtgcctgccagccccctacctacctgccgcagcctgaagccctccctgcacggggggccagcgagggacctccttggacagtcccactttacagaggggaaactgaggcccagagagaagcaacccgcccagccagcagcggtatgtgagaagccaggagctggggccagccgtcggtggccaggtcactcacgggcgtgggccaggctcagggcccacaggcgcaggtaggaggcggtgttggagacgcagcccaggcagaactcgatggtgtggatggcctggtgcatgagcacctcggaggggacgagctcggcctcctcttcatcatcccaggcccctgccttttcctcatcggagctccagccattcacagatgcgtcaggcaggtccgcaacccggccttgttttcctcctggggcatagcaggcagtgttggcagcactccagccccaggaggtcccccaccacccgccaggcctgctcctggccactcaggagtctgtcaggaagcgaggagtcagggacacaccggacagtggcctctccccgcaagcagccccccacaccttaagccccggtcccacctgtcggtcagcgggcctcctccagatgcggcggcggtggcggtgcaccaagtgcaggggtgtgccaagcagcaggatgggcaccatggccaaggccaggaccaccagcgtggcctggaccacctcctgccagggagagggcgagagtcatggcgtccctg

SEQ ID NO: 129442 - DNA, 884 bp, Homo Sapiens
gcagccaagccgggtttcttttttgcccaaagagtgccaggtggtttaaaggactcccggggaccccaccccccaagggcccaagggccacgaccgccccagggatgccggacatttttcttcttgaaaggagttagggaagcttcaaagtggtgggcagccaggctcccaaataggattgatgccaaaaggggtagggtcccgggaagacacccggtgacgttgggatccaggggtaagcatcgtgtgctgggccaggaatgcatcactccagccagactggtgggccatggcggccacactccagcccgaggggaagatgctggtggcgcgactgaagcactcgttgtagatgaaggccggtgtagatggagaacaggcccataagcaggagcaggtagcggcccctgaagaaagtctgccagatctcgttctgcgcggccttcacagccggtcggttctccgcaaggaccatggccagggcgaagaggaacatgagcagcccgtggcccacatccccgaacatcacagcaaacaggaaggggaaggtgatgatggtgtagggagcacttaggagctgtgtgaccttggcccagccacttcacctctctgagcctccatttccccatcggggttgacctcctggtagcggcccacgccgtaggcatccacgatgccctggaagctggccgtgaagcggttggtgcggatgagtgtggggggcatgtcccggcaggggatgcggtgagccacggcactcactccctcctccatcgagctgtcccgcagggcctcctgcagggcgggcaggtctcgcacagagcaccaggcctcggcaatgaggcacttgtgcgtggtgctcgcgatgcactggttcagggcca

SEQ ID NO: 129443 - DNA, 745 bp, Homo Sapiens
  misc_feature (697)..(697): n is a, c, g, or t
tgcccttcagaaggtcctttaataggaacagaactgaaggtgtcacacctccagctcccaagtcctcctctcgcccccaccacagtgactctttcactccacacccaggccagcccaccatgctgccatcagccagcccgcccttgggattggcggggactaggcagtaagctgtttgcttcgaactgggagtggaggaaattagagaaacctgaggctaccttgaggcttgtgggggaccctgggctctgagtctaaagctttaggagggggatgctaggtagctgcttgctttatgtgttctcagttgcctccgaagaagagtggatgggttaaggacggaccacaatgggggttggggttgccgctgttggagtcaaggtcctatggtcaggcttacatccttgaggctcaagtgctctcagcggtgacttggggaccctctggctttgaggtgatgggatcccagagtctcttcacagataacctggtgagtgtcttctgccagagggtggataggcatcccaggtccagtgcaatgcagtgaggtaggcaagagactccatcctggtccacccgtggaggaccagagcagaagactatggtggaccccaattccccccttccattcgatcctggctcctcctctgaagtgcccaggctctgtcgtgacaggctgggtcttgcacaaggacangccaacaagagacagtcggggaagtgacatccagcccgtgggccttgc

SEQ ID NO: 129444 - DNA, 644 bp, Homo Sapiens
  misc_feature (22)..(22): n is a, c, g, or t
gcccaccacgtacctttctgcnggggcggccgcgtccggggggaacacatctgagtttattctgccactgctacagggcccactgtcatttccagcccactgaggttgagggtatggccaggctgggattcacacaggcccaggatgaaagggacaccgagtgtgttggggtgggggtggctggctttgatccctaccccagtgggttggccaggtgatcagagcctccaggttccctcacacacagcctggtacatttctgccgtcaggggccggaaggactgggcccggttgtccagtacaaacagagggtcaaccacgatccccacattgaagccctcacgcaccaaccgggtcttcatcagtttgaacgtgctggtgacctccatggcgtcctggatgcggatgaaatggggggtagcgtaggcagggagccaagcgcgaacgtgctggtacaacttctccccgtcgaaagtctggccgggggctagctgcacagcagccatgcccaccttaccctcacaacctggcacgcacacgccatacacgttaacctgttgcaagaagtccacctgcgacaacacgccctccacctcgtgcgtggacacgttctcgcccttccatctgccctcgtgccgaattct

SEQ ID NO: 129445 - DNA, 724 bp, Homo Sapiens
  misc_feature (682)..(682): n is a, c, g, or t
ccatttgttcaccagatatataatttattatgttgcttatgcattgtacactgtaactccattattccagcaactcaaaaccccatccaatcacttggttcatctcactgttacaatctctagggtgtgttgtcctttgcatcagattcgaatactgttcctatagcacaggaaaactataaacacaatatataattgtatccattcacatccagtatacaggaggccagggacacagtggaatgacatggtcaaattgctgaagaaataactaccaacccagatttctatccacaacaatagtatttttcaggaagagcacaatataagattatatctggtcaaaaattggaaatttagtagaaaagtaaccctaaaagttatccttaaggccaaaggaaagtgattacaggtgaaagttctgcagtggtagaaggaatgagaatccaagagatggatgcatctgcagatcaatacaattacttattatctctatacaacatgaacaatatcttctaattgagcagaataatagatatgctatactccaataccaacactcaatgacatcctttgatgtgttcaagagaagggtaaaggtattaacaattctataataggttagagaagtgttacaattcttatcttagactaatgaataaaatgagtatatacatttcanactaaaagaaaattaagattattaaaacctatatatttttaa

SEQ ID NO: 129446 - DNA, 1379 bp, Homo Sapiens
  misc_feature (74)..(74): n is a, c, g, or t
  misc_feature (268)..(268): n is a, c, g, or t
  misc_feature (1240)..(1274): n is a, c, g, or t
  misc_feature (1277)..(1316): n is a, c, g, or t
  misc_feature (1350)..(1350): n is a, c, g, or t
attgtacgtaaattatacttcagtgaacttgacttttaaaagaaagaaaacaatgaggttgaagaaaggacctntggagactagcaattcagaagtttttggtgatgctggcaaaaaattgtttaattagaaaccagattgtaatggattgaggaataaatctgagtttaggaagcttgaaggtggcgcaaaagaggaaaaggtaaggtctgttaaagatggtttattgtttgttagtttattgtggttgttattgtttctttagatnagaacagctaaagcatgttggtggccaataggagcattgaaaatacaaaaggaagaaggagtaaactgatacaataagatcatcagtgcctagacagaaggatctctgagatgttactggtggattcattgacagaggtggagtgatggagttgatgggaaaatgccatttgatggccctctgttttctcgtgtaaaaggaggcaaggttaatagcagacagcgatgggtaacaagttaaatagagtgataaatgaaactgggaaatgaaggaggaaactgaccagaaacaaatttaaacattttgaagtaattctgaatttccaactcaagctggaaaccataattctggagagataccaaactgtatagttttgtgatttttctccagcattgctcagcagcctgggagctgaggagaacacacatgattgggttcttctgggctcaaaagctaggtagatgtagttgagggaattgatggagctgatggatatctctaaagttcaccatgggcatccagactggtagagaagaaactggaaattagtagtctgtgagccatgattgaagccctcttaggaaacttgaacatctctctgagttctcacatctgcggatatgtccccgagtgaactgggaggcctctgtccgtggttcctgcctgctccatggctcacttcgttccccagcactccttccttctggcctgcattcactccttcagcagcatcagcaccaattcatgtgcccaggactgtgctggatgccatttactcatctaagtggatggcaatctgttgacagaggccccgagcctcctctctgtatcccagtgcaaattattggcctgggtgtgttggggaatgtgtcctgagccctgcagaaggctctagcacccacactctctgcaggtctcccccccggccgtaatggccgaattcccgggcatatgtccggtaccgtcgactgnnnnnnnnnnnnnnnnnnnnnnnnnnnnnnnnnnncgnnnnnnnnnnnnnnnnnnnnnnnnnnnnnnnnnnnnnnnnctgtgacgagctagcgcccatagggttgaggggngtccaatttattcagactttttccttttg

SEQ ID NO: 129447 - DNA, 701 bp, Homo Sapiens
ggcaggatgaaggctgcagtggttttattaatcatgattggcctggccgtagctccaggctgagagggacaggtttgtcagtggtggtcccccagatgtccctgtgcccagccctggcctgtctgccctcaggcccagcaggaggcgctaccacaggctctgactggcgtccctactccctgtaccccagatggacagaaccttcgggtctacagtcggaatatatcattctccccattttaacctgagctgcctgacacacggagggtgtgctgggtaaggggcctagggagccagggttgaatcatggatcctggggaaaggttgcagacacaggaagggttgtcacctctctgtggagccctgctgcttaccacacagcaccttctgcagagactagctctgagggtggcaggggaccccacaggccatggccactccctctctgcacctgtccgtgcctgctgtggaagcctggactgggggaggagattgctaccctgtgagcctgagggagccacgtccagctgtgacctctacctggggctttacagagagttgtttatgggtaacagacaccttgtttcagagggaatgggcatgagctggcaagtgaagcacccccacagcttatcaggaactttttctcatttttaaaccatcatgtcttcatttcacattggaataaagtgaggttttgg

SEQ ID NO: 129448 - DNA, 500 bp, Homo Sapiens
tttatgtacttggcctctctcctgacgcctcacaccattaagcatggagaaaagggaaaaagggcaaaggaagtcaaaaaactgaactaggattcgggcaacagcctcaggctgcccaacagaacaggcttttagggaactggacacacagaccagctgtgaccctgactttcacattgatgggtgaatggcaagtaggaggtaatgaaatctggaaatgacaggggagagaaggcaaagctgcctggagtgtcagtcccggaggcatttgcccctctcccccgggggccagccagggacttcccagttcaggaaggccacaacacttgtggcacattaattccgagcttggcccggcttctttcctgtgccctctgcctctgtgggcaggggaaggaggaagggtgtggtcccttaggatctccaagtgctcttccagctcccaggagcagggctgagatcccagagtcagtgcaatgaactgtccattcccctcgtgc

SEQ ID NO: 129449 - DNA, 1158 bp, Homo Sapiens
ttttttgaaatgcaatagctcgcttttaataacaacatacaaaagtctggagaaagccccaaagtagtcccctgttcccagagcccaaagaataaacagatgggagaacaagaccctcctcttccttttcccccacagagaagatccctaaacacatcaccggaacccctcaaatattcctgggaacttcaaacaaaaaaacatagcaacaaagagacccagcttccagtttattcccagttgggtaggggacaggcctgctctcggggagggtaccgtgcatccttgcagatggaaacgccttcatgctggaccaggccgagggcaggcctggggctgggcagctgctcacacgaaccaatgggggtgcccatgtgagcctctgagcaactcctctgcctcagtgagctggtctgagagatgggaccaacacacgccgtcaaaggaagtgagttctaggaaaccagggaagatgaaaagacacccccgcccccagaagacggggtcccacctagaaccttcctgggaggatgccagccccaccccacatcagacaccctttggcagatatcctgttctgcctggctaccgaggcctcccgactaccctcagaatccaaattctgcaggttcctccgtgcgaggcccagcgtgggatgtcccaggttggaggtgtgcgtgttggcggtgttctttggctggaagcaaaaggccgttctggcgggatcggggccgtctgctcagctggaggcctttctggaactgggcgtgggtgaggtattcccagcccagggcaaagccatcaaacttctcgtgttcccatctcctattagaacaaagtggtaaactggggaggatgagctgggactgactcgggtgctgaaagttcatccgcacggcattccagtaatcttccaccggctttcctcaagaacatgtggacagtccagtgcactgagtgccctggctgggtggttccgcctgctgctggggggacgttgaacatagacccgccgctctggccccgctctgggcatcagctgctccttccgctctctctcatgggccgttcggcatctctagtcctctttgggtgcagagcggctctccagagatgggtggggggcgatgggcgggggcccaggccggagcagcgccg

SEQ ID NO: 129450 - DNA, 710 bp, Homo Sapiens
  misc_feature (550)..(550): n is a, c, g, or t
ttttttttcacacaagaaaagtttattgaaaaataaagttctccctagttttctctacaacagtggaaaacaaagcagtgctctctatgccaggacagtacatttggacggcgacaccttgtttgcagaatcctgcattacttaacccccgaagtgaatcacacaaaatggctgtaaccaggatctgtttgaagacacagatgcaaacggccattagcttaaagacgtcaaggttgtgacagcaactacagtggaagggacgtcaccatctcctttggcatcaactattatgctattaatacttgggtaggacaatgagcaaaatgcttcccaagttcactccctctcagctttggcagatgtgaagctgctctgaggttcctgacacgctgtcctgagaggcgtgtagacctccagcaccacagatcctttgagcaccaccccgtccccgccatcctccatcaacagtggccctgcccaccacataagcacagggttctccagccgtggggtcagggtggcattgagggagtgtcttaaggctccacanaatctgggctacagagatgctttgcagatgggaaattccagtcactgcatccacaggacgagactgctgatttggcggaacagaatccaaaggaatttgacgaaagtcccaaactccagcaaattccacacctgcaatctatccagagttgtgccaagac

SEQ ID NO: 129451 - DNA, 671 bp, Homo Sapiens
  misc_feature (11)..(11): n is a, c, g, or t
  misc_feature (29)..(29): n is a, c, g, or t
  misc_feature (58)..(58): n is a, c, g, or t
ggtcgtccacntggcccatatacaagaanaatgattcaaaaaactgctgagccacttntggataaaggaatcaatttcagagaatcctactttggatttaccttgttctatagggagaactgagggaactgcacattcatccaatacctcagatgtggatttcacgggtgcttccagtgcaaaagaaactacctcgtctagcatttccaggcattatggattatctgactccagaaaaagaacgcgtacaggaagatcttggcctgctgcaataccacatttgcggagaagaagaggtcgtcttccaagaagagcactccagactcagaactcagaaattgtaaaagatgatgaaggcaaagaagattatcagtttgatgaactcaacacagagattctgaataacttagcagatcaggagttacaactcaatcatctaaagaactccattaccagttattttggtgctgcaggtagaatagcatgtggcgaaaaataccgagttttggcacgtcgggtgacacttgatggaaaggtgcagtatcttgtggaatgggaaggagcaactgcatcctgactgtaggactgaacattatgttcactgcactctgattttctgtaggtacagttcaaagccctaaaggagtctggcttttactatctttcttaaa

SEQ ID NO: 129452 - DNA, 786 bp, Homo Sapiens
tttgatttggtcttccactcagagttgagtggtttatcacagagtgtgttatggcttagaccaatacaggtcccttcttaatagtggtagctcctttttatcctgaggattaagccattacaaactcaaatgaccagagaatgtaatttcttaataagaatttttccttaaatctatattcagctctctatttcagtgcttctctcctaccagaggtgcaaggagtgatcctagaaccacagatacagccaagaccacggagagcttttgacgtcaggggtccactttctccactgaacccttggagacagaatatccagcttctggagagagtgggaaaggataataaacaaatttctttcaactggtaaaacatcatacttcttcagcaaaaggaattcttctagcagagccttcatggatgatatctgtcacacatgccagcacctgcagtttggaaggcagtggtgaatggatccatgcaatatgtctagaagacacaaggatgagccagccacctgatcttgttatttataaacttttaagatttactctggtttatttttggtctgaaaatggaaaggctcaaataatgaagtaatcttttcatattggagttttacatggccatgaaaatatttctttctattctgaagactgaaatagaggaagcttgagagtcttgtctttcaaagcagctctctgtatctgcttgaattaaaagatttgtgggactgaaaatcatttaatcacataggcaacccccactttaaaaagctagccttt

SEQ ID NO: 129453 - DNA, 1039 bp, Homo Sapiens
  misc_feature (725)..(725): n is a, c, g, or t
  misc_feature (819)..(820): n is a, c, g, or t
  misc_feature (826)..(826): n is a, c, g, or t
  misc_feature (830)..(830): n is a, c, g, or t
  misc_feature (909)..(909): n is a, c, g, or t
  misc_feature (915)..(915): n is a, c, g, or t
  misc_feature (919)..(919): n is a, c, g, or t
  misc_feature (938)..(938): n is a, c, g, or t
ttagaattaggcattttatttaactcatcaaataatacaagttattccaggaaacaacaatcaaaatgtattacttgtactaacgatatgtagagccacatttccaagaaatctcatgaaaataaattacttgatggaataaagcaaataaatagattttttacaaacaataaccctgtgaatattagaaaaaaaatgtgagggttctggggaaggtgccacacggtgctgggggaaaatggaacttgaaactaatgcctgaatgagatgtaggaaacagcagcacgttaacaaaaattagtaacagacattctaactgctttcctccatctccccggttttagaagtgacttctcccatccccaccgagagaggctccaagtaccgctcctgacacccacagcctaagtgatccacataatgtaatcgcaccatcattaggaaccatgaaattgcaattcctcggggaaggagcgcgatcgctcagttacacggagaagagcgattaattagccgatctcagtttaatgtgactatgtactacacgggttctaatcccactctggagcagctctcgggcctaatgaattatctctaggaagctgagctggagccataagacatgactcaaaatgaaataagtgaaataagataaaagccaaaactttaacatgatattggggaaaagctgtagaaacacatgggagtaacctaattttcctgantctgaaatgacactatcgagtatgaaatctatatttagactctatttgaggcaacttcatccaaactgactcaatcattcatgcattcaatcanntcatangtgntactttaaggagtattactttttacacgacgtgacgggatgctactttagacccatttttgggcagttggatcctcaancatcanacanaggaaacttgaagctgcangtgaaactccatgagggtgggtaaaaactgctctgaattggggatgctcctctgggaacttatgtgatcagatttttctttccaaaggagagttcctaata

SEQ ID NO: 129454 - DNA, 831 bp, Homo Sapiens
  misc_feature (245)..(253): n is a, c, g, or t
  misc_feature (632)..(648): n is a, c, g, or t
tttttgaggtatctttggaaaatttaatttggaccatattttcttcctctttctgaaaacatcaaatatccccatacagtttgggttccacagcttacaaaggggcagtgggtttcccgcagttacatactgtacccaactttctatagaaagataaaacattttccaaccttgcttttgagtatttcctaaaaaatgctttaaagtttccttacaataaatggcaagtaaaacaaagtaaggcnnnnnnnnnctccttttcccccttttatgtactgcatgttcgaggaataaggaaggaagactagttccatcagagtactagtaatcctagtaccctggggattactgctggatcctcccaggtatacccctattattgaggccctgatgcacccctgcactgaggaacctgagaagggtaagtactaaacagtctgtcatagccacgtgggactgtcacagcacaggtgggactgggagtcgcccagttcttctcggtgctcacaggagtaacaaaggaactaggactaaaccataaccagaggtctcccacgtggtactacagtaccacacgttcacttttgtggcccttacaaatgcacatttatagacccaatgtatttactggnnnnnnnnnnnnnnnnntgcctttactaatttctgtatcaaattattagaatgaaaataaaagcatttgtctgataaaacacactttctatgttagatgaaaataactcccttgcaagataagcttggtaatgtgtatttgtcactatttatatatttttgcttagtacacacatttctttaatagcatcatctgaaccc

SEQ ID NO: 129455 - DNA, 666 bp, Homo Sapiens
attattttataatttattcaattttaatatggtttccattattaacttttaaaacaaaatgatttccagtttaaaaaacaatgcactgaccacataattccttttttattttacacagttatacaaatattctaaatacacattttgtgttcaagatgatggcaaataagattaactgtacagtacataaggaaagaaaatattttaagtatatttagaagcaatagaaatgtctatacaaaacaagcaaatggaataaaattttttatttttaaagtattgcaacaggcccacaggtttgtaacaaaaatgtctttgcacagttcctcacaatgccccattaatagctaaagcaagacagcattttttaaaaaataatgtttcaaaatgctacacgtggtactactgtttgcacagtttgatcaaaataacgatctactttgagtcaagcaaaacctagaggaaatataccaaacaacttgaaaatcatttgtataaaaatcattgcacattattttactcgtttgaaaagtaaaaaagtgtatttacaaaatattttgcagtcaaaattataaagtgaatggatatctcgaagtaacacgtcttgatacagacagttcaaggaaaacacacaaatgctttttctttaagaggttttcagtgctc

SEQ ID NO: 129456 - DNA, 966 bp, Homo Sapiens
acagaaacgagtatcttatatttcagaagatcattaagttggaatatgactttccagaaaaattcttccctaaggcaagagacctcgtggagaaacttttggttttagatgccacaaagcggttaggctgtgaggaaatggaaggatacggacctcttaaagcacacccgttcttcgagtccgtcacgtgggagaacctgcaccagcagacgcctccgaagctcaccgcttacctgccggctatgtcggaagacgacgaggactgctatggcaattatgacaatctcctgagccagtttggctgcatgcaggtgtcttcgtcctcctcctcacactccctgtcagcctccgacacgggcctgccccagaggtcaggcagcaacatagagcagtacattcacgatctggactcgaactcctttgaactggacttacagttttccgaagatgagaagaggttgttgttggagaagcaggctggcggaaacccttggcaccagtttgtagaaaataatttaatactaaagatgggcccagtggataagcggaagggtttatttgcaagacgacgacagctgttgctcacagaaggaccacatttatattatgtggatcctgtcaacaaagttctgaaaggtgaaattccttggtcacaagaacttcgaccagaggccaagaattttaaaactttctttgtccacacgcctaacaggacgtattatctgatggaccccagcgggaacgcacacaagtggtgcaggaagatccaggaggtttggaggcagcgataccagagccacccggacgccgctgtgcagtgacgtggcctgcggccgggctgcccttcgctgccaggacacctgccccagcgcggcttggccgccatccgggacgcttccagaccacctgccagccatcacaaggggaacgcagaggcggaaaccttgcagcatttttatttaaaag

SEQ ID NO: 129457 - DNA, 1470 bp, Homo Sapiens
tatgtatatgaaaactaatttattaaacctctgtacacaaagatgaacatacctgtatagcaagcatatatgaaggatgaagttacaaaaaagtaaaagtattactaaaattgacacatgtaaatcacttacaaaaataccccaaatgggataaagctgctcatccctgatttttctcatttggttgtaggagttgaaacatgaatttaaaatggtagaattttttcttttaaaaagtgatatattaaacttatatacaggataattagcaaaatgtagaaagggaaaacaatgtacaaaagacagataaaaaccatcactctcgacggatagtcacaatccaaaaatagtataaaccttaacaaaccctctctaaaccaggtcatattcacatctccccccaagttttgtcagtgagaataaaatatactgaactagtgagctcagtctttctttaaaataggcttgactttggaacatgaaccttggatagatttttaaacatgggagggacaaacaggaaaaccattctatctatccacttaattagtactaattaacggaacaaagttattaaatagctctcagtgctaagtcaagccattattcagaggcctttttgtttttctgctggtttcggggtgagttctttaacaagcttcttatcctgaggtacattccagtagattctgccatattctcaaattcaaatggcgtgattccagttgcaaatttgctcatgtcaggtatagggctatgaattttagtggccgttgaaggactggtgtctgcaggaaagagcttctggctgcccccattgctgatgtcacagtttggtacgacactgccattatcaagaagggcaccttcagtgtttaccggagccaactctgctttttccttctgacaaagtgatgtcacctcagagtctggactggaggcatgtccagcttctgatttctttgtaaaaatctctggtacctcaggctcatccagcgtctgcttttcagatgtttttccctccgggacagggaggtctagctcatttggacaaggtgatgaggcaacggaattgccagttaaaggtgtgtccacaggaacgtcggagtcgctgtttacgctctcggcctgctcaagagctgcccagatccgcctctgctgttcttcaagttcttctagagtcagtgcgtcctcatccacagctccagatgctgttctggtctggggtgagtcactgggagtcagcggcggggtgccctttgggagtggaggagtgtcaggaggtaatggtggttgaaactgaaaactttcgctgctctgagaaccatgtggtacctccatatctgaatcgagctccatgtctgcgggagatcccgctgagttgctttcattcttctgcttctttggactacctgggctagagtgagatgaagacctcttgttgccagacttcaccctcgggccgaatct

SEQ ID NO: 129458 - DNA, 582 bp, Homo Sapiens
  misc_feature (212)..(221): n is a, c, g, or t
gaaccttttttggccaagggattgtgtcaggtagtcttttagtattcagtcttaattattttgcaggcaggtttagttttccttcaacacattattttccttaatttccaataaaggaaaagtaacataagaaggaaaaatgtaatttgagatctccactgtacctcctttgagcaaaatctcaaaacatgacattttccaaatacatgtgnnnnnnnnnnccttctcttttcatcattaggaatggaggatctttggttccataccaatgcaggcatgtcagcagaaggatgtgtttgccaattaccttacttctaacttccaagcgccaggtgtgaagtctggcaacaagaggtcttcatctcactctagcccaggtagtccaaagaagcagaagaatgaaagcaactcagcgggatctcccgccgacatggagctcgattcagatatggaggtaccacatggttctcagagcagcgaaagttttcagtttcaaccaccattacctcctgacactcctccactcccccggggaactcctccacccgtcttcacccctccactcccaaagggcaccccgcc

SEQ ID NO: 129459 - DNA, 698 bp, Homo Sapiens
gtgggtcgatcaaatgcttgagtttattaacatgtctcccaagtcttttttactgggagtttcagggtggtctctgaaatccattgctgttgagctccaactccaggccccatggggttgcaccaagctgctcaacctcacctgtttcttgaaattttgctgccttccactaggcagatgggtccagcaggagacattggagcaccaaatggaaaagctcttccttccttcccctcttcctgtacatcagaaagaatgcattagaaactcaaggagtgagcatttgggcttcctaagggtgagacagtgtggggctcctgtggggagatgggtactcctgtacccagtgtggcctcctgctcccaccgctttccagctgtggggcttttccttgtggaaattactgtccaagtttgatttttccatctgtaaaaggaggcaagtaagggttggtatgaggatcaaatgaattaacaattatcagactgacacaaacattccacttaaacagtcaaattgacttaaaaggggaatatagatgtctgaagccatactgcctggtgggcaagctggagaaagcaacttctatgcaagaactgtgtcctttcagaagctccagccagagcgtacgtggttggagagagcctgaagacaggccttgccccacacaaacacagaacaaattgttctccaccccc

SEQ ID NO: 129460 - DNA, 711 bp, Homo Sapiens
  misc_feature (525)..(559): n is a, c, g, or t
ccattaaggagaacatgaatttccttggaggtgaggctccaggtagggacagggcctggtctgctgaaggccacaggaagcaaatggcccccagtccacctttctgtccctgccatgaagggccattacactggggtggggaggtcctcaggagggtgtcacacatagccttaggcaatagcaagtctttcctattcagctctgtccagcctccaattgaggagggataatgggggtgagacagggttgggggtgaagtggccaccaaacccggcaaaagtgagcagctccatcttgtctgaagttaacatcatcccctcaggtataaagcctcctcctcacatcgactttggtaaaccagtcagtgacaggccttggccaagctgagacttgggcaaaaacctgaacgagtgccaccggaaagccatcatcctagctctgtccttccaatgctgagagtcacatgttcccccatgggcatccctctcctgagtcggctatgtgtgtgaagccaggccaggccgnnnnnnnnnnnnnnnnnnnnnnnnnnnnnnnnnnnccagccacagagccatctcacagggcttcaggagaaacttcccagtactcaggacaggagctggcagtgagcatgtgttggctctcattaggaccccacctgtcagcgtctacaaacatgatgttcagtggacccaaccttttctctttccc

SEQ ID NO: 129461 - DNA, 1189 bp, Homo Sapiens
  misc_feature (1140)..(1140): n is a, c, g, or t
  misc_feature (1162)..(1162): n is a, c, g, or t
tgtaatttcatttagtttattaatatgatccaaacagatttagcttaagagatgaggacaggacataaaacaagatttggctgagctatataaagaaaaccaaaagagtgacaagattttcaattggtgacaatttaaagtcatttattaactaatataaaaataaatctacaatagaaccatgacttaaactgagccagtatgtggtacatgtgtcacccaaagtcagcaaggaaccattcagaacttacaccctcctggactggctcacacggcctgtctttgatctggaacctcatataagtcacctcacagcactgggtttgcagccagctacattttttctcctcagcctatgatcagttattaatacataccatttctatgtttcccatagcctctttcttttcagatagtgacagagctctagaaaaaactcatctggccagtactaaacagggaaggtgaaaaaaagtactttaagatgggtgtggggtcatttggggtaccaacagactcagataaacaagggaaccagagtgggcatcaacaaaaagcattgaggtaaggggcccagtggtaattcacagaaaagaccagaactggacaatattaaagtcaggaagaatggctgttacacttgaaaagtcacactagaagaactacaaagaagaagaaaactggaatgaacagtagtcccttttatattttttaaaaggaaggaattttttaaagaaatataaaagtcaagtcaaaaagtgaaatagcaacaatgagtatttaaataaaacagaatgtagtaggaaagaaagaattcttttattcccacatgacagcccaattttttaaaatggttatcttaagtcaggccagttttattttattgaccatgtatatataacatcagatatttctaagaaagagaagagaacctgattgatgtctctcatgtaacatggaaaggaaaaaggagggagggaaaatggggaagaaaagtctccacactcttcatgcccaaagtggacacagtctttaacctgtacttcaaatgacaggttcagatcatagaaaacattgtcaagtccaacagaattttgatcacaagctcttggtgctcagcgtgcagctgagtagcagaangcaaacaagcaagttgatgganaaatctctgtgcagggaagaggaagaa

SEQ ID NO: 129462 - DNA, 617 bp, Homo Sapiens
ggtggctacatttgagtacagaactttattaggaaaattataagtgcatatacattttttcattggtatgacttcaaagtagaaattgttgtttctcaaagagttgtttcttatttattttttaaagcacgctgcgtataggaattggccttctcctggaccattttcacattatctgggagatgcaattgaaacaatacaaaatacagtattcatcacatttaacactgaatcattcactgctcagagactgagagtccagcgaggttgcaaaataacaaattttctacatggttttatcagtggtctgcttaggggatttggaagtttctagggaatatttcccaggaatggggctccttcagaatgagtcagggaagctctgtagagggatcagagcactcaaattctcatccagctggaaaagggtgtagcacctgggaaaggcgatcaactcccagtcagggagcccacggtgataacaccagtcagacgatcacaccatggaagggtccaatgagatccaatggaaagacttacaacatctaaggttgggggaggtgcaaccttctgctattcagcccctctgctccaagcggaagcttttttctcaggag

SEQ ID NO: 129463 - DNA, 1245 bp, Homo Sapiens
gttctctgtgcctcagtttactcaagtgttaaacaggaatactcacatgaggattacatgagttaaaatggataaaatggataaaagtagagagtaaattatttaaactttatcaaatccttggtacatgaccttaatacaattaagtatttgttaaatacatacattttaaagaaacgtcatcatatccacacacctatgaggcacctgcccaggaccacagagccaatcaatcaggtgatgagtgattccaggccagcaggaaaccaccgcccactgacacagggactgcaccatccatccttggtttgcatggtgcctgccatgcttcctgtattactgttaaatacatggggcaggcctttggaggatcccaatgttttaaaagggcaatacgaatatgattctaatacataaaaagtatgagggcagcaagaatttagttacaaaacccaaaaatcctcaaagagaagccacatagcactgtgcagtgttaccactgcctcgagtctggacagggcacaggtgaccgagacaagtcttatttaactgatttcacaagaagggtccgagttttattagacaacccatgtcaaggtacaaaatgattaatgacaatatcagccatattctattagccaagtgccacctgtcactatgaaactatcctgtaggacatccctgggctctcagttgctaatgggctgctgaagaaatgaatgtcctcaaatcgagaccctaacacaaagagattccagagagtggcttagaaaacccagctactcttaccaatgtggggaaagggtcaggggaatgaacctctgcaggacaatttgaattcccaaactgagtaagagcgaaacaaatatgcaggcaaggcaaagcctcaggggggctcctgggtctggggcagggggtgggagacaggagaggcaaaatggcagggacttgacagcaggttcctcttgtctacttcttcctcccgcctctctccttgagggccaggtggatgactgcgccattggccatgttgtagtaagccagtgagttggaatctttgatgaagataccctcatactgtagcttctgtttccctgcaggcatgcctgtggcttcatgaatcttcaccttaatgacagagacctggtccgtgagtgggagggtgaagaccagcacctgcccattcagattccattccgtcttatcctgcatgttgggcacctgaactttgatgggcactggacc

SEQ ID NO: 129464 - DNA, 1674 bp, Homo Sapiens
  misc_feature (1652)..(1652): n is a, c, g, or t
tttttaatgtaaaaccatttgtttaattctaaatcaaatcactttcacaacagtgaaaattagtgactggttaaggtgtgccactgtacatatcatcattttctgactggggtcaggacctggtcctagtccacaagggtggcaggaggagggtggaggctaagaacacagaaaacacacaaaagaaaggaaagctgccttggcagaaggatgaggtggtgagcttgccgaaggatggtgggaagggggctccctgttggggccgagccaggagtcccaagtcagctctcctgccttacttagctcctggcagagggtgagtggggacctacgaggttcaaaatcaaatggcatttggccagcctggctttactaacaggttcccagagtgcctctgttggctgagctctcctgggctcactccatttcattgaagagtccaaatgattcattttcctacccacaacttttcattattcttctggaaacccatttctgttgagtccatctgacttaagtcctctctccctccactagttggggccactgcactgaggggggtccaccaattctctctagagaagagacactccagaggcccctgcaactttgcggatttccagaaggtgataaaaagagcactcttgagtgggtgcccaggaatgtttaaaatctatcaggcacactataaagctggtggtttcttcctaccaagtggattcggcatatgaaccacctactcaatactttatattttgtctgtttaaacactgaactctggtgttgccaggtccaaaggagaagagatgggggactgtgaagaggggagggcttccctcatgttcctcaagatctttgtttccataaactatgcagtcataattgagaaaaagcaatagatggggcttcctaccatttgttggttattgctggggttagccaggagcagtgtggatggcaaagtaggagagaggcccagaggaaagcccatctccctccagctttggggtctccagaaagaggctggatttctgggatgaagcctagaaggcagagcaagaactgttccaccaggtgaacagtcctacctgcttggtaccatagtccctcaataagattcagaggaagaagcttatgaaactgaaaatcaaatcaaggtattgggaagaataatttcccctcgattccacaggagggaagaccacacaatatcattgtgctggggctccccaaggccctgccacctggctttacaaatcatcaggggttgcctgcttggcagtcacatgcttccctggttttagcacacatacaaggagttttcagggaactctatcaagccataccaaaatcagggtcacatgtgggtttcccctttccttgcctcttcataaaagacaacttggcttctgaggatggtggtcttttgcatgcagttgggctgacctgacaaagcccccagtttcctgtggcaggttctgggagaggatgcattcaagcttctgcagcctaggggacagggctgcttgttcagttattactgcctcggagctccaaatcccaccaaagtcctgactccaggtctttcctaatgcacagtagtcagtctcaggttcgccctcgtgccgattttcaacagcccgcgcgcgggncctcgctacctcttagccctga

SEQ ID NO: 129465 - DNA, 1284 bp, Homo Sapiens
tttgtgttggcaaagttttatttttgaagcagtatagtatttatattagtaatctttatacttttttatatgtcataaatatggcattttaaattttaaaaatttagatgcacagaacattggccctggaaaggacagtcttaatgtaacccatacactgaagatgagggaatgacatttttatgctgacatccctccctttaaccagcactcggttagtctagtacaaaacaactcatggaacaactgagtgcttttttcctccaataaacatttatttaaaaagaaaggagttaacactgaaaggcataacgtgccacgtactatgttaagacagtggagctaataccacctgtcctggaagatcagagttgactaacatgtaaaacaaatgttgtctaggaacttattttatgattctcacacactaatctatttgatgcccaatattttcagttgtgtgaatagtgtgagttgatatctgcttcccctgaagatggtttctgaattaatttatgggacagactgagagtcagatatagttctgggaggaaagagaatacaggttaaagggagtctgcttgacttctctttgagaaagactgactgaatacctactacagttgacattcacttagccccaccctctcttacacctacaaacccatacttagagctttcacagaatacaaggagcatccaatatcttttctttttaaaaatttttgtatttccttgcagctccagctcaaaagaatatgtaataccttttaaagaaacaaaatgtataaaacttattcagtctttcatatgattttattttcttccttcgaccataataatatgatatccaaattttgtcttaaccggtgggtctgtaaacacaggcttatccatcccacttacaggcaaggcaaatgctgcttcttgaaatggtcccaccatggaccctctggtcatccaacccaagtcacccccttgcctggctttatcttcactatactgtgcggccacttcattgaatctcatcccagactttaacttttccatggcttccatgattttgccatgtttttcacatagaatgtgtctgacctttactgcattgccaccacctttgggaccttgagccttcttgtcagcactgtcactcccagaggctgctccccctttccccgcttttccagaaccactttttcctttgggcggcatcttggaagcttgttgttgaacccccggccgtaatggccgaattcccgggcatatgtccggtaccgtcgactg

SEQ ID NO: 129466 - DNA, 1113 bp, Homo Sapiens
  misc_feature (44)..(44): n is a, c, g, or t
  misc_feature (609)..(666): n is a, c, g, or t
  misc_feature (679)..(694): n is a, c, g, or t
  misc_feature (696)..(696): n is a, c, g, or t
aaaccacaataccccgcggggggggagttttcccccacagtttnggaattttaaaaagggggggcccaaaaattgggacaaacttttgtttgcgccccccggtttttcccccccatggggcaaaatatttatatacgccaaagggggcaccaaagagtgtttgaacgccccccggggggatttcaaggttttattacattccccttttttgagagggtttcccaagtgttgggccgaaaatggtttatagggaatttccccccattttctttaaataaaggtggccaggggccgggggcgttaatattaaattattggaaggctccgccttggggactccccctggttggatagagtttccccgttaaaaggccccttccgggaacttccctttctggggatttttgttccaaaaccgcttcgggtttcccccccgggggctttttttattgggtggggaaattccaagcccctatgttcatgggcccaaggattttccttagggaacacagctatgggcccaagttcccctttcctacttgggcccggcgcgcccaaaagaaatggtttagaaaagcttcttggagggcccgagggcggcccaacaannnnnnnnnnnnnnnnnnnnnnnnnnnnnnnnnnnnnnnnnnnnnnnnnnnnnnnnnnggggttgggtggnnnnnnnnnnnnnnnntngtctttcatatgattttattttcttccttcgaccataataatatgatatccaaattttgtcttaaccggtgggtctgtaaacacaggcttatccatcccacttacaggcaaggcaaatgctgcttcttgaaatggtcccaccatggaccctctggtcatccaacccaagtcacccccttgcctggctttatcttcactatactgtgcggccacttcattgaatctcatcccagactttaacttttccatggcttccatgattttgccatgtttttcacatagaatgtgtctgacctttccccgcttttccagaaccactttttcctttgggcggcatcttggaagcttgttgttgaactctgaactccccggccgtaatggccgaattcccgggcatatgtccggtaccgtcgactg

SEQ ID NO: 129467 - DNA, 695 bp, Homo Sapiens
tttacagcctttcatatgattttattttcttccttcgaccataataatatgatatccaaattttgtcttaaccggtgggtctgtaaacacaggcttatccatcccacttacaggcaaggcaaatgctgcttcttgaaatggtcccaccatggaccctctggtcatccaacccaagtcaccctgaaaaacccaaaagataagtgatatcaagtggcccagaagagggaacagttctactgtagcttgagagaatttcccaacattttgctaaggttacgaggtatattcctaagagcaatacaggaataggctcaataaggacaaataggtagaagaagtctaactagactgaacacataagtactctcaacactgctggactttgaagttagccgtgcaagtttggtcatgcataggttttgacatagatgacccttattctactatttacaagttggacatttctgcttttgagatctttaaaccaaaatatcgctacaaccaatggttgaacaaaggaatgatccctacttctgtgtttcttctgtggaggatggagaatttttatcttattttattatttgtcatttttactttgctttcttaccttgagagaaaattataataatagagcaacataccccttgccttgctttatcttcactatactgtgcggccacttcattgaatctcac

SEQ ID NO: 129468 - DNA, 887 bp, Homo Sapiens
  misc_feature (776)..(810): n is a, c, g, or t
cagttgtttgggccgagcatgctcgtctaccgcatgtctgtttccttgtcggttgtcttcacttcaattggtgccatttcatcatttaagtagccagcatcattagcagctttccatctctgctgtgacttcagggcatatttgtcacattcttctctgctttatttttgtgttttacagcaagattctctgcagtcattgccatggggttctggacatgctgatctgttaatgatacccataaagaatcttccagcttgatatctgatccaagcttggttcctaaacgcacatttctgacacagtagggagcttggctcatgctttcggttcctccacataagacaacttcagcttctttaacacaaatttcctgacatccattcacaatggactgaaaaccagaaccacagagcctattaatcgtgagagctggggtctcctttgggattcccacacgcaaaccaacatgccttgccaaatatatagcatctgaagaactctgcaggacattgcccataatcacactgtcaactgtttcaggtgagactttgccagcagacaaggcagccttggcagcaaattcagacaagtcagtagcagtgaagtctttcagaaggcctccgtaagctccaaagggcgttcgcttagcagcaactacaaacacacctcggagcagagccatggcggctgctgggtcgtcggcggcgcgggtctgtggtgtccccggccgtaatggccgaattcccgggcatatgtccggtaccgtcgactgnnnnnnnnnnnnnnnnnnnnnnnnnnnnnnnnnnncgccgcttcctcgctcactgacttcgctgcgctcgtcgttcgctgcgaacgagtagccgccctatagtgatgtataa

SEQ ID NO: 129469 - DNA, 1217 bp, Homo Sapiens
cagttcccaggcacccatcagggtacacccggatgcattccctgccagtaaccggttcccatctttttttgaatacctggaggaagttttctgtaactgttcccaggggtgtgtttggggcccgagcatgctcgttctacctgcatggtcggttttccctttctttgtcttcacttcaattggtgccatgttcatcattaaagtagccagcatcattagcagctttccatctctgctgtgactgcagggcatatttgtcacattcttctctgcttattttgtgttttacagcaagattctctgcagtcattgccatggggagctggacatgctgatctgttaatgatacccataaagaatcttccagcttgatatctgatccaagcttggttccaaaacgcacatttctgacacagtagggagcttggctcatgctttcggttcctccacataaaacaacttcagcttctttaacacaaatttcctgacatccattcacaatggactgaaaaccagaaccacagagcctattaatcgtgagagctggggtctcctttgggattcccacacgcaaaccaacatgccttgccaaatatatagcatctgaagaactctgcaggacattgcccataatcacactgtcaactgtttcaggtgagactttgccagcagacaaggcagccttggcagcaaattcagacaagtcagtagcagtgaagtctttcagaaggcctccgtaagctccaaagggcgttcgcttagcagcaactacaaacacacctcggagcagagccatggcggctgctgggtcgtcggcggcgcgggtctgtggtgtgggggacgctgagcggccgctcgcaatcacccagatttcaagagcgtgggtggcgccccgagagccacgcccctgccctttcacctacttcctggggctccttggcggggtcccagcgtaagatggtcctaccccacgcgtagcgctgcccgcctcaccccagcccgagggagcccaggggacggggctcggatagaccacaacgcgccttgagagcggactctttcctcacatcctcatttttagattttctccgtttccaaaccgagagaatttggtttgacacctctcacccatcatatcctagccccgacaggcgatgactcttcccctttgtctccgcctcgtgccgaattcaccacccagcctcgtacctagctat

SEQ ID NO: 129470 - DNA, 1614 bp, Homo Sapiens
ttttttgaagttaaggcaacatttatttgatttccttataatcatattatctaaggcagaagtggtggttacttggcaagaatacgatttcttttaatgtcttctatagttgagttttagctcagaaatacatcatatttcactggttcaaatctgagagaatgtacttctagcatgggctcctattcatgatcaatgcatttttgtgtcaccatggcttgatcaaacttaatcactgtttcaatggcagggcatggccagttgtggcagctgctctgaaggtcacttgttttactgtggcctggccaagtagagtaaggatgggtcacagtgagctcactggtctcttcaggctgtgctctgaatgatgacagcaataccttggccacctccaatgcaagctgatccaacggcatattttccacctcgacgccttaattcgtgaaccaggtgtgcagtaattcttgatccagatcctcccagtgggtgacccaaagcaatggctcctccattcacattggttttacttatgtcaagatccaaactcctctcaacagccaagtactggggagcaaaagcttcattcacctctaccaaatccatgtccttaagactcagtcctgctttcttcagtgccccactgatagcagggacaggaccaatacccatgatagagggatcacatccagatacaaagtagcccacaattcttgccagtggtgtgaagttatgtttcttaacagcatcttcactagctatgataacagctccagcaccatcagctacacccgatgcattccctgcagtaacagttccatctttcttgaatactggaggaagtttctgtaactgttccagggtggtttggggccgagcatgctcgtctacctgcattgtctgttttcctttctttgtcttcacttcaattggtgccatttcatcattaaagtagccagcatcattagcagctttccatctctgctgtgactgcagggcatatttgtcacattcttctctgcttattttgtgttttacagcaagattctctgcagtcattgccatggggagctggacatgctgatctgttaatgatacccataaagaatcttccagcttgatatctgatccaagcttggttccaaaacgcacatttctgacacagtagggagcttggctcatgctttcggttcctccacataaaacaacttcagcttctttaacacaaatttcctgacatccattcacaatggactgaaaaccagaaccacagagcctattaatcgtgagagctggggtctcctttgggattcccacacgcaaaccaacatgccttgccaaatatatagcatctgaagaactctgcaggacattgcccataatcacactgtcaactgtttcaggtgagactttgccagcagacaaggcagccttggcagcaaattcagacaagtcagtagcagtgaagtctttcagaaggcctccgtaagctccaaagggcgttcgcttagcagcaactacaaacacacctcggagcagagccatggcggctgctgggtcgtcgcggcgcgggtctgtgcctcgtgccgattcacacacccagcctcgtacctagcc

SEQ ID NO: 129471 - DNA, 836 bp, Homo Sapiens
  misc_feature (199)..(199): n is a, c, g, or t
ttttgggccgagcatgctccgtctacctgcatgtctggttttcctttctggttcttcacttcaattggtgccatttcatcattaaagtagccagcatcattagcagctttccatctctgctgtgacttgcagggcatatttgtcacattcttctctgcttattttgtgttttacagcaagattctctgcagtcattgcncatggggagctggacatgctgatctgttaatgatacccataaagaatcttccagcttgatatctgatccaagcttggttccaaaacgcacatttctgacacagtagggagcttggctcatgctttcggttcctccacataaaacaacttcagcttctttaacacaaatttcctgacatccattcacaatggactgaaaaccagaaccacagagcctattaatcgtgagagctggggtctcctttgggattcccacacgcaaaccaacatgccttgccaaatatatagcatctgaagaactctgcaggacattgcccataatcacactgtcaactgtttcaggtgagactttgccagcagacaaggcagccttggcagcaaattcagacaagtcagtagcagtgaagtctttcagaaggcctccgtaagctccaaagggcgttcgcttagcagcaactacaaacacaccttgagagcggactctttcctcacatcctcatttttagattttctccgtttccaaaccgagagaatttggtttgacacctctcacccatcatatcctagccccgacaggcgatgactcttacccctttgtctccgcctcgtgccgattaacacacccagcctcgtaccta

SEQ ID NO: 129472 - DNA, 1166 bp, Homo Sapiens
tttttaagtggagaacaaccaataaagagggacccctttattacacatttataaaataatagaatatagttattaaaaatgggacactttttttcatttttggtatcttgtattcagtttttccatcctcttcacaatcttccataacttgctttttgttatccattgttcacctgaaacttccaccccaccattcaaagtacaactgaagaataaacgatctaacagattcttgtgagacacattatcagataaattaatccagtgacacatgaataaagatttagagtttttaaagaaatacagtaaaagcaaaaacatatgaagcataatttaatctgatgattcagaaggcacctcaagattgtgttgtgccgttttcctcatgctgcgtggttaggtgcctataacagaattctggttagtaaaattttgaaaaaaattcacatataattcacattaaacgactacagatagatacaatatgggcattttgatgtgtacatttgtacctgacttagggcacaatttataataatatactaagaaaactaaaattaattataaaatgagtatttttagcacacttagtaacagctacttgttttaaactattatttcatttttggtgaccaaattatatttgaccataattaaagaacacataaccttaaaataatatttaagaaacatagttacaacagacatgttacattaaatgaaaaaaggaaagaaatgtacatgtattaaagggtactgaggtttttcaaacccattcttttgaaaggccttttaatccactttcatgtaaaccaatttaaatttaaaaagtttatactcaagaggtgaaatcagtgttgagcacatggctgcctaacaaccattcaatgctgatcactgaactagtattttcatttgaatatcctgacaaacataataattgagcccatgtatatatgcaagatgtggaggatccaactaataactgcagaaataaaaacactcaacttaaaaaaggttgaaacaaatgacaaatggaaatggctgaatcactgtacctttttgacacaaccttaaatcttagttttactatatattatttggtactcctggattcagtagttggggtaaaaaaagtttctatattcaaacatatctacagaatg

SEQ ID NO: 129473 - DNA, 2476 bp, Homo Sapiens
tcctttacttgatcctaactctgattttgtcagactcaaaagctgggattcatattacagatatacagtttacagcacacttggctggaatgcaaaaccatctattccacaaggccagccatgcaattctagacatcttgagaacatcaggtccaaaccctagcctaataggaaaaatcagtcctaaacaggacagacttggtcaaggtcaaggtcactcgagcggtgtcatgacagcaggatgcttctgacctcagtgttctgagttcatgtccttgcttgcatgaagtcttgtaagcgttctccaacagtctcagctgcttcctttgctcgcctcccagcccagtccatgtgtctgtaagcccacacctgctacaggaaatctgtaactcccctcttcgtcagcctttgccctcaccctcagcctggtagaccttcattttcctcccctccaacctcttgaccatattcgatccaaaggcccaaatttcagtacacaggtagctaagacaaaggttagaaaaagcccagaaggcactttattggaggtctctgcctccattcacaggagaaaggagctgggagccccatcctaagggtcccagcatcagcccactggagggcctggaacagtccagcactctgtgggagaggagtggggaggggaatgttttagaaaaaatagatctctatgtacatctgacatatttatatagcacataaattagggagtgctctgacccctgcccgtggagcccaagcactgagcagggaggtgaacgccagtccagaaagaaggtgctggagcccctgctctgtcctctccatcacggtgctcccctagggcctccccaggcctccttggctcagtccaggtgtctgcaggaggaaggtgttgtctgcatttagtgtctgagactgggtttgaggaggcaccagataaaaggagatacacttgcagctataaagtcagcttcaaaccccagggcttgtaattccaagaggagggtggggaggcgaggccatagtctccgagtcccaggacgatggctgacaatacaccaaaacatcagcttctctccacagcacagctgggagcattccccagtggaggggccatctggcctgcctgtcctcccaggaaggtttgcaggcctcgagtggtccgtgagtttggtcccgggtatagttccaaccctcagttccgactctggagaacctcttcctccttccagccgcttgagtttttgccaaacttgtagacgagtcgccggccatccacccgttccaggatctcccgtttgtagtagtacctcatggcccggctcagcttctcgtaggtcatgttgctgttctttttcttttggccccatagttgggccacagcctcggagcgcaggaacttgaagacgccttcatgccgattctcccacttcatgaggccctcgttgagctccgggtggatgaggatgtcccggatgaactcccacaggtgggtgcctctgggcgcgtgcttgctcttcttgccctcgagacagtcccagtactctttgctcagctttcggggccggcctcgtttccgcttcccgtgcttgggatcccccttcttgcagtcacgaaaaccatcgctggggaagagcttgccatcagtgggatccaggtccacgtcacttccaccggagtctgaggagtgggagctccgagaagcaccagtccctgcggtggagacgtcagagctgccgggggagggggctcctgcgccacagctgccggggtggtaggggctggcttgctgaccgtcgtccagcagctcctgggcaaaggggctgccctggtcaaagggccctgggtctagggcctcctggaaggccatgccatccttctccagcagctcaatgatccaactgagctcatcagaagagctggaagtgaggtctcgcagctgggcatggagttggtcccccagaggcccaaagaccagacgcagctcctcaagggcacaattgcagagggtggcgccatccatgtcacatcgtgagaagtcaatggcgcttgcgtcgtacttgttcttctccacttggtagctgatccagtccagaacctgcgtcttcgaccagaactggggctgttcccccaaccagctggccttctctgtaccctccaatgacatctgggggttgctcagggtcagtaccaagtcatcggccccaaaggtggcagcagggggaacagaggccagggtggagtcctccgagctgtacatcgcactgaagtagttgctaaaaatgttgctaatctcacaggttgcagccatgaggctaccggagtggcggagtccggctgtggcaggcaggccggcaggcgggagagaaatccagttccgccaggtagcgctgaggtatctggccgctgcgctcccctacccggctctaaatcctcgtgccgaattcaacacccggcctcgtacctagccgta

SEQ ID NO: 129474 - DNA, 599 bp, Homo Sapiens
cagtcgacggtaccggacatatgcccgggaattcggccattacggccggggagatacctcagcgctacctggcggaactggatttctctcccgcctgccggcctgcctgccacagccggactccgccactccggtatcctcgtggctgcaacctgtgagattagcaacatttttagcaactacttcagtgcgatgtacacgctcggaggactccaccctggcctctgttccccctgctgccacctttggggccgatgacttggtactgaccctgagcaacccccagatgtcattggagggtacaggtgggtctcagcggggtgggatggggcacggagtggggagacagatccatctaagggcctgttagacaaatgggggaataggcagggaggagggtctctaggcaaattccagggctagaggctgagacttagtgactgaggtgctggggggttgtgggggctgtgacaggcagagggaggtgtcagataccaggacaagggtggttgtgaatgctacctcctgcccctactcttgggatggctccaagggctgaggtgtgaatccccagtgtgctccaggaatggggctgtgtg

SEQ ID NO: 129475 - DNA, 1545 bp, Homo Sapiens
ttttttcattttccttgaagtttattgactgttactggtggcagagcaaattccataaacgagcaggttccatatggagcaagtagaaggggagctctgagttggtgaggaaggatgcgtggagtggggacttggagtaaaggatggaaaggtagatctctcctttttccctccattcccataaggatactggattaacaatgggggctatctgctcagcattccctctccaaattggagccagagaggggaaatgatgcaaatcagaggaggaaacacctcacagctcctctgtttctccatccaaggggatgccaatatccacgttgtagtctacaggctccccagagctcagccagggaataggggttcgattgaaagaaggcctgttggagaggttttggttgtagaggaccaggggttcactcagcaagggccccaggtcaaacttgggcatctggaaggtcatgcgtttggaggccttctcatatccaccatagggcattgccgtcctgttgaaggacttatatttgggaagttcagctttggccccataggccagcaggtcaatgccaagttccattttttgctgggggtcaacccccatggctcgctcccatggggaaatataggtcttgaacacagtgatatgttttccttctccgcctgcctggtctcctgatcctgtctcaccaacccctgctgtgccagcagctcctcctctgccagcctggcccgcgggaccacctgtacgccccagctccagacccagagcccagatggtgctgctgatcagagccatactgtccggcagagccactgccccctgcctggctgccgcctctgccgttgctcttgctgtatgagaatccctgaccagctgtgcccagctgtccccccactgttggaaggaacttctggaagtgatccattgagctgtcagagaaaacatcagggtggttctcataaataaacttctccaccctcatctgccgcagtttgaacatcttggagccccggttggtaagcagcgacagttcctccaacatcacatcccttgggacactgatctttttgcccaggttcaagcctgagctctcctgtccacctccagtgagttccatgatcagcttgctggatttcctcttcttattaggggccggggttcctgagagcggcattgtggaggtggattcagccggctgctcgggcagtggtcagctctcctggggtccagcagctttggaggactgagctgctgtgaccggagaacacgagctgggcaggcgtgggggcagcactggcagtgggggagggaagttggttattaatagagatgatgagcgcaagcagctcaaatggcacagggggtactgagacctggaaccaagatccctccctccttgcccggaggctcaggaaggagggaaaaggcctttgggattctcccactgaactgtctgagccagggatcagtctgcccagggactccccttcacattgcacctagagcctgagatccaaagaagcacttagggagaaaca

SEQ ID NO: 129476 - DNA, 609 bp, Homo Sapiens
atatttccccatgggagcgacccatggggttagacccccagcaaaaaatggaacttgccattgacctgctggcctatggggccaaagctgaacttcccaaatataagtccttcaacaggacggcaatgccctatggtggatatgagaaggcctccaaacgcatgaccttccagatgcccaagtttgacctggggcccttgctgagtgaacccctggtcctctacaaccaaaacctctccaacaggccttctttcaatcgaacccctattccctggctgagctctggggagcctgtagactacaacgtggatattggcatcccctcttccagagccttcgggttctcaccaaagggccctgggtctagggcctcctggaaggccatgccatccttctccagcagctcaatgatccaactgagctcatcagaagagctggaagctgacaaggaaggaaggaagggtcacactcccctaatccctccctcaagggctctctctggctgtgcagctggcccagagcttgcagggcactgcctacggccacactgaacttgactgggctcaacatgtggagactgctccccttttccagactgggtatactcag

SEQ ID NO: 129477 - DNA, 995 bp, Homo Sapiens
  misc_feature (805)..(813): n is a, c, g, or t
ggtaaatattattgcaattaagtgatcaagtacagacacaataggggccagttttgtttaaggatcaaagagacaaccactttggggaattagtatcaacttacaatccaagtccaagtatcatcttataatcacttttttctactatattaagatctaatgaatttgatttcttttttgaagttttttcttgtaacatctgagattagaagtttaagatgacttgaccccaaacctttgtttatgtaagaattttttaacataaaagtgtttgtttctgttatgttaccatattttgatgtatatagtgtccagatccatttagaaatttaatatttattaataactgaaactgtttgtcttcctttggtatatagtctcgcatattatattatagcaggccaagataaaattttgacagctctttaagcccacatgcagcagtgggtcagataaccctgtggcagtgacacgggcaaattggcatttgaataaagccctgggaccacctcaacatgcgtagcctcttgtcttaaatgtactccccatggcagcatggaggaggcaagacctgtgggtcaattttgaactggccttactttgatttttaaaacaagagactcagggaaagtactaaaccaaaatctctgattttactttgcgttttctgtagtttttgttttactgagatgcttttgtaaaggaaaataatactgtgacagtttagtaattctacagattcttaatatttctccatcatggccttttacttcacaattttctgaagtctgaattcaattacaannnnnnnnnaccaatttaatctcaaatgttgtttaactgctttaaattcatatacgtagagtattataaactgcagagatgaaaaatgtgttttcacgggatttatattgtgaactaaactaagcctactttttgtgacttatttgtgatgccttgttgataaatatgtgtaataagtatgtttaaaaaaa

SEQ ID NO: 129478 - DNA, 2238 bp, Homo Sapiens
  misc_feature (294)..(395): n is a, c, g, or t
  misc_feature (1002)..(1002): n is a, c, g, or t
  misc_feature (1012)..(1012): n is a, c, g, or t
  misc_feature (1173)..(1279): n is a, c, g, or t
  misc_feature (1755)..(1813): n is a, c, g, or t
gttttgatagttatgtcttttaatatgtattagaagaatacataattagcacacatcaaacctgtgatttcacagatatcactacttgggatgaaaatgatataggataacaatgttagacctcagatcaacctcaagaaaaatactgagtaaatagtacaggagggcaatttggaagtattattaaaaaccaatatataaatatcctatgactttgcaattccacttctaggaatcaaccctaggtaaactttcatacatatactttcacacaggcatagtgatgctcctgtnnnnnnnnnnnnnnnnnnnnnnnnnnnnnnnnnnnnnnnnnnnnnnnnnnnnnnnnnnnnnnnnnnnnnnnnnnnnnnnnnnnnnnnnnnnnnnnnnnnnnnaattacagaagatggattgagctacattaagtaacatgcacagatctcaaaaacatcgttaagcaaagaaaacaaattgctaaacaattcaatatatcatttgcattaaacacacaatatttccaatgagttcacatatgtacgtacaagcattaaaacaaagtctaaacggaagtacaacaaacaacagccactaagaagggaaggatcaaggagtggttggtagctgaatgagactatctttagcaatctaacttctcaaaaggagaatgaattcatgcatatttgggtaaattagaatggacttaactttttaaaagcaatatacagattggaattaaagtgtgatggtgtatgtgaatgagtaaaggctgagctcatcgcacccggctttgctgcctctgcatgatccttatagctaatgaggttagttcctaaaatgaacctcacaggtgttaggctgggatgtggcccaggatacctctcccctatttcctcacaacccagattggggctcaggcacccggttaccagacatgattgaagctacaggtttcctcaggccctccgcttaccaggtagacccatcagtgccctgaaactttcncagtcagcanggcattcagcactttccagatttggaggcttcttctgtccctaatagctgggatcagaagctctcaggggtccaggcatgagggttatattctgaggggtcggcacctagtggggctccacgaagggataaggcctccagtgaggagcttgacatcattannnnnnnnnnnnnnnnnnnnnnnnnnnnnnnnnnnnnnnnnnnnnnnnnnnnnnnnnnnnnnnnnnnnnnnnnnnnnnnnnnnnnnnnnnnnnnnnnnnnnnnnnnnaagtgggaccagaacccataactgtctgtccccagagctcatgctccactcctagtgcctgaccaaatcctaccaatttgtcaaggtctagcttaaatgtgacctccaggaagcctagaggggatcactcacttctcaaattcaaagtacatatgacattcagctaactatagtcattcatgaacccactgtatctccttactaggagggtagagatcatgtctgattcaactctgtattccaagcacagagcctgacaaatagagggtgttcggtatgtgtctgatgaatacataaatgaatgaatacacaaatgagtgaatgaaggcagtttcaggtaactgcctgagactcctatgaggtcctgagtacctttgcccagctcaggggtgctgtcatcctaagctctcttggaatcaaattcagcctaggctccttctaaaacaggtctccaatatcctttattattttgcaannnnnnnnnnnnnnnnnnnnnnnnnnnnnnnnnnnnnnnnnnnnnnnnnnnnnnnnnnngtgggcaagaggcccaaggggcccacgattatgggtgatgagggggaggaagggggtgtgtgtgatgaacagatggccctgttcagctcagcacctcctttcagaggccagaatactccctgtcgttcaggaatttttgctccagacctaacatcacctctgttcctcttcatgcttgattagcagtgcctaaatcccatgactacaccaaaaagggccaggaggtagggggaaggttgggagtcaaatatccagagattgggagagggacagcttagggatccagacagggcgggagggcaaaaatactgctactgctcatttggggttgggttggcatctgggtacttggtgaggtccaaggtcaggactttgctgatcacacagtcccctggctcaggatagacccaatggggctctggcct

SEQ ID NO: 129479 - DNA, 667 bp, Homo Sapiens
tttttgagaagttagattgttaaagatagtctcattcagctaccaaccactccttgatccttcccttcttagtggctgttgtttgttgtacttccgtttagactttgttttaatgcttgtacgtacatatgtgaactcattggaaatattgtgtgtttaatgcaaatgatatattgaattgtttagcaatttgttttctttgcttaacgatgtttttgagatctgtgcatgttacttaatgtagctcaatccatcttctgtaattgctgtatagattgtcatcatatgattaccacattttacttacgcatttcttttgtgatggacattaagactgtttttaggttttgctattacaaaatactacacaggagcatcactatgcctgtgtgaaagtatatgtatgaaagtttacctagggttgattcctagaagtggaattgcaaagtcataggatatttatatattggtttttaataatacttccaaattgccctcctgtactatttactcggtatttttcttgagagttgatctgaggtctaacattgttatcctatatcattttcatcccaagtagtgatatctgtgaaatcacaggtttgatgtgtgctaattatgtattcttctaatacatattaaaagacataactatcaaaacaaaaaa

SEQ ID NO: 129480 - DNA, 1016 bp, Homo Sapiens
  misc_feature (822)..(822): n is a, c, g, or t
  misc_feature (923)..(923): n is a, c, g, or t
  misc_feature (957)..(958): n is a, c, g, or t
gatgttgagagaacatttattccactcagtcagctcccgcaggagtcagcaacctgtagaaatatccaggctggacgaccacttccgtgcactcctgcagagccggggtgggggtgggggtccctgatgctcccactgccccaaggaggtaagagcctgaggcctccgacatccacttttgacccaggggagccagcccacagcccaagaaaaggcacccttgagttaactcacataccctctccccacgtgcactgcccattaccggccaccgacaagctccagcgcttgaggcaccagtcagccgacaagtgtttcctgagagttaggagcccagtcctgtgctagaccctggtaggactcaagaggaaatgacagtcccttgccctcagggagctaactgtctagttagggactcaagacacacacggaagagactggagcgtccatgggacagcacgcaattcgggggcaggggctcacacgggacctgttcggagcaggaaggaggaatgtgggctgggtggtttgggaagccgggccccgtggatcagaagggcttagctgggtagaggagaggaaaggggacatgtccgagcagtataggggaaggcacagaggcaggaacaagcacagcacagtgatgggcagagggggacacaaactgcaccattagcacaaaaggggcgtgtgtggaggtttcctctaggtcgggcaaggatcatagccagactggaagctcctggtggctgggagcaccttctcgttctcggatctccccctgagcattctgctattccagggtgaggcatacagtagganggtaacaatgtatgatccaacctgcatcggagactgcaagactccagtgcagggatccacaggctgccctccaaccacgctgacccaaccatccagcctgntcagtttgcctttctgatgtcatctggggagganngtagacttgtactcagctgacggtcagtgtgaaggaaagggcccgtccgctgctgctg

SEQ ID NO: 129481 - DNA, 1004 bp, Homo Sapiens
  misc_feature (917)..(917): n is a, c, g, or t
ccctgggatttcgaaccaatatactcctagcctgaacaacatagaacatttcctttccattttggtagaaattattttttaatgtaaattatattgtgttctatttgtttccaatgtcttgaaaagttcaatcacttctccaaattctccgaataaacataagaaaatatctctccccagcactacccggtcccccagtatcaccatcctaaaggcacttccacttcctctatcatcagggaaggagtgtgcagttctgatttagctcctcagtggagtaaagggaatttagaggaagggggatttctgcagaaattgtcagttacacaagtaagttcctcttggttccccgtttcatcaaaagtgaaaaactgttcacaggagtgcccatgtcccctgtttccctatgcatcactagagccaagaggggactccgccagcaaggcaccctctgctctgtcccgcagatcacagtccccgactttcaccccattgtttgtgcaatgtgcagaactggagcccaaagcagcgggctcaggatcactctccaggcccggcgggcccatagactccttccttggctgggaagaggggctttcgtgaaagcagagcttgacaagccccagtactgtcatggtcaagatcaccaacactacttactgctgtgctcacaaatatgaaagaccacggcagaggaggagtcgaaagcctgaggagtggcagaggaagtcgtagaattaaacttggaaatcacgctccctgatggggtgatagtggcctttgactcggcttgaagggacatttgaagggtagacatcgtgctctgtgatccccatcgaggaatctcaggaatagatgttactgaattgtcttgttcagggacaagtggtgtctctcccagcttctcgtcgaccctnattggccatgttctctgcggcacggggctggttgcagtggccggcgggcgcctggtgggcaccccggtccccccaagggtcggctgt

SEQ ID NO: 129482 - DNA, 3272 bp, Homo Sapiens
  misc_feature (965)..(973): n is a, c, g, or t
  misc_feature (2483)..(2493): n is a, c, g, or t
  misc_feature (2652)..(2702): n is a, c, g, or t
  misc_feature (3150)..(3150): n is a, c, g, or t
aggtgtcatttttactttatttaaggaaaaaagggtggggggacaacagtaattttcataatacacagtagacaagttagcactgcaaaaaaaagggctgtgtacttgccaccagtctgctttgcagcttttataattagtaaatttaatgcagtttgtcatttgtattactatttagcaaattaataattggcaaaattagggtaagtgtgctacaactaagacgaaaacctaaataacccataaaaagtcacttaaaataaaccataaatatgtggtgcgcattagtgtaacaaaaccatttttgtaaacattttctccaacgtaacatgtgcatgagaaaagagtaaaaaacactgcactcaatacagaaagggttactctgattttaatacagaaaggttattacttgtgaaagctctgactaaacctagagacatttttgttttgtttggaagagcactcctctaacagttcaatgttccttatgtaatggtgtcattgcaatactgttttcttgtgtaattttgccatattggcacttctgtggagaagttactaccctgtaaaaggggggaaaataattcctttcctaaaagaatctaaacatttcgacgactcccaatctttaacggagaaacttcactgggtccctgcatcaagctatagcaactcaatctggttgacaagggggtgaggctaagacgggaaggaaaaaagccaagtaaagcacagaccaggaagcccccgccgagaaggacaaagggtgttccaatttcagtaacttaagcccaacaatggattcaattcagttcaccacaaacaccaccagagtgcccaccgggtgcctggagctgcacaagcaagccaagcacaactcggtgtgagctcagacccctttaccacctatgggaaagccagcaagttctaagcacttggtaattccaatgaaacaccatttgcannnnnnnnngtgtaacatttgacttacagacatggagcttcaagtctttggataatgttaagaccattatgccacatcctttgttctctgccttctcccacttagcatcagacattgagcatttcttcaaagacatctgcccaccttttactgttctccacctgtgcctttccttcttctcttgatatgtacacgagtgtgttcactgtggcatgttttatcttatgaaaagcctaaacatggatataaattacaagcaggaatttaattctaactaaagtcctgtggcgatggaatccagcctacctcaaatccctttaaaggtaggattaatttttcaaccttctctaggttaactacaaaccagtaggcggctttggccttcagcactgctccaaactcatacaaatgaaacatccatttccatcttcttttacttccccaaaaagtaagcttctcagcttgtctttacaggtatacacaaaaccaccagctgctgtgtctgcattcatgagtggatgtacttgtcttaccagatgtttgtagctcaaaggagggcctttttcaaaaagatggaaccaggaacaggaaactgacaagaggtcagagtgggtgccaagtgggatgggaagcaaccaggtacaaatggctgctgtgtttaggtgggtgggagcagagggaaagtcccccattttcacaatatacaggagaattaaccacaaaggacaaagatcaagcctaaaaaacagcaagtttcttttgatgagtgaggttaaagcagccataatgcagttatttccactcagaactcgacaagaggaaagtaagatggcaggactgtgacatggagtcgtgatcctttcctgagacggtaatatccttacgggagcttgagtgatgaccatgcagccatgaaacgaattctttctcaagacatttattacaaatgtcatgaatatattcataaagtaaaattggtttaaaaaaacagagaacaagagagcaagtgagaaaacgagaaaagccaggacttcgatattacacctaaaacacagaagatgcccactttatgaataagcagaattaactacattcttaaaatagttttagtgcattgcatttttagaaaagggaaactcccccacccccaagaaaaggttcctgcaacactgaacagtttgtgtgactattctaatgtaaccacctgtctgctaccaacccctctacatcgagaacaatgagatcttgtgtcatgggctgcagttgccccatcaacctctaatggtgaatctggtaaaaacaaagcattctggtttctaaacttgtaagtaaactgcatcagccttaaggctatttcccatcttcatggacagttcttgtgcctgctgatttgtgacaataaaagtcaaacttcaatctggtcgttttggtattaagattaaattaaacattaatggtttcttccaaaaacatataaactaaatcacctctcaatgcattaagaacaatgaggtaggcnnnnnnnnnnntaaacatgtggtttgaatttttttctttcttctgcaagtgcagactgtggtaaaacttttgttgcacgtctaggtttaaacaaaaattaaacctttaactgaggcagtgctaatactgtcacacgacaaagttctggccattatacaaaatgcacacgnnnnnnnnnnnnnnnnnnnnnnnnnnnnnnnnnnnnnnnnnnnnnnnnnnnagaaccatctgcacatgatttaggcaacctggtacacagaaaaatgactgagttcttggccaggacccccacatcttcatagcacaccagaagctccattccatctgtattggggaggatgatgattgcatggggtttgatgctacactggatatgtgttggtagataaatgtcatagactgatcctgaatccacatcaacagcatggaatccagcacaggatccatagatcactttcaacctctggccttcctcaacagtgagatccaccagtaatggcttatgtacccaattctcccaaatgacttaaaaggcccataaatttgtgatatggctttggtgcccacgcatagacttcccacagaactcttcaaagcaatcaccagaaatttgattctttcatattttacaactttataatgtacacatccttccaaatcccctacgngttgtccatccctgcttcttctcaacttctggatcattgtgaagtattttatttcttaaccaggacaaatagtagacacgtaacttatcctttttgccagatattgtcaccaagacattcaa

SEQ ID NO: 129483 - DNA, 949 bp, Homo Sapiens
  misc_feature (695)..(705): n is a, c, g, or t
  misc_feature (753)..(753): n is a, c, g, or t
gccattactggtggatctcactgttgaggaaggccagaggttgaaagtgatctatggatcctgtgctggattccatgctgttgatgtggattcaggatcagtctatgacatttatctaccaacacatatccagtgtagcatcaaaccccatgcaatcatcatcctccccaatacagatggaatggagcttctggtgtgctatgaagatgagggggtttatgtaaacacatatggaaggatcaccaaggatgtagttctacagtggggagagatgcctacatcagtagcatatattcgatccaatcagacaatgggctggggagagaaggccatagagatccgatctgtggaaactggtcacttggatggtgtgttcatgcacaaaagggctcaaagactaaaattcttgtgtgaacgcaatgacaaggtgttctttgcctctgttcggtctggtggcagcagtcaggtttatttcatgaccttaggcaggacttctcttctgagctggtagaagcagtgtgatccagggattactggcctccagagtcttcaagatcctgagaacttggaattccttgtaactggagctcggagctgcaccgagggcaaccaggacagctgtgtgtgcagacctcatgtgttgggttctctcccctccttcctgttcctcttatataccagtttatccccattcnnnnnnnnnnncttactccaaaataaatcaaggctgcaatgcagctggtgctgttaaanccctccaactcccaccacccatattaatatgtcggcccgcctccggccctcaaaaaaggctttcttagaccatttccttttggacccgcccggccccagcaacgttaaactggaaccctggctccactagcctggtcttccccagggaaaatccctggggtcactgaattaggcgcctttggaatttcctcccccc

SEQ ID NO: 129484 - DNA, 678 bp, Homo Sapiens
  misc_feature (144)..(245): n is a, c, g, or t
  misc_feature (274)..(282): n is a, c, g, or t
ccaaaatggggcctggaatgcattggggcgatcatagctcactgcagactcaaactcctcggctcaagggatcctcccacctcagcctcctgagtagctacgttgaaaggcatatgctactacacgcagctaatttttaatctnnnnnnnnnnnnnnnnnnnnnnnnnnnnnnnnnnnnnnnnnnnnnnnnnnnnnnnnnnnnnnnnnnnnnnnnnnnnnnnnnnnnnnnnnnnnnnnnnnnnnnatgagccactgcgcctggcagagcctggnnnnnnnnnaatacttaatcttagccaaaaggctgagaagcgatggagaatgtggatttttggacgtgaattctgttgggtttggttttccagtagcctattctcttcgcagcctttgaacctaacacctctttggccccagctgctgtctgcacttgcagaccctcctgcaagctcaccctgtactaccgccgggggatgccgtgatcaaggagcatcctgcctgtggctggcagaagaggccattcactgcccattcgaaatctcaggcctcctctgactctgtaggaccctgtgccagtccaaggggggccggggtctcagctctgttccacagtgcacacgcctgacccaccctgggcccttcttggccccaagactctccctcggctactccctcgtgcc

SEQ ID NO: 129485 - DNA, 1387 bp, Homo Sapiens
  misc_feature (1228)..(1228): n is a, c, g, or t
  misc_feature (1353)..(1353): n is a, c, g, or t
ggtgtgcctgtcgtgtgtctgctgctgctctgctccgcgggtggctctctgtctgttcctcttttcttcctccgctgtacgccctctcttatgggtcgtgttgtctcgctcgtcccctgctcttgcttctctccgctcgtgtgtttgtgttctgcgcctatgggcccgagcctctgcgcgctgtgtgcgcgtcgagttctgtgctgttcgttgcgcctgtgttcttgcttggtctcttccccctctgctcaggtgtgtctactctccctcatgctgctactgcgatctcgtcttctctctgttatttatggagccgtgcttctgctactgtgcgtgcctacccttctgtgctgctatcccgccggccaggtttgtgcctcttctgctctcatctgcctgccttgctctcctcgccctcgtggccgctattttggtgccctctgccaatggggggtgggtgctgtggtccgtcggtgtggtgtctacggatccgttgctggttcctcccgccttgtgtcggcgctgctcgcccggctcgatttcatcgtggttgggcgactccatcctcggctgctgttttcctcgcgttgctgcattttgcttctcggtcttcctgtcattcttgcgtttcctttttaatccattcttttttcttcttattctgttctattattattctatgtccttttttggcaatggaaatttattataaaataccctcagctggcaacacagcaggcccaagccaacgtctcctgcaggcctcggacggccagggctctggctggcccccagagtcaccgtcctgtgatgaggcactccacaaaaggaaataccaacctcatgaagacagcggggactccatggtccttgggccatgacttgctggtcctcagaggcccttgaggtttcaggccaaggctggggcctgatgcccacctccctgcccgccctcctcgtctcccgggaagggagtgggtgagtcatgcgcgtgggtagagtgaccagaggctgatccgctgatccttggagcccgcggccagcaagccatcggcggtgaaggccacgcactggacagcggcgctgtggaaggccagcacggccagtggctgcatcgtccgccagtggaacacgcggatgcggtggtcccagcctgcggtggccaggatcttgcgatctggccggatcgtgacctcggcgatcccgggattggtgagttcatgagtcncacgcacctgcagggcctgctgccagtccaggctccagacagccagcgccttccccgcggagcctgagatgcccctggccttctgggagtcaaagtcaaggtccatgacgggctcctcatggcangcgatgcggctgcacaccttctgctcagagacgt

SEQ ID NO: 129486 - DNA, 1368 bp, Homo Sapiens
  misc_feature (39)..(39): n is a, c, g, or t
  misc_feature (65)..(65): n is a, c, g, or t
  misc_feature (73)..(73): n is a, c, g, or t
  misc_feature (613)..(613): n is a, c, g, or t
  misc_feature (1227)..(1283): n is a, c, g, or t
aacaactcttcagatttattggtcaggaaggctgccagnaatctgtcctgagtgtccctgtactnactccttnaaaagacaggccggcccacccaggtccacttccactcagcatcttgattccaggaagcagacagcgttcaggtcctgcccttctgtgactccctgcaccactgcttcttgaagccctttgtctttaagctttttgtccagctccaaccccacccaggtgccagggtctttggaccccaggggagccaggtgtccacattccctggcaggagtaggaggttgacatgaagcaggaggccgatgcacaggccaggtaccagagtatgatcaggaggagctgggcttccccactgttgggtagagcttgcgcaggctggagtccaggaggaaatccaccgacttgtcaatggggtggataatgatggggatggtcaacagcccaagcgcggtggtggtccacttgcggacagccaggggccagcgggtggcagtgcccaggacatagagagaggcagcacacacgcggttgatggtgaagcccggaatggccacagaggctagagcctgccatacaaaggtgtcccaccacagccacggtcanccctggcgctgcggcctgcttcaggggctgggcacctctccagccttcttgcctttgtcaatggcatccgccagcacgtaggagctggccacgccatagctcagccacaccaccgccgctggcacaagagagcggaaagcctcgcccacctcattggcatagcccaggtatcgcacccacgtgtcccggtagagatcgcgctctgcgccccgcggctgcggctctgacatgactctcccgccacggccccggccactacagccggtactggctccactgcagtctccgccgccggcacttgggtctgcccggccgggacccgccgaaagtcccgcgccgaaggacaggtcaggaaatctccgccagcagggagcgtctgcaaattccccccgcgcaccgaagcccctctcccaggctcgggttttacagactggttttcgtcacgttttctctgagctgttggcgctaatcgctcccaggactgagtgtaggttttggagccaaagagacaggggatcaagttgggggatgctacactgcaaagcttgtgacctcgggcttatccagcatctctttattcatttgtaaaaacgaggggagggacacagggctgnnnnnnnnnnnnnnnnnnnnnnnnnnnnnnnnnnnnnnnnnnnnnnnnnnnnnnnnngaaaaatctccttgagccccaaggggttcgaaaaacagcctgggacaaaataacggaagaccttcggtctcttactattagaaaa

SEQ ID NO: 129487 - DNA, 364 bp, Homo Sapiens
ataacctcttcaggatttattgggtcagggaagggcctggccagagaatctgtcctgaggtgtccctggtactgcactcctgagtttctccctgagttgtctgccgctccttgttcagccataccaccatggggtgactctgtcaagcacctgggggtcctgggtgcccagcttgccaagtgatcttgggcctattccttgccctccctgagcctcagtctctcatcctccatgggaggatgtaattttcctgaaaaagacagggccgggcccacccagggtccacttccactcagcatcttggattccagggaagcagacagcgttcaggtcctgcccttctgtcgtcttctcgcgccgtata

SEQ ID NO: 129488 - DNA, 1184 bp, Homo Sapiens
aacttacggctaggtacgaggcctgggtggtgaattcggcacgaggccagcctcagccctacccacacagcagtacgccaagtccctgcctgtgtctgtgcccgtctggggcttcaaggagaagaggacagaggcgcggtcatcagatgaggagaatgggccgccctcttcgcccgacctggaccgcatcgcggcgagcatgcgcgcgctggtgctgcgagaggccgaggacacccaggtcttcggggacctgccacggccgcggcttaacaccagcgacttccagaagctgaagcggaaatattgaagtccagggagggagcgccccgggccgcgtccgccccgtcccacactacgcccccgccccactcccggggcctgctaatctgaggccgatccgggaccggcctccttgcgtctcccattcccaagattgtcccgcctctgccaatccccgccgtccttccagcccacgacctgccgcgccgaggagcggcatctgtcccgtttcccgattgggtctgtcgtctctctccgcctagcgacagattccttctattaagggattggctcgctgagttctaagctctaaatgggtcaactcctttgttttccgcctagcgacaagggatttgctcgcacggcattggctccatcccctagtcgctggacagctcttttttttgattggctcaaatcctgtaaagggcttgaccagtctctacatagtcaccgtccgcttttcctgagttctccctcccaattggctccagcttcctgggggcgtggccaagccctcctcttcccagaattggcccggggccttcaatttacgttctttacactacggggactggggtcgtctttgcccacgtcccgacaacttgttccctgaccccctcagggatggccccaaactgtccctgcctctggcaccccctttcattggttccatccatccccacaacagcctgccaatcgaagcccgtccctgcatccaggatggtaccagctcccgcccctcgccccccacctccacaggtgccttaaagggccctcgtccacccaaggtggggggcaggggccctcactctccggccctggtgtgggggagagagtgaggggttgggggatcggcagttgggaggggcgctctgagattaaagagttttacctttggggtt

SEQ ID NO: 129489 - DNA, 844 bp, Homo Sapiens
  misc_feature (230)..(239): n is a, c, g, or t
  misc_feature (411)..(458): n is a, c, g, or t
  misc_feature (464)..(512): n is a, c, g, or t
ccccccgggtaaaaaaattgttttttcatcaatgcaccaatacccgttattaacacacattttttcttcaccccaccacaaacataaatcgaccccaggtttgtttttcaccccacttttagtaaccgccttaacaatttcttatatatttttgccccctttcagagagcggcttttaaattatcttctcgttgtggaggatattttgtcccaccccaatatttgtgctnnnnnnnnnngccagcaattaggtttctccttttaccacaaattttttccactgtatggcggcgtggttttccaccactctccaaacgttgtttaaaatcccgggctcctcctgctttctgcgtataataaaatgcacgctccatctataggggggccccctcttttcacacaaaaacaccnnnnnnnnnnnnnnnnnnnnnnnnnnnnnnnnnnnnnnnnnnnnnnnncccccnnnnnnnnnnnnnnnnnnnnnnnnnnnnnnnnnnnnnnnnnnnnnnnnnatctcagaggtaaaactctttaatctcagagcgcccctcccaactgccgatcccccaacccctcactctctcccccacaccagggccggagagtgagggcccctgccccccaccttgggtggacgagggccctttaaggcacctgtggaggtggggggcgaggggcgggagctggtaccatcctggatgcagggacgggcttcgattggcaggctgttgtggggatggatggaaccaatgaaagggggtgccagaggcggggacagtttggggccatcctgagggggtcagggaacaagttgtcgggacgtgggcaaagacgaccccagtcc

SEQ ID NO: 129490 - DNA, 968 bp, Homo Sapiens
gtttttggtggtggtgtttgtttatttttttaaacccacttgtagtttgggttcagctggaaagcaggacataccgacggagggagggtggtcgcactagcggggttccgcggcagctttggcgggaagccccaggcccttgctctggggaggtaggtcctgtcgtccactcccagccggctcagggaggcggccagcccttccgtgtgagtgttccgcgcagaggaaagttgtctttctttcttctgatctgtgtcctcaaaggcccagccaatggtttcccaacacagtgccctgcagctgagggacacgactccccaggcaggcctgagagtctgtctgtctgacaaggaacacgggccggtgtctgatgccagaaaacagactgggacttggcttcttggaggcccgcgtctggggcaccccatggggctgctctggtggcggcctggctgtctgggcccccgcccctacagctgccccggcctgatctgtggtaccctttccacaccccccaccctcatccctcggagaaaataatagaataaaataaaaatcaatcagaataaataccgactcggccaacatttacatttacatggatggacaggacgatccccaaacagtgaaggtttacagactggtcaaggaaggacgaacagagagaatggggtctgagggtgcacatcccgtggagggtggcggggctcctggcctcgtctgggtgaggttgggggcctcgctggggctgcggtcccagagcttcggcaaagccaccaggccttggggagcagggctgtggcaagcaggccgcctcggagaaaaacaatgactaactcatcctgacaggcagtggggagactgagacaggatcaacatcagatggctggaccgcctcttccatgcgccaagaaccgcgggcgaggggaaagcaatgcaagccttagaaatgcaatatccagctctgc

SEQ ID NO: 129491 - DNA, 2415 bp, Homo Sapiens
gcagcaaataaaaatagaaaaagtctacttttatttattggtaaacataagacaaccaagtctgagcatctggtgcagttcccagtgacggcacttgccctgcacacgctcttgaagcaccaggaaaaacacacaacacagtaagaaggcaaagtggctgggagtaaggtatctgcagattcaaactttgggattgaagtagctggtaaacagaaaggcaccgaatcagggtctggagagacccggctgctggggaggaatctggcctgcccaggcagacagggacagacatcctcatttctccaacagctcctggaagccgagtcaccccaagggcttggagagctgttagtctggctttggagcagtgaaggtagcacagtgctcagcaggaaggagtcaagactttgctgtcgagcacagggaggctggtgcctgaggctcagcgtgccaggatccacgcctcctcccaggctgcgcagtgagctggaatctctccctctcctgtgggagcagctcttccccttactgtctgcttccagctctggcctagctatctgggactcttagcccttcaattcgccgaggtgggcaccattcctgctgcagccaatatggccactgtgggctggcccccagctggcatatggatggccctcaacgaagccatggacatgggtccctccccaaaggcacactgttaaaaagatccatttggctacaccaaggccacctcttcctatttggcacggtgaggtactggggggtcttgcagtctggtacgcctgccccccgcaaaccagagcccattctcaaagtccgggctgctccatggaatcaggagtgcctccctatagtcaggcactggaatgtagccccatgcctgctggcggactccatccgatcagaggaacagaaagcacccaccccaccctcttttatttttggcatcacaaagacctagtgaccagattgcctgccgctgccacctctgggctgccctgccttgctgcccacgctgctctcagaacagaaatcctgatactggtcagaagccatacaagctagctcccagacgtgaccacctagaggcagctcacagtcttgagttaacaggggcctcagggccgaggctgacagatccagcttcccgggaccctctaccaggcgggcccccttagactttgtccagcttccccaatggcacaggtctagtttttcagctggaaaggagccaagcagggaacccctaaaggtgatggggattgtcagggaaaatgatactcctcaaggaatgcctcatccacttgggcagggccccacacaggacgtaggggagttgttggctggaccgcacgggccaacacttgcagcacaggcagagccggcagacgggcccatggacacccaagtgccagcactgctgtcctccaggtctccggggcagtctgtgggccataattagaatgaagccagtcctttactagcagaaggtaggtcctgggagtgaagggaggggcttgcctgccaagggtcctgcccactggactcccctggacctgagcacctccactttgggttttccttgggacacactgaactctgggctttcttagaaactggaacatgcttcagtgggcctggggcaggaggtgggtctgggtttggaaggggactcaggtcagttctcaccgggacacaggcaggagggaggttggcagccatagcctgcctctcctgctccgaggcacggaggctcttcagcgtggaacccagtctgtgggaccacccccgccccacccacgctggcttgtgggctatggatgctgccctgaactggggctagatgtgccatgaaggcagccttttagggctgctgggctcgctctactccagctgcctgccacttgtcttttcacattaaggccccagccagccgccacctcgtcaaaccgggcaagctgcgccacactcactcaccgccgcgctcacagccaatcccacccagaaccacccctgcccaccccatctcccaaaagctgtggccagatggagggaacactagtcccactggccatgcctccccacaatactctctgcccactccagggctgaaggcaaggtgggccagaagtcccctcctgacacctcagcccctgcaagacagggaccaaagctgtgattcagtcacgcaggccagggaggagcagttcaaactcagcaacaacgcagccatgaagaagcccgctctgttcaagacagtcacctggagccacaggtgccaccgggtttcctgaggcaagaggggagacgccaaagaggcctgcagaggtaggaacaagtggagaccaacaagcagtgaggccccctgccctatgtcctggacagagtcctcgtccgactacacccggctta

SEQ ID NO: 129492 - DNA, 536 bp, Homo Sapiens
tttcctttctgaagatttactcattcataaaaagttctccaggtacaaaacaacaacaaaaaaggtattctcaaaactgtagcctggcagagtgagtctgagagatgcggaccagccagccacgcctgggaacgctgttggcctctctgggaatggcatctaccaggaaagcagccagggatgtcagataacagaaaccccagaggtggcatgggaacatttgagggagtaaagaactggcaactcaaggtagggggaaggtacaagggacacggaggcttgaagcaggatagtacaggctacaacacagagtgctgaggaaggggtgggtggggaaggaaagcaggaaacaatgagaacggaggaagagccccgctaacttctctcagctgctctgcatttagacaagggatattccccactccgcaccaataccaggtccagttactctcaggctgtcctagggtctctcccaccacctgcctctacaaacaaagctgctatccagggccagggtcaacatgaggctgggtgcg

SEQ ID NO: 129493 - DNA, 2345 bp, Homo Sapiens
  misc_feature (41)..(51): n is a, c, g, or t
aacagtcataataatcctttattagtaccagctcttaaaannnnnnnnnnngccagagctaaacaatttaatataaaaaatgccattttttgtccatacagtatttataaaaaagtacatagtggttagttttgcaataatttctttttagccagatgtcatatcatcatataaatctatgaatataacaaatgacataagaacagtataaataagtttttgtagtatttacacttacacagaaactagcccaaatggtgtcctaagaaattgtttacagttaaagtgaaactactgattcaacatactgacactccaatgctttttaaagtttcgtattattttctatactagttttggctatgattttgcatagaattacttataaagtatgagcatttcacatcacagtaggagcttttagtataatagtacaaaaaaactagctcagaaaaggtcaaatcctcctaaatctagtttttcttaacatctggcttcttacttttgggaacaaggaaaacattgccatctcttgtttgctgcagggagtattcactaggagaataaggttttccatcttcatcacgtagcatgctgaaaacttcgagatataaggtgctgagttgttttttcagtaggtgaaggcttttgtcattttctccttttttctttgagcaatttttctttttcatctttcaaatgatctaaatcttgctctagttctactatattttccagttttctttttctgcaattctgagcagccactttattcttacccctcctacgtatatcccgaattaatgcaagttgagcttcattgaactgctctttggacatcatttcgttgaagtcaacaacagggaggttaatgattttttctacagggaatgggatatggagagcttttgccctaagttcatctcttgtgagatgagcctccaagcggcttgaatgtttgtcttttgtgaatggggttttccgatgaccaggacttacaggcaattctttctctggtgtgttctcacattgggcatcatgcacgtgagtgctctgcccctgagatggtgacaagggttgtaccatatccccagaagaatgtactggtgttttaggaccattctgtttgacacttccaggggcactatctagctcttccacttcagaatcactgaggccaagtagtgtgtctccatagctggaagattccactgagtgttctggtgatgccacactgggacttgtgtttagtgaaatgccggagtcagaatcattgaattctgctgtgctttcagggtggttttggttgaaagctttgcaaagtgatagatcagaaacatcaatgggcccatttagaagttcagagagtgaatggcttaaagtagcaggtgagggcatgctgttgctgatactgggctcagctatgaaagcagaataaaattcatcaccaaaatctgtgttgactgtggcatctgaatttaatgagttcactgtcaactggttggggtcttctgtggagaggatgctgctgaaggaatcctcaaaagcattaagaaaatgtggactacagttacctacttctttttccattgagggtatagatgagtaaaaatgataattgtcaacttctgtcagtttggcttctggacttggaaccatggtagtctcaaccagcttgtcattttcaatattaagacactgtaactcaggaatggataatagctcctcccaaacttgctcaatgtcctgttgcataccgtctaaatcaacaggggctacctgagcaacagaagtttcaggtgactgagcctgattagtagcaatgaagactgggctctcgatgtgaccgggaatatcaggaacaagtgactgaaacgtagccgaagaaacctcattgtcatctacaaacgggaatgtctgcgccaaaagctgcatgcagtcatcaaagtacaaagcatctgatttgggaatgtgggcaacctgggagtagttggcagatccactggtttctgactggatgtgctgggctggctgaattgggagaaattcacctgtctcttcatctagttgtaactgagcgaaaaaggctttctcttgctccttttggagttgttcttgtctttccttttcaagttttttctgtttttccagctcatactctttccgtcgctgactgaagtcaaatacttctcgacttactccaagatctatatcttgcctccaaagtatgtcaatcaaatccatgtcccttgacagcacagaagagaatatcccgtcttacacattttggaattgcaattctgaaacgctaaatccaaagacaaagccgctctggggaaaatagc

SEQ ID NO: 129494 - DNA, 1112 bp, Homo Sapiens
  misc_feature (998)..(1032): n is a, c, g, or t
ttttcatggtacaaaaatgtttatttaaattaaatatttgcaacaaattaatattgacaactgttccaaagtatgagttgttctttcaaaaaaacgaaacagtttagcttaatgtctgtgatactgttttatgagattattcatacatgctctggactgcgcatcagtcaatcatatcatcaacaatttactatttattaccaaatggcatataaagtaatagcataaagagtaatcataccttataagtgattttacaataggacatcttagaaggacaaaaaggatttatcaacaatacaaaacataagataaaaataataggagattatataaaacatatttcatacaggaaataatatgctaaaatcaaaaaaccaacaactgtctttcagcacactgttatgcatgctcctttaaaggaggtttgggggaaagatgaaaatattttgggggcaggggtccagggctcagaaacatttttggaatcacagtgagtttctgatttgcgggaagttgctctaaagcactggctgaggactttgcctgaggacctggctggtgaggaagacaaattctcacagcagctaaaggaagcatgcttgggataagtcaggggctgtttcagttagggaccagttcagcagtggaggaagagcagaaagaagagaaaaagaaatcccagaaaagagagtaacggaagctggagacagccgggaaggaagcaccttttgaatctacagaggggaaagtgtgtatccagatttgaagacagtgactttgcttggttgcaaagtccttttaggtaccctgggtctttggtcattagaaacagggaggttggcaacaagttgtcattgttaataaaaatatctgatttagactttgagtttaggagttgcatgaagtgggcatgtgtctctcacacgtctggtatacattcagaccccggccgtaatggccgaattcccgggcatatgtccggtaccgtcgactgnnnnnnnnnnnnnnnnnnnnnnnnnnnnnnnnnnncggccgcttcctcgctcactacttcgctgcgctcgtcgttcggctgcggaagagctagggcgccctatagtgatcgatca

SEQ ID NO: 129495 - DNA, 1283 bp, Homo Sapiens
  misc_feature (463)..(500): n is a, c, g, or t
  misc_feature (503)..(543): n is a, c, g, or t
ttttttgaccatagcgtcccgcggggtaataaaaaaatttttgtcaccaagaattcactaaatgctccgcgtgggaggccccaagacttcttccaaaaggcacgtgccagggcaatctattgtcgcgggtcatatggtgtaaaacccaccccgttagaaaaccacccctcttcaagaaagttgtatatatgattgtttcctcccttctaagggggccttccaaaaataacttctcgtgaggggagggttttcggtgcccacaaatatggtgacacccgccccggagggtaaaggggtccctccccaaaaggtggccgccggctagacaccgttttgtccccagcgtcacgcagaacgtggtgttaaaaacgaccgcggcacggggctcatggcttaataaaaagcgagctcccctaataagggggcccaccttggacacaaaaaacggggaaggcggaaactnnnnnnnnnnnnnnnnnnnnnnnnnnnnnnnnnnnnnntcnnnnnnnnnnnnnnnnnnnnnnnnnnnnnnnnnnnnnnnnncagtatcaaatctagttttaatcttctataacaagtcaccttttcttcccacctatatccaactgcgcctagtggtacagtgagaatgatggcctcctctctttccctggagtctgaggtattggcaacagcagtcacccactgctgagaggacttaggacccagcagaagtcaagggtcattagtgccctgcagctgcagggatagcctcacttcaggtggggatggggtaggatgcgggcaggacagggcctaggaaaagaagaagggtacaggagccttcctgactgcagaagtttcctgtttgtctgaaggcaggaaataggagctaacggagtctaaggccaaaggttatcttttaaatagagcataggatcagggagctgggacctcactagccactgataacttccagcgccacccgggtgagagaaaaggcgcagaaatggaaagtgaaaggttcagggctagccaggcaggcccctccttttctccccgcagagcgtgcagggggaaggccaccgtgggatggtgctccggaacctggactctcttcactcagccttcttggacactcggcccatcttggtgcggatgtttcgtaggaggaagaaggcagctgtgctggccgcacaaatcacttcagccacccagaaggctgtgctccaactgtagtgcttggcaatggtgctgaaggcagcccagccagaaagccgaccacattggccatgcctcgtcca

SEQ ID NO: 129496 - DNA, 1138 bp, Homo Sapiens
ttttttttctgtttcaaattctttattatacatcatggttgcacaatttgaggctggttaaatacaattggttttcaaaatctctttgaatattttctggcttactacatgcaaatgaccatgaaaatatttggcattttaaaattctgaaactctgaataggcacttacatgaaggaaaacattaccattcatagatatccacatgtagaacagatgctccagcacatggtggtacatggacccttttgccagtaaagttggttcctgaccattttatcaaagtgccatagtagtaaaacaggtttaaagaaatgtaatttgggttatttagcttactcataaagtaaggttaactgacaagacttgcactgaagtgcataaaaaatattggtacaaaaaccaatgaaccataagtgaaagtagtttccatacagcaggtttcattttggttcctacactccacatttagtgtatttgcgatcagaccccatgcatatgaatggatgactgcaatcttcttttttagagacttaaaacaaatgacttgaatttagtgttaaaaaattaagagactagatgaagtttcaatatgagtttaactagccaaagttcgagtttaataaacatgaaattacccagatctagataactacatgcttcacaggtcctcctgagtcccccatcccaaaattttcccctgaaaagaaaatgaatgtatgaagaaaataatatttgcatacacatggcaaaaagattccttaaattgaaatatataaatacgtttcaaagtatttatggaaaaaatagttttaacaaatctaaaatgccaagctaagtcaactccacattgcagaaaacacacaacggtactactggaatatagcaaaactgttacttaatatggccaaaaaaaagaaggccataatgacctgccacataatcccttggggaaagaaatctaatattcatagcacagaagacctcaaagaggataaaattctggaagccatggaatggtactcagaagtgcctgcggtgaaacactccatatgcttttctcaaacacatatgttaaaaacaaatgtacccggccgtaatggccgaattcccgggcatatgtccggtaccgtcgactg

SEQ ID NO: 129497 - DNA, 311 bp, Homo Sapiens
ccgactggtgcaggcgggctttattccgggtgctggagagctgtggaatgagtgacagatgcaggcgaggtgcaccactgtatgccgactggacgtaaagtcatatttgtggccatagatgaagggcactcggaagtagaagagcaggtagatgaaaaggggccccgcgtactctgttaggaagaccgtcacccagctgatctgggcccccaggtcccggaagtacagtgtggccgtggtgcccacgggcagcttctgcagaacatcctcatccttcagggacttgcccttggggtccaggcggagggact

SEQ ID NO: 129498 - DNA, 1329 bp, Homo Sapiens
  misc_feature (1218)..(1252): n is a, c, g, or t
  misc_feature (1308)..(1308): n is a, c, g, or t
tttttttccgactggggcaggcgggctttattccgggtgctggagagctgtgggccccactcctcccccagaatgccaccgggttgaggggctgagcctcagcaggggtgagcgctcagagcaggaaggggatgatgggcatgcgcaggggcgggtagtcccggaactccttcaggtagctgcggtgcttgcccttggcccagatggtcatctgggtgaagcccaccagggagaacagggccactgggagacactgcgtcatgatggcgaaaccgatccaggaccccacctcgtaggtgtagttggggcaggacaccagcaggaagagccacgtgaaggggttcttggtggggtatgggatcttccgcgtcttggacccagcgggccgcaggtcccgcagggccatgtggatggagaagttgccgagctggcagatcacaaagatggcgagcgccagtttcacctgctgagctccgtaggtagggggagtgtagagagggtgattgatgtaataggccatccacgcggcgaagccccagtagtaggtgcagttcttgaagatgttgcgcaaaggcatagtgccatgggagaagcggtgcacgaagagcgtctccagcaggcgcttgatgtagtggaatgagtgacagatgcaggcgaggtgcaccactgtatgccgactggacgtaaagtcatatttgtggccatagatgaagggcactcggaagtagaagagcaggtagatgaaaaggggccccgcgtactctgttaggaagaccgtcacccagctgatctgggcccccaggtcccggaagtacagtgtggccgtggtgcccacgggcagcttctgcagaacatcctcatccttcagggacttgcccttggggtccaggcggagggactggcgggcggggtaccactgcggatgggtcttagtgaagaggttcttgatctccgcaatggtggcgtggggctccaccttgtccaagaaacacagcttctcccttgtctttgcgtccagaatctccacctcgtaatgcttcatggctccctcccacggcggctactgctccgcggctgctgctgcctaactgcgcggcacagcacaggctccctacagcgctcgcaaccgcagcgatagactaaacgcggctctgcgtccgccccgcccccggccgtaatggccgaattcccgggcatatgtccggtaccgtcgactgnnnnnnnnnnnnnnnnnnnnnnnnnnnnnnnnnnncgccgcttcctcgctcaatgacttccgctgcgctcgttcgttcgttacacgagggnccctatatgagtgtattacag

SEQ ID NO: 129499 - DNA, 972 bp, Homo Sapiens
gtttgccctttggccccagatggtccatttgggggaaagccccacccagggaggaacaagggccactgggagacactggttcatgatggcgaaacccgatccagggaccccacttggtaggtgtagttggggcagacacccagcaggaaagagccacgtgaaggggtttcttggtggggtatgggatctcccgcgtcttggacccagcgggccgcaggtcccgcagggcccatgtggatggagaagttgccgagctggcagatcacaaagatggcgagcgccagtttcacctgctgagctccgtaggtagggggagtgtagagagggtgattgatgtaataggccatccacgcggcgaagccccagtagtaggtgcagttcttgaagatgttgcgcaaaggcatagtgccatgggagaagcggtgcacgaagagcgtctccagcaggcgcttgatgtagtggaatgagtgacagatgcaggcgaggtgcaccactgtatgccgactggacgtaaagtcatatttgtggccatagatgaagggcactcggaagtagaagagcaggtagatgaaaaggggccccgcgtactctgttaggaagaccgtcacccagctgatctgggcccccaggtcccggaagtacagtgtggccgtggtgcccacgggcagcttctgcagaacatcctcatccttcagggacttgcccttggggtccaggcggagggactggcgggcggggtaccactgcggatgggtcttagtgaagaggttcttgatctccgcaatggtggcgtggggctccaccttgtccaagaaacacagcttctcccttgtctttgcgtccagaatctccacctcgtaatgcttcatggctccctcccacggcggctactgctccgcggctgctgctgcctaactgcgcggcacagcaccctcgtgccgattcaacacccaggcctcgtacctagcctaa

SEQ ID NO: 129500 - DNA, 1227 bp, Homo Sapiens
  misc_feature (45)..(90): n is a, c, g, or t
  misc_feature (93)..(127): n is a, c, g, or t
  misc_feature (224)..(243): n is a, c, g, or t
  misc_feature (1109)..(1169): n is a, c, g, or t
aaaagaacctttggtatagatcactatagggcgctagctcttttnnnnnnnnnnnnnnnnnnnnnnnnnnnnnnnnnnnnnnnnnnnnnncgnnnnnnnnnnnnnnnnnnnnnnnnnnnnnnnnnnncagtcgacggtaccggacatatgcccgggaattcggccattacggccgggacctttcagcaaatacaatcttttcttggcattctgttaagttgtgnnnnnnnnnnnnnnnnnnnnagtgaaagaattggattgctagtttcatgttatttatattacatctctatgtgacaaataggatgaacttttgacaatatcagccagatcatgttactcccatgtctaaaaccctcttagggccttcatcttcacttggaagaaattcccagcttcttcttttgtcttacaaacccatgcgtgagctgacccttggctgtttgatctcattcagtactgccctccacctaccctattttgctgtagccacactgagcttttctcttgtctttgaccaatacaaacttctttgtgtgtcagggtctttgcactactcttctctctgatctttacttgtcttctggggtttagttcttggcttcagtttcacgtctctgaggccttgtgtcactctcaaatctaaaatcatcgggcagttgttttccatcatatccttgtttggatctatcactgattggattatttctatcactggtatttttcagttggatctatcactgatctatcactggtcactgattggattgaatctgtcagtggtattggatctatcactgatatttttctccgtggttttgtgtatcttatttctctcactagagaggaatgtcagcaggagccttattccttcttgtttccaccagtgcttgacactcggtaggttccctatatgcatggaatagattattatttatggtgtatgtgaagagcagctgtgatttcccctcaggtgaggaacataaaagggtagtgtaggtttcacagcagtgcagcttaggtcttacatatctgttgaagaatatgtcttggaacaatcagatgttctaagaactatagtgtttactgttaaaagatcatatgtggtnnnnnnnnnnnnnnnnnnnnnnnnnnnnnnnnnnnnnnnnnnnnnnnnnnnnnnnnnnnnntttttgagcctgagaatttgagatcagcctgagcaacatagcaagaccttgtctctta

SEQ ID NO: 129501 - DNA, 1119 bp, Homo Sapiens
  misc_feature (44)..(95): n is a, c, g, or t
aagcacttttattttaaaaatgtgaattatacagtccccccctnnnnnnnnnnnnnnnnnnnnnnnnnnnnnnnnnnnnnnnnnnnnnnnnnnnnccctataagcacattaaatactactttgccgtgacagctcagtgtacttcacaattcttaacactattctatgtggaatacaaaatgcctttttatctgaattaacatgcatttaaaaagttttagtatatgtgaaaataaaggaattataaatcagtaggaaagatattaaggtagaagcatcaccaatcaactagctcagtagatgttgtctgtatttattttctacctttatgaaacaagaacctgctaacaggtaaatcgtaaagtaacatatttttgccctgatgccattagtcacaatgccatggggtaactgctatgtgatttcccatttgcaaggaagcatattaattcagtttctgctcaatatacaattaggttgtagggatatagatatctcatttgagttatctgagtttttcatctttatatctaaaaatctaatctgaaaatagtaaaacacatttaaaaccttagatgctactgtagtaaaagttatgtttataaacatttcagtatattccttcaacttcaagaatcttgaatttccttgctagaaggcttttttcctcaaagattccttttaggcttactttggtgttcaggatctccaattataaatgtagtctctcagcaccacattccgtaaagatgatttcccaagtaacggtatttgactaagttgctccagagtgttagggtgcaaaccacagttagtaagctccttatgaacaacctcctgtggaaatgtgtgtacaagtcagtaaaaagcacattagtctttaaacacagaagagttaaataattactatggagactgacaaataaatggctgattaatgtgattcatcctattaatagaagttgatgctaagaatttttgtagtgacaaaatcccaaaatattaatggttataagtctagccaactgagatgcatgagacaattttaaaggtcttaattctaactctaaaaaccttaagtatgttcaaaattaaaggcaaatatggttaaataccccc

SEQ ID NO: 129502 - DNA, 530 bp, Homo Sapiens
aaatcatctttacggaatgtggtgctgagagactacatttataattggagatcctgaacaccaaacccatttttctcatcaaaacggctcccattcctccagttaccggggctgctcttaagaactgatcctatccaaagaaagaaaggatttatttgtagaattggaggtgtttactggaagatgatgatatggccaagccaaggaagggaacctacagtgaagagtacaggtgtctctgatctacatatccaagaactgcaagaaaaatgtccagatgggcatcagatacctagtccagtccttggcaaaagtctgggctttggaaaccaagggcaagaggcgatgacaactaatctatagaacccattctccataaacactatccgcttcttttttccgatgttgagatccagatgatacagggaattcttttgttaatgttacctggctttttggtggagttggttttgctgcagcaatctaaaaaataaagtgtttcttaattaaagctcaatatgatatctaaa

SEQ ID NO: 129503 - DNA, 1559 bp, Homo Sapiens
acaatgtcttaaaatggccaaatattttccaacattaaaggagggaaatcccattgtgatgcaggagtaaaattttggaaatgattattataaaacctcaatctatctacgtgaggcactcctgaagcaagtggcattagccatgaggtcctttggtacaaggcccattgcttgaagaaccacagtagctgctgtggctttagcatgcttcttattagggctggcaaagctgggctggtaagcgcttccatttatcaatacctattcaagaaaaacatacaattgggctggtaagggcttccatttctcaataccctaaagagaaaatgtttgcgatgatcagggccactatcatggaccaatagaaattcaggtggttgccaccttcttttattacagatctccatcaaagcagacacaggatgtttgcctgacagatctttcattgcagcagagaagttcccagacctcttttgtgctctttctcctactgcaacaagaccttttcggtctgtcttaaaatcaactaggatgggttccttattgccttctttgttttttcctaatccttctccttctctccagcccatttttctcatcaaaacggctcccattcctccagttaccggggctgctcttaagaactgatcctttttaatccaggcttgggcaccagtattggccaactgttcttgtgtcaaaacctgtactcctgtacttcctgtgaactggccaggaatagagttcagctgagcccaggcatcaatcctttcctgagctctatttaacatgctcatggcttcaagatcaaatgcattctcactgagtcttttctgagcaagtgcccgttcactcattgctgtagagatgtccacaggctctgagggcaaattgctgctgaaaacattatcatcatctttgttttcttcaccatttttctccacaggaacccattctccataaacactatccgcttctttttccggatgttgagatccagatgatacagggaattcttttgttaatgttacctggctttttggtggagttggttttgctgcagcaatattcagattgaaaaaaataggtttgggttcactgagtttaaagggatgatgataaaaaggaggttcttcttcctcttcatccgaaacatgaggtttattcactattacatcatcatcttctttactctgtgcgatctgtttacatttctcagttagttcttctatagtagctcctcctgactttttagcaactttctcttctatagtaggtggaggtgcaggctttaggtttggtggtaaagggacaccagccttagcacacatggcagctgcattagctttggctatttcaagtaattgagccttatccaaatctgtcagacgtttgggtgatctgcctcgttcagaagacctggatcttttacgacggatgggagatctgctaaaccttcttcttaagggtgttcttgatcgccttaatctgactggtgagatactgaagcttcgtcttcttaccacagacctgatcttctccggcggttggagtgcggc

SEQ ID NO: 129504 - DNA, 1262 bp, Homo Sapiens
ttttcactttataacccagaaaataaaacaccacgtttattccagagaagtttgtatttgggccttaagcttttgaaaataaagtttagagacatagcatatgaataccactgtaatacacatgaaatattctatcagaccctaaaaattaacataaacttttaactttctcatagtcaacaaaatagtggctggttgccaattttattagataagttggttacagcattttaattatcattttacgtctatctaggtgtagctgaaattcaaaatgcacatcaaagtaaaactatatcacaactcaatgccatactaaatgtacttggcctctgcaatagaattctagtcagacttcattttttactcccttcttatgacccaagtggctttaacaggaatgcaggacttagtgctgatcatcacacaacataccactttctttttagaacctctacaaaattttgaggggagatggtggcattagccctgtggaacagatcttgatcacctcaataacactggcccattatctgtccagcagaacccattgtgaaatagtacaaggtgcacagcccttcactgattacaggcaagtgttacagtagcctagccataaggaaggggagttacatcatagtacaaaatacagtataaaagcgttatttaacattccacactgaagattactctgatgccttcaaacagtcgtttggatgttagccacttaaacaaatacatcactaaggtaaacaatataaacataccaaaaccctgtatggttaaatacaatttccatggtacaaaaatcaaagcctggagatgtttttacagattgctttttacacaatgtcttaaattgccaaatatttacaacattaaagaggaaatacattgtgatgcagagtaaaattctgaaatgattattataaaacctcaatctatctacgtgaggcactcctgaagcaagtggcattagccatgaggtcctttggtacaaggcccattgcttgaagaaccacagtagctgctgtggctttagcatgcttcttattagggctggcaaagctgggctggtaagcgcttccatttatcaataccctaaagagaaaatgtttgcgatgatcagggccactatcatggaccaatagaaattcaggtggttgccaccttcttttattacagatctccatcaaagcagacacaggatgtttgcctgacagatctttcattgcagcagagaagttcccagacctcttttg

SEQ ID NO: 129505 - DNA, 581 bp, Homo Sapiens
tttaaatagaagcaattatttcttaagaacttctgatctactaccccaatgtaaaacctaagagttaacagctattcaatctgcacattaatacattgtagttcttaagagttagatgacattatactgtttcttaatgcaaaaagccccagaataaggagatatctctgaataaaagtctgaatacattttatagaacagacctgaagaaaaatgacaatgtaaaggacccatgcagaaaatgagaaattaaagcatatccaagtataaaattttgtaggtatgggagatgaatgtcacttgctgccttaagtatattcagaggaagagaaaggttcaatacatgattaatatatgagaagcttgtgcaagcatatgataatcagaaacaatcccaacatataaaggggcaaaagtcatccacaggcccattacaaatagaaaatgttatttgttaacaaacaaatgggaaaatcagtcttaacagtcttcaaataaatgcaaatgaagtgactgatatagtgactggagcctactgtaaagagtagttttgcttgcacagacttttcacacagatcgaa

SEQ ID NO: 129506 - DNA, 792 bp, Homo Sapiens
  misc_feature (92)..(92): n is a, c, g, or t
ctaacatagaagagttcattttgagaggcactcagttaccattcaatctgtgctgtaagtatgggactttgtacaaatgccctttttgaggncaaaaatttcaatacactttgttctactttgtgaaccaggtctggatctgcacagagaaagtaatgctgagctgtccaaagagtccgctcaggtctccctcctaaccctcctctgccttcccgtagtttgcttatcctcacgtctgacactgaggagtgcatagtcttcaactgaaatggcactacagttagttctcattggaaacaaacaagtgtatttctggaacctgctcgtctaaaatagtcaatgcctttgtaaagactcagcatattcaatatctattgtatggtagctagctatatacatagattgactatttttagtcctggtttgtgtattgttgagctatagtagtttgctttatccatttgtgggattaaacaatactgtttaatggttgtaaacttttataaaatctctttgggttttttgtttgacccaaacataatgtaagtcttaatgacaaaatacacaaagttaaccagaggtgagtgaaaatatagcccttccccagttttgtctgcccctataatgcacgtgcattgctttgtaatatgctctcgctagcatgaatgtgctatgactacttcatgaggttttgtttcacctataattgtgatggaaaatgctgtattgctgacaacaatgaactgtaaccacagttatttactgcataaactatttgtgtactaacgaaaa

SEQ ID NO: 129507 - DNA, 757 bp, Homo Sapiens
ttttttcaggcttttgctttctttattcagtcacgactacacgctcctatgtgactgtcctatggtacttggggaccgggcggtccacctgcagcctgggggaggacatccctataatgaacatgctgcctgggcttcagggggccactttggtggccaagatggcatccaggacaccccccaagtgcaccacctgcacctggtggaagccgtgcagctccagcaagcactgatactcgcccaggctccgctccttgccttcagtctgcaccagcatgttcagtgactgcatcagggcgcgctgcgccaccctcttctcctcatccaggagcgtctccaccagcagcaggccggcccctggcttgcagctctcggcgaccctgctgagtaacttgtggactttgtcgtctggccagtcatgcaggatccggcacaggacgtacagctcagcgctggggagggggtccctgaaaaagtcacctgctgcgaagtggatctgcactgcctgcggtccggggggttggaagtgggcggccagctcgataatgtctgggaggtcaaacacagtcacctgcatacgagggtactcacgggccagctctcgggccagtgcaccggtgcagcctcccacgtcgcaggcggaggagaagcgggacagattgaaggccgtggccacctggcacgcagtcagcttcgtcatgccgtgcatggcccgcatgaacctcagccgcgtctccgggctctggtagtacgcatc

SEQ ID NO: 129508 - DNA, 512 bp, Homo Sapiens
aggcttttgctttctttattcagtcacgactacacgctcctatgtgactgtcctatggtacttggggaccgggcggtccacctgcagcctgggggaggacatccctataatgaacatgctgcctgggcttcagggggccactttggtggccaagatggcatccaggacaccccccaagtgcaccacctgcacctggtggaagccgtgcagctccagcaagcactgatactcgcccaggctccgctccttgccttcagtctgcaccagcatgttcagtgactgcatcagggcgcgctgcgccaccctcttctcctcatccaggagcgtctccaccagcagcaggccggcccctgagggagacagcagagagctggagtcctggccagccaggcggggatccttcagcaggacgcaggggacacagcaggcaacaggagctcagaacggtgagcagaggctgctgagaacccttggccagggggcccacacaggtaggggaggggagagagaca

SEQ ID NO: 129509 - DNA, 686 bp, Homo Sapiens
ctattaggttttctttaataatgttaaatttctaaattatagcatatgttttagttaattctgaaatcagttacttcatttgttaatttatccctcatatcatgaatattgttttttaaatgttctatacaaatttgcatcacttcttttcttacagcttttgcagttaatatattctaaacttgaaaatgtggtatcaatcaataatagaagtatcactggaggatttatttagctttgtatttcttaattttagtcctagctactaaagtatgtaagccttaaagtttaaaatgtttttcttaaattagctttatacacaaacattttcatttactttatgaaatgggaggagatagtccactgtgcttatgtttttttgtttaatttctatattctgaagcagtgcagatatagggtatgctaatcaagtgagcaaggtggaacatgtacaatataaggagaagctgtaaaaatcacagtataaaattatgaagtttggtaactgtaaaatgtactgtatttatatgtaactctcattctaaaagttgccacaaaagctgaattggaagcttcatgtctgcatgaaatttcctatatttttaatgtgtatgatgaaattaatttttcttgaatattaaagtctgccaattgctatgaaaaaaaacctcgtgccgaattcttgg

SEQ ID NO: 129510 - DNA, 919 bp, Homo Sapiens
  misc_feature (825)..(825): n is a, c, g, or t
cacagtgaaattaaatatcattttattgaatatttgtttttgtgtaagagttatcaataatttcaaatattacagagttcatgaaaagatgtctatttcaactttcaaaaaacatttgtggaatgcctgccatgtaccggacggtggggaagttccccgttaactctcccctcatggttctcgttgtttctcactcccttcttaggttgaaattaagatttaagagcctttctgttagatttttagaaattcatttatttgcaaattacagtgaaaaatttctcttccagatgcatataaatccgaagtttttatcctagtgaagcgtacagaatgctattgttatgacatttaagtatcataacataatgtagctaataaagctttttaaaaattatggtaaagtgtatgtgaaatttaccattagtgacattgagtaccttcaccatgttgtgcaatcatccccaataagtagttccagaacattttcatcaccctagaaggaaactcctttttagcaatctctccccactcctttctctcagcttcttacaaccatttatctgctttctgtctccatggatttgcctattttggatatttcatataaatgcactcatgcaatacgttgccttttgtgtctgccttctttcacttggcaaaaatgcgctcaaggctcatccatgctttagcatgtatcagtccctcatttctctttatggctgaatattctattgtgccgtgtggagataccacaatttgtttattcattcatcagctgatggccatttgggttgtttcctcttttttggctactgtgactantgctgcgatgaatatttgcgtgaaagtttttgcttgaacacctgttttcagttcttttcagtatatgcccaggagtggacttgctgggtcatat

SEQ ID NO: 129511 - DNA, 1221 bp, Homo Sapiens
  misc_feature (874)..(889): n is a, c, g, or t
  misc_feature (907)..(994): n is a, c, g, or t
cgtataggcttacacagtgttgagtccaccgtatacggatccagtccagtaagtgcccaccccgggagtttgtttctttgaggttaaggcctcctggagcacttattctgaagagacttacttgtgaaggccaccagttaagttcagaaccaagcctatgccataccactggcaacgtcatccatgaagactggagctccatccatgtcttagaccgggaaagaaaatgcaagcataccggctctatctcccacaggcttctgggtacagtgaccgctgcagtggctccttcaggatgctcaaccctgggctcttgtaacaccaaggcacaggcctcagctcttccatgagtgaataccttttaaaggcatcaagctgcagcatctctgttgcatacaaattcactaagtactaaaactcctagacttttgggcccattgcttattacataaaattgtttccagcagtagggtttaagactaaacacaagtgaaataaaatgtacaagtttgttccatagaaacactgaaaacacggttatgtccttctacaattcagtaaaacaaacactgccacaaacaccctcaggttcacagtttagatttcattcattcaataattattttctaagtactttcattactggggatgcagtaatgaataataaggtccctgttttcttggagcctctgttccagcagtggggcaggggagacagacagcaaacaaaataaatcaatataccacgttagtagtcacatggttactgggtagggaaaggaaagcttctgcacacctaaaccccttaagagcaatttgaggctgctgcaaatatcacggcctcttttaggggaagataaaaactctaagtttnnnnnnnnnnnnnnnnaatagagatggggtctgnnnnnnnnnnnnnnnnnnnnnnnnnnnnnnnnnnnnnnnnnnnnnnnnnnnnnnnnnnnnnnnnnnnnnnnnnnnnnnnnnnnnnnnnatgagccactgtgcctagccctaacttatatttttaaaagtaacttttttataagttgcaaatttctagtcagactcttaaaagttcataattctagggagctgttctaatttttagttacaaggtatatgaataagtactttaagtccatactaaaggaataagacctacatcaggtgggtacatgtgcaggtacatatatgaatatatgtttacaggctcatgtc

SEQ ID NO: 129512 - DNA, 712 bp, Homo Sapiens
cttaaatgtaaaaaacacctcggtacagcagagacagacacgaagggcgggcgggagggctgcatgcaggggcgtgcattggctgctgccgcttttgtaattgaattgttttaaacctcaaacaaacaggactgccgctgtcactcaggccctccagagccactggctgcgaaggttggacctccggctggaatctcctaaagcccctgtggctgagctcactgcagcggtgcggcaggggcccctgagcagtgatagtggacattgagccacttgccatcccgacggtgccagacccgggtctcttctgactggctggtgcgaggccgaccctgcccgtcgatgtactgggtgaggcggatgtaggcgatgcacgctgcgtcctccccaatcacgtggacgtgtgggtttaggatggtggtatggataggcttgctgttcttggacaggagattctcaaagtaaaacttatggaaatccatcccctccacgaggttaccaagggcctcaggctcaaaggaagtgaggcctggatcacaaatcttcgtgtaggcctcaaagtccccattgttgatggcttcaatcagctgttctgtaatcttaatgatctcctgttttctccactttgaggtcctcatcttctgtcgtggtgttgcagctctctgtggagcccttgatcccatctgtagcgttgtgtaccacagtggtttgt

SEQ ID NO: 129513 - DNA, 1308 bp, Homo Sapiens
gacctgctgagctgacacttttgattttggggagtggtgcgagttctctccctacgaggtcggcttcccctaagtcggggccttcatcccctctgagctctttggctccgagttctttatggggcagctgatgaagaggcttcctgagtcccgcatctgcttcttagaaggtatctggagcaacctgtatgcagccaacctccaggacagcttatactgggcctcagagcccagccagttctgggaccgctgggtcaggaaccaggccaacctggacaaggagcaggtcccccttctgaagatagaagaaccaccctcaacagccggcagaatagctgagtttttcaccgatcttctgacgtggcgtccactggcccaggccacacataatttcctgcgtggcctccatttccacaaagactactttcagcatcctcacttctccacatggaaagctaccactctggatgggctccccaaccagctgacaccctcggagccccacctgtgcctgctggatgttggctacctcatcaataccagctgcctgcccctcctgcagcccactcgggacgtggacctcatcctgtcattggactacaacctccacggagccttccagcagttgcagctcctgggccggttctgccaggagcaggggatcccgttcccacccatctcgcccagccccgaagagcagctccagcctcgggagtgccacaccttctccgaccccacctgccccggagcccctgcggtgctgcactttcctctggtcagcgactccttccgggagtactcggcccctggggtccggcggacacccgaggaggcggcagctggggaggtgaacctgtcttcatcggactctccctaccactacacgaaggtgacctacagccaggaggacgtggacaagctgctgcacctgacacattacaatgtctgcaacaaccaggagcagctgctggaggctctgcgccaggcagtgcagcggaggcggcagcgcaggccccactgatggccggggcccctgccacccctaactctcattcattccctggctgctgagttgcaggtgggaactgtcatcacgcagtgcttcagagcctcgggctcaggtggcacggtcccagggtccaggctgagggctgggagctcccttgcgcctcagcagtttgcagtggggtaaggaggccaagcccatttgtgtaatcacccaaaaccccccggcctgtgcctgttttcccttctgcgctaccttgagtagttggagcacttgatacatcacagactcatacaaatgtg

SEQ ID NO: 129514 - DNA, 673 bp, Homo Sapiens
tttttctgcattcattcagcaagtatttatgatgtcacctggctccccgccagacactggggaaacaaacgtggagacggggcactgcccgcacagggcacattttgggggacagctaccctgtctggtgcaccatcctcacctgcacctggcaaggtgggtgaatggggaggaatccagacaggtgacctgggggatggcgggctattctctgatttggggaacacagagaggacagggggcaaagtggaaagtaaatgaagatgaacgagttatatctacaagtctgaagctggagaaagatgtctgggcttcaaaggagatttcggaggcagcggctcacaaggaagcgatcctgaaatcgtggctgaaggtgctgagtgctcagtctctccaaggatgatgatgctttacagagtactggtgtcacttcctgtactgggtggcatcgggctgccagatagagtcagaaagaaaacaggcgggagcagagccagtaaacttccgaagctttcaatgacaggaaagctggagattaggagccagtttgaggtcgtgatggcccacagcctgggaccctgagattccgcgggtggagaatgtctcaggtgagagcaccctagttagaaaagtattcccaagagaccaaggcaagccacgagtcactccttac

SEQ ID NO: 129515 - DNA, 712 bp, Homo Sapiens
aacacaccatcagtgtttattggtcagctgtcccaaacgggccagccctggggtctgtcagtccttccccaggctttccaggtccagaaggctttgtggggtctggggctgtgtcagggtaaggaaagctgccttggtggaggaagagaagtcagagaggtcacacatgtggccttagaacctgctaagtccaacgtcagcatgtgacaggaggggaagtgaggcaagacggcagaacccaggggaaaaggtggcagggagtctgagagtgaggttgggaggaccagcatcttttaggccctgagcaagaaggaggtgaccggagtcttccaggtatccctccctcctagcttctggaagtgggagtcggggagggggctccagtcagtcaggtgtaagctccatgccatggggactctgcaggacaggcaggcttgaggagccactgtgcctggacaggttctgcaggctcccccacttggtccctgtgctggaggggaagcagagaaggggctggcagcctcatccctgcgggaccttcactgagccttcttggtcactctcttgctcttcagcatcacgtaggagatgaacagtcccacaaacaggagcagcaggaggcctgcagccagtgggatggcgacagcataggctcggggcaggaaatacttgtggatgacatgctgactgtcgatgaatggcaagagaatca

SEQ ID NO: 129516 - DNA, 945 bp, Homo Sapiens
tttttttaacacaccatcagtgtttattggtcagctgtcccaaacgggccagccctggggctttggggctgggcctccgtgaggagaggtcagtcggtcagcggcccggggtggctgccctgagccccagggctggtcctggggtctgtcagtccttccccaggctttccaggtccagaaggctttgtggggtctggggctgtgtcagggtaaggaaagctgccttggtggaggaagagaagtcagagaggtcacacatgtggccttagaacctgctaagtccaacgtcagcatgtgacaggaggggaagtgaggcaagacggcagaacccaggggaaaaggtggcagggagtctgagagtgaggttgggaggaccagcatcttttaggccctgagcaagaaggaggtgaccggagtcttccaggtatccctccctcctagcttctggaagtgggagtcggggagggggctccagtcagtcaggtgtaagctccatgccatggggactctgcaggacaggcaggcttgaggagccactgtgcctggacaggttctgcaggctcccccacttggtccctgtgctggaggggaagcagagaaggggctggcagcctcatccctgcgggaccttcactgagccttcttggtcactctcttgctcttcagcatcacgtaggagatgaacagtcccacaaacaggagcagcaggaggcctgcagccagtgggatggcgacagcataggctcggggcaggaaatacttgtggatgacatgctgactgtcgatgaatggcaagagaatcacccaggcggtgtagtaggtgaagatgatcaggctaacggcgacgaggccgagtcccaccacctggtctgtccccgtggccatttccccgcgcgctccggacgcgtgggtcgacgatatcccgggaatccggaccggtccagc

SEQ ID NO: 129517 - DNA, 1015 bp, Homo Sapiens
  misc_feature (653)..(907): n is a, c, g, or t
aaaaaagacaacactttattgtctccattgagagcatgtggccccctgcttagttcttactaatcagaacacttaatttacaatcaaatgacatgtcaccgtggagcctgtgttcctagccctggcccaagttctatcccaaaaaccagtggttccttgagagtcaggactctgaaatgtgagtgtggataactgcaaaaaaagctgctgtatcccaccctatgaggctgcaaagatgggatggagagggagagagtagcaagttgcagaaagccataggtaaaatccaatcagtagtcagcagagggcaagaaacgcccaggatgccaatgatcacagagaaaggaaaatgctgagaacaaaatctggaggactatgaagagtgagagaggcctgggcaaggaggcagtctgggaccagagagagaggtcagcctgagtcaggaatcctagagactgtgaggtaaaggacaatgatcaagggactcagacatcatagaagagtcgaacgagctgatatcgaatggagaaggtgatggcactgcccaggatctgcagcagcagcaggagcaatgtgaggtttctctcatgtatgggcccaaggactttaagtagcaagttgatgagggtcatcctcgtgccgaattcttggtnnnnnnnnnnnnnnnnnnnnnnnnnnnnnnnnnnnnnnnnnnnnnnnnnnnnnnnnnnnnnnnnnnnnnnnnnnnnnnnnnnnnnnnnnnnnnnnnnnnnnnnnnnnnnnnnnnnnnnnnnnnnnnnnnnnnnnnnnnnnnnnnnnnnnnnnnnnnnnnnnnnnnnnnnnnnnnnnnnnnnnnnnnnnnnnnnnnnnnnnnnnnnnnnnnnnnnnnnnnnnnnnnnnnnnnnnnnnnnnnnnnnnnnnnnnnnnnatggcgctctccgcttctcgctactgactcgctgcgctcgtcgttcggtgcgcgagcgtatcactcactcaaggcgtatacggtatcacagatcagggatacgcggaa

SEQ ID NO: 129518 - DNA, 1871 bp, Homo Sapiens
  misc_feature (76)..(91): n is a, c, g, or t
taatatatgcgacattgtcagaaagctgggtacgcggtaagcttgggccctcgagggatactctagagcggcgccnnnnnnnnnnnnnnnnaaaaaagacaacactttattgtctccattgagagcatgtggccccctgcttagttcttactaatcagaacacttaatttacaatcaaatgacatgtcaccgtggagcctgtgttcctagccctggcccaagttctatcccaaaaaccagtggttccttgagagtcaggactctgaaatgtgagtgtggataactgcaaaaaaagctgctgtatcccaccctatgaggctgcaaagatgggatggagagggagagagtagcaagttgcagaaagccataggtaaaatccaatcagtagtcagcagagggcaagaaacgcccaggatgccaatgatcacagagaaaggaaaatgctgagaacaaaatctggaggagtatgaagagtgagagaggcctgggcaaggaggcagtctgggaccagagagagaggtcagcctgagtcaggaatcctagagactgtgaggtaaaggacaatgatcaagggactcagacatcatagaagagtcgaacgagctgatatcgaatggagaaggtgatggcactgcccaggatctgcagcagcagcaggagcaatgtgaggtttctctcatgtatgggcccaaggactttaagtagcaagttgatgagggtcatgttgttacattcagtgaattcaccatcttcagtctcactctggtgtactgtcaccagctggaggctctctgccacctttaaaataaaggtgcccaagaaagagaggctcttggtcttgaacttggaatagctcatctccagtttgcctgtcttgatattgagtctgggtatgcggtggcgagggcaggggatgatatgcaggagctgaggcagtgagtagaggaagttgaacacctggggcatgaagaatagtagcatggtcttgctgaagtgtcccaagatgcccaccacggcaaaggtcatgccagcaaagtaacagaaggtatctcccacaaacacccgtgatgggtaccagttgtggtagagcaatcccaaagtggtgaaaaaaaagggtatcatgaagtagagggaaaagacatgatcatcccgacaatcaccttccaactctaccaggttgaagacaatgatggaagcagaaatgactagtgactggccagcctctaggccgttaattcctgctaggatattgatggcattggtacagaacactgccagcagccccatgtagacatagtacaggattcccaagtccagatgcaggccaagtatcgggcggaagggcttgggcaccacaatggtcgtgttgccaaagttggtgaaatagaccatgaggagaggtagtgaggcagctgtaggtagcagcagcttatggcgccagcgcagattcagtacatcatccgcaaagcccaggaagatcatgcagcagatggcaaggagggcacctatcagggccacaaaatctgctgtcggctggttttgttgaggtcctgaccacagaggcgcgcagcaatgaagtggccccggaaggccgggatgagggtgactgtggccacaaatcccagcagcgagacgatcaaattgatcagcagcggcatgggcaattccgagaaggcccacatggtgaccggtcaggggcccggctccgccgcctcttcaggtaacgggcaagctgagcagcagtcctgaggcctcagcagtatggagtggccgctccccacaggcaggctcttcccacaccaatctgagcaaaacccagcaactctgacttgagccgccgtcgggacaccggatcccgggaattccggacc

SEQ ID NO: 129519 - DNA, 1301 bp, Homo Sapiens
ggacaatgattcagggactccagacatcataggaagagtcgaacgagctgatatcgaatggagaaggtgatggcactgcccaggatctgcagcagcagcaggagcaatgtgaggtttctctcatgtatggcccaagggactttaagtagcaagttgatgagggtcatgttgttacattcagtgaattcaccatcttcagtctcactctggtgtactgtcaccagctggaggctctctgccacctttaaaataaaggtgcccaagaaagagaggctcttggtcttgaacttggaatagctcatctccagtttgcctgtcttgatattgagtcagttgtggtagagcaatcccaaagtggtgaaaaaaaagggtatcatgaagtagagggaaaaagccatgatcatcccgacaatccactttccaactctaccaggttgaagaccaatgatggaagcagaaatgactagtgactggccagcttctaggccgttaattcctgctaggatattgatggcattggtacagaacactgccagcagcccccatgtagacatagtacaggattcccaagtccagatgcaggccaagtatcgggcggaagggcttgggcaccacaatggtcgtgttgccaaagttggtgaaatagaccatgaggagaggtagtgaggcagctgtaggtagcagcagcttatggcgccagcgcagattcagtacatcatccgcaaagcccaggaagatcatgcagcagatggcaaggagggcacctatcagggccacaaattcatggtgggggaatgccttacactgctccttcacaaagcagttcaggaaggggaaagggatgaagcagaagaggatgataaggaaaacagcaccgctgatcactccctgggattctgggatctgctgtcggctggttttgttgaggtcctgaccacagaggcgcgcagcaatgaagtggccccggaaggccgggatgagggtgactgtggccacaaatcccagcagcgagacgatcaaattgatcagcagcggcatgggcaattccgagaaggcccacatggtgaccggtcaggggcccggctccgccgcctcttcaggtaacgggcaagctgagcagcagtcctgaggcctcagcagtatggagtggccgctccccacaggcaggctcttcccacaccaatctgagcaaaacccagcaactctgacttgagccgccgtcgggacaccggggaacctctctaaggcaacctatgttctgccccgctgcacccgcctatctatcccgggaattccggacc

SEQ ID NO: 129520 - DNA, 1019 bp, Homo Sapiens
  misc_feature (720)..(720): n is a, c, g, or t
  misc_feature (736)..(736): n is a, c, g, or t
  misc_feature (744)..(744): n is a, c, g, or t
  misc_feature (851)..(851): n is a, c, g, or t
  misc_feature (883)..(883): n is a, c, g, or t
  misc_feature (909)..(909): n is a, c, g, or t
  misc_feature (916)..(916): n is a, c, g, or t
  misc_feature (968)..(968): n is a, c, g, or t
tttaatggtgatttttctttatttccccgcaccttcaatctcatggcatggtctgcaggaaacctcagagtcctgccaactcgcaggcttcgctgatcgcatggcacctgggcaccccgccaaagagctgaaactcccaaggctcagccaggactctccagctgtggtgtttctaaaagccgttctgggtgagatgtagagccgagttttcccagtcgctcagtcctcctcccgtgaggacaacactgcttgctctcctggcttgcctcacccatccaggaaaaggtggggaggggctctaggcagcggcctctcctggttgaaagaaactgagacctgggccttccgtccagtttaacctggagcaggcctggcccctgggcaggctcagagcaggtcccccattcagcaaatgagggtatcctcctattttgccaacatccatcttcaccgacttggcctgaacccattctgagtacagagggacacccatgacagaaatcccaggtcaactctgctggaagccactgtgctggaagaggacttctttcactttgtccacgatggtccccacttcagccatggccccgagaccttcatctccgcacaccagcttcttggccacacaggggatctcgacatagccaaaggccttgagctggtctacctgctgcgctgtgatcgggtgctccacatggcggtgttcatggccgggcaaangagcagggcttgctgncggtccangccgcatgacgcaggtaagcaagtgtcacagatgcactgggcaccttcccagagtgttggcatcagaggagcacagcaggggtctgccactccgcagtcatgtgcanacgggtcagagggtcttcaatctccatcatcncgtcctgtaaggtgacagatgtctgngggcgtnaatgttggtcctcattgtgacacgtactccagccagatgtcaagctgaacanagagactcaggtggaatcccgtcaccaagaatgattccccacaggtgacac

SEQ ID NO: 129521 - DNA, 1252 bp, Homo Sapiens
  misc_feature (300)..(308): n is a, c, g, or t
  misc_feature (1153)..(1187): n is a, c, g, or t
ccaggataaaaattttattgcatttgacatcatacaaaaatttgaacttaaggaagaaaatgaaaatgtgcaccttttacaagtcaaagaaaagcaaaagttttagcatttggtctgcaaaaaaaagatacgttagaggtacaaaactgtactacagcaggtctaaaaaatgttggacatagttcttttgaaaaagttaaaactgttttcaaggttactttttatatttaaatttacaggcactgaccaatttacagatatttacataaatcaaaaagacccttaataagcagtgtagcnnnnnnnnnagcagccaccacttctttcatgtgaaaaaagaaatagtaaaaaggagattttttacaaacattaagcttttatttataataattttattgtgtcttatctaaaacattttgtggtgacttactgcctaaaaattccagtttagattacaatcctataattgtacacagaaaaatatctgatactacaaacaggatataatcttaactttgatctcagtttctgttgcttcatgtcacagagaaaacagagcaggaaaatggcaagtaaaacagaagtgcacattgcactaagctatcgtaaagcacaggaaacaatcttttcaaaatgtctacactgaactgattctttaaaacgattcactaactgttgtaagagttagtgctcccattactacagtgcaaaatgtattgttgtttcaatacaaaatttaaagcaatctcaagagtacatcaaaagcatgtgaagtactaatgaaatgctaatacagacacacccaaagcctcagtctatcccagtgagtcaagcaaagacttaaggcaattgttcagtatttcatgactgcagtgatttgactgaaatgaaagatttcgttttgcttcaagtaactgaacaactgacttgaatcttcactttactagaacagactttgacaacaaactatctaacgtaggttatactttaagcatgtatgaattagaccctttccaaattctacacatctcttcaggattagcatgtggtacaattaattgaagttatatcaaaaactttttatttgttcagttaatttccccccggccgtaatggccgaattcccgggcatatgtccggtaccgtcgactgnnnnnnnnnnnnnnnnnnnnnnnnnnnnnnnnnnncgcacgcttcctcgctcactgactcgctgcctcgtcgttccgctcggcagatcgcccaattagtt

SEQ ID NO: 129522 - DNA, 1583 bp, Homo Sapiens
ttttttttgtgttcaaatccactttatttaaattatttggtaattttagcagtacaaaatctttgactatgaccatgggacacagacatgagtttatgttttggtttgttgtggtctggggatcatgtacttttctaaatcctctgcacttcctttcattaacaaatggcagagtgccgtaagttcctctattattcatagaaaagaaatttgtaaggtaagactgaaaaaataaaatctacagattcacaaaattatcttccaatattaagaacatacaaagtatactaaagacatctacatttagtcctccaggtaacaaagcaaacatttgacgtttgacgtttctgtttttacttcttgctaattacagttcagagaccaaagtatttccaaaagctatgaaaaccctcactgacgctcctagtatggatttaatggaattagaggatagaactatgagagcacttgaaaacttgcctttaaaaatcacaagactttcttttcctcagtgggacttttcttctgcagtagctgagggcactatttgcttacttaatgccttataattagcatctgccttacagtagatctaagtattggcttatttaagtatattactggatagcacgtggtaggtagcctttttgtccaaggcaaacatacagcgaaccttaaagtaaaacctcagagggtttggtgccccttagttgttctccagcgagcccgaagttgcatttggagttctgattccaaatttactatggaatgtcattgtgactttgtttttatgtcctgttctttgatcaaaggcatggcatgtatcaaaaggtggactgtacaagtgaaggctcacagcaggttccgtatggctgatgttctctactcgatgtaagccaatggaatcattgatgtaggcacactggttttccctcaagactctttcagacttcttgaccatctcattggattttttgtcaggccaggcaaataatgtctcctttagatttccctgtagcatcttcagaaagcagtgggagttggtatgatcatgaatactgctgccatgtccttcaccccaacagagaatcatcagattaaattttccatttccttgatccacaagatttcgggtatacctgtactggtcgaacttggcgtacattgcccactcggtggggtcgctctcgtaggcttccatgatggcctgcacctcctctacattgacctcatcgccggcaaagagctggtgcaggatgcggatcagatcagccagggtccgtggcttcagcacttcggtctgttccatctcgtggggagctggctgcgcgcgcgtctcactgctgggctgcggtggaggagctgagcgagccaaggagctgggggcgagggagcctaacagcccgctagaccgctaagcagacacacacgcacaaacccagcattagagtgccgaaacgtaaggatgtcgtcgcagagacagcaagagacccacccccaggcccctggcagcgcagtggatccgggatcgctggagacgcggtgcacacacaaatcatcccaggaattccggaccggtccac

SEQ ID NO: 129523 - DNA, 2221 bp, Homo Sapiens
  misc_feature (139)..(186): n is a, c, g, or t
  misc_feature (791)..(819): n is a, c, g, or t
gacaatgagaaaaaattttatttatgacgatcttgagcagtataaaactcagaagctccactgaggtgaaggaaacatggacatgatactaagcaaagcctagtcttttccataaaatgaataagaagtacatttggtnnnnnnnnnnnnnnnnnnnnnnnnnnnnnnnnnnnnnnnnnnnnnnnngcattaaagcattaatcctcgcatttcgatagggctatgtagcttttaagtaagcaatgttagaatgagttgtagagttttatttttgtgaatatagtgagtgacagatggcaattacatgaggatatttgaacgaaggtacataagcctaaacaatttcacctaggtaaaatattgatgtcataaccaaactatatggccccgtttcataaaggttactatattctatagagagtgaagaggtggcctttctatcccagcttaccctattcttgttattgttcaaattctcctgaagcttgcataactagctgccatcaggtaaatgctattggctagcagaagactgcagttctgttaatattagaaccagcagggggaacttgggaacttgacattaaaaatctagaaacagaattttaggatgggtctcgttagaaacctgaattgttaatggacttaagtaaaaaccatcccaaagaatttgagctttaaggtgataacgtcttttcagagatcatagcacatgaagaacccatggacactacacagactatgaacagttagcagaaaaagatctcgtgactaaagtggggatgacagcnnnnnnnnnnnnnnnnnnnnnnnnnnnnngttgagaatacaggaatatttacaagatgttaaaaaattattaatcttcagccaaaatgaggccccttcgcattcccaaaacctttgctttcttctcctttcgttcttgctcgcgtttcttccgttgctcttcctttgtctggagatggggttgtttgtaagttttcttgtagaagttaattctgttgacatgttgatttagataattattttctttagattgcccccatggttttagctttcctttgtgtggttcatagttgaggggacgagacaaacttgctttaagatcaaacactggtttcttattggagactggagtctgcgttgcctcagttgtcaacttgaatggggtaataacagcagcagaattccccgtgatggtctttaatttgtgtgtcccaagcacagcctcgccttttggggtgcccccagacacggtcacatgtgcagactttctggctggagtcttggtcagtgaacgcttatgctcattatctttagtagcagctgaaaacctgacacccgttttagctgcagagatagcagagcgcttgagtgaccccttcagacccaaggtactttgacttgcagggccacaggcccgggctttgcgagcgtcgttggctgatgggagtagaagccacagagagtcttcctcttggaggtactggagtcctgacccctcccttattgatgggctgcttcagttcattcatggaattgtgtttcttcaaaaatgtttcttttttctctcaatatattgatcaatggactccattttccttaaaatgagcttcatgaagcttcttaaagtttgggagtagtgattgcagttcttttattttttccaggtttggatgactcatctgtgtagagagatttctttctttctgaaggtacctttgaatctctgttacctgaggaaacagcattctcagcttcttggtgctcgtctggtggagaaggaacttttgcagtagctctgagatcctggctttcctgcttttcatgattctgtgagtcagggtccacacggacagtcttgcaccttctccttgttttggtgacatggccaagtggctgtctctcagcttcttcctggttgctgatctgtatctcagtctcatcacaagaggatgcagaagtttgactttcatcctgattctcatttccttttcttgcctcatgtttaatgtagcctttcaaggcttttaacaacttggttgccctcaggttggcccggagacccagactcttggctaagttctgcaggtcactgtacttgagggagtccagctcctctagagaggggatgatcatcgcgattcgaaatcccggcgatactcggaagatggatcaccaaacttcgtcagcgcggttcaaatccctggcgcccccc

SEQ ID NO: 129524 - DNA, 470 bp, Homo Sapiens
  misc_feature (143)..(187): n is a, c, g, or t
ttttgacaatgagaaaaaattttatttatgacgatcttgagcagtataaaactcagaagctccactgaggtgaaggaaacatggacatgatactaagcaaagcctagtcttttccataaaatgaataagaagtacatttggtnnnnnnnnnnnnnnnnnnnnnnnnnnnnnnnnnnnnnnnnnnnnnaaagcattaaagcattaatcctcgcatttcgatagggctatgtagcttttaagtaagcaatgttagaatgagttgtagagttttatttttgtgaatatagtgagtgacagatggcaattacatgaggatgtttgaacgaaggtacataagcctaaacaatttcacctaggtaaaatattgatgtcataaccaaactatatggccccgtttcataaaggttactatattctatagagagtgaagaggtggcctttctatcccagcttaccctattcttgttatt

SEQ ID NO: 129525 - DNA, 705 bp, Homo Sapiens
ctctcaatatattgatcaatggactcccatttccttaaaatgagcttcatgaagcttttttaaagttgggagtagtgattgcagttcttttatttttccaggtttggatgactcatctgtgtagagagatttctttctttctgaaggtacctttgaatctctgttacctgaggaaacagcattctcagcttcttggtgctcgtctggtggagaaggaacttttgcagtagctctgagatcctggctttcctgcttttcatgattctggaattcagtgggattacttatttttatctctgaatgattctgctgtgagtcagggtccacacggacagtcttgcaccttctccttgttttggtgacatggccaagtggctgtctctcagcttcttcctggttgctgatctgtatctcagtctcatcacaagaggatgcagaagtttgactttcatcctgattctcatttccttttcttgcctcatgtttaatgtagcctttcaaggcttttaacaacttggttgccctcaggttggcccggagacccagactcttggctaagttctgcaggtcactgtacttgagggagtccagctcctctagagaggggatgatcatcgcgattcgaaatcccggcgatactcggaagatggatcaccaaacttcgtcagcgcggttcaaatccctggcgccactcttaactttccc

SEQ ID NO: 129526 - DNA, 953 bp, Homo Sapiens
  misc_feature (255)..(316): n is a, c, g, or t
  misc_feature (401)..(409): n is a, c, g, or t
ggatcactttatagaaaagggtagtgagggaaagtggcatggacaagcccccgaatggtttctgctagaggggggcgggttgattgggcgaggatttacaatacgctattgagtgcggacccacgggggtggtaataggggtgctagggaaaagggttttgggagaagtgtaaataggggggacccctagcaccagggtgggttggttttaaaacaggttctaggggcgccccggtatggcccgccccgagtaannnnnnnnnnnnnnnnnnnnnnnnnnnnnnnnnnnnnnnnnnnnnnnnnnnnnnnnnnnnnnttggtttgtttaatgggaaagacgtaaggcttgggttcatcaaataaaaccaatttcgggggggagaaaatcaaaacccgcaatnnnnnnnnngttaacactgtctgggccacagcagaacccaaagaacatattcgtataattgaaaaattctaggtgcttcataattgaccttttgatacaaaatgacctattaaatttgcaatttgtaatccttggtgttgaggtccataggacaagctaggaagtcttcaaaccttgagttgaattccataaggggttatttggcttttgaatcggtttttccttgtctaagaggtagcagcagcaacagcgcccaccttctgggcagcttctttcttggcatgatgagcctgtagaactgctacagcttcatccaccttggagcggagagactcgggggactctaacatgtgcagcagctcagagttgtctatctccagcagcattcccgtgatcttcccagccagatttgaatgcattgtttggatgagtgggaacaagcgttctcccagcatctgcttctgttcctgggggggtgctgcagccagcatggaggcagtcagtggctcctgcccggacgcgtggtcgacgatatcccgggaattccggaccg

SEQ ID NO: 129527 - DNA, 849 bp, Homo Sapiens
  misc_feature (197)..(207): n is a, c, g, or t
tttttttgagattaaacaggcaagttttattatcaaatgttaactctacaaaaactcagtagtattgtagtaagcattactgcctatcttaaagtctttcagagctttgggcagctttgggcatcttaaggcatcaagtatacagaaatttcttttcgatcttaagtgccagttatcaccaattttcacacaaaccnnnnnnnnnnncttcctattgcagttaaagggccattgccagtcagctgaagaaggaaatgtttgcttctccctttaaggtgttaaagtaatgcacagaaaataaaaatagcagccacataaatctgcacggcattgcattcaagcaaaggacaatatgagtaacttagagaaatagccacattcaatgcacttaatgaaatcctgttttctttggagttacatgaggcagcagtactagctagtgtctaatattgcacttttatagcataaacacagctaaacatagtgttaaacactgacagcatcagtacctgttctaattgcatcagtgtttacctctcagtctagcatgctgactatagtcctatgctttaaaaggttataattatttgacagttaaggcattagaggaaaaaggtttaaggctatcataatatatataagcattcacttctgttcagttagtgtattgttttctagaatacactgttcaaattgtctcacttctgggatattaaaaactatggaatttctcttattaaagtccaaaccatcaataatgaaaaaagtacaatataaaataatacatatgaagccacaatattcaattacagttcaaactagaaattactaaatacatgtagcggccgc

SEQ ID NO: 129528 - DNA, 2133 bp, Homo Sapiens
  misc_feature (710)..(724): n is a, c, g, or t
  misc_feature (1491)..(1504): n is a, c, g, or t
  misc_feature (1790)..(1790): n is a, c, g, or t
tttgcaggtatattcatttttattatattaatagacttagttacatataaataaacacaaaaagcaaatatcaactgaaaggtttggttgggtagtcaactaattttgttcttttctagggcaattcaagaaggtaacatttgaaaggtttctaaatgatgcacactgtaatcattcattctttgttaaaatacaacacaaaccaacagctacaatgctttttatttttaacaaaaaggatgtaaggagggtaagaaaaacagaggacagtaagataggatgtaaagtgtgatgtatctctggacaccatccctctctgcctgccccacacccaaaagttttaaataatttaaaggataccaattacagtaccagaacaccatcaaaataattgtctttatcagggtcaaaaaatacagtgattatgaatgagctgtgaccagttacgaaattttactggaaatgtttaactgtggtcagcagtccaatggtgtgcacagtgccttcaattaatgcacttgagcatacgtaattacatttctggcagggtccacaccccccaagaaaaggtaaagctaagcatttcatttctacattctaaactctggaatcacagagcccagtttaaaagaaaagtcacagtggataagagatgtatataaaaaatacaaggtgtttctttcaaatcaggagttgtgggactacattcnnnnnnnnnnnnnnnctttcttttcttacaaaatgcgattttagaaaaggatagagactccagttcatgttatactacagacttagacagtgaataagtatattgcatgttttggtagtcagtcttcaggcttcctttcatttcccctagccccaggtttctttagggtaaagcatgtgagtcctgaataaagatacaaaaatgcatttgcagctcttttcttgaattctgcagacttcaaagcctgcaagtcatatattccatcatcaatgaccacaatttttctttagctttgtacacctattcttgtataacaacagtgcatggcacaaatgtacaagaaaataactggttttagtctctacagtttctatatggagtaaaataagttaaaacttttctaatgagaatagctgacaggcagcatacatctttattttacattttaaagtctctgcaggcatctactttggttagttatcaacaatcataacataagcactgatcagagaactgagcagcattccaataacgttaacagatatattatttctttttgaaatactgggaaagcccagttttaaaatattattaaaatgttctaacatttacatactatgaagagttagatctaataaaataacatttcttcaaaaataatcttgcagtgctcttttaggcatgctctgagacgttatcaccaaacatccataccttgaaaatatgactatcacatatccatacatcccaactcacacacacataattccttatacagaccnnnnnnnnnnnnnncccaaacccttatcccacatactgaaaaatcaatggtttttgcaaacgagtcttgatgcgtatagctgactgcatgttcatgtggatggatgattaagcatcaattgcaggttaggttttcatctgctataaatccacgcagctttgcaggtcttcagctaaaatgaaacagccttgatttcagcctcatttcacctgcttttggttgtttcagtactggaggccattattgcaaacattcttgggattcttttctttccccagaaagtaatgtatttgtatgcancacctttagcccgtttcttttcacgtacgctaagtaattacacattcttcttccccagttattgtggacatttggatctgttacttacacttgcttttcctttacatcttgcttttgtctcgtgctcgatcgtggctcgaaggcaatctcctacattggtcgtataattcggatcagccacgcggttccgtgtgaattttagcgctcacatctaccatactcattcgtacataaccgtaacgctgggtgctatgttgcttcatacatatttcttcgctactgcgctccacctgaactgtctgcaccgtctatacggcacttcgtgaaggcttgtgatctctcc

SEQ ID NO: 129529 - DNA, 938 bp, Homo Sapiens
  misc_feature (354)..(354): n is a, c, g, or t
  misc_feature (466)..(466): n is a, c, g, or t
  misc_feature (472)..(472): n is a, c, g, or t
aggaaagaaactaaactgaagatgatgaagaatattaaccaagcaccttttatggacccttgcattcactgataactttctggcagcatctactttttagtgtaactaatgtcaaactgtatcatcaaaaacaaagatctgaaagaaaaaaacatctgatattttaacagctgccaatatctcccacaataactgcgtgaagaaggaattttttaattacttaacctacgtgaaaagaaaagggctaaaagtgatgcctacaaatacattactttctggggaaagaaaagaattccaagaatgtttgcaataatggcctccaatactgaaacaaccaaaagcaggtgaaatganggctgaaatcaaggctgtttcattttagctgaaggacctgcaaagctgcttgggatttctagcagttgaaaacctaacctgcattgatgcttaatcatccatccacatgaanatggcngtcagctatacgcatcaggactcgtttggcaaaacccattgatttttcagtatgtgggataagggtttggggttttttggttttttggtctgtataagggattatgtgtgtgtgagttgggatgtatggatatgtgatagtcaatattttcaaggtatggatgtttggtgataacgtctcagagcatgcctaaaagagcactgcaagattatttttgaagaaatgttattttattagatctaactcttcatagtatgtaaatgttagaacattttaataatattttaaaactgggctttcccagtatttcaaaaagaaataatatatctgttaacgttattggaatgctgctcagttctctgatcagtgcttatgttatgattgttgataactaaccaaagtagatgcctgcagagactttaaaatgtaaaataaagatgtatgctgcctgtcagctattctcatt

SEQ ID NO: 129530 - DNA, 923 bp, Homo Sapiens
aattagggagccggcagatttacccactgtgtgaccagaaacgctgggtccgggaacagggaaggccaaggggcgaagtcgggagcccctgtgtgtccgccacccgatatagatgccctcgagtgttttttgttgggtgttttttctgaacgatttctaaactttatggaaaaagccaatgacaatcaattagccaaaaacgagacgccaaatcccatctcactccagcgccatgccctcttctcaaacgctcgccggctctaggacctctccaccagcacagttctcaggagtcctgctggtctcccagtgctgttctaagggtccacatgaaggcaggtcaggcgggactccccgggcaagcacttctgtacgcggaaagcacgaggcgcaggagccatggagagccggtcctttggagacaggaatacttaagaggattggcaaaccggagaaacgctgggagaggtgccccgcactgcggtggtaaggcagagtctcagttctcctcgggcttgtcggctggcggtccacaaggctgaagcatcttttccatcaagttgaagcggactcgcgctttgctctcattctccgcaatggcgaagtagttgagaaggtcgaagtggcccatgtaggagcagtacgagtcgcggtgttggttcaccagccactcccacttggtggtgtcggcgtggcccgtgccgatgtacttggactgcaggtgctccagctggctatggatggtgtagcggtcagtcatctcgccgctttccccttcgctctcaggtcagaggacgcaggtaacaactcgccgctctagcgttttacaggagagtgaagccaccgcgcggaagctccaggtccgcgcagtcccccggccgtaatggccgaattcccgggcatatgtccggtaccgtcgactg

SEQ ID NO: 129531 - DNA, 368 bp, Homo Sapiens
ccactgttcgatcgcggagaaacgctgggagagtgccccgcactgcggtggtaaggcagagtctcagttctcctcgggcttgtcggctggcggtccacaaggctgaagcatcttttccatcaagttgaagcggactcgcgctttgctctcattctccgcaatggcgaagtagttgagaaggtcgaagtggcccatgtaggagcagtacgagtcgcaggagccatggagagccggtcctttggagacaggaatacttaagaggattggcaaaccggagaaacgctgggagaggtgccccgcactgcggtggtaaggcagagtctcagttctcctcgggcttgtcggctggcggtccacaaggctgaagc

SEQ ID NO: 129532 - DNA, 989 bp, Homo Sapiens
aaccaggcggtgtgtcccaaacccgccctcctagggcccccacacacggggttacacccagcaggaactctctcagtgcacagaacacctgtttccagtcacaacctcccggataaatcttcggcaatccaaattccccaagtcaacggggccgctgtcacgcctcgaccaaacggttccccttcgtgagcaaggcctgaatctgacaggagtcatcccgagtctctccaccagcagctcccgcccaggcatcgccttcccagtaccctgtgagcaaatgtggacgcgcgatggtacagttccgctaggctgctcagcaggggacgcagcgcagtctccacagtcttggattccattgtaagacaaagccagcataaggctgccggaaggagaggcagccaaacttcatcttcgcaagcgccccgggcctcccgtagccttgatggtctcctgcttccgtctgtcactgatgtccagcaccacagcaggcccaagggaaggggctgggattcggctgactcaggtccatcccatggagtctttgggccggtccggagtagggcggggacagctgctttacggccagaggaggaaacactcttccacttagcttctttaccgtccgcaagaaggctgagcacacaggctcccgcagcatgggccctggcacctgtcagccccggcaggtctcacggcctccggaaccatggaccctgcgagtcgtgggtgtctagggccgactccggcttttcgccacaggaaagaacagtcctctgcctccccgagacccagcgaggccaccggagccaggacgatgggctcccaagcaaggagacgtgggccgctgtgagaagagggagcgcctggctagtgtccaggctgcaaggtcgttgccgctaactccgggaaaccagtggccagtgacaggtgttagcggtctataaccctcgtgccgaattcgccacccggcctcgtacctagccttagtt

SEQ ID NO: 129533 - DNA, 1079 bp, Homo Sapiens
cttgctgtcggcgctgcggggccccccttggtgggggccgattttcttccccccgaggccttgtttccctccgcgcccctcccttcagcggggcggggggtcccgggacccccccctcctgtaggcccagaccccgggtgacccgcagactcgttcaggtggccacagctggttctgtccacacctcatcggattaatttcgggcatgcaagttccgcaggtcaccgatcccgctatcactctcgccagcttttcgctttcctgaccagcctgaatctgagcaggagtcatccccgagtctctccaccagcagctcccgacaggcatcgccttcccagtccctgtgagcaatgtggacggcgatggtacagttccgctggctgctcagcagagacgccagcgcgtctccacagtcttgattccatttaagacaaagccagcataaggctgccggaaggagaggcagccaaacttcatcttcgcaagcgccccgggcctcccgtagccttgatggtctgctgcttccgtctgtcactgatgtcgagcaccacagcaggcccaagggaaggggctaggattcggctgactcaggtccatcccatggagtctttggggcggtccggagtagggcggggacagctgctttacggccagaggaggaaacactcttccacttggtttctttaccgtctgcaagagggccgagcacacgggctccggcatcaggggccctggtacctttcagccgcggccggtctcacggcctctggaccctgagagtcgtgggcgttcagggccgactctggcttttggcctcagagtacagtcctccgcctcctcgcgacccagcgaggccaccggagccagcgaggagacgtgggccgcggtgagaagagagagcacccggctcgtgtcagggctgtaaggtagctgccgcttactcccggaaaccggtggccagtgacagatgctagcggtccataacttcggctttcatgcagctcccgtcgtccccctcgtgccgaattcgccacccaggcctcgctaccttaggaccgttagagttactgcaacgggtt

SEQ ID NO: 129534 - DNA, 1362 bp, Homo Sapiens
  misc_feature (114)..(130): n is a, c, g, or t
  misc_feature (194)..(197): n is a, c, g, or t
  misc_feature (212)..(260): n is a, c, g, or t
cagagccccctctttgtgttcctagtggcccccgccgggtttctctctcttggggggaaacccacaacctctatgagcccccacttttctcccctttttccctttatagggggnnnnnnnnnnnnnnnnnaaaagagaaatggtttctaaaaaaacttttttcggaggggcccaagggcgggcccccccagggnnnngtttttttagtggtnnnnnnnnnnnnnnnnnnnnnnnnnnnnnnnnnnnnnnnnnnnnnnnnnttgtcatctacaacacatttatttgtacaatccagaaactagcaggaccaaaattagcagcaatgctgagacatttactggcagctttgccttctaccctaaggtcaaagtacttgagacattgcctgtgtgcctaaggaggcatcacacaaggaaagccccaccccctacttccttcatctgagcaaaggaacctgtttacatgcacagtgcttagtgggtgggactctccaaagcagtggaaattcatctttaacctaatttatacaggtctgcgtcacgatggcaaattgaaggtgccatgatttagctggtttctctggaacattcctttcaggagcccacacttgtcacacttcatgccccaaagggatcaggtgctctgggatgtctacctggaatacatccttgcctcctttcctaggtatgggctccagtaaccacctggggtttgaaatcacagtcaggtacttctgcttcaggttggtcagtgcagcttgattttctagttccacaacctcatcgggagttaagtcttcggggcattgcaaagtttccccaatgtcaacgagtcccgctatcactcctcgaccaaacttttcccctttcctgagcaaggcctgaatctgagcaggagtcatcccgagtctctccaccagcagctcccgacaggcatcgccttcccagtccctgtgagcaatgtggacggcgatggtacagttccgctggctgctcagcagaggacgccagcgcgtctccacagtcttgattccatttaagacaaagccagcataaggctgccggaaggagaggcagccaaacttcatcttcgcaagcgccccgggcctcccgtagccttgatggtctgctgcttccgtctgtcactgatgtcgagcaccacagcaggcccaagggaaggggctaggattcggctgactcaggtccatcccatggagtctttggggcggtccggagtagggcggggacagctgctttacggccagaggaggaaacactcttccacttggtttctttactcccggaaaccggtggccagtgacagatgctagcggtccataacttcggctttcatgcagctccc

SEQ ID NO: 129535 - DNA, 915 bp, Homo Sapiens
  misc_feature (257)..(257): n is a, c, g, or t
aggttaagtccttgggggcattgccaaagttttccccaatgtcaaacgagtccccgttatcattccctcgaccaaacttttccccttcctgaagcaagggcctgaatctgagcaggagtcatcccgagtctctccaccagcagctcccgccaggcatcgctttcccagtccctgtgagcaatgtggacggcgatggtacagttccgctggctgctcagcaggggacgccagcgcgtctccacagtcttgattccatntaagacaaagccagcataaggctgccggaaggagaggcagccaaacttcatcttcgcaagcgccccgggcctcccgtagccttgatggtctcctgcttccgtctgtcactgatgtccagcaccacagcaggcccaagggaaggggctgggattcggctgactcaggtccatcccatggagtctttggggcggtccggagtagggcggggacagctgctttacggccagaggaggaaacactcttccacttagcttctttaccgtccgcaagaaggctgagcacacaggctcccgcagcatgggccctggcacctgtcagccccggcaggtctcacggcctccggaaccatggaccctgcgagtcgtgggtgtctagggccgactccggcttttcgccacaggaatgaacagtcctctgcttccccgagacccagcgaggccaccggagccaggacgatgggctcccaagcaaggagacgtgggccgctgtgagaagagggagcgcctggctagtgtccaggctgcaaggtcgttgccgctaactccgggaaaccagtggccagtgacaggtgttagcggtctataactcttccgctttcatacagctcccgtcatccctttcacgaagaaccctcgtgccgaattcgccacccaggcc

SEQ ID NO: 129536 - DNA, 1007 bp, Homo Sapiens
  misc_feature (37)..(37): n is a, c, g, or t
  misc_feature (93)..(93): n is a, c, g, or t
  misc_feature (185)..(185): n is a, c, g, or t
  misc_feature (251)..(251): n is a, c, g, or t
tttttggaaaccattcctttcagggaaggcccaccanttgtcaccattttcatgcccccaaaagggatcaaggtggttctggggatgtttacntgggaatacatccttgccctcctttcctaggtatgggctccagtaaccacctggggttggaaatcacagtcaggtacttctgctttcaggtnggtcagtgcagcttgatttctagttccacaacctcatcgggagttaagtcttcggggcattgcaanagtttccccaatgtcaacgagtcccgctatcactcctcgaccaaacttttcccctttcctgagcaaggcctgaatctgagcaggagtcatcccgagtctctccaccagcagctcccgacaggcatcgccttcccagtccctgtgagcaatgtggacggcgatggtacagttccgctggctgctcagcagaggacgccagcgcgtctccacagtcttgattccatttaagacaaagccagcataaggctgccggaaggagaggcagccaaacttcatcttcgcaagcgccccgggcctcccgtagccttgatggtctgctgcttccgtctgtcactgatgtcgagcaccacagcaggcccaagggaaggggctaggattcggctgactcaggtccatcccatggagtctttggggcggtccggagtagggcggggacagctgctttacggccagaggaggaaacactcttccacttggtttctttacctttcagccgcggccggtctcacggcctctggaccctgagagtcgtgggcgttcagggccgactctggcttttggcctcagagtacagtcctccgcctcctcgcgacccagcgaggccaccggagccagcgaggagacgtgggccgcggtgagaagagagagcacccggctcgtgtcagggctgtaaggtagctgccgcttactcccggaaaccggtggccagtgacagatgcctcgtgccgaattcgccacccaggcctcgctaccttg

SEQ ID NO: 129537 - DNA, 854 bp, Homo Sapiens
  misc_feature (173)..(173): n is a, c, g, or t
acctcattcacggttgggttctgctaatcagagcggtgggaacctccacattctgtctgggtcacagggtgcaccagtccgcagagcagaaaatcatttcagcaagttgagtcacattcctacagctgagcacgctccatccgaggggagaaaaatcacacttcccctcccanttgtcatcggacgagggtttggggggcctaaatcccattgtccactgcttaattctggttaggtcatgctgagcacggggccacaggccacagagctatgcaccgcccggcctggggtccaggcgagcttacagcacaggggccaagcgggaggcagggaagaccgggccgagatggggccgctgtgtgtggagcagcacttgcagacgcaggtcgcgggtacacgcgcttagaaggaggggggccgagaccatggggagagcaagggacaccaaagggcgcttcgggcgcgccccgcacgggttctctgcccgaaacccaggggaaagaaaccccagcccgcaagtaccgtctgcaagagggccgagcacacgggctccggcatcaggggccctggtacctttcagccgcggccggtctcacggcctctggaccctgagagtcgtgggcgttcagggccgactctggcttttggcctcagagtacagtcctccgcctcctcgcgacccagcgaggccaccggagccagcgaggagacgtgggccgcggtgagaagagagagcacccggctcgtgtcagggctgtaaggtagctgccgcttactcccggaaaccggtggccagtgacagatgctagcggtccataacttcggctttcatgcagctcccgtcgatcccggga

SEQ ID NO: 129538 - DNA, 814 bp, Homo Sapiens
  misc_feature (728)..(728): n is a, c, g, or t
  misc_feature (759)..(759): n is a, c, g, or t
ttttttggatgtgaaatttgaaaggttttatttcctaactacaggcagctttaagaggctgattatctgccacgaccccccaggctgggaggcggcagcagggcaggggagagcaaggggctttggggtcgacctcctgggggagggtagccctggggccccgctgtgccctcactcgcccttcttgtaggcgttcttgatgatggcgtttttgaacagcgtcaccaggggcgtctggctcttctcggaggtcatgaaaccgccgtagcgcttgtccttgggcgggctgcccagcggaagtgctccatcctgtaggggccctcgtccttcttctcggccgccaccagcaggctgtgctccaggtcggcctgggcccctgcgccgtcatcggcagggccgtcggggccatctccctcccggagtcgctggccagtcagctccctcttgaactccagggggaaggcctcggccgactcgtcctcggcgccgttagggtacaccttcactgggcgccgcttcttgcccaccggcttgccccagcggaagtgctccatggagtaggagcgcttgccctcgcgcgggcccggcttggcaccatcgctgcggggctcggggccgccctcaggcagcgggccgcagtctttcgcccgctgagacgtcctcgcgcttctgccctgcgccgctgctgccgctgctgctgctgttgcggcggcccgattcgtcccagncgaagtggcccatgacgtaccttccgggggntctccgtcagaagctggtcgtcgccattttccggggaccatgggaatctcggccg

SEQ ID NO: 129539 - DNA, 762 bp, Homo Sapiens
  misc_feature (709)..(709): n is a, c, g, or t
ttttctctttctacttttatttttcaaattttatttctgtgaaaatgtatttgtttacataaaaatacaaatctgggtagcaactgggtatttcaagaaaacaccgtggacagacttgtctccattcccacggggaagtgaaggcgctttgataaaagggccaagggtgccctcgtgtggccacggagggaaatgccgcggcttcagcagaaaggaggggctccaggagctggtcgtgaagtcatcagctcccttctttcaaaaggcctcggatttcccacaggcttttccatcttttccactccttgcagttttgttattcctgtcacaacttagaagttcgagtgctcacatggtaagctttgatttccatcgagaggaaaggctttatgttttataaaaaatatatactaaagtaatctacacgaagcttaggatgagttgaaagggtactgccaaaacgcggccctgcccaggacacacagcagaggtctggagtggggacagtgcggccagcatgtgtggggaaggaagcaggctgacggaggcaaagcagattccgaagaacaaaagcagctttagtttgcctgggcaacaggctcaacttctgtctccacttcagttatcaggagaccagaagccgattctagggaccagaagagaatgtagggtcacatcaccaagatttaatttcataccaaccccgcancatgaatgtgacctccggacaccgggagagtacactcaggttatgacatatga

SEQ ID NO: 129540 - DNA, 3145 bp, Homo Sapiens
  misc_feature (131)..(201): n is a, c, g, or t
  misc_feature (203)..(204): n is a, c, g, or t
  misc_feature (206)..(206): n is a, c, g, or t
  misc_feature (208)..(210): n is a, c, g, or t
  misc_feature (212)..(214): n is a, c, g, or t
  misc_feature (216)..(220): n is a, c, g, or t
gggggggatcccagccctattcctggcccgggtttccttggaaacacggtatgccccgttccctttccttctggggccgcgcgcccaaagaagggttttgaaaactttttgagggccgaggcggcccacannnnnnnnnnnnnnnnnnnnnnnnnnnnnnnnnnnnnnnnnnnnnnnnnnnnnnnnnnnnnnnnnnnnnnntnntngnnngnnntnnnnnttccggagaccgatgcaccccacagtcagggtgattttatttctagaaaaggtgacaggtgctgcacgtgggcaggagcaggtcacagtgaggcagggccaggggcatccccctctcaacacaacctaggcgccagcagcctaccggccaggtagagcaagggctggcccatgtagtgagcccagcatggggagacgctgagggcccatggggcgccaaagccagggggcagcagcctccaaacaccgacagcgccacgtcccctgggcaggaaggtggatgccccagggcactctgtcctcctgctggagggcctggcaggctggtctcaagacaccagccggagggaggcctggcaggtggccagggatagaggcaggggatgggctgagcagggacgcagcccccacctgcctgcaggctccagacacaacagcccaggccccatctgagccctggcgctgcgctggcatgggtgggggctggggaggggcgtgggcatggctggcctcagaagcccttgtccatgctcagggtgcggcgggtcacgtgctccagctcccctgacacgtaggcggccatactgatgcggtattgtgccagcatcttcagcatgagccgcaggctcagccaccactgctcccgtggcatgcggtgctcgaaatcagtgtctttcttgagctcagtgacggggctgaaggccaccgccttcttcttcaggccgatcacgcaggccgagtctggggcattggcgaacacccgtcccttgcggtaaacctcgcgcagcttctccgacaaccacagcatggccttcacccccagcttggtcccatagttccggtcaaagggggttggagcgccaccctgctgcaggtggcccaggacattggtcctgcagtcgaagacgcccttgccctctgatgagtacaggttgtacaggaactccgtggtgtagtagtcatggcacttctcgttccgcagcaccaggcccctctgaatgtctgtcttcatcttctccgtcatgtgctccacgttgacctttaagtcgtggatgttgaaagggtcctcgaagacgtaggcggcgtcggcccccacagcaatgccagtcacggtggccaggtagccacagtaaccccccatggtctccacgatgaacacacggcgcttggtccccgaggcagactgtttgatgcggtcacagctctccatggcggcatttacagcagtgtcggagcccaggctgaagtcggtgccagggacgttgttgctgatggtggctgggatgacacacatgacgatgcagagctcctcgtagcgcccgcgagcctccaccagctgcagcaccccttcataggcctcaaacccaccgaccaccagcagggcgtgaataccatagatgcggatgttctccacaatggactccagctggcccttgggcagggtcctcttggtccccagcatggagccaccacgccccaaccagccggccacgtcgtgccagcctacttcttgcacctgacccttggctaggccttcgaagccatcgtgcaccacgtatactgtgtgtccatgggagatgccggtccgcaccgccgagcgcacggccgcattcatgccagccgccggggcccccacattcaggatggccagggagaagttagacttctccttggggggcttctggtgggcgaggagcttgtaaatgttccagttgttctcgaagctcccaccacggagctgggtggcctcgtcaaacctcttgtcatccatggctttctgcacttccttggtcatctgcacgcactccatgaggggcagccgcactgactggttccccgagagggtgaccacgcaggccggcgtgtcaggcgtggcttccagcagcgccatcaccgcctccatgcccatcttgctgctcaggatccggtcgaaggcagagggcgtccctccccgctgcacgtggcccagcacagttacacgggtgtcgaagcccagcctctgaaccaccaggtccttcacgtagctggacgagatgggcttcccgttgcggtcaatggcaccctcagcgatgatgatgatgttcagtcgggacccacggctccgagtctcacccagcctctcacacatgaagttctcccagccgtcctcggggtggagcctcggggatgaacagccagtcggcccctgaggccagtgcagataccagcgccaggtacccgcagtgccggcccatcacttccagcacgaaggtcctctggtggctctgggcagtggtggtgatggcatcgatgacctccatgatgcggtggagggccgagtccgtgccgatggtcatgtcggtgccgcagaagtcgttatcgatggagcccactaggcccgcgatgttcaggtgcgagtaggtccgggctgtagtctctgagatcttaccttccgccaccagctcctccagcaggctgccccactcgctgcggaagatgttggcacctgtaaggctgccatccccgccgatgacgcacaggttggtgatgccgtgctggaccaggttgtaggccgctgcccggcgcccctccctggtggtaaaggccttgcagcgagcgctgccaatgatagtgccgcccagctggatgatgttggagacgctcagccagttggcctgcttgatgttctcacctccctccacgaggccctcatagccctcgtagatgaggaagactttggcacccacataaatgcccatgcgcgtcacagcccggacagcagcgttcatgccttgcgcgtcgccgccgctggtcaggacgccgatggccttgcccgcgcccgacgcccgcagcttctccaggtccaccgcggccatggcggcggccgaaacacgggcccagctcgccctcgtgccgaattcgccacccaggcctcgctaccttagac

SEQ ID NO: 129541 - DNA, 1184 bp, Homo Sapiens
  misc_feature (633)..(654): n is a, c, g, or t
  misc_feature (671)..(712): n is a, c, g, or t
ttttagtggttcggagtttcttgcggctgcggctactacggctggtggaaccatcagaaacagaatagctattgatactggcatcatcgaagtcagattccacatctaagtcatcatcctcactcgaggatctcttacgcttggaaccaaaacctcccagcttgattttcaggggagctactttcttgggtttaggcttcttggcatcaggtacacgagggctgcccttgggcttcctccgagcattgggacctttgccctccttggtcttggccttgcggataggcacctccacagggggaggtggtggtgcaacctcagtggctgtcaccatgctctccaccacagctaccgctgctgctgccgcagctgccactgatgccccagaactgcctttgaaggggttattggtactgaactcccgccattttgcacccaaaaccatcatcatcttggagacagcaatcttgggatttttggcagcaatgaggggtctgacaaactggctgaaggccttgtagttggtgagggttcgataatcctcctctgagaacacgtggtcaatgtcttccatgccccagtcttccaggagctgagcagatgatttaggctcctttgaatcatcatcatcannnnnnnnnnnnnnnnnnnnnntccgcttggatttgccnnnnnnnnnnnnnnnnnnnnnnnnnnnnnnnnnnnnnnnnnngccaggagtatagtcgctgccctcactgtctgagcgcagagccacctcttcctcctcctccacaaactctggcccctccccagagctgtcccccagctcctttttttggcgcttgctcttagggattttagggtcccgaggtttcttaggctttttcttcttcttgagctttggagtctctgtttctgacaaatcctcttctgggtcctcttcattttctgggtggggtgggggcaggctgttgttcaaaagtgcatccatatcctcctcctcactgcccgccgagcagggggacggggagcccaggcccgacgccatccccttccgctcccggccagggaattggcccagctgctcctgccggcggcctgaggacctctacactggcccgagtcacccggagccgccgcaggtcgcgctgggtccggctcggtgtcactcccgctccggctcctcctcgccgcggccgaag

SEQ ID NO: 129542 - DNA, 301 bp, Homo Sapiens
tttaaaaaatcaaagactttattggataaaggttacacaacattctttaacatttaaaactctgagcatacttaagatgagaaacaatttttatcattcaagtctacaaaacaaaataggcttatgaagattgaaatacagacaaaaggtagcatgaagcaaagcttaaatattaagcaactaaagcaatgaaagtgaaatagcaacatggtaggtgtaggttttaaataccaccaagtctcattttttaaaaaatgaaaatctggtttgtaacaaaacacctttgagaatatgccatgag

SEQ ID NO: 129543 - DNA, 1155 bp, Homo Sapiens
  misc_feature (834)..(834): n is a, c, g, or t
ggtgtgctttctaaagaagctacaaaaaggaaaattaacctcaacatatcatacgagataaatgaagtatcagtcaaacacactttaaagctaatccacccaaagctggagtaccagttgcttttggctaagaaagtgcagttaattgatgctttaaaagaattacagattcatgagggaaatacgaactttctgataccagaatatcactgtattctagaagaggcagatcacctacaggaagaatacaaaaagcaacctgcacatcttgaaagactctatggcatgatcactgatcttttcatagataaatttaagtttaaaggcaccaatgtaaaaactaaagtaccccttctattggaaattctggacagttatgaccaaaatgcattgatttcattcttcgatgcagcatgacatacaaataagtgttttatgactctgctgcagtttgtggaaatgctggacttggctcagtgctataaatcgtagccaggaaataagaagagcttacacagagtcgggggatcttaattagacatgctgtaaccagtggagctattcagcgtgcttcaagtgaagagtgcagaaatagtgatgccatcttagattttcctacactagtatcttctagatctctttttatcatatatgacattaaggctacagaagttttgtgcattaatcttaattcatatttattaatttcaagggaatattgaaaggttttaaaatggcatacagataatggaaaataagctttatgtttcaagaagggcagactcacgaattttttagaaaacagtgcttcttaatgatatgctattatacttnattagttatgtgcaagctttgtatattcttatatttatatataaatataaaaatttgttaaaggcacgtatagttaagagagttttattttaataaggtcatattgtttttactatgtttaaaaaactttacttctgaaaggaacataattatatctaggtcactagaacgtcattgtgttttttgttggttgccacagcttggggaaaaatagaaaaaaattaatgactgtatttgaatattttgtaatacactgctatttattatatatatcaacagtagttcaaggtgccatcttaaattaattgcatcttcattagg

SEQ ID NO: 129544 - DNA, 609 bp, Homo Sapiens
aagaattcggcacgaggcctgctgtttataatgttgaatttctgtaaaataaactgtatttgcaaatccaacattgagcttctggactacgctgactccactgctgaatcctcaatggaaagggtcgactggttgcagttgaaatgacctgaaatgtagcctctgtccttgtaagtcagttgacttgccgcacatctctttgtgtacttgtacggtactggcagaaaagtcatttttcaaaagccataggcttttccttgcccttagctgtaataatgcatctgattttgatttcctccagagctgtgtttctgtccatcacctgtgtattggccctgtgtttaccactctggcccactcctcacccccttgctcccctggtcttctggagtttgtgacattgatttgaaatggatggtgttctcttgagagcaagtgagattgttagaattaagttccaactatacagttttctaacatagctataaggtccttgttgctgtttgtgataactgatagataactcattggaaacgtgcatacatttatattcagatgaaattatggtttgcactgtctattaaatatctcgattaattttcaaaaaaa

SEQ ID NO: 129545 - DNA, 691 bp, Homo Sapiens
  misc_feature (566)..(597): n is a, c, g, or t
ggagcgcaagaacccggcggcaaggggtaaacaaacgacaagaggacggagcaaacagggtacagaaagagggtaaagataggggagagagccagcgcaaggcgatgcaatgggaataatccagctcgagcgtggagaggggcagaatgaggagccatacccgcccgtggcggatccatagcccaggacgcagagcggtccggaaagaaacaagcatggctcaagacaaaccacgtgggtgggcaccaatgggcgcccgcacctaccgcgtagccgccgggcgggctcagttgagaaattaggccagtaacaattcccaccggaagcaggtttaacctggtagcgaatttaggccgaaccgctatagggaattagccctaggaggcacgaattgggcaagagggacgaccaagagtaggggcacagccagaaggcgccaaccatcaggaccaatcaaatgctgtcaaagttacagttaccgcaggacattcgtcccgtattctcatgatcccagataagtgtgtgttttatactgcaacaatatgcagcaatggtaagcgtaaagnnnnnnnnnnnnnnnnnnnnnnnnnnnnnnnnatattatgaagtcttttaacagtctctctttatataaatacacagagtttggtatgatatttaaatacatcatctggccaggcatggtggctta

SEQ ID NO: 129546 - DNA, 689 bp, Homo Sapiens
aaagagatctaaaatgtttttattaaacattctgcaatcttttaatggcaggaccctaacaatgtgctgggacatggggtcacgtatcaacaaggaaaaaagtcaagaggaaaagtccctcagagttagtctgctttatagagtttctttttagcaagtcagtttttccagtgtaaggtatgttcatgggcactgatcttcttggagtgaagttaacacaacaataatgacaacaatagcaaaactgaggtttctaggagagaaattcctcttttcccctctgaggggcaactcattgacaactcaatgttgtcaattgtatcccttattctatcatttatctgtgaaagccagtaatagcaccgtcacctcctccaccaccttccaccttgccctgtcagaagagtccttgccttctcagtttctcagtctctgtgtggcttctttccagccacacaatgtaacctccaacctcatgttcttgaccttgtttagttcctacttctttttgatggacaagaatctcattcttcctaaggacattctgttactggcttcttgtgggggtgttcccatcttcattcctgcccccacaccagttcttttccatatctaccatatctatattggtcaagaagagtttggcctagtttttcctgctatagtgtgtgtggtggaatgcctcgtgc

SEQ ID NO: 129547 - DNA, 537 bp, Homo Sapiens
aaaaataaaaaatcgattttaatattttctgcctctttcccaaattacccttcccacttgctcgacaaatctatgtaaagcagtttgttttttcatgttttaactttaccttgctctgtgttatggtactggctgacatgtctaagactggatgtgtatatttattatggtgtctaaaaatcatgaagttcatcacttttcaggagtatagataaaatcaaattggtagtacatcagagttacttttcagtgcaccatgacatcactaaaatgagtgctgtaatgttacagggctttcaggtttgtaaaaacataaccataaattatattgacgtcagatatgagttgagtatctataaaatatcacgtgtatctcaaaatattggactgctgtttgactggatattgctgcataattttcttctattgtcccatatccttttggagagagatttaatgggatttgaaatgtgcaagctgtctaaataagatgcagtcaaataaagtatggttaagttgtgtttgcatttttctttt

SEQ ID NO: 129548 - DNA, 1441 bp, Homo Sapiens
gcagcaaccaataatcaccgttattattaagagcagtttctagtacagagcgcctcagggcacttacaatccccacagaggccagctacccaacatcagagtctgaccagctgggtggtcctgccctgcatccgagagggtgtcgggacactcatccagatggctctgagacagcagcagagctgacaaggaggccccacaagtgagattcctttggcttcaaggtcgcaagtcctgtccttgggcctcctggcctgctgagcctcccaccggctttaccctcagagattgctgcagaagcctgtgtgctggaatgggctgccacatttctaggaaggaacccgggggcacatgtagcctggttattcaatgttatcatagacgtgaatcacatcctcgtggttgctgagagcctgaatgagatgtgcggcctgttccaggtcgggctcagccagctgcacctttgagttggggatgaactctagtgcacaggacacagaacacaggcccagggagtccagcttcttcctcacttggtgcagtgaagaggcatcacaaataaatttaaaaacgttcctttcttcttcatcttcagtttccttgacatcctcagctcctgcttcgattgccatctccagggcacgctctaggttcacagccttcttctctctgtcctccacttcaaccacaatcaccccctttttgtcaaaagagtgacgagctcctacagccatcactcctccattcttattcaggatatgtctaatgtctgcttggcacttgtggctactgttagataatgcctcgatgagcagagaagagccaccagggcctcgaccctcatacagcaaataagtgtccttggatttctccattttcagtgctgtctcaatcgttgacttgggcatatgtttgctgcgacacacctctaagatattggccaggttgctgttgtgctcagggttggggcctccttctttcactgccaggcggatgttcaaacagagtttggagaagatgcgactcctttcgacgtccttcggacccttgatgtgcctgactttggaccacttgttgtgcccggcggggacagccgcggtaaagtgcagcgtcctgcccggagcggcaccgcagccccggggctcggggtgggagggccgggggtcgcgcggaggagccgccctgaccccggggcctcgtgccagcaagcatcgggcagcggccctgcttaggctggcagcagcccaagccgacatcggtcccgaccctggggttcaagctgctagcagcagcggccaacgccggcgcgtctcttccactgccggaacaagcagttccggaccccgcggccgcctgtgccggtcacctgagatccaaaggcttgggcccgcccggggcggctcaacagctaatgaccctacactgtccccgccctcgtgcc

SEQ ID NO: 129549 - DNA, 480 bp, Homo Sapiens
tgaggttcatccatattttatattcactcatcagtagttgtacacacattcttaaagtagcattttcagatatgaataagcagggatgaaataagtattagggtaagggaaatggttgaggctttcctaagtgaagtgtaaaaaccacagctttctttttaatgggatgtctaatatgcatttatctgttcaagcattttaagatttccatgaaaatgtcctgaaaaatcaagattcttcattgagggtgaggatctcccaatgggagactgctctgaaaagagcatgtgctttttgaattagataacctactataatcatggatgttcttgaatacttagcaaacataccagcatcccaaagtcaccaagataaaccctcctactccaacatcacatgatcttctaattctacctgtaaaaataagcataacaattaattagaatataattacgttatatacattactccacctataag

SEQ ID NO: 129550 - DNA, 930 bp, Homo Sapiens
  misc_feature (818)..(852): n is a, c, g, or t
gagtatttgctgttttttaatgggatagtaataaggttgaggtttttgttaagggacgtttacttatcatcaaactctatacttactactacaaggaaactccaagtacattaaacactatgttttataattctttgccacactgccaataaattctgttcacattttaaggatgacaagtccactatatgtaacacgtaagaatgctatcctggcagtagacacagggccagaataaactggcaagttttcattccacacaagtgtgggaaaaaaatgactacaacttaaactttatttacttgattgagagcttattgcacatgaaatgttttatgtggttgatcttaacttcgtttacattgacttctatgctcaagattgttcaattgctgctgctgccgttgtgttttctttcaggatcgaggtgggtaccttcatataatatcttctttttaatttcttctctggcaattctttcctggattctttgctttgcataattatacctacaatgaaaccagcatcccaaagtcaccaagataaaccctcctactccaacatcacatgatcttctaattctactagtgaacaaaaaatgtccaaagccagccacaacagatcctaatgaaccatacaatattgaatgccgggcgcagggagtattttcaacatctaaaaatcctaggagcttaagggacttcctctcctcgggctcaccgggctccggcggggcggccatgaggactactccgcgactccacccccccggccgtaatggccgaattcccgggcatatgtccggtaccgtcgactgnnnnnnnnnnnnnnnnnnnnnnnnnnnnnnnnnnncgccgcttcctcgctcaaagactcgctgcgctcgtcgttcggtatgacgcggggcccctatatgatcgatcaagtcct

SEQ ID NO: 129551 - DNA, 393 bp, Homo Sapiens
ttgcctacaacttaaactttatttacttgattgagagcttattgcacatgaaatgttttatgtggttgatcttaacttcgtttacattgacttcttttctatgctcaagattgttcaattgctgctgctgccgttgtgttttctttcaggatcgaggtgggtaccttcatataatatcttctttttaatttcttctctggcaattctttcctggattctttgctttgcataattatacctacaatgaaaccagcatcccaaagtcaccaagataaaccctcctactccaacatcacatgatcttctaattctaccttcctctcctcgggctcaccgggctccggcggggcggccatgaggactactccgcgactccacccgccctgcaccccc

SEQ ID NO: 129552 - DNA, 703 bp, Homo Sapiens
  misc_feature (59)..(59): n is a, c, g, or t
  misc_feature (578)..(578): n is a, c, g, or t
tttttgcctgtggtcactctttaatagatgccctgaaacatagagctcacacttcagtngggaagggggaagccagtgggtgaacaggaggctgtgccccgtgactgacagcaagtcactctcactgcaaacacaggctatgccaaaacccagcacacacaggcagaactctgccctgctggctcctgagccctgcgctggcccccaccccacgctcctggagggctctgaggaggaacagaggtggggaaacatgggagatgggcacagccttccacaagcctccagcatgggatacctagtggctcatccctgtgtgcttctcgatgtgtagacacccacatgccacctgatccaatgccccagacccctctagaccacgcatagccccaccctgagacatgctggaagcaagcacagtgaaacaactcccaaagcccgagccccagcctgcagaccctggacaccaccccgcttccaggcacagggaccaaccccccatgaggctcatgccaggcagagtggggtacaaggcccggaagctgccagtgctggccagagacaccgtcccgtcctcncagacaaccctgtgtggagccacgattgggacccggcgccatctggagcccagcactcacacggtgggctcctctggggccacaggaagtccagggagaaaacaaccacgtgcctggggccctga

SEQ ID NO: 129553 - DNA, 703 bp, Homo Sapiens
aatcaaaaccatctttattatttaaagagcatcccatcatcaggggcacctagacaggagtcccagacagcagaacaatatttacatgggggtcaggagggtgaggttgggtggtctcggggctgagtgggcccgccactgtggaagagaggaccctggagggagggtgtccttggacctgtggaccgggcccaagaagaaaaacgtcccatcctcggcccagcgtggatcccaccaccgggatcacctcgggccctggaggctgcgcagcgagaagccaccggtcagagctgggtcaccatgccgctggcttcggagtgagtctttatggcctggaagatccactcccggaagtcactgactttggtgtagacgcctggcttctgggccagggcacagccagtgccccaactcacaatgccacacagccgccaacgtggcgtccgagagatgctgtcctcacacacaaagggaccaccgctgtcgccctggcaggcatcaatgccaccctcggggtagccagcacagaacatcttgggcttgatctggtttccatagaagtcagcgccattgcagacatcattgctgattatggggactcgagcctcctggagtaccccggcctgttggccatagtactgcgtgttgccccagcctcacggtacagatcttgccattccacaggggaccggtaccgagtgat

SEQ ID NO: 129554 - DNA, 1086 bp, Homo Sapiens
tttaaggcagaaaccagcttgtattggttaccaggagtgaggaaaagccgggcattacaatccgttaactgtgagcttcagtgtctccaaggagaggagatgtatattttaaagacattctttctgtctgatttcaactaaggtttgggctatacgaccagacaaacagtgtgattattcccagcttttcgtttctaaagtgagcacgcgtctttgtcttcctgcacccctcactctggcgcaggcccagcgatgctctgagctcctgcgggcggggaagtaggtttttaaaggccacgtgagctgacattagtaccttctgtgtgaatgagaacaaaacatttgggactgaatatactgcaatgtacacattcataagaaacgttctaataacaattagcgcacaaaactattggtataaacatttttccaaaaagagaaaactattgcatttcgttagaaatcgcgtcctgggccgaggctcgtctttcttctctgcagttggtttggggacagaactccagcacgcagctgtccaactgcagcggctacgtgtttccatggagacaaacttggtgtctcaagttcagggcttcgaaagtcccgaatatttgtttgtcccgagagaagagttttgactttgaagaggtccaggtgggactcgctgggggtggggtgctccgggattagttcagagggaggtgttctggaagactccgtggagcgggacgcaggcactgctgtttggacgacacgcgggatggctgctttctgaagttgtggctgtgacactgaccctgttggacaaactccttccacagccagtggcttgatggtgacggtgaacttggacagagtcccacatccttcctgctgctgataaaacttctggttttgattttttgaaagacactgctgtgtcctggcacgagcgagcccgtttctgtggcttgttctttttcgagctgcggatctgccgggacacagcgattgtcagctgcccctcaagtcctttggcatctggagatgggttcctgcagcacagccggcctcccgcctcggggcatccggcagggaggtctggat

SEQ ID NO: 129555 - DNA, 389 bp, Homo Sapiens
ttttaacaggccatgaaaagattgttttattccatgtaaatattctcaacagagaacactatctttaaatgaaggatttaccattaagaaatcaacatgtgcacaaaaagagtaaaaattaccaaaaaattaaagattttttgggacaattcacatgttcaaaatttaagaatgatttaaactgtgcaagtacaaatgtctttcctattataataacccatatacaggttgcactattccacatcaaggaacttgcctcctacggaagcaaatcctgcttttagaaaaacaaacagtagcttgaaaagaacagttagtccttacaagaaagtcttaaactttgccctctgtggctgttagccaaaaaaccataagcacttcaggctttg

SEQ ID NO: 129556 - DNA, 786 bp, Homo Sapiens
ttttttcaagatagaaggtctttattcaatagcagatgagagactatgcctcagtcctctgaggggatgcatttccccccacataccattcctttcccacgtttccattctctgcaggctacagcttgatggaaaaaaggggattgttctagaggtacttatacacaacctttgagggcacagtttggaggtggagtcgcacaggacatttgtaaaagtaggacagcaaagtttcactgtagcccacgaggaagtagtacttgtgtggagacaactgcctcaggaccacggcacagatctccaactggttaccccggcgctttaaaaccagctggtcagccaggcagcctgggaaggtaccccacatgaacttgcgaaggaaaacatcctccaccgttcgctctgcggcatggtcctctccatccaggttacctgtgtgcagcgacagccagcctttacggtgggcgatgtagtgcggcgcgtgtgcctcctcgtaggtcaccggcttgtcccccttgcttacgcgtactcgggccgcccggttcttggcgcagaccggggaggtgtgcagggcgcgccaagcgcaaggcagctctcggctccaggacagcacctgtggagggagggcgcgtgaggcggaaactagggaccccacctccgactcgcagggacctgccgagtcgccccactcacccgtggccccagcaacccgctgcacacggaggccgccatcttggccaagccctcgtgccgattcaacacccagcctcgtacctagactagttt

SEQ ID NO: 129557 - DNA, 809 bp, Homo Sapiens
  misc_feature (46)..(46): n is a, c, g, or t
  misc_feature (48)..(48): n is a, c, g, or t
  misc_feature (139)..(139): n is a, c, g, or t
aggtttaagaaaatttttccaggggccaaagggggccccaaaaaantnattattggaggcggcctgggctcccgggggattagtccccgtatgggccccggggcgcccgtcggatttggtcaggaccgttcggtttccnttacaagatagaaggtctttattcaatagcagatgagagactatgcctcagtcctctgaggggatgcatttcccccacataccattcctttcccacgtttccattctctgcaggctacagcttgatggaaaaaaggggattgttctagaggtacttatacacaacctttgagggcacagtttggaggtggagtcgcacaggacatttgtaaaagtaggacagcaaagtttcactgtagcccacgaggaagtagtacttgtgtggagacaactgcctcaggaccacggcacagatctccaactggttaccccggcgctttaaaaccagctggtcagccaggcagcctgggaaggtaccccacatgaacttgcgaaggaaaacatcctccaccgttcgctctgcggcatggtcctctccatccaggttacctgtgtgcagcgacagccagcctttacggtgggcgatgtagtgcggcgcgtgtgcctcctcgtaggtcaccggcttgtcccccttgcttacgcgtactcgggccgcccggttcttggcgcagaccggggaggtgtgcagggcgcgccaagcgcaaggcagctctcggctccaggacagcacccgtggccccagcaacccgctgcacacggaggccgccatcttgggccaagcggagcgcccc

SEQ ID NO: 129558 - DNA, 1009 bp, Homo Sapiens
ttttttcacaattaaaaacagaactttattcctccaagtgttcaggtgtgcacttggggaacagccatgctccatgccacacagtcagtcggcaggcccgcctctgttcactgcggacctggtcagtcagcggccagcagatacctggcctctggctgcctctcttgcaggctgggggtgggctgtctctcgtcagcagggccacgggcttctgagaaagtgcttgtcctgctgctcacaccagccgcctccgcttccgggtgtgcctggcatgccgggttctgagcacgtccaggtcgtcagggtcattagaagtatccaggcaggaggaagcagagcatttaccagagtctggggctccctgaatggggcatgtggctgtcgtgcagcccggctgcccgtccctgtctgcaagttccagctcactcaggaggtcttcatcctcactctcagagcccaccctcgaaggtactgagagggtggtgcggacgccttggggggccagggtggccaggagcgcagggagggtgaaggctgccaggaaccgcgcccgcaacaggaggtaggccgggttgtcctggagctgcccccgcaccagccccagtgaggcttgcagtgctccggccggccgctcagcctcgccccccaccaccagggaggtggccttgtgctccagggccttcttgtggagtaggagaccggacagagctcgcaggctgcacagggctgggggctgatagggcagtctgctgcccagaagaggcacacgcaccccccgctggccccccagccactgctgtgtggccgcctcagccctcctgggacagcaggcccaggtccagggcccccttctcaggcccaggctggggtaggggcggcttctccaggtccagggcccccttctcaggcccaggctggcgcaggggcagcttctccaggcccagaggccacctgggctcctgtgcctcgtgccgaattcaccacccaggcctcgctacctagaccgtaa

SEQ ID NO: 129559 - DNA, 1422 bp, Homo Sapiens
tttaattgcaactgcttttctgccgtgcctctcttccctacccaaaagtgatgagttctgaacaagacaagactgtcatattgtagagactttggtatgtgataccatagaatactgattggatagccatcctagtcacttaccaatactgactagaagttaactcttaattctaagctatcttaaaatgcatatatatacttcttgcatggaagagcaaaacaaattcaagttgtcatgcctgataatttcagatgccaccgtatagcaaagggtgaacatgttttcaaccctttaactttttacggtgtttgaagaccagctactccttaatatttatcaatggattaagaagtttaagattttgcagatttatcaatttgggtttttgtactgaagttgtcttgcggctttgcaagtgtccctttatatttaaatttgaaagttgtaagcactgatgttaatgtgattgatcagcatgggcatatgtaaaatgtccttttctggttgcctctctatgctattgtgttcagatacttacaccataattaaacagtaagttatagacttgctgagtttggcatagatagtgcactcatttaatctgtgcctctcaaaacttcagaatattagcatattaccacaaataatttttggtgaaactattgagatattaaaatttttgaaatcactactgttacctgttatagaaaatagtgttggcttagtctagtctctgtgtaactggttacattttgatggttgtctatactcaactggatatgtgtatgtaaattagaaaatacatacctatccagacataaatgctaagtaacatttttttcttcctccaactacataatttgtagctcatcatttttccttaatcctttcctaacttgttgcagcagtttgaatttcccagatatttatgtttgaacataatggctcagaatacatatttgaacatcatagttgtatatatttttaaagtagaataaataatggaaagcaacttgatatacaagtttatactaaaatttcaactgtgtgaagatacattttaaggcattactttgctaataatctacacattcttttttctattaaataaacaaatggtttgtggttcacagctttcatccaagcttggtgataatcaattttgaaaatacagtggactgaaaagcaaatttattctttcgaagatttcatttaaatctctgtactatgcatttttgtttcagtttgtaaatgtgtaacatttatagttaaataggacaaagcaggccctatgactattgttttcaaaaaattaatatataaataattcagaggggtttttcatttacttttgaaaagaaatttctttaacaggattgcacctatcaatttcttgtagaataaaaccaaatctttcaa

SEQ ID NO: 129560 - DNA, 717 bp, Homo Sapiens
tttcgtttttttgctttaaataccaaaactacaaaaatcagtttataaactgtttttccaaaacaaccaccaaaacaaaacaatcccccaaatcagggcaaaacaaaatactgtcaaaagtgttaatcgcccttctcctaaaataaaagtcatccacactcagccacgtgattgggaagagaaagggggcttgctctacttggcgaccacatggccgggtggttcccaagagtagccatggtttatgattttgagaaccacggagtggggaacagctgttctgactgcccccctttttctagacaaggggtaatatttcagattcagctagaagagctttccaatgtttaagatgtatttttaacccttaatggtttgagcctccccaacttagcctacttacttttctatgggtttgtgatttttcaacaaattgtgcaaatcagagcccttctatgtaaaggcatttagtagtccatgatcgatgcagattgtcacatactatgtcccgttttgcgggtactaacctgaacaagatattgctttgcatgtattgtccatggtaaggagactccattttgatctcttcccagaaacctcatcagaatcaagagttgaggcactggccttttggtggttttctgcccctccctgttcccactccccagccaatgtatctgtctttaagggtgccaatccagagacagcttgggttct

SEQ ID NO: 129561 - DNA, 1419 bp, Homo Sapiens
tttttttttcaggatacaaaaggtttattgcttataaaaataagttaccaaaacccaagccccacaaaacacaagaaccccgcatgacgatacccatgaacacaagggctcattccagtaacagctcgcggagacgacagacaccagcactgccgacacacatggacgaggagcatgctgcacagcttccttctaccaggttctagaaaggtcttctttgccttcagtccgctggctagtgggaataattagtcccatcagccacagagggagtctgctcttcaagagtggcctctgcacacatggcgctgctttatgaaagggaggagcagctgtacacatctgggcagtgaggaaccagctgagccttctgtgggcttcctgcgtgtctgggaaggtgctgggtggggtctgaggctggggccagcgtgggggctactgccggcaggtgtcatggaaggcttcgagggttcggaaatccctccatgtcgggggaaggccgtcctgcagaaacttcccgcagcgctggcacggggcctggaacagctttatgtaacttcttaaccaggtcatgaaggatcggaccacgacatccggcatctggggcagctgatagtggagcagggcagtggtggcatggtctgtcaccttctggaatacttgatagttggatttggaccatatatcaagcttgccatcttctgtgtagacattctcgttatatccctttactattgttcgatcaatgaacaggctccgcatgacgacgatcactttcaacaccttttcccaaggtcaccagaagcattgctgatgttccattgggtctggataagtggatggacatttcaggaaacatcctgtcaatgcggctgatcacatcatcaacatattgaggtggtaggacaagagttgtgggctgagcctttggtctacgtttggcagatactcccatctgattagcggaacgcttcaatgactgctgatttaaaaggccagatgctagtcctgcatggtactgcaacttgtttgaccacttatatgcttgaaggagttgactatagagaggagttttgtcctgcacaggatccaggcttaacagcccactgttatgaagaggatggttctcagatggcttgcctaccagattgctcagacgttccagctcattgaggtcccggttgaccgaatgtaagttgtcctggaagtgcgcaataaaggccttctcccggccctccagcgtctccttgttccgcatcccatccttcaggcagtcgaacaccctgctcacgctggagcgcagcgcctggatggcactaatggcctgggaaaaggcctccaggttcacactgacatttatcactcgtgccgaattcgccacccaggcctcgctaccttaaaaccgttagagttactgcc

SEQ ID NO: 129562 - DNA, 942 bp, Homo Sapiens
  misc_feature (812)..(812): n is a, c, g, or t
tttttcattttcaaaagggcttttattaaattctccccacacgatggctcctgcaatctgccacagctctggggcgtgtcctgtagggaaaggccctgttttccctgaggcggggctgggcttgtccatgggtccgcggagctggccgtgcttggcgccctggcgtagtgtctagctgcttcttgccgggcacagagctgcggggtctgggggcaccgggagctaagagcaggctctggtgcaggggtggaggcctgtctcttaaccgacaccctgaggtgctcctgagatgctgggtccaccctgagtggcacggggagcagctgtggccggtgctccttcctaggccagtcctggggaaactaagctcgggcccttctttgcaaagaccgaggatggggtgggtgtgggggactcatggggaatggcctgaggagctacgtgtgaagagggcgccggtttgttggctgcagcggcctggagcgcctctctcctgagcctcagtttccctttccgtctaatgaagaacatgccgtctcggtgtctcagggctattaggacttgccctcaggaagtggccttggacgagcgtcatgttattttcacaactgtcctgcgacgttggcctgggcacgtcatggaatggcccatgtccctctgctgcgtggacgtcgcggtcgggagtgcgcagcaagaggcggggccagacgtgcgcctgggggtgaggggaggcgccccgggagggcctcacaggaagttgggctcccgcaccacccaggctgggcgggctcccgccgccgccgccaccaacncacgtccaggggccggtagacaaagtggaagtcgcgcttgggctcgctgcgcagcaggtagcccttgatgcagtgcggcagcgcgtcgtccgccagctggaagcagcgcccgtccaccagcacgaacagc

SEQ ID NO: 129563 - DNA, 1377 bp, Homo Sapiens
actgggggaggaattccaagcccttagtccatggcccagggatttccctaggaaaacaagctatgcgccatgttcactttacctaccggggcccgccgcgcccaaacggaatgggtttagaaagtttctcggagggccgagggcggccggacaagtttttgtttttgtttcctaccccctttcttcttggttaacatttatttaattttgggaacacagtaaaaaacagaaacaaaacatctatttcttcacaattgtgaaaatgtctggcttgaaacacctttgacatttatctcactttcgctctcaagtttcaggctgctgcatccatggcggctagctggcagtgatgctcttttctgctctcaaggtttctttgggcttggaatagttccacggccgtctattttctgtgaatccataaagttttctaagggccactcgagcagcctcttcttctgcaaccaatactgtttccccaggtccttctgcaatcaactttttatcacagtataagccaacaaaatacaaaggcaaagctgtggtgccaccagactgcctagtaagtcttgattcaggagctgaaacattccttttcttcagttcttctaccaatagccccatgggatttattatcttccacatctcaaagagctcttttccagtcatttgagtaattaagaagtccctgatgaaaagtgcagtcctctcaggtccactgctctgtaacagggctccaataactgcaaagaaagtctgctgtaacacagctgggggcactgggaattcttcactcagtgttaactgctccacagccaagtttctagccacgtgacacacgacttcctcaccagtgagaaagtcaacaagattttttatgccttcagtgggcatgtctgggtactcgtcttcaagaaactgtgtaaggcaagtctgtgaaaaagatgtcccttgttcggatagttcttgattacttttaagattcagaagaacagcttctttctctatcccaagttgttggcgtttggcctcctcacttttaatatagcagctattaacaaatgcagttttgagaagatctaaggaaaagttttcctgtaaccgatgtccaaaagcttgtatttctgcatggtaatcccagttcggcttctctgaacggcgcacgggcggcggcgggcaccgcagaaggcgctgccgctctaactccttctggaagcggaaggcggcgcggaatcccttcttcactccccgaaccggagggaccagcttgggggcgactggagccaggaggcagcgatgtccctgctgcagcaatcttaccagcccggacgcccggacgcggggtcgacgatatcccgggaattccggaccggtcca

SEQ ID NO: 129564 - DNA, 3421 bp, Homo Sapiens
  misc_feature (122)..(130): n is a, c, g, or t
  misc_feature (139)..(139): n is a, c, g, or t
  misc_feature (348)..(348): n is a, c, g, or t
  misc_feature (360)..(360): n is a, c, g, or t
cccctctttggtatgtgtaccccccaccactgtgggtgggcgcccgaaatttttctttatattattctcggcaccagagaggcggggggacacataacgattgtcgtgctctggataaatannnnnnnnnatggagcancgagatattctcccggggggttttttcatatatttaaaaagctgtccgcccgattttttgcgggggaaattgcggtggttttttcaccacatcgtgtgcggagcgccaggaaaaaaggtgcccgttttaaatcgtggacacggtgttatgcccaacccccgtgtgatctcttgtgctcaaaatatagaacgtttgcgtacaagggggcnctcggggggggncgcctcttaaaaattttgcggaatatatcttgcgggaaggcgtctccgggccttttggagagaaccttaccccctcgttgtttagaatataaagagacaccccccacaggtgaaaaatggtgtccccttcccaggaaatgtttctccgaatttctgggggatgttatttttccaacggacacgcgcttctcagagttgttccccaccccggggagcgggtttttgtttattttgggtggaaggaatttcccaaggcccatttaagtccaaggtacccgagggagttttctctatgggagaaccaggcttatggaccccaagtttcccctttacccttaatggggacccggggccgccaaaagcgaaatggtgctaggaaagctttttcggagggcgcgaaggcggcccgaccaagaagggtggggtggtggtcggaatcttttttttgggcattaagagttctttattttaccagaagggacaggcagtggggcagtgcaacatccaagccccagaccagacatgcagcatccacatgcaggaagagctacacaggctggggcagggccagggtggggagctgggaccactggacattcacagcacccctgccaagacgcttgggtcctgggctcttctgcctccattggagcaaggagacagaggattgggttgcttccccatggctggaaccccatcactctggccaggaagaaagatggcacaagggctctggggtctggccaggctacagcactcgattctgtacagggttggcacagccttgtccaccagaagggcccaacacccaggacagtgcagccctagcaggaagaaggtctacacacttttctgtccccaacagggctagaccctcatctcagaaaacttagcagagttgggaccaaaccgcaccgccccagcaggaacatgcccatgaagaggccttccctgagcacaagcaggggcctcctaaggcagtaggaaactgaggaagctgctgtagacaggaggccttgcctctgtgcccttggggtcagggagaaaggacagggtatgagcgctggctggggccttgggtggatgaggggaaggacagtgtctctgggccctgcaggtcatggctgcccagacctagaggggcagcagcaggtgaggctgtgggcttcctggggcagggtttagggctgggaagaccagtccaggagagaggacagtgaccgtcctacccagaacccctgcccatgctgagctctggccagggccatagggaggatggacagatgcacagagaacttcaaggcaccaggattctgaggagcagcagggccaccccccacagagagtgattgtaataaacatcttcagcttaatctacatgatgtgcatgggggaaagaaaaagacagacaaaggaaaagacacgcagggagatgagacacaaacctgatgaaagtggcagtgaaagtggggtaaaggagaggaagaggaggaggtggacagacaggagagacaggaagacagccagagatggcctgaacacacagcacttctggtcccttcgagataaggcaccagagtcagtaacgttcccgttgttctgtgggattaaaacgggtgctggagggagggccgggtggctgctgaagagagtgggcctgcaggagcctcacacctgcacaccagtggccttcttgatcaggggtatcttagacaggtccacgcctgtgagggcatgcacagaggcaggcagctcggccagcagtcggttcacttctgatgtgaccttactgttgtctccactgaggaccacaatctcatcgaccttggtaagtggggcagcgattttggcagcaatctggggcagggcctctagcaccaaggccatcttggctgcatccccgtatttctggtaggcttctgccttgagcttcatccgctcagcctctgccttgcccatcgcctcgatgactgccgcttccgcctccccgattttgcggatcttctcagcctctgcctgtgccaagaggacctggcttcaccttttcaccctcggcaatctgctggatgcggtgggcctcggcctcggcaggccggcgcactgtagcgatgagctccttgtccgtacgcaggatctcctgtgcctccacggcaatctgtttcttgcgctgcacaacctcaatctcaatctcttcctgccggatcttctgctgttcacgggccccctgcagctcataggccaactgggcctcagctgtcttgatgttaacctcctcactgaaggctgacttttgcagctcgaaggctcgcttagagtcagcaatcttggtgtctgccatgaacttcacatccagcatctccttcttgcactcagcttcccggatgcctgcgtcccgttcagcctcggccacgcccaatgtcagcatctctctgcagccacggcagtctgcgtcttgcccagggagctcagatagtccactttgtcatacacgtccttgatggtgaagctgaggatctcaatgcccatgcggccaacatcaggggctgccacctcccgcaccagcttggcaaactggtcccggtcctgataaatctgctccactgtcagggtcccgaggatggagcgcagatgtccctccagggtctgcaggacgacgtttttgatgtcctgcacattcttacccagaaactgctcacaagccacggccaggagttccttctccgtcatgatcttcacctgggcgacacccgtcacagttaaagctaccccctcggccgtctctacgtcctcgcagcggggctgcaacgtcataatctctagggaaatcctctgagtgtcggagatacaccaccaggcccaggcccagccgccaaacacgtactgtttatagtcggaaccacaacagccccctgaaaccaccagcgcctcgttgggccccaccgtgtggcaattgcccatggcgccggcggcacggagggccctcgggaccgcacagacccggacaacagcagcgggtctgcagcgccggccgcgcccagcctatcccgccacccccagcgcc

SEQ ID NO: 129565 - DNA, 692 bp, Homo Sapiens
taagattatacgaagtgatttattgatactggttaacatccattatatacaggtagaaactttcaaaattgtacaaagaaccattaagcatattgataaagacagttttacagacaaaacaactggaaaatagttttaacatacacaatatataattatgaaaaaaatgtagaacacatattgttctaccagataaatcccaaggttattaaaagtctgctatgcagaccttaagttgaaaaatgtgttcaatggagttacatggttttagaaaattaagtataatgtaaaaattaagcttttttttctcattgcaattgggagaggaactgagacaactttttaccccaaatctatacagtttgaaaaataatttatatgtctagcataaagaaaattgagaatgtttatggttctgtaaactttgccttttatgaaatgcaaaccacatcagttttaaaaattagaaactgtgcaatcagaaacagattgttccctttatggtacaattgtaccttaattggctttatacctgagcaccaaagctgaagttctaaatgccatctcttcctggaaagttattctgaaaatgagcaagaaatcaaaactagcctattatcatctagaaaattaggcaccaagaaggagattatctccttggaaatgcaacatcaatgacagagaagtttcaa

SEQ ID NO: 129566 - DNA, 523 bp, Homo Sapiens
cctaaaacagacttgaaagtattatacagggattggcattcttcccggtcactggtaacaatagcaatatgtgtccagggacacagaatgttggtttctaacagactacttccaaaaacagtttgagaaaaaaactgtctgattttaagtctctagaggtctgtaatagtttttacatttttcaggcagtgtaaagttttttgataaggccattttaggtggctcactttctcattaagatatatatatagaaccattttttgtagattagtataagaaaaatatttaccctgttttggggcaaatgctacctatttgtgtcaccttttgctgaactcacagttagacaatccatggtttaatgcacatgaaattacctatattttatactgtttcaatgtacaggagaaaggttactgtaaactgtgttatgttggtgcttctgtgaattaagttgtggtttcatcatgagtcttaatgttctttgttgataagacaagtttagaattggtttacttaatac

SEQ ID NO: 129567 - DNA, 730 bp, Homo Sapiens
  misc_feature (657)..(657): n is a, c, g, or t
  misc_feature (719)..(719): n is a, c, g, or t
gaggagtaataatttaatcagaatatattcctttttgacagtttagcaataaacatatgacccttccttctttaaaaatgaagaacaaaccgagagcccagcgccaagcctacagggcggcaagctcagccaggcgcgccatcctgcggagctggctcccgtgcacggggctgtagcgcccaggactgcccaggcctggctttgcggggttgcttccagccacgctgtttctccccggactgtagctgtgagggccactgagatctggcagctgagacttgaaccttcctttcaccgcgggactgggccaactctgtctgtccgagggtgagtagcacaggacagcactcttccatctgtgcacggccgggaactgatgggggtcgacgtctgcacattcaagagcggccaaaacatcctgatcgagttttgatggctcctctccaaaaaggaagagccgcctggccggttccctggtgacctcgagctgatcctcgtgcctggggctgctgggactcaaggacattttagcgatcctggctgacatttcactttctgtcctcctgtggccattcccgagttggtctgcgggagaaggctctaacaagtctctttctactgcattgattcttgaagtcaggatctgatctttagttnttgtactttcatctggtgtcttggaaacgctacgtcctatattttgcagatcagtttatcanactcaacagtc

SEQ ID NO: 129568 - DNA, 203 bp, Homo Sapiens
ccaaagaaaagtcacaaatacatatgtacacatgcacgccaaccccactgggggacagacaccaggatgttgggatgtggggagtggggagtgggggttcccaagcacagcagggtggtgggtgggaccctccaaccccagcccgccccaccctctccacgtccccaccgatgaaatgggaaggggtggtgggggggtgaggg

SEQ ID NO: 129569 - DNA, 742 bp, Homo Sapiens
ttgaaaatgatattaattttattgcatcattttactgactagaacgccagacttagagtggatataagtataaaaataaccaaattcttacaaataatactttgctgctacagtactgaataattagtggaggttgcaattataatacaactttaaataacattctcataatgggtttaacacaatcaaccaggggctaaggtttaaaggtttacaaagagaaatccaggacaacatgaaaactcccaaagttcatattccagctaaatgcttcatttaaccgtcaatccaccaacacaaacattaacaaaactcagagcaactcatgatgaaacagtcgttctctttttaggacaggccaaggttaatacagaaaggtaaatgattcggattagtttcccaggcagaactgattccatcccatccctggcctatcccatcctccctacccaagaaatctgtaatgaagtatgttaagtgcattttaaaaatctgaatatgcaaattcttcaaaatgtcctctttgaaaatgcccaggtgacagacccagtctcggacctgtcgctttttagacctgaatggtccccctttggtttcatagggttttctgtgagcagtttacaccagatatgatggagtataacgctaatgaagatactttactacaacaaattaattggcatttaatactttcatgttcctactattttagtcagttctcttccttggagatttaagaaaa

SEQ ID NO: 129570 - DNA, 1649 bp, Homo Sapiens
ccaattcaccgtttgtggtggagtgtggtgtctcccattttggggcccaggaatgccttttaaatgaaaattccccatcccggttgtccttcgaaaagaatccggccagtgtcagggggccgttaaatttaggaaattgggagcgttccgctggcgatctcccctgtgtgaataggaattccaggtaaagtgcccttcagaaagtccccttgggggatttgtttcaagagacgcgtcgggttgcccccccgggccgttttttattggggggggaatccccagccccttagtccagttccaaggatttccctagggaaacaagttaagggccatgttccccttccctttcggggtcccgcgcggccaaaagaatgggtttagaaagtttctcgagggtcccggggcggcccgacatgttaaaatttttccttaaaccgttagtttttccatactagcaaaatactttatttttataatgataaaacaaggaaagtaaagatttctttttggtgtataccagagttaagggcagtagaagaatatggggattaataggacttttatgaacttttgatgacaataaaaagttaacaataccaaccgtttgccataaaacttatcatagctcccccaaaacacacatataaaggatcatagttttaaaatctataaaagtaaaaaatatacagttggaagctctagcgcttattccatctttcatataaaattgtaaacatttatttacacaaagcaaatgtgtataacaaaagtctgagcacccttttcttctgagtcgtggctcctggaagacggggctgtgcacagaagcaaagtcatctcctcccctgactcccgaaaaccaggttcataaataaagccatgggcagctccctggggggaccccaagaatcacattttattgctatgacactgcagcaagtgaggagcccccactgtgtcgccggccccaggactaaggcggagtgcagggccagcgagccccggggacaggggtgggagacggggcagcagccagatggggtcaggagaggaacaaggatccacaaccagccttcagccgatttttgggagaaaagccgctgaggtcaccctcttccccttcagattggggaactccctcagagggtgaaattttcactggctttatgattcaccccttctttgagagctaaactgagtacatgggaaaggtagggaaggtgttttaaggagaaatggccgacataccacttggggtggcaaatggctattagaaaagaagatctgagggtccaagtacccccagtgagaaaggcactgctggtgcaaaataactaccaatgtgtgtacaacctctcgtcccctcaccgcgactcaggctggttgcatgagtattttccttggctcaattctcacataggacactcctgaatgatccattgggagactccagggaaacagaagtggggctgcagtttctccacagaacactctgcatctgagccacttttcagcattctcttttctctccaccattctgtgtaaaagggtctcaccctgtgcttaccactttgctttcgttacggggaagtgctctctccatctcggacgcggggtcgacgatatcccgggaattccggaccggtacc

SEQ ID NO: 129571 - DNA, 512 bp, Homo Sapiens
gagaggttgtacacacaccgcgactcaggctggttgcatgagtattttccttggctcaattctcacataggacactcctgaatgatccattgggagactccagggaaacagaagtggggctgcagtttctccacagaacactctgcatctgagccacttttcagcattctcttttctctccaccattctgtgtaaaagggtctcaccctgtgcttaccactttgctttcgttacggggaagtgctctctccatcttcgttttccaaaaacagctcacatgtcatattctatttcgtggaccctcagcttagtcaagtccacttgaatctttagaaaggatgtcttagtgttataaagcaatctctttaagaagtgcaagtcatctgacatgggagtggcagaagttgtcaaaccaagtggaattgcttcctccgggccggcctacggcctccttccccaaaacctttatgctaaggttcccttaggaattctacggcacgaggcctcgtgcc

SEQ ID NO: 129572 - DNA, 1475 bp, Homo Sapiens
  misc_feature (1324)..(1379): n is a, c, g, or t
ctagtttagtgtttgcatttattttaaaaatacacaaaatagaaatttttacatcaaagtgtgataacctcacttacacattgttccatacttacctggttttgtttgcatctttctgcaaacattaaaaggagatggatttgattctgatttttttgctatggttcatgtaaacagttgagactgctacataaagtaggttgttgtcaaaggtgaagtggccacagaatcccaagaatagaataattcaatttggtttaatgaaattggtggaggtcttagcagatagataatccaagactaaatattgtcttctaggcattttaaaaattaagaactttgaggttttcttcatgttgtaaacataacttagaccttgttggcattaagtttacaaaagaaaatattaaaccatgatttttatcatcctgcccatgtcagtatacactctctttattatgagaatgaaaccaaataataagcaaaatacatcaggaatttcaaattgtactgcaaagaaggtcccagctggtctcttctgggagtgatctaactaacttaagctgaccctgtgactggctgaggataatcccttctgtccactgcaccgtgcaatgccacaggtcatgagatggtcagttcctcttgctctgtgtcgtctgaagcaagtcgaggccctacttctggttccgcccttcttccttgggcttagatttgctgggttagtagtttgctactattgtcaagactgtactgtccctttaaggtaccacatgccaccatagcttacacagcagtcctttagtactttatccacctcctgtttactgagatcttctccacactcttgagtcaaccgagactggatcatgtttcggcgtacccggtaatttttggaaaaaatttcaagcaaaacctgtcgatgctgatcactcatgtctccagactcccagagggcaaacaccttctgctcatccggggaagcagcagtctgggggggaaaaggcaccagtatctgcttgcaaccggcggccagcaccgtgtcctgtagcatgcggtccgagatgccgctgaagagtgtgtggccggggggcaggctggccaagtgcagattgaagaggcgcttgagttcgctcagcgtgagcacaaactgtctctgaaaggtggcctccacgaaggccttcagttcccgagccacaggggtgctggcgcagccctggggcagggtgcccagttgaagctgtcatgtgcccagcagcccagcccgagaggcagcccgttggccagcttgctgtggaggccgctgggggaagtgtccatgggnnnnnnnnnnnnnnnnnnnnnnnnnnnnnnnnnnnnnnnnnnnnnnnnnnnnnnnnccttgatccgcacaccgggcgggaccgcaggcacccgcagctgctccttccgccgccctcgtgccgattatacacccagcctcgtactagccctaa

SEQ ID NO: 129573 - DNA, 997 bp, Homo Sapiens
  misc_feature (137)..(154): n is a, c, g, or t
  misc_feature (678)..(678): n is a, c, g, or t
  misc_feature (809)..(809): n is a, c, g, or t
  misc_feature (827)..(827): n is a, c, g, or t
  misc_feature (900)..(900): n is a, c, g, or t
atgagtaaagttaaactttactttacagtaaattttttttctatatacaaagaattacagtacatgtttatggggactcctaacacagggctcccctctttttcactaggagtttcacttacagctgacaatctatnnnnnnnnnnnnnnnnnncgcggcaaaaaagcaatgatggaccttggctgatccccccgacccctttcttaacaatataggtagatgtctatcgtcagcttgcctctttgccaagacctaggaggcggctctgccatgagctgctgtgtgctgccctccccaccttcagcacactcatctacacacacacaggtagcacccacctcgatgagaccgccttgctctggcctgccccaaccctggaagttgaaaacatagaaccatttatttctgcttctactctctgtgcccatgtcttgtccacgaaactttgctgaacttccaggaccttacacctgaagccccacaataacctgatgttttgaaagccatgggaaagcagctctagagaaggaaccacataagcagaaacagcgcatgttaaactcgaaacacttcttccgaggttgtggatttctagtttaattctttccacttccttagaaaatactacccttaatcttcataagcagtagaggggcttccatgagtggaagaggtanagaggggcaaaagggagctgaggaagacccaacaaccagagctctctaacaacctgctccaggcagcgtggacggaggctatggacaaggtggccccagccctgagaaactcattggccaccttcacctgnatataggatctcttccanctctgggatgcactgggccactccaagggttgggtgcaggcttcactgaggatcttctttctcccacttttanaaagcctcaacttttctacataaatctctcccaacaaggaccgggtttctgagctgcatccccacccttggcatgctattatacgtgaattagaccc

SEQ ID NO: 129574 - DNA, 1429 bp, Homo Sapiens
tttttggtgtgaaaagccactttattaaagattctctatcacagtcccccatttctggaccagtcagattggctttgggttgaagtttctgattgtctttccttccagtttctctctttgtccatggcttcctgagattcagtgtcctcgatggcatctggggaaaggtaggtgaccttggggtcctggaccaatgcagggtgagctggcagctggcagagggccaaggagtggccagccccacagcccacaaggagtcctgacgatgacagcagagcctgcaccggctttggggcccagacgttggcttcagtgccatctccgcacatgccatgctcattccagccccaagagtaacacactccaccaattattgccaaattatgctctgagccacaagagacctcagttgctccagttaagcaatgcggagatgaaggcatgctgttcggtggtcttgaacaggggagaaatgaatcttgcttttctagtttccagccttcataagtctccaacttcctccctagctgaccatagtctgctcggccccaggtaaacatcttgccagtttctgtctgagcaaccaggtgtgtccatccactccagatggcagtgaccttttcattctggaaacaatgtgcttctattttctggggcacaggaaggaaagcagcctcattagccagttgcccatgcttgttgcttccccaaacatacacctctcctgcatctgttaatgaagctgagtggtctgagccagcaagaacacacattgctttagaattctctagacctgtcactctgcttggttcctttgctgtgaaaaacaatggaagagtctgcccagggcacaaccgtcgtccacatgatgccaaaccagtcccccactggaacacgatgccactcgctgtagcagctactgcatgcctcagtccagcagcaatacaaacaaccttctctttatggagctcaatggcctggggaaccacacatcttcgaggtccatgaggaactcctaactggccaaaggagttggatccacatgatagaacttgaccattttctgtgagcataatcgtaaaatcccagccacaggccacctgttggatgggacagccaaagagggatttgcagggggtaaaatatgggatatcctctgtgtgaccaagccccagttgcccatctttgttcaggccacaaacaaagaggtctcctccatctgtgacaactgcagagtggccccctcctcctgtgatcctcctgacactcctgggtttacagaagtcattcagttgctggggcaacagcacatcttccttatggccgaggccaagttgcccatagctatttgcaccccaggcgaagagcgcggccgccgcgggggccctcgtgccgaattcgccacccaggcctcgtacctagacgtatt

SEQ ID NO: 129575 - DNA, 976 bp, Homo Sapiens
  misc_feature (103)..(111): n is a, c, g, or t
  misc_feature (268)..(268): n is a, c, g, or t
tttttttcccttaattaaaagttttatttttaaaaaacgtaacagaccactctaagaaactttggcattcaaagcagtagttactgttatttgctaactctgnnnnnnnnntttttcccctcacaaacaaccggcaaactcctgccacttcctagcttggtggctgccagcgtgcactgcagggaaacggtgggtggagggataggaaggccctcacgctcccaacccacggagaaaatgcagatggtgacaagctgcatctggactnccaggatgtatctgacaaagagggagatgtttcttccctccccttcaccagctccactttcccgctgaagaaacagagatgtggaggcaggcgtgacctgtcccagctctaggacagttactcaagagggctagtctggaaccctgatgtctgttaccagcggccatggctcagctacagtgaaccttgaagtgtccccagatacgtcagacaccgaggggcttgctttctgaggctcagtaaggagggggcatgtgtgatcagccagcccctccacaacaccacattcctgagctcccctgaccccgagtccccaccccaggggagaacttctcacagcactgctgacaaagcgcgcagccatctggcgtccgtcctgggcaccgccagtgagagccctgcacagaggcgctcaggtgtgaatccgcaggtggcgcgtcaggttcgtgttgcggctgaaggtcttcccgcactcggcgcatcggtagggcttctcgcccgtgtggatccgctggtgcacagtgagggaggagttcttgatgaaggacttcccgcactggccgcacctgtacggcttctcgccggtgtggatccgctggtgctcgatgaggtaggcgctctggctgaaggccttgccgcactcgccgcacacgtagggcttctccccggtgtgcacgatctggtgcacgatgagggacgagcgccccc

SEQ ID NO: 129576 - DNA, 1176 bp, Homo Sapiens
  misc_feature (80)..(81): n is a, c, g, or t
  misc_feature (104)..(104): n is a, c, g, or t
  misc_feature (180)..(208): n is a, c, g, or t
  misc_feature (212)..(212): n is a, c, g, or t
tggtgggaggaaatctccaaaggccaccttaggttccattggacccagggattttttcctaaggaaaaacagctttaagnnccccatgtttcactttaccctanctggggcccggcgcgcgcaaaacgaaatggtctaggaaaagcttctcggaggggccgaggccggccgaccattttnnnnnnnnnnnnnnnnnnnnnnnnnnnnngatngtcttctagggcctagcctccattttatttatttgttctgcaaattcgatgcgtctaccttcaaataaagcgttcatttttctctgtgactcttctattagtttttgggtagctggacacattcttccaggaatataaaacaaatggggctttgtcttagttcttatatatttaattattttggcattatgttcattccattcttcttgcagctgcgcaagctcaactttctgttccaaaagccgcagttctgtctgtttagcacgcctctcttcaaacagttctctcctttcattttcaacctgctttctctcttcttctgcctgaacttcaagtttttgttcaatttcctggcgccgcttttgcctttcagtagcaacagtggattcttgtttaaatttttgaagggtacccatcaacaagccaaatattcgccggttcctttgctttcccttttcatccatattttgatcctggataaggtctctacgtgtgcgctctttggaggtagctacaactgaagactgcaatgctggctttttaacatcatcatcctccgggtcgctttcctggcgtgattctcttctggtccgacgctccccgcccagcctactgactgccccttcaaggtctctctgtttggctgggggtcctcctccactatctgagaatccacgcctcagtaataaactaccacgtcctctacctccaccaggaccagaaagggccagcaatctggcttggatgggcctcacgtcattcggatcccgcccggtgagcttgcgaatgttctcatccacgttcttaagactctctttggccttttccagctgttcctgcaaagttcttacggcgaccgccatcttctccctgcggcaggcttgagactgctttacagccgagccgggctatgccgcaccgccgaggcggcgcctcgtgccgatttaaacccagctcgacctgc

SEQ ID NO: 129577 - DNA, 997 bp, Homo Sapiens
  misc_feature (81)..(81): n is a, c, g, or t
ggtctcactggtcccaggttctgacagctttgggaatttctccaggggtaatctttcttgggtgttgatctcaggggtcanctgggacaccaagcgggctccacccactccatttatgatcttttctccagatgcacagtcaccaccttgccgtcctcaatgagccacgagctctcctccaccttcacttcattgtagagctccccatcaatgatcgctggctgccccttgagccccacccggaggtgccgccgctggatgtccaccaccatgtccttccctttcagccggaagttcacacagaaagggaccgccaggtccagctccgacagggtctgggtccagcggtaattgggcaggtctgccccgttgcctaggttgggcttcagttttcctttgtccttctcatcttcctcctcatcttcctcagtatcctgcttccctggggagtcaaggctgccgttcttgagctgggcctcatgattctctgcatcctttttctggtcaatctctagctgcagcctctctgcctcttcatcagttagctccttgatctggggccctgaggtctctgacttggcttccttggccagtctggccgcccgctccgccttctcccgccgctcggcctcctgccgggctctcttctcccgccgggtcttctgtgccagctgattgtggtggctgaaagtctgtgtgataagcttctctgccatcccttcttctcctccaatgaaaaagtctgttttgcgtcgaaggaagctgaagaaggtgttcacaagctcctgcacgccgccctcgtgctgctgagccatggccagcaacatgccgtcgaaccgctcctcctcctgctctccgcccatcgcgccggctccgatccacgtcccggagctctgcactctagtcccgcgctctctacgctcctgcgggtcgcgccgggcccaacgactctagtccctcgtgccgattcaacacccagcctcgtacctagccgtat

SEQ ID NO: 129578 - DNA, 715 bp, Homo Sapiens
cgaagtcacacgaaggccccagtccagctcgacaggtctgggtccacgtaattggcagtctgcccatgcctagttggggcttcagttttccttggtccttctcatcttcctcctcatcttcctcagtatcctgcttcctggggagtcaaggctccgttcttgagctgggcctcatgattctctgcatcctgttttctggtcaatctctagctgcagcctctctgcctcttcatcagttagctccttgatctggggccctgaggtctctgacttggcttccttggccagtctggccgcccgctccagccttctcccagccgctcggcctcctgccgggcatcatcttctcccgccagggtcttctgtgccagctgattgtggtggctgaaagtctgtgtgataagcttctctgccatcccttcttctcctccaatgaaaaagtctgttttgcgtcgaaggaagctgaagaaggtgttcacaagctcctgcacgccgccctcgtgctgctgagccatggccagcaacatgccgtcgaaccgctcctcctcctgctctccgcccatcgcgccggctccgatccacgtcccggagctctgcactctagtcccgcgctctctacgctcctgcgggtcgcgccgggcccaacgactctagtcgtccgccttccgcagcggagcccctcgtgccgattcaccacccagcctcgtacctagcc

SEQ ID NO: 129579 - DNA, 1784 bp, Homo Sapiens
  misc_feature (64)..(286): n is a, c, g, or t
  misc_feature (299)..(350): n is a, c, g, or t
ccggtaatattattttgagaggagttttgtcaccagctgagtgaagtagcaatccggctcaaannnnnnnnnnnnnnnnnnnnnnnnnnnnnnnnnnnnnnnnnnnnnnnnnnnnnnnnnnnnnnnnnnnnnnnnnnnnnnnnnnnnnnnnnnnnnnnnnnnnnnnnnnnnnnnnnnnnnnnnnnnnnnnnnnnnnnnnnnnnnnnnnnnnnnnnnnnnnnnnnnnnnnnnnnnnnnnnnnnnnnnnnnnnnnnnnnnnnnnnnnnnnnnnnnnnnnnnnnnnnnnaatctttaagtannnnnnnnnnnnnnnnnnnnnnnnnnnnnnnnnnnnnnnnnnnnnnnnnnnnagaatctgggctagaagccaaactcccagttcccagcagcagccgtaagaggcctgtgccccagagaaaggccagaggcaagagaggacacagaaggagctgggcaaatcgttttaatgtgtaacagtaggccaactggggaggacaaggtcccaagacccagcctttctcctgatgccccgggacctgtgtgcctgggccagtcccatgcctgccccaagccctgaggcccacaagtcccagagaagagtgggaaagaaagttgggtggttgcagctcagccccaagagttcagggaggaaaaaacaggggctagttgaatttagccttggaaaaatccatctccggatgttgatccatgaacttcttcagaatctcctgtttcttctgttcgtctgaagttggcagccccatggacttctgtcgctggtcatacatcatcttttccaccatgctgcgagtctcactgtccaggtctgacagcttggaattctcagggttaatcttcttggtgttgatctcagggtcactggacaccaagcggctccaccactccatcttattgatcttctccagatgcacagtcaccaccttgccgtcctcaatgagccacgagctctcctccaccttcacttcattgtagagctccccatcaatgatcgctggctgccccttgagccccacccggaggtgccgccgctggatgtccaccaccatgtccttccctttcagccggaagttcacacagaaagggaccgccaggtccagctccgacagggtctgggtccagcggtaattgggcaggtctgccccgttgcctaggttgggcttcagttttcctttgtccttctcatcttcctcctcatcttcctcagtatcctgcttccctggggagtcaaggctgccgttcttgagctgggcctcatgattctctgcatcctttttctggtcaatctctagctgcagcctctctgcctcttcatcagttagctccttgatctggggccctgaggtctctgacttggcttccttggccagtctggccgcccgctccgccttctcccgccgctcggcctcctgccgggctctcttctcccgccgggtcttctgtgccagctgattgtggtggctgaaagtctgtgtgataagcttctctgccatcccttcttctcctccaatgaaaaagtctgttttgcgtcgaaggaagctgaagaaggtgttcacaagctcctgcacgccgccctcgtgctgctgagccatggccagcaacatgccgtcgaaccgctcctcctcctgctctccgcccatcgcgccggctccgatccacgtcccggagctctgcactctagtcccgcgctctctacgctcctgcgggtcgcgccgggcccaacgaccctcgtgccgaaatcgccacccaggcctcgctacctagga

SEQ ID NO: 129580 - DNA, 663 bp, Homo Sapiens
  misc_feature (117)..(135): n is a, c, g, or t
ttttgcctttcccgggtgctttattacacgtgatggcgaccagtctacaccacagactagatcgtgcgatgccacagaagagccttcccgcttccctccaccatgtcccccttgttnnnnnnnnnnnnnnnnnnnatgaaaagaggagccggagtgggatgacagcagcgaggcccctcagtaggtgatctggtacacggaggcgtgctccccggagcctgtgacaacgaggcggttgttggaagagacgtcacagcacgtgactggagacatctcaggcacctcgaacacttttgtccccgccggcatgctgtagacgccaaggaagtcgtccattccaacgcttgcccaccactggccaaagggggagaacttgacgctcaggatgacgctgtctttttgccccaccatgtgccgctggctcccgctggtgctttgcagccactgctggccattggccatgcccagcagcacccagtcctcctgggggctgtgggacaggctcattatctgagacttgaattggtactccagaggtttcatgatggtcctctggtcccagcaccgcagacaggcatccggacccccagtccagatgttgtagcccttgaccacgatactcttgactccatcaggataacccttgaggtccctgaccacact

SEQ ID NO: 129581 - DNA, 772 bp, Homo Sapiens
  misc_feature (729)..(729): n is a, c, g, or t
  misc_feature (743)..(743): n is a, c, g, or t
tcagaattaaatcattttatttttgccacaagaagctctaagaactaatatcaggccatggttaatgaaaagtagaacttaaagtcatgacagggaagattgtacaagtgtgaacattacagtactcggaggaatgaacaaggtttcatatagttgaccagccagaaagccagtgctgttaagttagcatttaattctttagaatatgcatgccttgacaatacaaaataccttgatcagtgtttaccatttttttatctttttggtacaatgggggaaaaatgcggcattatttcttcatagtggttgtgtgtgggggatcgttaccaccaaaatcataataatcatttaaagtatattttaaagttagtcttgcaagattgttatggcatttttaaatttctgtagtttaagcattttcattttgtcatatcttttaacaaattactatttcaagtagttcctatccagaatatttacaggtaatttagcataggagcaaatttgaagctaacttcaaacaagaaaaggaagttcaatagccagagagctaagtataagataaaaaaacaatatggtaattttaaacagcatcttgctacagatttccaatccaataaataccaggaatgaaggacttttgccccaaagaagtatttcacatgaattctgaactttggatatggaaacttatagaaaaactgaagaccctgagacacatgcaagtangagtcttctggcanaaatacaatttaattttccagtttctctc

SEQ ID NO: 129582 - DNA, 1484 bp, Homo Sapiens
  misc_feature (388)..(404): n is a, c, g, or t
ttctgagtcaataagtaacatgtgatacaaactcaagattttattaaaatcatttgtaagttaaattagcatatctcggtggtgaaggaagacttttaataaagcaaaataatgagttaggtgaatcaacagaaagagtgaaaagtgttaacagtgacatttaaatggttacatgattttaattattcttttgataataagcaaccttgtgatatctattcaagaaaagccagagcccactatggaattcgcagttgaataagagctttgttccctgcttttggtaatgttaaagaaacaaatggaaatggtttaaagaccttataacaatctcccacctagcaaaagaatctaaaaggtaaggtgggaagcattagaaagagagtgnnnnnnnnnnnnnnnnnggcctcacacgcagcattggggtttatttgagagacagggcaagagagaatgaagtgttggagagagaaggtgctggaaggccagccgatgccaatcccttccttatctgttcttggctgccaggggtttccggctgatctttttcgatttgtcattattcttcttcggtggttctgggttggcctgcatgtgtctgccgtagaggtatttgtatgtctcagaacggatatactcaaaaacatgggacacgccaagctggaactggtctgcaatgggggtcacccagggattgttctctgctttgaatacctgcttctggccagttaaatccaagtttcctagttctgggggcagaacggtgaggcggttcccctgaatgtggagctctttaagctgggtaagctccccgatttccttaggcagcgagatcaggtcgttatccctaaggctgagtatctgcaactttgtgagcttcccaatatctggcggcaggatttcaaaatcgttgtcacttagatagagtgcacgcagggtggtcaggtagaagaagtttccaggaagagaattttcgctcaagttgttgtaagtcaagtccagaacctcaagagctggcagggagccgaagcctcgtggcaaagtgttcagcctgttcatgccaaggttcaggtgtttgagtttctgaaggctactgatctgtgtgggcagctcctcgatttggttattaaaaaagttgagcacctccaaattcttcagttctgcgatgttcggtggcaccattgttagcttgttatggctgaggaccagttgtgtgatatgggataaggtaaagaggccgttgacatccagcatgttggagatgccccggtcactcatgtccacctcgggctggttcttctcccggctctcctccaccaacttcttcagagacttggacatggtcacggaaggtagcccctaagacgatgggcgtgcaaccacaagcttcggcagaacgcactccagctgccctcactccctgcaacaccggcccccggccgtaatggccgaattcccgggcatatgtccggtaccgtcgactg

SEQ ID NO: 129583 - DNA, 766 bp, Homo Sapiens
  misc_feature (69)..(69): n is a, c, g, or t
  misc_feature (95)..(95): n is a, c, g, or t
  misc_feature (123)..(123): n is a, c, g, or t
  misc_feature (148)..(148): n is a, c, g, or t
gttttgttatgtcctccagaaacggggatatacctccaaaaaaccatggggaccacgcccaaggctggnaactggtctgcaaatggggggtcacnccaggggattgttcttctgctttgaatnacctgctttctggccagttaaaatnccaagttttcctagttctggggggcagaacggtgaggcggttcccctgaatgtggagctctttaagctgggtaagctccccgatttccttaggcagcgagatcaggtcgttatccctaaggctgagtatctgcaactttgtgagcttcccaatatctggcggcaggatttcaaaatcgttgtcacttagatagagtgcacgcagggtggtcaggtagaagaagtttccaggaagagaattttcgctcaagttgttgtacgtcaagtccagaacctcaagagctggcagggagccgaagcctcgtggcaaagtgttcagcctgttcatgccaaggttcaggtgtttgagtttctgaaggctactgatctgtgtgggcagctcctcgatttggttattaaaaaagttgagcacctccaaattcttcagttctgcgatgttcggtggcaccattgttagcttgttatggctgaggaccagttgtgtgatatgggataaggtaacacggaaggtagcccctaagacgatgggcgtgcaaccacaagcttcggcagaacgcactccagctgccctcactccctgcaacaccggcactgaacagcgaacacgccctgtctcccc

SEQ ID NO: 129584 - DNA, 975 bp, Homo Sapiens
  misc_feature (149)..(326): n is a, c, g, or t
  misc_feature (331)..(331): n is a, c, g, or t
ttgcaattttctaattcctgatttgtacgataccttgatgatatacctccgcaccaagacagccacgatcatggcggatggagacgccatagcaaccctttcccggcggtgccgatcatatccattgccgacagttcccgactgaaacnnnnnnnnnnnnnnnnnnnnnnnnnnnnnnnnnnnnnnnnnnnnnnnnnnnnnnnnnnnnnnnnnnnnnnnnnnnnnnnnnnnnnnnnnnnnnnnnnnnnnnnnnnnnnnnnnnnnnnnnnnnnnnnnnnnnnnnnnnnnnnnnnnnnnnnnnnnnnnnnnnnnnnnnnnnnnnnnnnaccangaattcggcacgaggacaaagggaaggttgtttggtcatttatagacaattaagcacagactgtagatgtccttccaattcttgggaggctaaactgagtctaccatttcttacatttcttttacctattttttgagaattgccagttgtacagtgtttagcatgtggaatgtaccaaatatatctatgttgtgacttaagatattctaaatgtggataacttctgacctaggaaacatgaagtttgtagtgaagtaagtgaaaagaatgttcaggaaattttttttctccatctcttcagttggcatttattgagagttttatttgaatgcttattaaaagtatatgatttataatatttagaaaatagaagaaaaaagaaaactgtagatgttttatcttgttttaatactgtatgtttagtacgtatacatttatgttctagtgtatcaaaatttttcattttcattaaagtgaatccaattttccatattctaggtccattttaaaccatgaaaactttaatcacatattttgtaaagggctgaaagtatgatttaaactacagattgatatattttaattctaaatgaaaggtaatgtaaataagcatggatctgattgaataaagattttaaaatagt

SEQ ID NO: 129585 - DNA, 741 bp, Homo Sapiens
ttttttaatataaacagacagtatccacatagtttatttctcacagttctcctgacaaatgaacatcattcaagaacatactgtatacacagataagaagaaacatacaaaatgttttaaatgatgcacaacaaaatccagcagtataaaagaatgcatgtgaacccttgctcactgtgcagactaaatttaatcacttgtttaaatagtaataaaaatacaatcttttatggatcttgtgcagactacaaaagagggaaattattaccatatatatgatttttatattaggcagttttctttgatgagttgtactgacaactccaaatacagaggcagaaggctgtgtattttaaaggaattaatgttgtgaattagaaactttacacagttactaccactggcacttttcaccatagtttgtacacatcacatgatcatcttatataacattacatttaaaaaatatatctgagtgacaattttataacattcacacaccatgagctggttaaggaagcaatgccacagttgcctcctgtagtgcttcactgttggtaattaaggacaattcattgtggttaaaagaaattagatatcaatatgattaagcagctccaatttactaaaggccatcaatgaccaccactgggacagtgagttcttttaaagtgtatatcctagaagcaacaccatcattgggttaaactttgtctaaagagtcatttctgtgctgaaaac

SEQ ID NO: 129586 - DNA, 824 bp, Homo Sapiens
atgctttagaactttcaattttaggacaggaaagtaacattaaatgtagaaaacaaaaatggaacatttattcgcaactcaaatactacgcatatacggtaagagattaaatataaacacagcaagttccaccccagtcctatttgtccaaggctgcatggtcaaatggaatcttgaagagaacacctggacaacagaggacctgtcagcgacgtctccggtctggacttctgctgcgtcttcggccacctctcctcttgccttttggtggaccccgaacaaaacaccagtcaacgctgatgggctgtcccatcaaatcctggccattgagtccctccatagcagcctgggcttccttgtatgtttcatattcaactagagtataccccttcagatatcctgttcgcctgtcgaggttgagatgaatgtttttaatttccccatattctgcgaatttgtcgtgtatgtcttcttcggtggcttcctcatggactccagttacaaagagaatccagccttcaacagagcgttgtggtccgggttcatcgccatcctgctccacgctgtcataatcctcacgcatccgcgctcgggacccctcttcggagccaaagccgcgacccttccgtttcttcgctttttctttcagtttgtgaatgctctcgtccccatcctcatccatggcgaaatcttcgcccccagcctcgtgaagatctagcacgtccgccatctcgccttcgatcgagatctcgtctgtgccgctcagacactagatgctgttgactggggcaaagaataatgggagaaaaacagctgggtcctaa

SEQ ID NO: 129587 - DNA, 1815 bp, Homo Sapiens
ttttttttcatttcaacaggaaacatttatttcaaaacatgaaggtggttatccttccatgagtttgaagtacaaaggcaggctcacggtgtcgtcagaattcagaacgatggtcgtggggctgggggtgctgggaggggctgggcatggttggctttgtgatctggggtctggtgtgttccatctctgaatctctctcgagctgcactctttcttaatacattttcataagtttaaccaaaaataaaacgaggatgcgaagcttgcttgggttgttaagcctagggaaattatccagccatgagccctggcccagatgcttctagaagcctggagggaactgagaactttccaagtggaggccgcagaggcaaggccctgaggtgggagcacactgctgttcgtccctagctctgaagggggtgccctggtcggaatcagtgctgggtgcagcgaaagccgatctcacccgctccgcagggtgttcagcctgccagcagggggccagctggtcctcctgggatatggcacggacccagcagctctgtctgaaatcataatggcggaaccaagggccctctacgtccaggtccgttgggaggcggggcatggagttccactgcaggaatctccaggaaccctgaggtcctccctgagccagggccgggctgggcacaccctgagtgcccacagggtaggtgtcttcccggacagccccaccaggacagggtgtggaagaacgaggtgcccgtggcggggaagctgaccaaatgggccgcgggaaccgggctggtgggcctggaggggcctgcctgtcccccttgcagagggtcttcccgccacgtgaagccggcacaggcctggatgccgacgacccttgctcgggtttggctgggggttgcaggtccccctgctttcttgttagtttcttcatagaggccctaagatgcttgagcacagtgtcctcatccctggcccaggtatcaacgaaccggttgcaaaaacgtgcccacgggccacacctggacgtcttcgtgaggcgcttctgctgaaccttaaaggcgattcttgttatcggcatcaacgcctgttcgccttctaccagatacacgtcccacaggcgcagggtgagcccgagagagatcccgtcaatcaatatccggatgaggcagcctaacggggaacactgcccacatagatctttcttgtcctgatgccccatggtcttgggttgtgacgtggctaccacatgctcctgttggtcttggagcccctggacggtcccgccatttgggctgtgaaatccctgcagggagtgcctctcactggccagcagctgcaccagtgcccagaatgcatcctcctcaggaagatagaggaggaacaaggcggcgatgtggctcaggtccctgcagtagcccacctccgggttatactcctcatatgccaggaggatgtggagtagttcccgctgcttggttccgtatcgatccctgaagaatatatgcttccttaatgtcccgcttacgtcccggtcgatgcgctggatgtgctcagatgacctcttgcccttctccttcatgatctggtatcttccggggtttttcaacttcatttcctcagtgttcaggaggactgaccacatcgggccccggatgttcatgggcattcccttgtacgctcgatctatgagctgtgggcagaaaacgatctggtgtcacaggccacggggtgaccccagtgaggaccagagcccggggattctggaaattgtcggttttggccccatgattcctcagtagaggtgagatcaag

SEQ ID NO: 129588 - DNA, 684 bp, Homo Sapiens
cccacaaggactcatgtcattggagagggcaaggtgactggagaggcttcctctgaaggagaggcttcctcgggttatactcctcatatgccaggagaatgtggagtagttcccgctgcttggttccgtatcgatccctgaagaatatatgcttccttaatgtcccgcttacgtcccggtcgatgcgctggatgtgctcagatgacctcttgcccttctccttcatgatctggtatcttccggggtttttcaacttcatttcctcagtgttcaggaggactgaccacatcgggccccggatgttcatgggcattcccttgtacgctcgatctatgagctgtgggcagaaaacgatctggtgtcacaggccacggggtgaccccagtgaggaccagagcccggggattctggaaattgtcggttttggccccatgattcctcagtagaggtgagatcaagctgggacagggtctcccttcccaggactgaaagagtggatggacactcagagtcgaaactctgatctgaaccttttccttccttcaggtcaccagggcatccctagccttgagctccgggtagtcccagccctagattcagattccctccctgcaaggtgacgcttgcacgaataggcaggaactgcgaccagcctgcacgtcctgtggcaacggagcagctcat

SEQ ID NO: 129589 - DNA, 739 bp, Homo Sapiens
  misc_feature (721)..(721): n is a, c, g, or t
ttttaaaaataagatttaatgctttattgctcttgatggcaaatcaaaatatgctttagaaataaagttaatttactggaaaataggagtttttgcaccaaaccataaaattgcatttcattacatcaagagaaccccctcattgtctacaatcatgcccgcttcctttcccctcagcgcccgggacacgtgaccgagatcataccctaaattcctgatccttttgcagttgccacatactgtggcttttagtacatcataaaaaagtgcttgtcctgtggcctcagctgggaggccctggcgctggggctaaggggcccaaggcaccatccaaaggctgggaggaaagaacccaaacccaggccctcctcctgccctccagcctttgacaggcaactcatttggcatgatctgttttggtgtgtttaaaacatacatttgcatgtgtctagtgtaaagcaacaagtttgaggaaataagtggaaggagagaggaagttccagttagatggttccactagtgtctactggtaattggcaaaactatgagtgttgctaacctgggctgagggcacctctgcctgtgcaggcagctgaccaggcttggagaatgagaaagggttcccaaggacaggatgccagcgggattctttgttgcaaactgcacacagtgcaatttttgggaagcaggggatggggagtgggcatgagaccgggttgtntgggacactctggggtca

SEQ ID NO: 129590 - DNA, 1046 bp, Homo Sapiens
  misc_feature (774)..(774): n is a, c, g, or t
  misc_feature (824)..(824): n is a, c, g, or t
  misc_feature (907)..(907): n is a, c, g, or t
caagaagcaaacaggtttattttatacagtgggccaggccgtgggtctgccatgtgactagggcatttggacctagggagaggtcagtctcaggccaagtacatgaaaggagggagcactggctcaccctgtcctagtcctgagggcccccaggtttatgctgacagttcctgttgggcatgcctggggtgaggccaccacaacgtcctttctgtgaaagaggcacgatgattcgaggacccattcctgctgggaaaaagctcagccaccagtgatgaagagggttgtcctgtctggaggctcacttttgcctcagctttttgatgaaggaaacctcgtctcgattccggatgccgtagtctcggagcttctttctgtcttccgtgagtttctctcctgcagaggtcagatggtacgtcctccacacgataggacctgcatgaggggaatgcaggtgaaccacgtgccctgagcatggtgagctgagtggctctgcatgacgtgggcttgaggcatgcagtcctatgggacctggggcagctgtcctccctacctgggctgttctgtacaatgtgcagattgggtctgaggcagctacaaggaggctctgttctcagagggctgtctggggcggcttggccaaaagaaccttgctcatgcaacaggcgacagtgttgagactcagtgtacaggatagttgattcactaggagagtgatggctgacagcacccaggttatgaggggatgggacgccctacaggtgtatcatccanaactacggatgcacttccagacacactggaaatcccgacagtgtccccangtgaaacagctagcaactcggatggggtgatgcttatggaaaaacaaatgttggggatgtgcgatgcaagactccaggcacanaacgaccccactgtctgtgacatggagtcatcatcctgtgacagggcagtcacactcaatggtgctgctcatgcaagctcagactgttccaggggggccggttgcatttcaaaaagtctactctcccaaggtatatgaa

SEQ ID NO: 129591 - DNA, 1283 bp, Homo Sapiens
  misc_feature (197)..(206): n is a, c, g, or t
  misc_feature (289)..(308): n is a, c, g, or t
  misc_feature (316)..(429): n is a, c, g, or t
cgcccccccttttggtcgcctcgttgtttaggagccccgggaattatacttcaaaaagacgccctggggtgtgtttcctaaaaaaagggttcccggccagcggccccgttttattttgttgggggatttgtaccaaacattttgggttttcgcgcttcctgtggttatacggggtggggcccgatgcccttttctannnnnnnnnnctccccgagaaaaagttttagaaaattttctttgcgccggggggcgccccgcacacaagaagagggtttgaaaagtttttttnnnnnnnnnnnnnnnnnnnncagagtgnnnnnnnnnnnnnnnnnnnnnnnnnnnnnnnnnnnnnnnnnnnnnnnnnnnnnnnnnnnnnnnnnnnnnnnnnnnnnnnnnnnnnnnnnnnnnnnnnnnnnnnnnnnnnnnnnncaaactaagaagcaaacaggtttattttatacagtgggccaggccgtgggtctgccatgtgactagggcatttggacctagggagaggtcagtctcaggccaagtacatgaaaggagggagcactggctcaccctgtcctagtcctgagggcccccaggtttatgctgacagttcctgttgggcatgcctggggtgaggccaccacaacgtcctttctgtgaaagaggcacgatgattcgaggacccattcctgctgggaaaaagctcagccaccagtgatgaagagggttgtcctgtctggaggctcacttttgcctcagctttttgatgaaggaaacctcgtctcgattccggatgccgtagtctcggagcttctttctgtcttccgtgagtttctctcctgcagaggtcagatggtacgtcctccacacgtaggaccagctgatgtgctgaatgcccccttcacgctcctgcttgagctgcacgtatctctggatggccttcttcaggtccaggactgtggcactctgcactacaaccacgggcattacttctccatccatcttgcacactcggaccgtcattgcctggccgtattctagggctatttgggagttgacttcttccagagtaacctggatcggcagatcgcagagcagcgggtcctgcaccaccatagccagaccctcctggaacacgtccatggcctcggagtgcggcagcgcctcttcttcgtcctcatcttcctcttgcgcctcgggcccacccgcggcctccgtctcctccagggccgcccctctcagccgggcctcgtgccgaattcacacacccaggcctcgtacctagccgtata

SEQ ID NO: 129592 - DNA, 853 bp, Homo Sapiens
ccaagcccggtggggttctccccatgggactgaaggggcattttgagccctaaggggaggggggtcagttttcagggccaaagtccaatgaaagggaggggaggccatggtctccaaccgttcctaagtcccgggagggccccccagggtttatgcggccaagttacggttggggcatgcccgggggggaagcccaccaaaaaggtcctttctgggaaaaggaggccccgatgattcggagggacccattcctgctggggaaaaaagctcagccacccagtgatgaagaggggttgtcctgtctggaggctcacttttgcctcagcttttttgatgaaggaaacctcgtctcgattccggatgccgtagtctcgggagcttctttctgtcttccgtgagtttctctcctgcagaggtcagatggtacgtcctccacacgtaggaccagctgatgtgctgaatgcccccttcacgctcctgcttgagctgcacgtatctctggatggccttcttcaggtccaggactgtggcactctgcactacaaccacgggcattacttctccatccatcttgcacactcggaccgtcattgcctggccgtattctagggctatttgggagttgacttcttccagagtaacctggatcggcagatcgcagagcagcgggtcctgcaccaccatagccagaccctcctggaacacgtccatggcctcggagtgcggcagcgcctcttcttcgtcctcatcttcctcttgcgcctcgggcccacccgcggcctccgtctcctccagggccgcccctctcagccgggctctgcccgcactgccagcccgcactagggaggccccc

SEQ ID NO: 129593 - DNA, 712 bp, Homo Sapiens
tttttttagctttaaaaggtgtttcctcccattttatttcataatacattttcacagaaacatgatatatttacaaatatacaggtaagagactgctggtcagaaatcttaaaactcaaaatgtcatcaaaaattaatttacaaaagccaccaagggtccatggaggcggccaggtggatggtgtggccggcgtctgcgtgagcctgcccagaagcccacgcagcctcccggctctgcctccgctggccccgtctcaggaagcgctggtttgcaggtttttggaagctgcaagcatcgctctgactttggccatgagatcctgagtgattttgctctgcacggaagaaacgattgctgaagagatctgggcttctttttcctgagagactcccctggagcgctcctggctggagccccgactctccacaggggagacgctggctgagtgcgccgagtgggccgcgggggccgcgggccggggcgctgcctgcttgctgggtgacaccgactgagacctggccttggacttggtccgcgaccgggaccgcctcttcttcttcttctcgtggggacttctggagcgggtccgcttcctgctggccccagggctgcggctcacgcggtaggcagtgggcacactcctctcttccctccgtctctcaggggagtgggctctcctccgaggggacgggagcggaactcgcctcgtgc

SEQ ID NO: 129594 - DNA, 765 bp, Homo Sapiens
  misc_feature (150)..(158): n is a, c, g, or t
  misc_feature (365)..(383): n is a, c, g, or t
  misc_feature (726)..(726): n is a, c, g, or t
ttttttaaagaaagccaatatacgtgttttgttcataattgaggaatcccacacacttctcaactaggtttaattaaatgcctacagggaatgaagatttttctgttatgaacctgtaaaaggattccaagaaatcaacatctttgctannnnnnnnncccagaaaccttaaccagaagacttaatccttggtaattaattaaattttcttgagtcctgacaggagagtctgaatcagaattaaattagaggccaaaccacctttaaattcaggaacaattataccttaacaatggagggcagaatgttagccataaaggataattagatatagaaatatctgatatgtggctaaaactgttcgnnnnnnnnnnnnnnnnnnncaaaaagaccatgcccctgaaaggggactggtgttcacatgaataaaagcctcttaaactgatattataaaatataacttgtgatgaaataccttaatggttcagaaaagctgacttcagaccaggagagtaatagcgaatattagtgatgtgttttcatgaagagtttcttaccagtttcctatcagaagccaggccttttggctagagtaaatgaagacacgtttacagtgatttacttacagagggtcctgggggaacagtccgtccagcagcaccagggaaaccagtcataccctaagagccaagcacattagaattccacagtcaacatcaactccangaatttgggtaagatgggatttctttgttttggaaatca

SEQ ID NO: 129595 - DNA, 982 bp, Homo Sapiens
  misc_feature (263)..(303): n is a, c, g, or t
  misc_feature (796)..(804): n is a, c, g, or t
  misc_feature (865)..(865): n is a, c, g, or t
  misc_feature (880)..(880): n is a, c, g, or t
  misc_feature (921)..(921): n is a, c, g, or t
aaaagtacagtattctttattataaacaatcagataacagtataagtgtgcatttgatggataaccgaagccaagttattataatagaaagcatgacttcactcaaatagacagtttctttgttgttgttaatctgttttacattaatttgaatttaacatatgctaggatcacctaaacttgtcatacagttctgctattaaaatcgtaacagggaaagacaaaatgtgaaatgcatgttatattttgctttatttgttgannnnnnnnnnnnnnnnnnnnnnnnnnnnnnnnnnnnnnnnncacactaaatatttgggacacaaagttaagcaggtgcttacagtctatcaagtgatatttatgaaatgtttttgttgctgttttgttgctgttatgggaacatccatatccttagaagacaataaaaaagaggattctaaatgctagatggttggctaacttctcctgatttatactgagtgtaaaacaaaacaaaacaaaacataaggtatatgtgttaagtagtgacatctttatagttccaaagcactcgcagctattaaaatatcatctagctaaaacaaacttttcacaattttttaacagaaaaataataaaccaacaacaaaaactgatcaatgttctgggtcttgtgagcagaccgaaatgttactacagtgttctctattgtgtgatccttgtccgtggcaaccttaacgtgtgctgcagtgctgatgtatttataggcttagcatgtctgctttattagttatcctggaaagatgctatcagnnnnnnnnnaatgtctcatcaaggatgatgctaatgagccattagcagctgaatcaatacgcattatttnttgactctggagcanagaaagctgataatagatgtgtacatgacaaaggtactctncatatctaatctcaaatgtcagcacaataagcttgataacagtgggagataattgcaatta

SEQ ID NO: 129596 - DNA, 599 bp, Homo Sapiens
gcacagcattaggagatgtcttttatttcaaaattagttcttactgttacaggagcaccacaaattttaaggaagaggctacagtgtgaaatgagctcactgaaggatatgttaaataaaattttaactacaatataaggtactgcaaaagctttgttccccagcacagatcccttaatcaggaaaagtagtgaacacttacccaatacaatatgtaaattcgctctacaggagatggggaaaaacctaactcaactaaaagaaaatactattattagctaacaaacctgtgatagctggcttcagaattttcctaaaaataaaattcaaaagcatacacagtatttatatcctttgataaggaatgtagacatccaaacggaatgaaagaaaaatctggttttaagaatttctaagtggaatcacacacacacaaatgggtaactgagaaaaactaaatattcaaaatttaagtaagaagatttataatagaaaaaagtggcaaattgttactgtgacttgattttctgaaaacatctgcaaattcacactggcattaagaaaacccaagtctcaaaaattctcctttctcctcgtgc

SEQ ID NO: 129597 - DNA, 1066 bp, Homo Sapiens
  misc_feature (708)..(857): n is a, c, g, or t
  misc_feature (880)..(939): n is a, c, g, or t
  misc_feature (961)..(961): n is a, c, g, or t
  misc_feature (988)..(988): n is a, c, g, or t
  misc_feature (993)..(993): n is a, c, g, or t
  misc_feature (1038)..(1038): n is a, c, g, or t
  misc_feature (1042)..(1042): n is a, c, g, or t
tgtactcccaaaatgctgggattacaggcgtgagccactgcacctggccccatctttctacaactgggaaaattctgagttctggaaccatctgcccagggatttggggtcagagatggtgggcctttctgatcctggtctttgccatggttatgattgtggcatccctgcctgtcttctatcatgtgcctcagcctgttttttttcctttgccaggctgcaagcccctgatatcagactaacaggagcacaacattgcacggtctaaagacactacattagggtgaaattttgttcttctatcttccccccttgcatggagaggaccctcattcctgcccccaccctcgcttcactgtgccaggcacaggcagagcccaggtgctgcctctgcttgtctgcagttgccgacgaggcctgcgctgagcattttggcaagtctggagaattgaaggcccaggcccttggccctatcaccgcaatgcaggcccagaggtggcaggcgggagctcaccgatggatctgccagtgtcagtcccagagcggaccccagaagtgttcaggcgtggactcgcactgtctgacatttccatcgatggcctgcatgaggaatgggcggtgagcatcctccttccatctccagctgggggtggagggtgtgagcctgcccgccgagaggaagccagttacagaatcaaaatgactcannnnnnnnnnnnnnnnnnnnnnnnnnnnnnnnnnnnnnnnnnnnnnnnnnnnnnnnnnnnnnnnnnnnnnnnnnnnnnnnnnnnnnnnnnnnnnnnnnnnnnnnnnnnnnnnnnnnnnnnnnnnnnnnnnnnnnnnnnnnnnnnnnnnnncttgcttctggcctgcaggcaannnnnnnnnnnnnnnnnnnnnnnnnnnnnnnnnnnnnnnnnnnnnnnnnnnnnnnnnnnnaggtgtcactgaagtttcgtangtcagatgcatctgcactgggcttganatcangacaccacagcagctaatgtctattgtatgctcactgtgtcctgngccntgccccatgggcttccactgcgat

SEQ ID NO: 129598 - DNA, 728 bp, Homo Sapiens
  misc_feature (82)..(94): n is a, c, g, or t
  misc_feature (583)..(583): n is a, c, g, or t
gtattttgaagaagtggagacaagtttattgaggagcttgacacccctcttctgccctagcttgagagaacaactgcagcannnnnnnnnnnnnctcttcccgatgaccatcttttgggctggcgggccaggcccctgggtgtctcccatatcgctgtctttagtgagactgaggatctggtataaggaaacagatcagctgcagccagtgagggcccctgcgttgggcctgggagagagaaggtcctgttcctgcctttcctgtggccccaggcactctcagctctgaagccaggctattgctcgacaccgcaggatgcccaggactccctggaaccaggagcaaaagggcgcagtcctttccccgtcagagccacccaccagcttccaggcttcctgcatcttccaggggtccagcctgtgggacgtcagcaggaatttcccatagcagcaccggtctagcgggtagtgggtggcaccagccagcttgacacactgtgttggggcgaggcctcctcgtcgggcacttacccccacaaagacatcctctaatgggagaaggggtgcccggctggccaccttngagaatgagctgcacagcagacgctgacagcacataccccgtgcctgaggcatagggtggaaaggggccccaggtgtgagggcactgctcctctgatacgcggtgcctgccccccggtgtccgagaggggttcacgcgccagtgc

SEQ ID NO: 129599 - DNA, 813 bp, Homo Sapiens
tttcttgttcgttccgttatgtgggttccgtgactcccgtgttttcggttgaagttaggaccggcggagaggtcggcaccgccccaggaccccgtccgcaggagcagcacagcaggcagctgcaggagcagtgggaggagctgtcgagtcagctcttctactacggaggggaactgcagagccagaagagcacggagcagcaactcgcagcccaattggtgacgctgcagaatgaactggagctggcggagaccaaatgcgccttgcaggaggagaagctgcagcaggacgcgctgcagacagcggaggcctgggccatattccaggagcagaccgtagtcctgcaggaggtgcaggtgaaggtgatggaggctgcggaggagctggacgcctggcagagtggccgggaactgtgtgacgggcagcttcgcggagtgcagtacagcaccgagtcgcatcatggaggagatggccagggcggaccgagagacgcggctgttcggcggtcctcgcgcgctggccatcaggcgctgctgacgctgccgctcctcttcctggggctgtcgctgctctggacggtgctgttggaccccggcgccgtctccgcgtggctctggagcctcacctcggagacgacgctgcgccgcctgcgctacacgctgtccccgctgctggagctgcgcgctaacgggctgctgccaacctaagtgcagcgccccgcgcctggctccaggtggactccagggcaccggctttatttctggtgcactcctctcctgagagtgtagaccaaggtcgcctaataaactcctc

SEQ ID NO: 129600 - DNA, 539 bp, Homo Sapiens
tttttttcatcccttgagtttattaggcaaccttggtctacactctcaggagaggagtgcaccagaaataaagccaggtgccctggagtccacctggagccaggcgcggggcgctgcacttaggttggcagaagcccgttagcgcgcagctccagcagcggggacagcgtgtagcgcaggcggcgcagcgtcgtctccgaggtgaggctccagagccacgcggagacggcgccggggtccaacagcaccgtccagagcagcgacagccccaggaagaggagcggcagcgtcagcagcacctgcagcgcgcccagcacgcaccgcctgatggccagcgcgcgagggccgccgaacagccgcgtctctcggtccgccctggccatctcctccatgagcgactcggtgctgtactgcactccgcgaagctgcccgtcacaccgccccaaagctgggggaggagaggcgggaggcaccttggcgtctgagtggggccgcacctgcaggactacggtctgctcctggaatatggcccaggcctc

SEQ ID NO: 129601 - DNA, 456 bp, Homo Sapiens
ttttttcatcccttgaggagtttattaggcgaccttggtctacactctcaggagaggagtgcaccagaaataaagccggtgccctggagtccacctggagccaggcgcggggcgctgcacttaggttggcagcagcccgttagcgcgcagctccagcagcggggacagcgtgtagcgcaggcggcgcagcgtcgtctccgaggtgaggctccagagccacgcggagacggcgccggggtccaacagcaccgtccagagcagcgacagccccaggaagaggagcggcagcgtcagcagcgcctgatggccagcgcgcgaggaccgccgaacagccgcgtctctcggtccgccctggccatctcctccatgagcgactcggtgctgtactgcactctgcgaagctgcccgtcacacctgcaggactacggtctgctcctggaatatggcccaggcctc

SEQ ID NO: 129602 - DNA, 879 bp, Homo Sapiens
  misc_feature (822)..(833): n is a, c, g, or t
gtgtttgctcatgcagattagccatttctttatttttcacctaaaaaagccccctccattaaaaacgtgtaagaaagtaatctcaagattagaataagatggcacactctcatttacaaaatacacacgttcctcattaatttatcatttaatataaatgctgacagaaagcagataaagaccttgtagacattttcatatatttacaatccaaaaggtgaatcacctccttctacttgttaaaataaatcattttatctgcaactcatgggagccttaaacactaattaggagcaacatgaggctgagtcagtttccaaggtaataaaggaaatagcattttaacaaaatgggcatctttgatataaacatgcacacaaataatacaaaattgagaaagatggccctagtactctcaaaaatcggcaacaagtgggaacatgtacttatttagacccagagttctgctgccctaaacatcttcctactactatttctttttttccaccacacttgttttgaaagctgcttaaaaatcagaaatattaaacagattaaaaacaagagaaaaacggtctatttcaaatagggttctttttcctactccaaaagaactctcaggagataaggtcttcaaataagacttcacggtttgccagatcctaaggaattattcacagcctgtgaaattccaatccatttgtcttcaccattccaacctatttgtcttcacttctctttttaaagttggaaacacttggaaaaagtaaaatttcacaaaattcagcaattaaaaaatcagctgtcactttaaggctcaannnnnnnnnnnncctgaacaggggggtggaggcaggcaagaaagatagggagctgtgg

SEQ ID NO: 129603 - DNA, 716 bp, Homo Sapiens
taaaatgtattgtacatagtggaaaattttcagtagctaatttaaaatttcagaaaatgctattaaagaattttgattcaagtatttaaactgtttagttatgcatgcttcttattaaccgaaaatgataataccatttagtttagtgatcagtatgagaagcaatacctaatcctatgttgctattgtattttttcctagttggtgtgcctgctcagaaaaacatatactgtatgtgtatacatacctgtgtatatataaaaggtcaatttatatatttttctataggaaaatggagtaacaagttccctatctcccatatttatttgtccatagtaaaatggccacattgatgataatttctagaactagtttctgagattgtcagccctttgtctaaaataatggcagtattaatgattgacttctgtcactgccatagttacctggattgtcagccttggtagcctttgtctaaagtcctaaagagttccaaaaaaaatgtgttgaaatttaattgctaaatagtggttggtgattctttacagtaggaattgtaataattttcttgcaaataagttatttactgctattgatattgaataatttgtcttttattcagatatatttcaaaaagcatgaatatatgattattcataaattgtatactttaccagtaagttttcagaggaaataaagacttttaaatccttttc

SEQ ID NO: 129604 - DNA, 773 bp, Homo Sapiens
ttctgaaatgtaaattgtttttaatatatttaagagcacacagaagtcttgatttataaaaaaataaatatataacatgacaaatttactgatgatcctggagctctgaggtcaaactctttaaatgatcagtgaaaacataaaacatccatgatctgttaacacacacaggagcatattccagttgtaaaaaacaaattccttgaaggctcagaacgaacaaaaatcagtctttatggcagaaagcacatccaaagctaggcaatgaagttcagcctgggccacgtgaacctttcaccagccagcctataacctatggagccaggacaggaaagcatgatccttcagctcatgacgccacccaggcttccagacaactgcagaatgaaagagtccctcagaggctccccagcccctgctgccatcataaagcacgggagggattgttttgtccttagcggctctgtcctaaatttgagagcaggagactgagaaggttatgctcattaaatattgtcattgtaacacggaatggaaatcatgatccttgcccatgggcactgagctgaaagaaagaggaacctcacatgaggctttcctagagaccaggatgttgggtgagtgggcgtgcacttctcaagtgggcaaggaagaactgcttttctccagctgacatgctctcaggggtgaagaagtttagcttaaaatacctgatggcgctgcataaactggggatttgggaactgagtttttagctctgtgacacacaacat

SEQ ID NO: 129605 - DNA, 1668 bp, Homo Sapiens
  misc_feature (1623)..(1623): n is a, c, g, or t
ctcctggcgcgggagcgacatgatcgtgtcgtgacaacatctgtggggcacttgcccgcctgttgatggccagtcccaccaggaaaccagagccccaggtgctggctgccgtactgcatgccctgccactgaaggaggacttggaggagtgggtcaccattgggcgcctcttcagcttcctgtaccagagcagccctgaccaggttatagatgtggctcccgagcttctgcgtatctgcagcctcattctggctgacaacaagatcccaccagacaccaaggccgcactgttgctgctcctgacgttcctggccaaacagcacaccgacagctttcaagcagctctgggctcactgcctgttgacaaggctcaggagctccaggctgtactgggcctctcctagactgcaggctgcagccagtccagagagaatagagcctgcccaggccttaagaccacctctcagcccagttcagttctgccttaccaaagattctgagactcatacccatttggagccagccccacttgctgccttacagggctgtccctgaggctggatctgttacaaatgagtcatgacatcatactgtaataaaagcagcttgttttctgcttgaacaatagctctgagagcaagaaggctggaaatgcacattcagaaatgaggtaagcaggacccagtgaggcacgacgtggtttactagaagtggccggtttcctggcagctttgtaaatggactctaacctcagtggaatctgggccccggctggatcaggaggcgaccatatggcttttcttgtttcacgtgaagaatctgttgcgctgagagcaccaggagcaggtagaagacccgggcagccatcctgcgggggctgagaggtgacaccaggctgctgaagtcgggctccctgttagcctgcagctccagtgccactgccctgtgcactgcttccagtgagagcagctcgagctctgggggcagcaccaaaggcatctccatgggcacctcagggagttcaggcaccacgggcaatgcaggagcttctggcgcctccacctcaggccaggcccaccgttcttctggtgggatgaggctgatgcgggacttctcctcttcagctgcctctagggagatctctaaagacaccataaggggaacactgggctccagggcctccctcgggacctcaatctcacttggaacttcaatctttctcctttcctcctcagcggctgcctcctcaggcagctctcgcctgagggcttttgggggtggctgggcacaatgggtccagagacccagtagttcagggggtagccagccagagagagttggggttctgaacaactccgcagggcctctgatggtcctctcgggcggctgcaccatgggacattcccagcagtgggctctggtttgcagttgttcctggaatttcccgggagattgagtctcttgtccagacagtaacgacgacccgaggagtggacgggctcctttggtggtgggctggcagacgcagctcctccgggggggtcacctcatgagtagggccccaggttccagcctgtcaggcaaccagctcctcagaccctcgtggccgaatttttaaacacncccaaggggcacttcagcatccttgccgccgataattttcggttt

SEQ ID NO: 129606 - DNA, 1041 bp, Homo Sapiens
  misc_feature (57)..(127): n is a, c, g, or t
  misc_feature (135)..(135): n is a, c, g, or t
  misc_feature (139)..(277): n is a, c, g, or t
ggggggaaaacacccctttttttggccggggtttttttgaaaaaacatgttgccccnnnnnnnnnnnnnnnnnnnnnnnnnnnnnnnnnnnnnnnnnnnnnnnnnnnnnnnnnnnnnnnnnnnnnnnccaacaanttgnnnnnnnnnnnnnnnnnnnnnnnnnnnnnnnnnnnnnnnnnnnnnnnnnnnnnnnnnnnnnnnnnnnnnnnnnnnnnnnnnnnnnnnnnnnnnnnnnnnnnnnnnnnnnnnnnnnnnnnnnnnnnnnnnnnnnnnnnnnattgaaaccacaagccagtttatttatcaatgatgtcagtactcaaagttgtccagttaaaatctacttcctcttgaaaaacaaaaatacactgaaggaagatgcaaagagctaaaagtggtatcatgattccacagcagtgattgtaagacagtgagccacagggaaatgggaaaacgtgaaaagaaacaagtatcaggaccaaattagagaagatatgagtagggccatcactagaggtgaaaatggagaaacctaagaaaaccagtgttggcatgaattatgcaagtggaaaatacatctgtagagggacgagatagaaggacctagatctaactccaagtgcttgattggagaagagagggagaaagagaatttatagaattaactgtatagaagcctaaaaaataagattatcagcctagtcatgtaaagtctagaagttcctttatttgctcatcacctttcctttttctataagactattaagcagaaggtcagtaacagaaaatttaccctttcctctcctctcttggtttaaattttataaggaatctgaagaggctatggatcagttggcattacagtgggaagagcttattgaagcaaggttgacaataggtcttgtcattctgctccctgaaaatgcccttcgacaactgtgtcaggcagaaagcacacacaaagtgctcaggatggaacttgtaccccatggcactgatacaacgggcagtgatgggctgcccacacccatggcagagccc

SEQ ID NO: 129607 - DNA, 945 bp, Homo Sapiens
catagcaaaaaatatgtatttataaggactgtcaggagggataggctatttccaatatcacagttttgtttgttggtgccttgaaaagataagatttattactcaagagaatgaaatccactgataggttcacagaaacatgttccatctacagcgtaaactggaagatttttctggaagtggctgttggccgacgccaggtgtttgaataaagacagcagcatcttggtgttatactcaggaacagcttacccccttccatagggtaaaaagtggcttcttaggtctgcaagaattcgggttgtactcgggctactttccggaattctttagtgtgggtcttagggcactgcatctcacaccagctgatgggaaccatctggatacctgactcactgtgggctaccaccactcccagctcgttctcggcggtggttagcaggtagttggactgtgcatcacctaaggagatcactttggccaagacaatgtcacctgggcggaaactcttataaatttcaaccttgtctttttcagttgctcggacatcttccttgcggatagttcctcgaaaagagttcttaagaggcatggaccccacatacaggatgtgtactttggcaaagcgtgaattgatgctagagaccttacaggttacaatagctcccacatctggcagtaactgggactctgtttctctcactacagacaccactggaagcgcgccattctcgctgctcttcatcagacagccggcaagcgacgaaaagatgtagccgtggcgggtgtaggtgccgctgcccgggctgccctcctccaagttacacagacgttcgccggggatgcagtatctcacaggtggcgccatgattgccgctgtcccaaaaccaggatccccggccgtaatggccgaattcccgggcatatgtccggtaccgtcgactg

SEQ ID NO: 129608 - DNA, 659 bp, Homo Sapiens
ctttataaacttttattttaggttcgggtacatctgcaggtttgttataaggtaaattgtgccacagggggttgttgtacagattattacatcatccagatattaagcctagtactaattagttattttttctgacagtctccttcaccccaccttccacccacaggcagaccccaatgtctgttgttcccctttgtgtccatatgttctcatcttttagctcccacttacaagtgaaaacatgtagtatttggttttctgttcctgcattagtttgctaaggttaatggcctccagtcccattcctgcaaagaacataatctctttcttttttatggctgcatagtatgccatggtgtatatgtaccacattttctttacccagtctaccgctgatggacatttaggttgattaaatgtcttggctattgtaaatagtgctgcagtgaacatatgcatgcatgcatccttatggtagaatgatttatattcttttgggtatacagctagtactgggattgctgggtcaaatggtagtctgtttttggctcttttagaaatgatcacactgcttttcataatggctaaattaatttatactcccaccaacagtgttcccttttctccacaacctcactagcatgttattagtattatta

SEQ ID NO: 129609 - DNA, 1063 bp, Homo Sapiens
  misc_feature (51)..(51): n is a, c, g, or t
  misc_feature (74)..(74): n is a, c, g, or t
  misc_feature (86)..(86): n is a, c, g, or t
  misc_feature (95)..(197): n is a, c, g, or t
  misc_feature (202)..(203): n is a, c, g, or t
  misc_feature (215)..(216): n is a, c, g, or t
  misc_feature (224)..(224): n is a, c, g, or t
  misc_feature (259)..(259): n is a, c, g, or t
  misc_feature (957)..(997): n is a, c, g, or t
atcattatgcagctgcacgacagtttcccgattgaaagcggcagtgagccnacgcattatggtgagtagctcantcattagcaccnccagctttnnnnnnnnnnnnnnnnnnnnnnnnnnnnnnnnnnnnnnnnnnnnnnnnnnnnnnnnnnnnnnnnnnnnnnnnnnnnnnnnnnnnnnnnnnnnnnnnnnnnnnnattgnnccctcgagccanngaatcgcnacgaggatgtagcagaatccgagcaatgtattgtnattgagtcagcacaaattgcaagcaatgttgtggagaagtgtttactcacgcctcacgtacggagcgcgctgtgctcatcgatgaggttgcaccatgaacgacgttccccacagtgccttatacaccatgatgaaggaccagtatgccaactacgtggtccagaagatgattgacgtggcggagccaggccagcggaagatcgtcatgcataagatccggccccacatcgcaactcttcgtaagtacacctatggcaagcacattctggccaagctggagaagtactacatgaagaacggtgttgacttagggcccatctgtggcccccctaatggtatcatctgaggcagtgtcacccgctgttccctcattcccgctgacctcactggcccactggcaaatccaaccagcaaccagaaatgttctagtgtagagtctgagacgggcaagtggttgctccaggattactccctcctccaaaaaaggaatcaaatccacgagtggaaaagcctttgtaaatttaattttattacacataacatgtactattttttttaattgactaattgccctgctgttttactggtgtataggatacttgtacataggtaaccaatgtacatgggaggccacatattttgttcactgttgtatctatatttcacatgtggaaactttcagggtggttggtttaacnnnnnnnnnnnnnnnnnnnnnnnnnnnnnnnnnnnnnnnnngtttttagctcatttgcctggccggcaagttttgcaaatagctcttccccacctcctcattttagt

SEQ ID NO: 129610 - DNA, 1048 bp, Homo Sapiens
  misc_feature (78)..(112): n is a, c, g, or t
caaagatgatagatcactatagggctccgctcataccgaacgacgagcgcacgagtcagtgagcgaggaagcggccgnnnnnnnnnnnnnnnnnnnnnnnnnnnnnnnnnnncagtcgacggtaccggacatatgcccgggaattcggccattacggccggggactgctgagctgggagatgtcggcggcgtgttgggaggaaccgtggggtcttcccggcggctttgcgaagcgggtcctggtgaccggcggtgctggtttcattgcatcacatatgattgtctctttagtggaagattatccaaactatatgatcataaatctagacaagctggattactgtgcaagcttgaagaatcttgaaaccatttctaacaaacagaactacaaatttatacagatctttcattcgtacgtgcctttgagtttacctatgttaatgtttatggcactcacgttttggtaagtgctgctcatgaagccagagtggagaagtttatttatgtcagcacagatgaagtatatggtggcagtcttgataaggaatttgatgaatcttcacccaaacaacctacaaatccttatgcatcatctaaagcagctgctgaatgttttgtacagtcttactgggaacaatataagtttccagttgtcatcacaagaagcagtaatgtttatggaccacatcaatatccagaaaaggttattccaaaatttatatctttgctacagcacaacaggaaatgttgcattcatgggtcagggcttcaaacaagaaacttcctttatgctactgatgtcgtagaagcatttctcactgtcctcaaaaaagggaaaccaggtgaaatttataacatcggaaccaattttgaaatgtcagttgtccagcttgccaaagaactaatacaattgatcaaagagaccaattcagagtctgaaatggaaaattgggttgattatgttaatgatagacccaccaatgacatgagatacccaatgaagtcagaaaaaatacatggcttaggatggagacctaaagtgccttgg

SEQ ID NO: 129611 - DNA, 826 bp, Homo Sapiens
ggaagtttcttgttggaagccctgacccatggatgcaacattgtcctggttgtgctgtagcaaagatataaattttggaataacctgtttctggatattgatgtggtccataaacattactgcttcttgtgatgacaactggaaacttatattgttcccagtaagactgtacaaaacattcagcagctgctttagatgatgcataaggatttgtaggttgtttgggtgaagattcatcaaattccttatcaagactgccaccatatacttcatctgtgctgacataaataaacttctccactctggcttcatgagcagcacttaccaaaacgtgagtgccataaacattaacataggtaaactcaaaggcacgtacgaatgaaagatctacatgtgtttgtgcggcaaaatgtagtactatatctattttctctgtttcaaaaagcagtttcacaaagtgagaatcacatatgtcaccctgtataaatttgtagttctgtttgttagaaatggtttcaagattcttcaagcttgcacagtaatccagcttgtctagatttatgatcatatagtttggataatcttccactaaagagacaatcatatgtgatgcaatgaaaccagcaccgccggtcaccaggacccgcttcgcaaagccgccgggaagaccccacggttcctcccaacacgccgccgacatctcccagctcagcagtgcctagtaccgtaaagagtatggtctgaaaagcgcagggaagttccgccgcgaccttttgcgacgcgcctcgctcgcgggacacgttaacagagcaagccagaggcagct

SEQ ID NO: 129612 - DNA, 603 bp, Homo Sapiens
ttttttttaaatatatacttgattttacagactttctgcagaaaacctattgggaatttttgtaaagagaaaagttgggttgtggtaaaaatgcataaacacatatctcctaatatctaaatttgtaaatatatatctacaatattattttaaatctgttttgttttccaagacccaccaatgacatgagatacccaatgaagtcagaaaaaatacatggcttaggatggagacctaaagtgccttggaaagaaggaataaagaaaacaagtatgttttgaattaatcattttgggggcaagtcagaaaaatttaaaggaaaaataacttatttccagaacattatacaaaccagtggaatattgtgttgaatcattcgtacttttcaaattgccacatttcatatatttctagtagcagtcctgtgtttcctaagcatcttgaattttataaaccaacctctgatcaatcttcccatatcttgttagcattaatcaaatacctgtattatttattctgaggtacatattttttcactttcttcacactcctaaaaggtatgtatttttataatcactggtgtcttataattattattgtagc

SEQ ID NO: 129613 - DNA, 706 bp, Homo Sapiens
  misc_feature (679)..(679): n is a, c, g, or t
  misc_feature (685)..(685): n is a, c, g, or t
gtgtgtgggtgtgtgtcaagttttaatacacgctagaacaagccacaagagggtgctgctaggccagaactacactcaccccaagcccaccccaggaaccccaaagcagaggtcaggaactgagtccacagctcctggggaggcccaggcacccctgaacgcttctgtcacctctgacctcccatcttgccctcagcctagactcgtcccttccctaccagtcccttccctagacaaaggcccctcccctccctgggtcccaggacttcctccctcaagggacagaggagcagccagagagcgacggttcagggccctgagggtccggctctccaggagaagctgggctctgaaccagggtgggtaaacgttgcagaagggctgtcaggacactcaggcgcccacacactccacgtagttggcagggtacaggccaatgcggccactctgcaactggccttggcaccagccctgctcgtcctcctcactcatcttcagcagctcctcccctgctcggaagctcagctcatcagcttcctggccagcgtagtcatagagtgccctcacccgaaccccggtggcagccttccggggactctcttcatctgaccactcctcatcctgccccgtgcctggggacccggggactggggtgggggtgcggtgccatctcttgtangcacantgctggtcagggtacctcatc

SEQ ID NO: 129614 - DNA, 1456 bp, Homo Sapiens
  misc_feature (316)..(324): n is a, c, g, or t
  misc_feature (411)..(475): n is a, c, g, or t
  misc_feature (479)..(594): n is a, c, g, or t
  misc_feature (728)..(728): n is a, c, g, or t
  misc_feature (1099)..(1099): n is a, c, g, or t
  misc_feature (1299)..(1299): n is a, c, g, or t
  misc_feature (1311)..(1311): n is a, c, g, or t
  misc_feature (1321)..(1322): n is a, c, g, or t
  misc_feature (1346)..(1346): n is a, c, g, or t
  misc_feature (1389)..(1389): n is a, c, g, or t
  misc_feature (1412)..(1412): n is a, c, g, or t
  misc_feature (1437)..(1437): n is a, c, g, or t
aaaagatttgaaggtatctttatttacttatttagattttttaaatcgaggtataacatatacaagtgtgcaaatcttaaccacacagcttgataaacacttgatgtatatacgtgcactctcaagagcaagatgtacagtgtttccagaaagctccctcctgcctccttccagtcataactcctaacaaggacagccactgtccttattaccatgttgtcatgtggcctgtttttgaatgtcacataaacagcatcatatagaatgtacccttttgtgtctggtttctttcactcaataatattaaattgtgagnnnnnnnnnaatgtgaagtctttcaacgtttagaaattcaatgacactctgttatacaggttttgtttgtttgtttgtttattgagacagagtttnnnnnnnnnnnnnnnnnnnnnnnnnnnnnnnnnnnnnnnnnnnnnnnnnnnnnnnnnnnnnnnnnattnnnnnnnnnnnnnnnnnnnnnnnnnnnnnnnnnnnnnnnnnnnnnnnnnnnnnnnnnnnnnnnnnnnnnnnnnnnnnnnnnnnnnnnnnnnnnnnnnnnnnnnnnnnnnnnnnnnngtgtcttgtctgggcctaaattctctagaatacaatggaagagggaaagtgaaagaaggtggaagtaacccacagctgggagccctgaaccctgctggtggcaggtggctctcgtgtccctcaccaggttgccnctgcaatcacatgctgcatcctttttcctgaacctgccccacgtgccccaccacgcagccactccgagggctccttcaagggcggcagccctgtcactcacgtgttccaaaagtgcttcccctgtgccctgacggcctcgccatgtgtcccatcatgccccacgcgctcccactgtgcgccccacctcgcacccgtgccccatcatgctctgcgtgctcgttaggtgccccatcatttcccgctcgctctcattacgtacccagcctccggcccctgtaagtgccccatcgtgctctctgtcgctccagttagatgccccatcctgccccgcgagctccaattacgtgccccacctaaccccccatgtccngtgccccatcatgccccgcacgctctggttacatgccccgcctggcgctcccgcacatgccccatcatgctcagcgcgctcccattacgtgccgccacctcgcgcccctgcaagtgccatgtgcctgtgtggtccgttactgtccatcagtttgtgcgctcgatacgggcaactggcactcacgtgcgactcgtattcanactcgcaggcanggcgttgcgnngtgacaacatatgctctctgccanatgatgcgctcgtaggtcgcggatagggctcgaccacaatcancagaggcacgggacagcgagtcncaaggagatagatggggacgtacangatcgagaacccgcatggg

SEQ ID NO: 129615 - DNA, 711 bp, Homo Sapiens
ttttttttgcagtaatatatgggctttttaattaatacatcaacttacaggatctgctatcattccaagaggtgacaaatatgaacaatacttcaagatgccctttttatgttacattacagttgctgtaactggtttgtattggtgggaaaatcccaggtactgcttttactactgtgatttgttgccagcatttataacttgggagtaaggctaaatttcagtttcattgctgaaaataaagatgtaacattttcttccatcaagttcatggttacccctggcttctatccaggttaagaatccctgcctttagggaaaattctggacataatcaggacactcctgaagaggtttaaagaagaggtaagacctcactcaagaattcccactgcagtacagacagactttcatggtttctttccttgttgtcttcagggttgttgcagatccctcctcagggcttgtttgtccaggcctcgttgatgagatgatattttgaaaacaagttcatcaacaagttccggttttcctgacattgagcagtttctgagttgtatcagtttgccagcgtaatgggttaaggtgaacaactcatttcattgtcttccatctcaggggccagcagggtgtggcactgaggggcggccaggggctggggaaacgtgtccactctgctgatggggcagtcctgggggcggatctccttgg

SEQ ID NO: 129616 - DNA, 1642 bp, Homo Sapiens
gccctcgtctgaagaggaggatattttgaaaacaaagttcatcaaacaggtcccggttttcctgacattgagcagtttctgagtgttatcagtttgccagcgtaatgggttaaggtgaacaactcatttcattgtcttccatctacccaagaaaaagaaaagtgactcacatatttggcgaaacttttgcattcattatgcttggctttaccaattttttatagctattgggaggcaggaaagggaattttggccccagaaaccatgagatttgggtcagaaaaaggcacacggggaaggggtcaaggcaggctgagagtcacatttccagacctcaggggccagcagggtgtggcacttaggggcggccaggggctggggaaacgtgtccactctgctgatggggcagtcctgggggcggatctccttggccagctgccccttcctcttcaacgtgcaggcctcctggtatggtggcgagatggggggctgtgtgggtggagtgtacttgtactctgagccgccctctaggtccagtgggtaactgcggtccgaatcataggagctcaggtccccacaggtcacaaaaggcacaatgatgcgggtgggaccatccagctggttgaaatctgggtcgtaagaatggtccagcaggggtttgctcaggtccgggatggagccctcgggagggtcatagccctgacagacagcggaaggcctcgatgctagagttccggctgctcctggggcttggcacacagcacgctggagaagaagacctgcagctggctgtagaggagcgtcacatcccggcctcggaatatcttggccacaaagcagccccctggcttcaggacatgtgtagcaatgttcagagcagctaggaggagctgggcctgcatatactcatcaacatcatggagaccggttacatcaggagccccgtcacacaccactaggtccgcagggcagcccttaaagtgctggatgatctccttggcagtggacagctgggtgatgtccccctggatctgtaccacacctggtagtggagccatagcctgcaggtccacagccaccacgtggccggacccttggcccccgatcttctggctcagcacctggctccagctgcctggggctgcacacaggtcaactgcccgtgtcacgccttggaagagttggaattccttatccagttgtagcagtttgaaggcgctgcgagcacgccagccattctccttggccaggcggtagtagacatcccgcttgtcctttgacgtccgtcccatttcacacaccagttgctcaaggacctgccgacagtccactgatgccggccagtatcagtaaccagatgaatgggctaccacctacctcttagttttcggagcagggtggtccgcgagcagcctgtgcctcggcgagagcgcaaacgggcgacaagtcctagggcttcagtttgtgttcgtagtccacccgaatgcccgggggggcaagcctatgggctgtcgcagcgtggcaaactcggcatcgtggatcgcccaggttccggcgggccgggacctgatgtgaacgtacaacctcgtgccgaattcgccacccaggcctcgctaccttataaccgttagagttactggcc

SEQ ID NO: 129617 - DNA, 1498 bp, Homo Sapiens
caagtccaagagtctttatttcatgaacaaaactacttctggtaaagagacgaggctgaatgggcccctttctaggtggccacagttcaaggctggtgagagagggcgaggttgggccggggcaggagtgcattacagggaggggggaccccaggtccagccggaggaagcgggaggggaaatgatgccggggagggggagtcggagtgggtcccagaaccccctgccccaaactgctccagcccatcatcgcgacccctgccgccaggcagggaggaggcggggaggggctggccccagaagtgcgtgtctgaagcggccaatgtgtgcaaatcagcaaggaggaggggtgcggggccgctgcccccacctcaccgcccccctccccaaacaggcagcagaagcagggtgggggcagcggcagtattgctttacccatcatgcatggcggtgcgcggccggcggggcaggagctggaggaggccaaagtgggggtgcgagccaagccccctgccccctcccaccccagtggctccgtcggcaggactctgaggctttctggggcccaggagtggccacccccacgctgggggcaggcggtgcctggagagtccccattacggctggctcttccttgaggcggggcccagggccagggctattcggccacctggacgcccgtgcagttctctttgctttcagaggtgatggccaggtattccgaggcattctcctgtgcagcagtctccgtggcggcagcgatcttcttgtagcagtaaatcatctctgccacgagccatatggtcaacaccacaatgagcacatacatcatgatctcagacacgatggatgccatgtctctgttggctttgtccactacctcaatgtggatcttcttgacgacgctggtgttgtgctcgtagttttcgaagaagagcaggcggtagacgtggcactcgtagtcgcccgagtggttgtaggtgacattggtgatgaagatagacagatcctgcaggtctttggtgccccggctgccattccacaccacgcggccctcgaagcgctcatcctcctccagctgcaacacctcattctcatagcgcaggatcttgacaaactcctcagtgcccttctggcggaaggtccactcggtgaaggtctcagcgttggtctcgctgcggcgcttgcaggagatgcaaggaattttgaaggtcatcccatacacggcctccgtctccgagtccacctcacgcagcccccgcaagctgaagacaccagtgccgcgccgaccactaaggccagcagcctccccatgtttggccccggcgcgggctgcgcccccctcccggggccccccggatatttaataacgggggccaaaaggcgggcgcggaacctgtgcggcgcgctaaaaaatggtccccccgggaaactcctccggcccacaatatacctggcgggtttctcggggaacccgacttaatgggtgttgacagcg

SEQ ID NO: 129618 - DNA, 670 bp, Homo Sapiens
ttttacagtcaaagtagtaaacttgcagatatatctaaaaccaattttcaaaccagcttcataacatatgctgtaagtaaataaataccaaaacctgataacactagcatggagaaaagaaaagctgaattaaaaagacattcctttacacaacttagtcaagacaaaatacacattactatgtgatgttacactaattattccaataattatttacttaagaagagggacaaaacagttttgttacattaaatctttctcttatttgccatccccacctttctactccattactgcctcctaatactttcccttcccaaggagattggagattaagaaatagcctctgcccctcaatctagaattaacttaccttttatttttacatacaaacactggatttcccagagtcgtcttttaaaggagttaagattctagctctggcaggaaagtcaagtgatttaatcacaaccatagttgtttctctactggtgtttaacatgtaccacataaactaactactaacatagccaattctaaggtcatttatgtgagatattaagactgaaaatacacttttaatttctgcctttttctccaatatataatccctttttaaagtctcttaactaaattagatgctggaattgatccagccaagtaacacctt

SEQ ID NO: 129619 - DNA, 1036 bp, Homo Sapiens
  misc_feature (614)..(614): n is a, c, g, or t
  misc_feature (708)..(708): n is a, c, g, or t
  misc_feature (751)..(752): n is a, c, g, or t
  misc_feature (836)..(836): n is a, c, g, or t
  misc_feature (877)..(877): n is a, c, g, or t
  misc_feature (896)..(896): n is a, c, g, or t
  misc_feature (902)..(902): n is a, c, g, or t
  misc_feature (911)..(911): n is a, c, g, or t
  misc_feature (963)..(963): n is a, c, g, or t
  misc_feature (969)..(969): n is a, c, g, or t
  misc_feature (980)..(980): n is a, c, g, or t
ccagtgatgatgtccagaatttattactcctggaagaacagactcaaaacgcaggtgagagccacacaggtgtccaccaagacggatggagggggactcaggccaggggtggaggctgcagagtggcaccggtgggcatgccaggcacctcaggctttctcatccaggcgtgtcctggctgtgaaagggaccaggtagcccctcccatgccacacgtggcctccaaaggcccagatatgtacagatctacagacgtgcactccctggtcccccggcgaggtccaggctacaggtctgacaagaccaaacctcacggcaggcctctcactgctgtcagcatcctggaccagggcacaggacggagaggcgctcccatcgcccccagcagcaaaccacagcagaggtgtccacgcacccctgagcacactccatgacgcgcaccctgagcggctcctctctccaggggatggccacgcaggccacggccctcggacccctggaaacacctttccctaccggctgctgggagcctcgcctcagtttctggtatttgtggctcacggaaacatccctgctgccaggccatcctgttcaccttcacactcactgaatcncctgcttcctttgagaaatgcccgtgacacccgcggtcagagagcgctgctgacgtcacctccactcccgagcacccacaccacctgctacggngggcgccggtgggtccgagctgcactctcaaggctcttccganngacgggctgtgtctgggagcctctcctgctatgacacagcgggctcacttcctcactcaagacaatgctattgttttccagtcntgagacagaacactaaaacgatcgctgtccagatttggaanggatgctccatttcggcanccccangctcaccanggtgttccagactcgctgcaggactgcacgtatcatcctgcagagctctcangaacangatgctgccanagcgctcgggggacatctgacaacatggctgggcaacgaccctcttcaagaggcaa

SEQ ID NO: 129620 - DNA, 1240 bp, Homo Sapiens
  misc_feature (1098)..(1098): n is a, c, g, or t
  misc_feature (1171)..(1171): n is a, c, g, or t
ccccccattttgaattacctggcaaggcttaaaaattatccattaggtaggtattaattcccggccaacctttaattgcaaccatggaacttagatttatcccaaaaaactaaagtttcagcccatagtttttcttgcagtattattagagcaaaataaatgaccaacatccacaaatttaacatttgtcatcaactcacatccaaaaaattaaaggaaacataattaatcaaaacagcagcaaacttaaaagggatttatttgtgatttcctatatatatttagcttgtaaatacaagactgtaaatgtattaagagacaatttctgttaaagttttcattgtgtttcacttcaagtactgcacaagttaaaatctgataaaggatttacattcggttatctgaaactccccatctcagacttttgttttaatgtggtgggtaacttcatcatttccatagataccaccagcaggaaagtgtctcttttatggcttctaggactttcattagttagtgtgcatacagttttcattttctatatcattgtcattatcattgctatcttcatcactttctaatgggatgccagtggcagctgaagcacctttagtttctcggtcaagaggaaaaaagccagttccactgaaagtgtcttgtctctggtagaagagtacatatgctgctttggacacaatttggtcttcagatgcagtggagacactactgtcatcaaaatagtaccattttccatcatctttattttttgcaaaagcagtatagtgtcctcctcccatccctccatagtggttggaaacagcaatcagattatagcggcaaggacctgcatttggattaattaagaattccgacatatccaagtcattgataggaaaatcaactaaggtatccaacttgtctctcatgtatcgactgtaagaaaatcgcttgagatgtactacaagtactggaggcagggacaataatccaatttctttgtggcttgctgatgttcttacaattcggacaatacagggatctcagcactagctttctttgttgtaaaagtcatgcatctttatttcacaaggtttttangaggttaactcaacttcatgttttcaagtctcacagatttcactcgtgcgattctggctcgaggcaatcctanaggatcgataaatctatcagtaactgttctggtgaatgtatcgtcacatcaacacataaccgagaaatg

SEQ ID NO: 129621 - DNA, 1120 bp, Homo Sapiens
  misc_feature (918)..(943): n is a, c, g, or t
gttctccttcccttttggggttcccctttaaacaagtatttggccttttcggaaatttacggtgggataattttcaaaaggcaggagttcccaggacccggagagggttttttcccatcccaaggaaaaagctaatacctaaccctggtttgtttttaacccacttgttatcccggttattcgtggggctggcatagaacttttgccaaaaaggcaagccttcaaggttacacaaacttcaacagattttgggtcatatttccaacaggcacatcggaatgaggctttgtgtttccttggctctctggcatgtcccttttaaatcatgggcccacagtgactctcagagatttatgccaaaattgcatacaattgttttctgaatcataacttgtctatttttctgcctatgtgtgctacttttcagtttgtttctcatcaacattttgactctcagaagagcctccatttgcccctttctctctttaggtatctaagatctttgaacacctggacctttacatttgatccaaccctatcaaataatgaacttctcagagaggcatctggggtcctggaacttcatgttgatgaagtcatattatataatatgataaaaatattctcatgcagtattttaaataatttcaaattctagaagaagcaaatttcagcgacatgtcattgagtttttatttggtaaagctataattgtgcagtgtacaaagcactttttaaaaagatagtttattctgtcagggtatatgaagttagtatacagccagaacagccaagcctcaattcttgtaccttgtgtctttttattactgtttaatcaatagatatcatatgtttatgacagtttcaagaattgtttttaaacccaaacttaattttatgtttcagactattgttagnnnnnnnnnnnnnnnnnnnnnnnnnncctcactaatttgccctaattggatagggcaatcagaacaaaatctgactttcgaatatttaaaagatatgtaagtttgattgcattttcgtacattttaagcaaactaggttaacaacaacatagcctagtcaaacttctcaggaaacttgttttaataaatatgtaaaaataccc

SEQ ID NO: 129622 - DNA, 1780 bp, Homo Sapiens
  misc_feature (215)..(215): n is a, c, g, or t
  misc_feature (218)..(672): n is a, c, g, or t
  misc_feature (690)..(717): n is a, c, g, or t
gggtgtgacacacccagtgggcgagacccacacaaatggtacgtcaggtgacatggaagcccacgctcccaaggagaaggcgacagtaccggtaagcgcaggtcgaacagagagccacgaggagctcccaggggaacccgtgtatcttatgtcctgtcgggttcccccctctgacttggcgtcgattttgtgatctcgtcaggggcgggaccctntgnnnnnnnnnnnnnnnnnnnnnnnnnnnnnnnnnnnnnnnnnnnnnnnnnnnnnnnnnnnnnnnnnnnnnnnnnnnnnnnnnnnnnnnnnnnnnnnnnnnnnnnnnnnnnnnnnnnnnnnnnnnnnnnnnnnnnnnnnnnnnnnnnnnnnnnnnnnnnnnnnnnnnnnnnnnnnnnnnnnnnnnnnnnnnnnnnnnnnnnnnnnnnnnnnnnnnnnnnnnnnnnnnnnnnnnnnnnnnnnnnnnnnnnnnnnnnnnnnnnnnnnnnnnnnnnnnnnnnnnnnnnnnnnnnnnnnnnnnnnnnnnnnnnnnnnnnnnnnnnnnnnnnnnnnnnnnnnnnnnnnnnnnnnnnnnnnnnnnnnnnnnnnnnnnnnnnnnnnnnnnnnnnnnnnnnnnnnnnnnnnnnnnnnnnnnnnnnnnnnnnnnnnnnnnnnnnnnnnnnnnnnnnnnnnnnnnnnaagaattcggcacgaggnnnnnnnnnnnnnnnnnnnnnnnnnnnnggcagcagcttttttaatttgaacactttcttcttgaggacacaccttcagtacagttaacaaatggttacacctgaaatctgctgagagcagagcttaagatccacaattgcaaaggccactgctggctcacttcctcacaggctgtattacctttcagagctgagtgaggctgtgctctacgtcccaatacttgttactgagtggacatgaggtgcaagtttagcaccttaaagggagaaaaaaataggttagtatgcagaatgtgattttgtcctcacttcaccttaagtcatctttttacacttgccaatgtgagttctgaaaggtagtactatatctgcttagaaatggcgagtgactgccaattaaaagccacatgataaggtaggttacaggtaagaggtaaatcaggttagacatgcatgagaacatgtaggcacagactgaatataagcacaggaacactcgtgaaacccaactgagcttttcttttgcctagaagggctaaatcctgccttctacatcagttcccatttatgctgaaaacccagttgaaagaattgtttcctacctggacagtgacacagtagtttgtttcataccagaaacacattgctaaacaaaacttaagagtctcagtttgggtttttctacaataaagtgaattccaacagttggcatttgccacagtagagaccactaaccattccctaattgtgatgattttattacccagcaccatcttctggagaaaaatatctgtaaggtgctcagtctcagcagaacacttcactgcaagctctagttcagtcagttcagaaaggctgtgaattgcccaccctgatttacagcactaattttaataatctgaagacaaattcgcttggggcttatccaagggactagtcttaaacctacgtaatttaaattgattgcattttataattaataaaatcccctgtaactcaatagttatatgtttcctttatctaaaccatgtagcactctttataaagggactttaaaccaattaaaataatgtttcatgtgcggcaaaaaa

SEQ ID NO: 129623 - DNA, 2115 bp, Homo Sapiens
  misc_feature (203)..(211): n is a, c, g, or t
  misc_feature (869)..(883): n is a, c, g, or t
gcttatcaagtatgattttaatttcagtaaaattgatactgagctctactgttgataactgaccagctctattggtaattccaacctgcgttactcaagattatttatagccccaaagagcaaaaccacatttgctacaacaccaattattaaaatgtgtcaggtgcacattcaattatattataacatgattctcttatttnnnnnnnnntaagaaaatgcagcaagaataatttgacagttttgggaactatccacataaaggaatggatgaggcaagataatgtacaataccacaaaacctatgctaaattcaatatttatctgaaagttaaagaaaagcaaacaaacatatacaaaggacatttcatttttaatcactcaaaaatgaaaaaggtttggacaatgtcaaattccactcaccataatgctatagttatacattaaatataattactatctatacatatgcaaaaatataaagttctatttcatacaataaaaccctttatagaaaccattttaaaattaagcagaacttctcaacattaatatgtgaggtctaagtccttctaaaggtttctttaaaggtttttaaacaaaatgctaaacctaaaaacattgtcctgtcagttcccaaattaaatctacttagaacaaaaacaaaaatttatagctcggtcacatactacttaaataatattgttcaggcatctctaaaatcctccatgttttcaagtatggaaatagaactcaaatattccacaatacagtactaaacagatggagtatttaggaaagactttgttgtcatatggcacaatattaatattttgttgcttcaatacgttttgaaataaatatcagannnnnnnnnnnnnnncctaaaagaccaaaattataatctacattaagataattctgactgtggttaagacttaagagtgtaaaatacaacatcaatattttatcacaaaagtaaagctggtaacaaattataaaaggagccagtactctactgagacaggctcggagattaaagctcatcatgatagaaatagtcatcatggagctgtctgccataatctgtggcttcactggtgagaaacaagtccgggttttccagaatctcttcttcagagagctttttgtcaccattcaaatccatttcatcaattagatgaagcgcctcctcttgtgcaatgccctgattattaggtactacccaaggtaacagctcttggggatcaagcctgccatcgttatctttgtcataatcattcacgaatctgtctttctcaacaagtatccattctggatcttcatttgcagttggatcccacctgtaatcaccaagaaattcttccaaactaacaaatccatcaccatttttgtcatgttcttctaaagcttcttgaatgacaaattccgtcatataatcaacttcttcaggatgctcaaaagcaataaattcttcaagactcaaaccgggacctgaatcctggttagctttttcaaatcgcttcttgtcctttaagtgaagcttcctaaaggactcctcttctgcatcatccagagcagtgttctcatcaaagtcaatcacacgatcatacatctgaatgttatattcatcccaagtcacagtatcatcactgtttttatcatattcaacaaactgttgttttgcttcttgcatagcataatgcttaaaagacatctgaatccatgacctgagttcactttcagtgagaaagccatctgagtccaagtcgattttctttatgatcgcctgcagtcttttttgctgctcttcgtggccgagtttaacatattcatccacatcttcctggacgcccagcagcgcctcgcggtcgtagtcgctgcggcgctcgcccagcgggtagtgcagctcctcggccttgccggcgccggccgcggcggcgcacagcagcagcagccccaacgccgcggtcctcgggcccagccgcatcgcgccggcccgcggaggacaccgagggacgcgaggagggaggctggcgggggcccgggccggctgcgatgctccgcgggccggacgcgtgggcggacgcgtgggtcgacgatatcccgagaatc

SEQ ID NO: 129624 - DNA, 1949 bp, Homo Sapiens
ttttatgacacacaccaggttaatatctttaatatataccgagctcatacaaatttatctgaccccagaagatagagcaaaggacactgacaatccacaaaggaggaaatacaatcgctccacatgaaagatgttcaaccgtgctagaagtcagtgaaatgccaactgaaacacgatgctattttttcattatcaaattagcaaatatttagccagatgataattcccaatacgggcaagatggacatgtttatccttgctggtggcagtgtaaggggatacaaatatttccggaaaccattttgtcaatatgtagtaaaagcctcaaaggttttcatattctttagttgaagaatcccacctcctggagtctaccctaataacttgacattgggaaacagcctgtgcacaaagatattcatcaatttataactgaaaagttagtaacagcattagtgattggcaactggcacaatggtccatctagtcaatgggagagtacacagccactccaaaataaaatatttagtaatcataaggggagatgcccacgatatgctaagtgaaaacagctgcacaaaactgtatcattacagaagacagcaacaaaactatgttaaaacaaaaagcaaagaaaccatagttggggggggaaagcctgagagacaccaaaatgtgatgttttatttccttctttcctctacttgcaaaaatttatctaacatgtggtttacatgggtaatgagaagacctagtaggtttggtgcttgtgtatgcaaaggcatgaggcacacggaagtgaggagctgggtttcctcccatctctaccgcatctgcgctgtgccaactgccaccccacccaaactcaggtccccaagagacagagacacaggggctgtctgttccacgtggaaggccctacaccccaaccttctcccctactctggggagcttctcctgttggcccaacagtctgctcttgcttcccttacccaggagacccaccttgtgcctacctctctaagtccctaaaccagtgctttccaagcagaggtgccatgagccttacaactgtggttgcagatggaggcgcctccattaggatctcttccctcttccacccagagctctgcccccagtcagtggctgcagcatgggcccttttgtccaatcccagggcttgttccctaagtcaacctcagcacatgcccagctcagccatgtcccttcactcccctacaggctggaactgccagggtggtgcccacccaaggcggctgtctgccatgacaacaggagcgtgtgcgtcaggctggtcctgccgcactttctgggttttgttttccactcctcctcattgctcatcacatacttacctggggacaatgaaataggtctttgctattccctagaagtcaccaaaatgctttaggacattaagttgtcccagggtcacactatactaggccagggagtcaccccttcactaactcccatctccagtgataccctggtatgcactgaagcctacttaccaaaggggtaccatgtggaccagacagcagtcacaatacagtccaaagaatgtcaaaaccatggaaaacagaactttccttcacatgcactgttgaacactactggcctgtcccttttatcaatcaatacccgttctcctaaaatttagagaaattataaccccaaaatatgtacaaagcatctcccttcccccactttcgtagcctgatcccctatcactgaggtctccctctggggctgcgcctcatcctccttagctggagactaacgtatcttccactagagccaccatggggtcctcacctctccaatgtgggcttcttccaagtccaaggtggagggcaagcccctgaccctctctcatctgctccgtgttccaaagtgcagggagctatcaagaaggtcataagtgc

SEQ ID NO: 129625 - DNA, 988 bp, Homo Sapiens
  misc_feature (140)..(152): n is a, c, g, or t
aacatttttgcataaatgggtctttgatacaggtaaccagttttgtaacattattcagaacttcactgtatcttcaagtttttgatatcagcatctctgtggagaaagcagtgtgctataatgtcaacatcaggatttcnnnnnnnnnnnnnaataacgcaaaatgacttatggagacaaccactgatggggcaccaggagtgtagataccagacctctggttatcagatatgatgtcacaacattatatattggcctttgttctggcaggctcctagcaatagaaaaagttttctttgaatttcatcatttacaaatcttacaaatgctacagcatgacaaatattagtgaaacctgttgactcatcatcctggatagagaagctgctacttttcagttaatgacacaaaaccttttttgcatcatatgacatatcatcagtaaatcaacttattgagaataaagtctcttcaactttgtactgcatcttgccccagcattttaatgttattagattctcaccaaccatgcatattttcctttcctgagataagttctgctactaaataatttgcttcttaaaccttttgactaaaggtgatttctgaacaaaagccttactgtttttgatagtccaaaagccatttgaaaataatgaatatcctttcttgtcaagtggctgtgatttattgttacaattgctagttttgtaagttgcatgtcacagacaatgcacaatgggacaggagagcttggactgagtccacataatacccttgagaagtagctttctttattaagacagaatttctttgtgtcccttgttgcactagtatactgaagtatactcagaagactgaagttcttcatcaccaaccttttcagaaatgtctgtagttctatgcctaaaatggttctcgtctctctcacatcttgccttccaaaattgcgacactggactgtcagctatattacacacaaatgtta

SEQ ID NO: 129626 - DNA, 229 bp, Homo Sapiens
tgtcacaacattatatattggcctttgttctggcaggctcctagccatagaaaaagttttctttgaatttcatcatttacaaatcttacacatgctacagcatgacatttattagtgaaacctgttgactcatcatcctggatagagaagcagtacaaagttgaagagactttattctctataagttgatttactgatgatatgtcatatgatgcaaaaaacgtttggt

SEQ ID NO: 129627 - DNA, 1277 bp, Homo Sapiens
  misc_feature (1)..(1): n is a, c, g, or t
ntaatgataataaacaagacatttatttttcatactcttttgggggaaaggaaaaaaatcagtttgccctacccaatgatggtctttctgaaagattctccattcattccatagaactggataggttgcttcatctcagaggattttgtactcttaattcataaagagaacttctcttcaggaaagtggtcaaagggtgagcctctgtgagcagcttcgctggtgcacagccagactccctctctgggtgaagctttttccacactggccgcacagatagggtgtctctcctgtgtggattttgccatgcagaatacaattccccctggtgtggaaactcttcctgcactgggtacaggcatagggcttcaggcctgtgtggactctgatgtgaacaattaagcttcctttctgactgaaggcttttccacactgatcacatctatagggcttctcaccactgtgaactctcctgtgaacagcaaggttactctgattcctgaagcttctctgacaaatagcacactcgtagggtttctgtccagtgtggagtctctcgtggacagcgagactacctcgttgactgaagcttttcccacactccttgcactgataaggcttctctcccgtgtgtatccgttgatgtgtaacaagattgcctttggccctgaagctttttccacagtgggtgcactcaaaaggcttttgaccagtgtggattctctcatgtaacgttagactacctttttgccggaaggattttccacactcctggcactcatagaccctttgtctcactccaggtgaatcttcctgtagtgtcttcgaatctggggatttttgttccagcttctctcttctgaaagaattttggatatcccagcttgaggatcctgtagcctcagagtggtcatatttgtggtgggcttcagtcatcacattgaagaacgctacattctgggcatatcttccatgacagtccagcagggtagctgttggaaatccaaacatgtccactcctgcttacgacctcagtcaccacctcttcatatgattcttccatgggctgttcctgagcacctcggcatcccgctctccggtccacgggaccctgctctgcggaccgccgacctctccgctcgcggctggcctccctcggggcccgggccggccaggcctgctcatttccttggcggccgctggcataaggcggccacacggagggcccgggacagcggtctgatggcgcagccccgccttgccccggcgctctgacc

SEQ ID NO: 129628 - DNA, 1094 bp, Homo Sapiens
  misc_feature (264)..(273): n is a, c, g, or t
ttttaatagaaatattaaatttagtgataatacttaaattcaatttcattaatactcttcaaaagactattccaccaaaagtgccttttatatgcttaactgaagatgcgaaagagactatgaatagtcacataatttcgtagtctgatatgggagaggcatacatgatgaaagcacatcttgaacattactggctttaagcacagaagtaaacatgacttggtcaatggatagagcccacagggaatttgcaaatgagtctgnnnnnnnnnngcatgtgacttcagtagtttattaatactaaaggagttataaaagccacaaatatgtaagcaaaatatacactggaaaactcaaatcctttatgtgtattttactgacccttaagtttcactttgactgttttaatatcaactagatttgttttccccctttttactcattcaagtcttaatcttagataatttctcaccattcagtggccactgtgccaataacaaaaacaaaatacacatacctcctttaacaaatatttatagaatatttactatagtaataaagacaataaaaatagacaaactaccagactcatttacactctcctaacctgtggaaggcactactcgttctttttgagtgaagtatttcccagatctctttcctagatcagaaaaaacagtatctgaccacagagtttgatgcttgtgtatgtaaaatgttgccatctagatacttaaatacaggactgtccaacagaaatgcaatgtaagccacgtaaataaaagtaaacagaaacagataaaatcaactttaatagtatatttaacccattatagccaaaatattgtttcaacatgtaatcaatacaaaaaatattttctgttctttttctaccatgtctttaaaatccagtgtattttacatttatagccccactcatttggacactaaattttcattggaaatactttatctgtatttaggtatcataaaatttgcaattggaaaattagattcaaatacccaagttgttccaaacacaattgtaagttttccaataatcaagtatccatttttaaatgaaaatggaaatg

SEQ ID NO: 129629 - DNA, 1422 bp, Homo Sapiens
  misc_feature (213)..(227): n is a, c, g, or t
  misc_feature (1155)..(1155): n is a, c, g, or t
tttactttttgggaagagtgattaagaaactttattacagaaaatgaatgcatccaacgtccccaaatacatttgtgacaagaacagacacacacaggagacacagacaatagtcactacatcacagccttgttctttccgaaggataaaatgtcattcaagaatggggtgaggtggttagagggagtaggtactatccttttaaatgggggnnnnnnnnnnnnnnngcaacaggttggcatcttaagaacacagacagtgggcccagaaatcaagctaagcctaagccttaggtaacatcatgccacttacatcatctcagagaaactagggcattattccactagaagagcaatcttgccacagtgtgaaaacgttgagtagtgatcttgctgccccagctaatggaccaagtggcctcaacttgacagcctctttaaaactcaatgtttgcctaatcaaagatcatctggctaaactgctcccccacttctgcttagctactttggaagcacaaaagttacccctttccatccttggcccttccctggttggtacatctagttatgagatagacgcgcaccacttaacaaatcactcccttttgaccgcaggttgtttctcttccatatttgacgaggctggcaacagctcccgaatcttggcctagcacatcacgaattgggaagctaaagctttagcttagaatgccaagtgacaaggacatggctgaagcaggaggggaaattctggaacaagtgcctctgggcaaacctcacaaccgagttttttaaattagtggtcattttctagaactagaggaacacattcaggacaaacagttctgatgggagagcgaatggctatgaacacataagagatcaggctgtgaccgtgaccataactcgtactcatccaggacccgacagggcggagaggacaccgcctccagacatgcaagtttctcaacagtgaattttaagaaaaagctgctttctcttaaaattaatagcacaaaaacactcctgcgtgtttcatagcctcaaacatacacacccaaatattaatgctgggcaatagcaacactcacccacaacacagtactgtatccttcattgctacggacagtaatgatgtatatacacatcagccttncaaaatggtattttagtgtcaccacttgctactgtggccatctcccctcaccccaacctggataaaatgttacactacccactaatataaccactgacacacaaaccaagctccttccagtttaacattgaacatcaatctacatttccagtgaatgagctaaacttatgagcaggccattcaacttttcatgatacatttagtgctcagaaatggttgattccattagcctgccctatagctcaggtggcccaagatggagcctat

SEQ ID NO: 129630 - DNA, 1040 bp, Homo Sapiens
  misc_feature (254)..(292): n is a, c, g, or t
  misc_feature (817)..(817): n is a, c, g, or t
  misc_feature (843)..(843): n is a, c, g, or t
  misc_feature (903)..(903): n is a, c, g, or t
  misc_feature (941)..(941): n is a, c, g, or t
  misc_feature (957)..(958): n is a, c, g, or t
  misc_feature (967)..(967): n is a, c, g, or t
tatcattccaattcatattcagccagtgtttattaagagcctactacacgccagacactttacatgctgatcacatttactcctcacaaccatcttgtaagggagacatcatcagtgccatttgaacaaatgaaaaactgaggctcagagagattcaataccttatccaaagctctccagacaataagtgcaaaaacaaggatttgaattcaggactgtttgattccaaatctggaactttctggaacctctgnnnnnnnnnnnnnnnnnnnnnnnnnnnnnnnnnnnnnnngcaccatgtcctgagctgctgcctcctggactcccgccagactgcacctgacagacaaagccaactaggagggaggggagtgagggagaaggtcccacaggtgaccaatgcctggccccttcatgacagcaggggctagggctgtcccacagggactagagagaggtgtggaaggcagggactttcccataatgctccctcctctcagtgcacaagtgtgctatgttgagaaatggggcaaaagaacaaacagtccttgccacagagggagacaggcagcagccttatcaaacaagataaggagacccggatgatgtgccttttgaggcccctggtggtggaggaggattgagccaggtgaatgggaaaggaagaaaagatgaacccatcttggagtgttgtactttggttgctggagagcaacagtggagactggagacaatatttaagtcattccggcaggccccatgtacgtgcctcacaatctaacaccgcccaccttggcagagggaagcttctatggangtgctgcctgctcatctgtctctcangcttctccagactgcggtctccaggagatctgacaggacagaggatggacagcatagcangagagtggtgtaatgcaactctgtcacaggaataagangtgaggatgcggtcannaggagtcanagagtcacactctgctgggacaagaatgcagtgccaagcatctctgcgatttggagggtaagctgtactcaag

SEQ ID NO: 129631 - DNA, 371 bp, Homo Sapiens
  misc_feature (253)..(291): n is a, c, g, or t
  misc_feature (293)..(293): n is a, c, g, or t
atcattccaattcatattcagccagggtttattaagagcctactacacgccagacactttacatgctgatcacatttactcctcacaaccatcttgtaagggagacatcatcagtgccatttgaacaaatgaaaaactgaggctcagagagattcaataccttatccaaagctctccagacaataagtgcaaaaacaaggatttgaattcaggactgtttgattccaaatctggaactttctggaacctctgnnnnnnnnnnnnnnnnnnnnnnnnnnnnnnnnnnnnnnngnaccatgtcctgagctgctgcctcctggactcccgccagactgcacctgacagacaaagccaactaggagggaggggag

SEQ ID NO: 129632 - DNA, 905 bp, Homo Sapiens
caagttgctttttccctttttattaaaaatagactcaagcactttatgtatcatacaaaagtttcattcgctggtggcagccacgggaaagactggccccgtagcactgattttccacctcccctccaggggactgggtcccaggagcagtgactgggcctcagagaaagcccataaagactgcttactctggaagcagccgactaggggctgttccgcgagcagctgtccccaccccacccaatggcaaaagttagatactcgaaagtgcctcttcagtgccaagataaactaacaagtggagtgaaatggaaaaccctttgattattttactatttcccagggcctgggatttgagttttccctgcactcaagtccttttccctacaaataggggtaggaaacttcatcctcagagactctggtctcctggtgtctgagaccagaatttcactccaacccaagtcttttctcatctgctgttctgtggtccatgatctacttgccctgtgacccaaggtttgtcctctgttcactcaaaaagaggtggagcaaaaacggattcctcccacaatcctctctgcctgagtctatgccctgccatcgcttccatgttcaggatcttgggaacagaaagacccacaaccatccctttcccccagttctgtctctccctgactgctgcccactcctgagccttaacacccctggggtacccccagacccctgttctaaagggtgcctggttagtggatcttgtggaggcaggggaggggatgcgttggagcccatgtttccccccagagagtgggggcagctactctttgctggatatggactgcttggcaaggccctcggggtgggatgcgcatgcggcaggaggggccaccctgcctgagccctct

SEQ ID NO: 129633 - DNA, 764 bp, Homo Sapiens
  misc_feature (100)..(100): n is a, c, g, or t
  misc_feature (168)..(168): n is a, c, g, or t
tgagcgcccgccctttttttgtgttttgttctttagtaatacagtatttatttggtctgtttctctgtcaaagccccctttggagccaacccacgttccncagctgcctggggaggtataggaaaaggaacacacgggccaaccagacgcgggagaactatgggagtnggagacggctccttcacatggcaaagaggatgagaaaggctaccatcaggccaaaagagcccccatggcctccgagagggcaaagcccagaatggcgtaggagaagagctgttgcttcagagaagggttcctggcataaccaatgatgaggctcccaaacacagttccaatcccagccccagagccagccaccccaactgtggcagccccagctccaatgaacttggctgctgtgtcgatgtcccttgaaatggcgctggtttggaagctgcggctagagacaagtgaggtaaggggacatgagactgccaagctgctgaggctctcatctgtcagtatctccggtcgtttcagcaccactgcagatagcggacggctcagcagctgtgaggtgctcttgaccaaggagggagtggagacaaacttggagcaggcgaacattttcagggggtgaggagctgtggcaggagagctgctcccactgcagagaagacagagaggggcggagcagcgcgacgcgtgggtcgacgatatcccgggaattccggaccgtaccagcctgcttttttgttacaacttggtttatattccatgcg

SEQ ID NO: 129634 - DNA, 1173 bp, Homo Sapiens
gtacctccataatgtgtgccatttgagtattttgttttcaattagggagatagttggtattaggattaggattgttgtgaagtatagtacggatgctacttgtccaatgatggtaaaagggtagcttactggttgtcctccgattcaggttagaatgaggaggtctgcggctaggagtcaataaagtgattggcttagtgggcgaaatattatgctttgttgtttggatatatggaggatggggattattgctaggatgaggatggatagtaatagggcaaggacgcctcctagtttgttagggacggatcggagaattgtgtaggcgaataggaaatatcattcgggcttgatgtggggaggggtgtttaaggggttggctagggtataattgtctgggtcgcctaggaggtctggtgagaatagtgttaatgtcattaaggagagaatgaagagaagtaagccgagggcgtctttgattgtgtagtaagggtggaaggtgattttatcggaatgggaggtgattcctagggggttgtttgatcccgtttcgtgcaagaataggaggtggagtgctgctagggctgcaataatgaagggcaagatgaagtgaaaggtaaagaatcgtgtgagggtgggactgtctactgagtagcctcctcagattcattgaactaggtctgtcccaatgtatgggatggcggatagtaagtttgtaattactgtggcccctcagaatgatatttggcctcacgggaggacatagcctatgaaggctgttgctatagttgcaagcaggaggataatgccgatgtttcaggtttctgagtagagaaatgatccgtaatataggcctcgcccgatgtgtaggaagaggcagataaagaatattgaggcgccattggcgtgaaggtagcggatgattcagccataatttacgtctcgagtgatgtgggcgattgatgaaaaggcggttgaggcgtctggtgagtagtgtatggctaggaatagtcctgtggtgatttggaggatcaggcaggcgccaaggagtgagccgaagtttcatcatagcggagatgttggatggggttcggggaggttcagatgaatgagtgttaattaattttcgacgcgtggtcgacgatatcccgggaattccggaccgtaccagct

SEQ ID NO: 129635 - DNA, 987 bp, Homo Sapiens
  misc_feature (74)..(80): n is a, c, g, or t
  misc_feature (85)..(100): n is a, c, g, or t
  misc_feature (107)..(136): n is a, c, g, or t
  misc_feature (831)..(865): n is a, c, g, or t
  misc_feature (869)..(920): n is a, c, g, or t
  misc_feature (939)..(939): n is a, c, g, or t
  misc_feature (963)..(963): n is a, c, g, or t
ccgcgcccgccaaaacgaaaatggttcttaaaaaaagcttcttcggaggggccgaggggccggccgacacaggnnnnnnnttttnnnnnnnnnnnnnnnnttttccnnnnnnnnnnnnnnnnnnnnnnnnnnnnnnttttttaacatcttattaatacagtatttatttgtcttttctctgtcaaaccctgagccaaccacgttccccaggctgcctggggaggtataggaaaaggaacacacggggccaaccagacgcgggagaactatgggaggtggagacggctccttcacatggcaaagaggatgagaaaggctaccatcagacaaaagagccccatggcctccgagagggcaaagcccagaatggcgtaggagaagagctgttgcttcagagaagggttcctggcataaccaatgatgaggctcccaaacacagttccaatcccagccccagaaccagccaccccaactgtggcagccccagctccaatgaacttggctgctgtgtcgatgtcccttgaaatggcgctggtttggaagctgcggctagagacaagtgaggtaaggggacatgagactgccaagctgctgaggctctcatctgtcagtatctccggtcgtttcagcaccactgcagatagcggacggctcagcagctgtgaggtgctcttgaccaaggagggagtggagacaaacttggagcaggcgaacattttcagggggtgaggagctgtggcaggagagctgctcccactgcagagaagacagagaggggcccccggccgtaatggccgaattcccgggcatatgtccggtaccgtcgactgnnnnnnnnnnnnnnnnnnnnnnnnnnnnnnnnnnncggnnnnnnnnnnnnnnnnnnnnnnnnnnnnnnnnnnnnnnnnnnnnnnnnnnnntagcgccctatagtgagtngggtggtgaggggccggttgcacnacggcggctgggcgcggggggggc

SEQ ID NO: 129636 - DNA, 1556 bp, Homo Sapiens
  misc_feature (44)..(44): n is a, c, g, or t
  misc_feature (1237)..(1470): n is a, c, g, or t
ggaacgcagctcagctgggtttctcgctcccatttctacaagcntcagaggaggctcccactggaattctgaggattaataggattgatgggctccttcaagaactagccactggttccaggctgcccttggatgtggggggagtcaggtgctgggagctcatggtgggcaccggggcgatgggagcacttgccagtggcagggagtgcagaggcgtggaagctgcagaaaacaagggccatgtccctctcaagatgaaagggacctggtaggcctgctacacagtcttgcaacgaccctcaaaagtttctgcaaaatgcacatttccaggccctgccctaacccagctgggagatccctaagtgctgcctgcttggcatctgtgacggtgccaaggcagggactgggagggaagccgcgtgtcccagccctgcctgcacccaaggatcgaagccccagacacatagtgcctggcagagggaggatgggatgaggaccttggacccacgtctccctccagacccacaaccatgtctaaaaggagaaggggggagcagaatcatattaatttggacccatgggatgagtgttttattcatgctgtttccaggaagggatgtcagagctggaccagtcgaaacccttggaggctttttttgcagttggccacaggggcgttggaggcctgcttatgggtcctcgatgtcgagaaactcctgcttggggggcgccgcgccgcggtaccacgcacaggagccgtcacttctcttgatgcaggcgaagaacttggcctggtgcccgttgatgttcttctctgtgacccagtccatccagaggcactcgtccggggaggagatgtagcacgggatcatggggcagcgcgtgatcttgcactcgcagcccatctggtacctgtggttcaggctcttcttctgggtggtgctcagggtgtcccagggcacgatgaagtcacagagggtgatgtgcatcttgccgtccccctcggcctttcctgcaatgagatattccttctttcctccaacgtccagtgagaccccacacactgccgaggagggggccgtgtagataaactctatatccttctcaggccctttgaacatctttatctgcttgatctcatactggatcctcttgatagggttgcccataaatgtcgtttccagagtccacttccttctcactgaccgcgtatgcgcctcgtgccgaattcttgggnnnnnnnnnnnnnnnnnnnnnnnnnnnnnnnnnnnnnnnnnnnnnnnnnnnnnnnnnnnnnnnnnnnnnnnnnnnnnnnnnnnnnnnnnnnnnnnnnnnnnnnnnnnnnnnnnnnnnnnnnnnnnnnnnnnnnnnnnnnnnnnnnnnnnnnnnnnnnnnnnnnnnnnnnnnnnnnnnnnnnnnnnnnnnnnnnnnnnnnnnnnnnnnnnnnnnnnnnnnnnnnnnnnnnnnnnnaacgcggttgcggtatgggcctcttccgctctcgctcaagactcctgggccggtcgtcggtgcgggactgtaaactcatcaagggg

SEQ ID NO: 129637 - DNA, 554 bp, Homo Sapiens
tttcttattaatacagtatttatttgtcttttctctgtcttctctgcagtgggagcagctctcctgccacagctcctcaccccctgaaaatgttcgcctgctccaagtttgtctccactccctccttggtcaagagcacctcacagctgctgagccgtccgctatctgcagtggtgctgaaacgaccggagatactgacagatgagagcctcagcagcttggcagtctcatgtccccttacctcacttgtctctagccgcagcttccaaaccagcgccatttcaagggacatcgacacagcagccaagttcattggagctggggctgccacagttggggtggctggttctggggctgggattggaactgtgtttgggagcctcatcattggttatgccaggaacccttctctgaagcaacagctcttctcctacgccattctgggctttgccctctcggaggccatggggctcttttgtctgatggtagcctttctcatgctctttgccatgtgaaggagccgtctccacctgccatagttctcccgcgtctgg

SEQ ID NO: 129638 - DNA, 197 bp, Homo Sapiens
cagggactgggagggaaaccgcgtgtcccagccctgcctgcacccaaggatcgaagccccagacacatagtgcctggcagagggaggatgggatgaggaccttggacccacgtctccctccagacccacaaccatgtctaaaaggagaaggggggagcagaatcgtataatttgacccatgggactgagttttaacg

SEQ ID NO: 129639 - DNA, 1024 bp, Homo Sapiens
  misc_feature (528)..(541): n is a, c, g, or t
tgtgtgaggcacagaaaatctttattgccacaggaagcaagtgcattcgtcccacctcaccaacagcttgaagagtcacaaaaacgtggacatcgcacaataaagtgtaagagactcggggagaaatggtcccttggactatattggctgtaatactgaggtaaccaattgaccttgttcagtgaaaatacctctaacaaaatgaaaaaatcaactaattataacttccaattcacatatacaattcaaataaaaatatatattatttgctttaatgtatagcaagtttaatacattagtgtttacaaaataaaaactgtattctactgaaatttttcttgtgcttccaccttatcactaagcttgaaagactagaaacataagatagttaaggaaacttattatgaatttaaagatgcaatctgtgggtccacaacgaatggataaatattggaagttggaagattactgcatcttttaaaattgtggcttatgaaaatctacaaacttgactgtaagacacaattnnnnnnnnnnnnnntgtttcaaaatagattagaatacaggaaacgtttcatgaaactactgagatatactacccagtgctatggctaatattaaaaagtgaacagtctattgaaatcgtactcatactatttctacacacagtgaacaatacaaccacaaatagtcaacctcaagctggcaacaaagttgcaaggtccataagaagcttcttcagtgagcaaaacactatggtacaattaaaacatttaggaaggggaaaaaagccttttaacagtataaaagttgtttactggcgtttcctactgttaagtacttgtacaaattaaaatgaagaagcaatttatatacgtgacagtgatctgagactacagtgcagacatttcatcttacatttggctgacaaatttttagtgtaacagattatgacttaatattttttacaattatgatctagagcaagactaaacaaaaaacactactctctaactcagagtca

SEQ ID NO: 129640 - DNA, 1672 bp, Homo Sapiens
  misc_feature (213)..(225): n is a, c, g, or t
agaaggggaaaaaagcctttaacagtataaaagttgtttctggcgtttcctactgtaaagtacttctacaaattaaaatgaagaagcaatttatatacgtgacagtgatctgagactacagtgcagacatttcatctaacatttggctgacaaattttagtgtaacagattatgacttaatattttttacaattatgatctagagcagaactnnnnnnnnnnnnncacatactctcttacactcagagtcaatacactcttctcagtaatatctgggtttagatgcatctgtaggaagtaggtaaagctgtcagttatcttctcttaaaccaacagaaaaaacgtatattggcagatgtatgttgttttaccattatgaattccaatgtgaaattctcataagtatgcaagtaaattattaacatgtaagcacactcccatatatatgcacatggtccattaattaaattgggggaactaaaaacatactgtcaagttaaaataaattttaagaaaaaactgcattcataaatctcaaaggtgtagaaaaatgaaattgtaaaataaataatgaatatagctgtcaattaaacttccatagaaatatgcctacagatgtggatgcagtgattgtccacatttgtgatggctgggtgggaagacattccctagtgaaagcatctagtctctctgacttctctacatagagaagactttctggatataaaatagtacttaatctgttacagcctttgttaacagtcgccatctttataacatgtagggttaacttactgtgtcttaatctatttaacacattctgaaatatcaatgtttaagtcaaagcttttatacatgggtccacttatttcaagttctctgtccaagcaatagcttcctatctttgaaacatcttaagtagctattaatacaatctaggtcaactagtttaagatatattttctactctattgctcatctttttaactttcctccactcaagtatttattgtgtaaacgtgcattgataaccagatgttatatgactgaatgctaaaaatttcctgttaaacaaaatcagttttatcaaatattaaatccacaatattttccttggcttaaactgagtattcgctttctatttttccataatcattgcaatcttgccaataactgcatcacttaagctttctttttcacaactgcaggcagattctaaactctgacatatatttacgttaaacacacaaagtagacaacaaaatttcaagtaaaataaactgtatccacatctattagaccaaacaggtctcaacatctaaattttacttctataaattacacaaatacattgtacattcttaaataatgaatgcttacaatattgatttgtaagcctttccatataaaatgacttaacacaggaatgtgaatgaatcaatattactgttatagattgcaacactcttgattttctcttttgtggctgttgttttatcttcctggtttccacagactaccgtaccagtccttttgctttggctatgaaatctgtttgagctgaatgaggcaacactggttattaaggcttatttctatgatggagtattatccttaaatctgatgccatttccagagaacggtgagagaaatcacagctatcttgaatctt

SEQ ID NO: 129641 - DNA, 1356 bp, Homo Sapiens
  misc_feature (679)..(735): n is a, c, g, or t
  misc_feature (781)..(1183): n is a, c, g, or t
  misc_feature (1307)..(1307): n is a, c, g, or t
cttttgcttatatgctagatttttctggtgagggaagggttgtgttcttcaggggtcttttgttttgaaatactcttgattgggagaggtttatttaagaacgaattataattatggtttacactgttgggagtaaaggagcatttttacaccccttaagggtgcttaattctgttgaaaccaaaaagatttgtctacaaatgctatcttttttagaaactattagaaatgactccctttcaaagtcaatctttggaaaatattgaggaggtcactaattagttggtgcagttaatataattcaagatgatttggatgatgggaagtttgagaccgctgcattttgtttttaaattatgcaccttctgataacccccaaatacagaaatgttctacatctctgaatgacctctgactttaaaaaagtttttatttgcatggctgtatttacattaacactgacattttcttctactcttctcccttctttcatcttggggttgggtagagaaacacaaaggaaactgaagcatgtgccattctatactgtcattccaaattctcatggactattgcctgttgtgaaaatgtttgaaactgcactgaaagctgcatctgtctgtatctttcttttgtaaatgacctcacatgtaaattcaccaaataaatattacattcnnnnnnnnnnnnnnnnnnnnnnnnnnnnnnnnnnnnnnnnnnnnnnnnnnnnnnnnnggcctaaagccgcggccgctccaaaatccctcgtgccgaattcttnnnnnnnnnnnnnnnnnnnnnnnnnnnnnnnnnnnnnnnnnnnnnnnnnnnnnnnnnnnnnnnnnnnnnnnnnnnnnnnnnnnnnnnnnnnnnnnnnnnnnnnnnnnnnnnnnnnnnnnnnnnnnnnnnnnnnnnnnnnnnnnnnnnnnnnnnnnnnnnnnnnnnnnnnnnnnnnnnnnnnnnnnnnnnnnnnnnnnnnnnnnnnnnnnnnnnnnnnnnnnnnnnnnnnnnnnnnnnnnnnnnnnnnnnnnnnnnnnnnnnnnnnnnnnnnnnnnnnnnnnnnnnnnnnnnnnnnnnnnnnnnnnnnnnnnnnnnnnnnnnnnnnnnnnnnnnnnnnnnnnnnnnnnnnnnnnnnnnnnnnnnnnnnnnnnnnnnnnnnnnnnnnnnnnnnnnnnnnnnnnnnccacaaaggcaggaccggtaaaggccgggttgtggggttttcataggtcgccctctgagagcatcaaaaatgacgctaattaaaggtgggaacccgaaggacaaaagaaccaggtttccctggnactcctctggcctctgttcgactgcgctacgagacttcgctttccttcg

SEQ ID NO: 129642 - DNA, 784 bp, Homo Sapiens
  misc_feature (158)..(209): n is a, c, g, or t
atgtgaattccccaatccttttttatttgtaaagttattacattttacatttaaaaaaattataaaacattgcaacaagtctctcacccattcctgctccccgattccctatttgaagaggccatcactgtggccgggttcttctgcagtgctgcctnnnnnnnnnnnnnnnnnnnnnnnnnnnnnnnnnnnnnnnnnnnnnnnnnnnntgcctttttttccatatagatggtagccaatttttaaatgttggtataaagttttaaaaccctgagggtcaaataaaaacacttttgttcctctgagggtcaaagaaaacacaggcatgtgccttatgatccactgggttgtagatcacacaggcatgtgtcttttgatccacttgactgacagttccctgaagacaggaaactttgtcctggaatcctcttcggtacctgggacgataccttgcacacagctggcactcaataagcacactgcctgttcatggaaacttttcttaagcaccagcactgtgtctaatgctgagtctaccacagactacggggtgaactgtggtgtgcccacccaagagggaacactcaggagagttagttgtctggttaagtctcaactcctgtggaaacaaccagaatctgcctgcttcccatatttcctggttacctgggtcaacaacaaatggacagaaatagcagattacagtccccgttctcagttctcaggccccctaatgggcatctgctcgtgctgacggcctaagctgttgcagtgtgctaccggg

SEQ ID NO: 129643 - DNA, 1062 bp, Homo Sapiens
tttacagtctctgattttaatgagtcaatctcaaggcaaagctataaccttttccatgtgaaccttaaaacggaaatcctacgtgtttggctcagctaccatagacatgtcttgccccagagttccagtgtatttttcacctttagtttcttggctcctctccgcctctacaccagcctcatatccacacgggatgctctctgctgagtattgtcttgagttagttctccctctcatgttctggctgatgctactcatggtcatagtatcacctgagggggaaggagtatgctatgaaggtgaaaaatgctaccatagcattttgtttgtttataaaatgtcaggccctggttccatttttcccccctcttatatctaaattttgaaaccactggcctctaacagtctgtagtaggcttaagttcaaggtgccatttgcttctctggtgcctgtttgtgagccaaatagaggaagagtatgctagagagagcgctgaccaggaagatcacatcaaaccaacggtgatagaagttgaactgcagttctccaaggacttcagtgattatggtgcggtattctaaaggcatactcattcggatcagcagcacagaggagacaaagtacatgcccattatctgtgctaatagcaggacaatgacattggaggacttactgctagagatggcataaaagaacttggtaagagtgatcagcaatcctctgatggatgtgacgatgattattccaacaagaatgaaggaaatgtgttgggaccaaaacttcacatcaaattggattcccagataattcacagtgatctcaatgcctcttgtgacaggatccgttttcccaactcgatcaaaaacaatattgatggtagccatgaaaattttccaaacacagtaaatagagaaaaagtaaccaagaaaattaaaatatttccccttgaaggttttggagtattctattctctccttggtagcatatagatcagctgtttccagaaaaagctgcctgcttaattcttccaaagcatccacttcctgttgaataagagtaag

SEQ ID NO: 129644 - DNA, 878 bp, Homo Sapiens
  misc_feature (762)..(811): n is a, c, g, or t
ttttttttgcccgccgttaaagttttattttttggaggacgcgcggcgaggggggccgggaaggggcgggggcagccgagcgaggcggggcgctcactcccgcttccgtaggtggatgtagatgatgccgctgaccagggcgagggggaaggccacccaggccagggcgaagcagtatccgaagctgccccctcgcgggtgcttctccaggatctcctcggcgtgaatggcatagatcaaggcgccagtaaacaccgccacgctggtgcaaagctggcagaggccggtggcatagaagagacctcctcgtcgcatggtgtagagctggaacatgaacaggatgaaggagagacagcagagaatgagggagagcaccatgaggacctgcaccgccttcagccagccattctcgctgacattactgcaggcccatgttttggtgtcgttgttccacgtgcagtcgtaccagagattcagggactctttcccagggagagtccaccaggacttgtccaaagtggccacgaaaagcagtataagaatgaggatgtgaagggctgagaccaccagcaagaggagtgacatggctgcagtggaagccgagagccgcgaaaaaagtcagagctggagtcggagtcttgtccctcgctcgggcctccgtgccccgccctgtctccttccctcctttcaccctcccgaggcccccgcctctctcaccgccttcctccctcccttgctctcccctccaatccagaacccttnnnnnnnnnnnnnnnnnnnnnnnnnnnnnnnnnnnnnnnnnnnnnnnnnnctgtctgggcctccttctctcttcggacgcgtgggtcgacgatatcccgggaattccggaccggtcc

SEQ ID NO: 129645 - DNA, 796 bp, Homo Sapiens
tttctggttttaaaataatttatttcataggtctgttttaatttcatgtctcacagcatacattatttaaccaagaggtgctggacagagattgtaaaaagggaggaaacatttaggataagaaaccggctcaattccattagaatttgatcctatcttgtaaagtcttgctaggataaatttctataatacttcttttgtgcttacaaaaaaacattaacttctgaatttccaatgttgtaaataaaaaaattttacaattaggtatgcattcaattaacacacaaggcaaccaaataaattctgtcatcaacattagcataatgtgtatttcccgtcactgcactaacattaaactaaacttcaaaccacaaaaacattgtgactaacattaaaaaggcaagctgtaagatactcaaagcttataaaggacaaattgcacatggttaagatgggacatcatttgacaagggctggtgttgtgcatatggctgcttttttttataagaaggccaccggcaaacagggcaacaatgtcggcccccagccaaccacatcacaatgcaattctgatgaaacacatgaccacaaggcaaccccattagcaaacatccattttcagaattctctaggcaaacaacacattcagtacagtgcagcatatcagcaggccaagttaaccaatcaggttccatatcttcattagtgttatatgatccatatgacctccccttcctttcacatgggctggtctgacaatatttattggcacatgaacaagctcagcatcacagtg

SEQ ID NO: 129646 - DNA, 1461 bp, Homo Sapiens
  misc_feature (538)..(538): n is a, c, g, or t
agattcatgaggtacatgtgcttgtttgtcatatggatatattgcatactggtggagattgggcttctagtgtacctgtaactcaaatagtgaacattgtacctgatagacaaagccctggacttccctgggttcctggacatgatggcacctcgactcaggccgatgcgtccaccacctcccccgccggctaaagccccggatcctggccacccagatcccctcacctgaaggccagggaagccttgacccccagtgatgctgctgtccctatcttcaagctgtcagaccacaccatcaatgatccagagcaacacagccaaaagctggaatcgcccttatttccaccctcacctccaagggtggaaacttgccccttcccatttctagagctggaacccactcctttttttcccattgttctatcatctctaggaccggaactactaccttctcttctgtcatgaccctatctagggtggtgaaatgcctgaaatctctggggctggaaaccatccatcaaggtctctagtggttntggcccacctctttccccaccctggctccatgacccaccccactctggatgccagggtcactggggttgggctggggagaggaacaggccttgggaatcaggagctggagccaggatgcgaagcagctgtaatggtctgagcggatttattgacaatgaataaagggcacgaaggccaggccagggcctgggcctcttgtgctaagagggcagggggcctacggtgctattgctttaggggcccaccacgggcaggggcctgctcccagctgccacgctctatcatatggagcgaggtgttggggaaggcggggcaggcagcctgttgcaggcaggggaaggagaagagactgaggggctgtgacctctcctgaggcccccagcctgagactgtgcaactccaggtggaagtagagctggtccctcagctggggggcagtgctgtccagtggaggggagggctttcacgcccacccaccccctggccctgccagctggtagtccatcagcacaatgaaggagacttggagtagtggctgactccctgtgttagagcttcctgttgatcagctgtgtctggtttgcttggctgcccatttggctcttgagtgggcttccctgggcttgggcccctccctccgggctttagtgttggctctggctaagctctggggtttcctcggggggttcaggaagccgaaaggcttaaatagtttaagtaggtgatgggaagatgagattacctcatttagggctcaggcagactcacctcacatactccctgctccctgtggtagagacacctgagcagaaaggggaggggtcaacaatgagagaccaggagtaggtcctatcagtgccccccagagtagagagcaataagagcccagccagtgcagtcccggctgtgttttcctacctgg

SEQ ID NO: 129647 - DNA, 510 bp, Homo Sapiens
tttgtctatagcagttttattttattatttattttagattcaggaggtacatgtgcttgtttgtcatatggatatattgcatactggtggagattgggcttctagtgtacctgtaactcaaatagtgaacattgtacctgataggtaatttttcaaccctcgcccctgcctctactcctacctttgccccctttggagtcctgggagtctgttatttccatctctatgtccatgtgtacccgttgtttagctcccacttataagtgagaacatgcaatatttggttttctgtttctgagttagttcacttaggataatggcatccaactccattcatgttgctgcagaggacatgatttcattcttttttatggctgtggaatgcctgccttttctaaaactttctggtacttccaccttgtgcacgaggagtctccctccctggagttaccaccatctccaccaccccaagttcactttgcatgacttagcacttagtcatttattgtg

SEQ ID NO: 129648 - DNA, 1303 bp, Homo Sapiens
tttttatacatacatttttaatcgaaaaaaaatttgtgctttgtgtgttgaaaagcaaaaacatgagccacacagaggatgattaataatttcacaatctcaaagcactaaactttagcaaattatcatttctagatatttattatgatgaatatcactgccaaattgacagtagatttgctaaactgatctgtattgaattgcaagaggcaagccagcaagacaccttttcctccttcttttgagaaaaattatagttctttatccaaagtggattgtcttgcgctgtctctctgtagttccagttgttcaatttccagagacagcttatatacctccagggccattttcacatcctctgggtttgggagacactgcatgagtcttttgcctgtgagcacttgttcacagccttcgggggtctcccactcacacttgggcacctctgggtaccaggttctgttcccagagcaagtgatactttggggaccaaccacaccatagccagaatcacattggatggtgacattttcaggctcaacatactgatccttatccacagacaaccttccattcactaattctggtttccgacacagagctttacattgaggggctggagctgaccagtgtgaataactgcaggagagtttcgcctgtccgaccagaatgtagcctttatcacattcatatataatctcttctttgaaaaagctgtatgaactagattgtttataatgcccatgggcaattttaggaggaaaattgcaaatgtctccacatgatggtgttcggggactccacgtgccatctccttggcatatagctgaaaacctactggtctcatgacatgaaaatgaaatctcatctccatagaaataaacacagtgattggcaggacgacttttcctgtgttgagtgatttcaccattatttagctttggttcagggcaacataacgcctcacatccttggtatggggtccatctcaaatttttctgacaaatcacagtcgtaggctcatctgtagtgggtttgtagccaggatgacagcggtaccttaacacagtcccaacaacatacacatcctcttttgtcggcctaggatatgtttcccaggaagcatgtggaatgtctggtaaattaatacaactattgggctcacaagcaggaggagaaggattccatttgctatcagcatcacaatgaattacactgctgcctctgagaacaaaacctttttggcacttaaacacaatagtgtctttgtaattatagatgggtccaaatccagagaccattt

SEQ ID NO: 129649 - DNA, 821 bp, Homo Sapiens
ctccggacccggacagaggaggcctgccgccttctgcacgatgtactccttgttcttcttcaccctccagctgatgaagcaaagcagcagcatgcccagcgccttgtagcccatctgcaggcccaggtacctgtctcggagagcatcgttgtcatagtaggcgcaggcccctcgcctccccaagcacagcgagttccaccggatgcaggagtggtcaatggtggtgacccggggcactggccggggtgtccgtggtttcttgggtggcctgcgagtcgtggtggtggtggagtcagttgaaggcgttgctggttttggtgtggatactcgtggcttcttggtggtggttgtgggaggggtagcaactgcagtaggctccacatagccaggaatggtcatcgttgggcgaatctggccaggaactgtggtgccagcttctgacacccgagtaggctggatggggcctagggttggggtttgaataatggcgcctcgagtccggatggtgaccgtgggtttcccaggaacaggatccctgactggaggagccatggtctctgttggaggagcaatggctggagatgtgggggttggcacgatcctggatgggggctcctggatagccgtggttgggggcccaatggcagtgacaggtgtgggtgtagcatggatctgcctccggacgcgtttgggaagagggggcttcttattggcgatgtgccaacccaccacagggtagccaagctgagcagacattgcgccctccctggcaggggcctctacaccatgaatgtcaggcacactgttctggttcagggagc

SEQ ID NO: 129650 - DNA, 1211 bp, Homo Sapiens
  misc_feature (684)..(737): n is a, c, g, or t
caattgttataaatttatttggggacatttattgccaccacatttggaagcctttgaaaattcaaacagaaaccaatacacttccatcttttttactttcgataaataatatctttgtgtatatgtatatatagatagatatacttaatcaataagtcatttagcagggtttttacattttatactgcattcatccaaaacagctctttccagatcgataggatgcaaatgaggtaagaattaaggcaaacccaaaaggcatgcaaatgtagtacatttatattcactgataatacaagcttctgtggtgtgtggaccagacacaggagccaagggtccctctgtgtctgtccaatagtattttacaggagggtagtgacatagcttataattaagttacattaccatgggggtctcagtgctactaacattatgtaatcaaggagatacgagcattagcaaaacatgaacaagaagtcatataactctttgcagcacatttctgcccaggctttggaggaagagggatttttatgaaatgatattacacatatcacattgtggcaggttgtttgttttgttttatatatgcttttaaaattcattagcaaatgacattctcatgcacacgagtgtttcaaacacaagaagcaagtccatttataggtagtccaagcaatattnnnnnnnnnnnnnnnnnnnnnnnnnnnnnnnnnnnnnnnnnnnnnnnnnnnnnnaatagctgcggactgtatggaacagtgagacttgtgagcggtccatagcatggacatcaagctcattagtggaatgtcgcactggcgagattatgccatgggatggtggctcttcgcggcctctatgaattcatccgaggtaatctggtcatttgggttcttatccatctgtctgaaaatagtgtgtacttgctgctcaggcgtcaggccatgcttatgcgtttacatcatgagcatagcgcctacgattttgtatatagcctcaattatctgtagcatctagtactaggtgatcttgacatgatcatccagattatacatatagaaggccgcatgtagattgtgctcacagctggccctggtggagatggacagagcgcatatgaactgtatgaagtgaagggtgccgtccgcatattagctgaatgttgagatagcatgctgagataaactcggaggtgtgtgcgatgggaa

SEQ ID NO: 129651 - DNA, 1438 bp, Homo Sapiens
ttttttttggcaggtttccttttattggttctagacagtttgtggaaggaagagatgaggccatctagaggccggcaggctcgcccagtgccccaaacactgccaccctgaagtagtgttggaagctgctccagggatgttgcagccctaagcacagtgacaggtgggggcaggagcagcaggggtccccgaggtgttgagaggctggtgagggcacagagaagggacctcctggggctgaggcccctggtggccctatgtgttggagcacgctggcgcttgtctgtccggcctccagtcacgccaaggcctcctgccctgaccaccagcaatgctggcctcaatgtggctgaagctggacgtgtgactttgaccccgtgagggggtcctgggagggctcagttgctgccgttgctgtcgtcactgtccaggtatgcacccagttggctcagggaggacgcgccaggcgtcaggggtgtagggttggcctccttcctgttctgcggggctcctggggggggggccgcctgaggctgcccgttgctgcagtccgggtcggcctttgccttcttcaccacgaccagcctcgacagcgggggccggctgcccaggctgccaacgcctctgctcccagacctccaccttcctcttgggctttggggcctcatccaggatggcggtggggttggccgaagggctggctgcaggggcgagggagcagcctcatcctctgagtcggagtcctccagcagtcttcgctttctggcttcctccaacagggccgcggtctcctgctcgtcctcctcctgctgctgcctccgccgctcctcctccgacaggcggtgctgcctcagcatagcctcgaagtccacgtgcgcctgccgctggttcaggtctttcagctcctggaggttctccagcacctccatctccagcttggagtccttggtccggttctccagcaccttcatggggttgttcagctcctcgtcctcccgctccttctgcaccctcttctcctcctcctccaggagcttctcagcctggaaattccgcgtggctccatgctccatggtgtagtctgtgttttcagggtctgtcttgaaggtgatctctgccaggcagcgcgtgcacttgatgtaaaagcggaagatgggcaggcccaggtagacctcgttctgcaccgtctccttccgagcattgaatttcttccccttgtagatgtattctccgcacgtcttacacctcatgttgaagggggccatcagccgcaccacgtactgccggtctttggggagcttgagtttggggatctttgatgggtcaaagtccggcgggtagtatttgtttaatacttttcgctccgacatctttgccttctgatcacctcgcaagcacctggagaatcctcgtgccatttactccgcctcgtcctagg

SEQ ID NO: 129652 - DNA, 703 bp, Homo Sapiens
ttttaacatataagaaagcctttaattttgtcaccataaacattatactctgattgctcacttacagtataaaatattcaccccgctaaataaataagacgacattattgcaaacggcacttaaaccccccctgagagataagacctcccttagctcaggcagggggtgctcctgagtttctgtgtgagattccccaagcacagatatactctgggggctgagatggacaaaggcttgggaaaccgcactttgtgcttctggtcctgcagtagctccaaacagggttgtggagctggtggggaaagttgggggtaggggaaagttgggggtaggggaaattttgggcagtgccttcatcagcccagtcctagagagagtagaggggagtggaagtggggggaaccaggctgggccaagagaagaggggtggttagggaagccgttgagacctgaagccccaccctctaccttccttcaacaccctaaccttgggtaacagcatttggaattatcatttgggatgagtagaatttccaaggtcctgggttaggcattttggggggccagaccccaggagaagaagattctggcaatgatcagcccaatgaccagctatctcaggggacctgattgttggggatcccccaccctacccaaatattagacaccaacacagaaaagctagcaatggattcccttcta

SEQ ID NO: 129653 - DNA, 676 bp, Homo Sapiens
gccaggcggaaatatttatttgaaaaattgaaaacacagatgcaatgtattatacaaagaaaggtcttaataccataataaaagtattgttggagggaaacagaagccagtggccacctgccctgggaaggtaggcactcagtgaaaaatgaaattcatttcaaggaactaccctaatggaaacccaggggaaaggttaaaaacagaagaaaaacaaacccaaccctatccctgcaaactgaaatgtgaaagagtctgttataagtttgagacaactgcattatcaccaagatgtaaccgaaccccctcggtttgtccctatgagtggtaatcagtttcatttagggccttcaaacctgaggtagttgagggtcacctgaaagacatgtctggaaaaatctactctcagaatcgaacccaacagcattgaattgtttcctgttgctttggctcctgacaacaccacggtgtggtgctgatcttgtatttggtctggacctgggagaggaaggaatttggcagcaaacagctggctggtttgctgcgccgatggctggcaggtccgtggtggtggttttctatgctacaggtggtgcagtctctggaggacaaggatggcagagagagggcaaagccagtttgcttggaaagccaatgttggaactggaggctttcc

SEQ ID NO: 129654 - DNA, 729 bp, Homo Sapiens
  misc_feature (8)..(17): n is a, c, g, or t
  misc_feature (227)..(245): n is a, c, g, or t
  misc_feature (649)..(649): n is a, c, g, or t
aaaggatnnnnnnnnnnttaaaataatttatttcaccaagttctccttggcactgaattctacttaaagcataattcatacagtagagaatttgagtacacggggtatggagagtagggcacaaaatgtttccatacatttgactttattgatttgaaagcaaagttactgaaatgcctcagttagttctgcattttaaaaggtgtctacctgaaagaaacaaaaannnnnnnnnnnnnnnnnnngcggggaagatggaagattattcacatgcttgaaggctattcacactgctttaacaaataaacatggaacatacgtccttaattaactgtggagttaatagtctgtctctttgtcctgatgtaatttagatcttaatctaaccccaaccctaaactatatcaaacccaggcagaaaaactgaagttacaggcaactacctgggctaatcttaggtttttttctcaagagtgagaaccatattctcctatttccattgaccacaatttggttccaccacctttctacatcctcaattcactcccaacagtagttacgttttcacaggggaggaaaacgccagtacaacagggttcttgcatcaagcttcatgctttcccagacatttactcaagggaacgtgganaggaggaggaggagggagctggagtgatacgcagatgttacacatgtttttcctggaaagatcacccactttttctaatt

SEQ ID NO: 129655 - DNA, 540 bp, Homo Sapiens
tttttcgttttaaagtagtattttatttctctgggctgtgcacacttaaggcattagatccacagatgggctcatccgctgggatgctacttgtggtgatcatctcctaagccccacgttttagccttgtacagagtgatgtcactgcagaccctgaagtgattcagcctgcggtcatggcgttctgggttgatcaagggctctaagtcccatccaacttcctggttttcagtctgtgtctctgggtacttcttccttggtccctgggcagcatggtgaatgagattcagaaacctggcatctgcaggttcctccaggttatcatgccaagacatgggcttcctggtgactgtatgaacctcactcttgcggaggggattcacgtgatactgcgtgtagagtttctgggttcgtagctccttgaggtacagttcccgcaagatctggttctgatggacctcatctggaatcaccttctcttttgggtgtcccgccatggccttgggctgccacgcgccctcttgcctgggcccctcgtgc

SEQ ID NO: 129656 - DNA, 973 bp, Homo Sapiens
atttcgttttaaagtagtattttatttctctgggctgtgcacacttaaggcattagatccacagatgggctcatccgctgggatgctacttgtggtgatcatctcctaagccccacgttttagccttgtacagagtgatgtcactgcagaccctgaagtgattcagcctgcggtcatggcgttctgggttgatctagaaaggaggatgcagaatcagaaagaagcctgtgaggatgcaggaggacctgggtttggagtcaatgggcctggcttatatcaggctccaccctcccagcctgtggctgcattgcggaatggagatgaccacatgtacatcaaaaaggttgtgaggtcagaggagaataacctacgcacagtcgtggttctccctgtcacactgcctgactgggaggccacagtatcctcagcacctagagcaagacccagcgcatgctaggtattcaatgcatatttgctgaaagaatgaatttgttgaaagagtcacatagaatctaagtaaaagtcggcactctgacacatcgatcttatagaagttacaccgtgcaaataatttaaaaaatgtatttccagaaaatgttaccaggagatgagaggctgaatgatggtcattgagtctggctttgccagtgtcccagtactgagactggaggtatcttgtctatccaaggtgaggctctgccagggggcagggagcttcaagttgcagctgatcaagcctcttctggcccagctacttcattctgaagctccaacttaattacctcttctggttacacaacacctgcatctcatggtttttggggtatactttcttactatgctagcagtgctcttgtgatggcattgtccccaggtttatatgatgaacagcatggaatatttgcagaccctctgcaactccagagtgctcactgatctggagacacatgcacatcccgggaattccggaccc

SEQ ID NO: 129657 - DNA, 1005 bp, Homo Sapiens
  misc_feature (324)..(336): n is a, c, g, or t
  misc_feature (690)..(690): n is a, c, g, or t
  misc_feature (694)..(694): n is a, c, g, or t
  misc_feature (798)..(798): n is a, c, g, or t
  misc_feature (830)..(830): n is a, c, g, or t
  misc_feature (876)..(876): n is a, c, g, or t
  misc_feature (905)..(905): n is a, c, g, or t
ccttttatccctcgtctttattttagccgaatttacagaaaagcagtaagaatggtgcgaagggttttcccagttgccccgatgtgaatgttgtccctgctttttcctgtttccatgcaaacgcactcacacaggctttcctgctggagccgtgtttcagtccgtgcgtggcaggtactgccctctcccctgaatgcgacagcgagcatttcctgaaaccagcaggtgctgggctgccgatcctcgtctgtagcaggctcagccctcatggactgtcccagtggtgtcctgtaaacagcacgccccctgctgcgtggcatttgnnnnnnnnnnnnngcctttaatctagagtgttccccagtcagcttctgtgttttgtgacatctactgtcccaagagcactggcctgtcattcggcagaccgtcctcagctcaggtttgtctggtgtctccacgcggtgaccataaggctgtgcttttctcagagtggcagccgaggtgacgtgcatcccgtcagtcccattgctggccgttcggctgagacggggtctgccaggggttttcactgtgaagtgactgttttgccctttatcagatgtctcttgggggaggccttccaaataccctgggactcctcaaggtctagcattttttgctaatgttgcctgtgtttattacggtgtttggcanatancgcttctaattctgctgttgtctttccactggcgggaggtatcttcccactctcctgcttatcgtcagtcacagcagcgtgagacgtgttattttttctttcanagtgacactctctgtcacactctttattttanagtccgctgtcatcaagctggatgcatgcatgatatggtcatgcanctcgactctgggtcagcatctccatccanctctgagtactggacacagatgcacacatgctgggtataaaaaaaggtggtgcgtgtcagctgtatccacacatggagtgagcagggcagagcagatcaa

SEQ ID NO: 129658 - DNA, 1514 bp, Homo Sapiens
  misc_feature (140)..(168): n is a, c, g, or t
  misc_feature (1462)..(1462): n is a, c, g, or t
  misc_feature (1467)..(1467): n is a, c, g, or t
ggggggaatcccaagccctagtcctggcccaggatttccttgggaaacaggctatgaccatgttccttaccctactgggccccgcgcgccaaacgaaatgttttgaaagcttctcgagggcccgaggcggccgacaaggnnnnnnnnnnnnnnnnnnnnnnnnnnnnngagcacttgttaatccgttatgatttattagctgtacagcagtagatcctcctccccagctttcaaccccattacatattttattacaggtctcatgttggcgtcctaaaataatgaaaaatatcacacagtacagctaagtacaaaatgcatcaacctagagtctgatagctaactgatggctctcttaaaagcaatacacagaagaaaaaagtgtttgaaatcagtaagactgaggctctctaaaaaacacatttttaaacatgtgacagttcatgtgcaagaatcactttttagttggttttgcttcacattattttattttttgaagatccaaggtttaaattactgacctagtgaaattttctggcccagcttataagggctgctgtgaaccactcataatcacccttctgccttaacagaagatttataaaacacaacaatcagctacaaacagggcaaagaaaatgtcgatgggaaatcataactgaaagttaattatacaaggttcaaatgctggctccgtgggctggaaatcatgatctgccacgtgcatgtccgtcactggtgggcagtggtctgggtgccattctgctacatgattgtgatccaattccttgtcaacatttacacactacagagtctgtggtaacttaatttgcaagtaattaaaatgctgggttttcttacactgcacttcttttcaacctcttaattaatggaaaggattaaaatgtaaaaaaagttatttacaagcttgaccataccagaaactttgccaaggaagaggcaaagctttcaggacagaacctgatcgtagcatgccatactactggtgtgcagctgactccaagcaaagggagtcagggaaaagcaaaagcaaaaagcagtttaaaactctaagtccttcccaagtatgcatttacaattaaaaactctcttgggaagaagaccatagaactctgggaagcctggtggccattctggagtggtttaccacatggagggaggggtcaatgtctccgtttccatctaggaaaacgagttagttgtcaacactgtcctcagcacttcacagtaaaccctcagggactcagaacattccatgatttgctaacatcagacagcaagttctagttaaatcacatttttttctaacatcatccttgaagttttcgttctcggtatgtttggtaaaatgatgcttttcccaaagccaaaaaaagaaagaagggagaaaaattaagatgcgggccgtttaaacacagcccagagaagtcctggcgacgcnacgangccgccatcaccggtccatcatgctgaggatcatctctgggcgtgag

SEQ ID NO: 129659 - DNA, 783 bp, Homo Sapiens
  misc_feature (770)..(770): n is a, c, g, or t
accaagcaatgcatttatttggaaggataccagttaccagtcatcaaaagcttttgtatgttgaaaatgtaattttaatagttaattcttcatcttacataggagcacaataaaatacaccacaatctgaagaaactccagaattacgagaataagagtgaagaaaattcaaatgggctacaatatccattaccttaaactgcaagagacaaggttgcaacccgaaggttaacatttatgtatttatgactggctacatttatgacttaaaaataacaagaatcaggaattagatatggagagaggtgggaaagaacagttttgtgaggggaggaattcgtcaataaagaagaaaaattactgaattccaaattaaagaataaaacgagctcccacagcaaatactggagggatgaaagcaagaatcattaactgaggacttgatactctcaaagggataaacctttctgatgacacacaagctagatagttgagatctgctcatcaggtttataaggaagactcacaaatgcctcagcaaatcccaaatgatcagatcagtgtttcttaacacacatgaaaggttacagatgaaattttcagataagaaccaagaaaaatgtcataacccaaattttaggcaaaaatgtggcacaactgtgaaagtcctacatgtcagtcacaactgctatctttgctgtgactttcctgtacagtaatttttaaacattgtggcaagacaccaatgatcatctaatcagacaacacanacacatttatttc

SEQ ID NO: 129660 - DNA, 1579 bp, Homo Sapiens
  misc_feature (942)..(942): n is a, c, g, or t
ggaaaaacacttaaaatttactcagtgactttcaaaatacattgttgttaattacagtcaccaagctgtacaacagatctcttgaactcagttgccttgtctaactgaaattttgtaaattttgaccaatatctcctcaatcctccactgccccaccagcccttgataaccaccattctattctctccttctatgagttcaacttaagattccacagtgagattatgcagcatttgtctttctaagcctggcttattttacttaacatgtcctccaggttgtcacagatgaaaggatttccttgtttttaagcattaaatactgttccatcaataccatttttaatatatttaaattatatccattttggaagtattaacagcatgctttgatggtggctcagtataagacattgtatcagaaatccacaaattaagcaactgtttcttatgaagtgcatcattttcctggttggcctgttcatccagtgactttcttatacaattctttaattcttcgattccttctccagtaactgcagatatggggatgatatgttggaactctacagtcctctctggaatcatgtttttttcacataaatgcagaaaatctttaggattctggagctggctcatcaattcatggaacttatcttgggcatctggcaagtccattttattaactgccaagagtgcaggttttgtctgaagttcctctttgtacaattccaactcttttgtaagcagtattatggtttcaaaagctgtcctgtattgagtgtgagaagaaagctgaaatccagaaatatcaacaacaaaaagtagttgtctagttctttctatatgcttgaggaatttgtggcccattcctttgttcatatgtgctcctttctattaaaccccggaaagatcaggctactgatatctgtttgaaatcacntgtacattatctttccaagttcaggctttaatgttgtaaatgcgtaatctgcaattgcaggttttgcatgagaaacacaacttagcaaagaggattttccagcatttgggaatcctattaggcctacatcagctataagttttagatcaaggtgaattattcgtttctggcctttcaatggtaagaaatttgtaagtaatttaccaccaagacctccttgagctaccaaaattctgtcattttctttattgagttctcctataattttaccattttcatcagttactgaaatacccacaggcacagggatttcccagtcttttcctttggagcctttcagtgcactaattttgctgtttgctcctactccagccacaaaccgtttccgaggatacctgtctttaagttgttttaaagtcattttgttttgggctacaacccagacattaccaccttttccaccttctccacctaaacgaggataacccattccaccggatcctcccctggtgaagagtcttagcttatcgatgaaatttccgtactttctgaacaacacgcaactgcaatgcaccatggctgcaacaggccaggaaaccttcttgcggaagcggcacaagccgcagtacagcgcccc

SEQ ID NO: 129661 - DNA, 631 bp, Homo Sapiens
tctattgttactgtctttctttgagagagttctcttgaagttctggataaccccttctttttcctgcttttcaggtccattactttgagccttcttaggaggaatggcgtcattctcattcttaagaacaaatctgccttcccgatcatctttgttccaattcagttgtacaactagaggtttctcatctatatccaatcttctttctccgctgacatgcacttcatagagtgaatacttgggagaggacagcattcgcatatcaggtcgaaatttctccgcgagcgtttcgattacatcttgagtggtggcagtactagagacccgaatacattttgttgcaaagtttccagcagctttatcttgaaaataaaatctcatcactccatggaactccaaatcctcggtcggctggctgatctcgaacaggtccagccggttggcgttccagtggtggatgatgtcggccagcttccgccgctcctcgtcacggccgcccgccgacatggtcctggccgcgcctcctcagccgcgcggggccggggccggaggacgggccgaggacgacaggtccgcgggggcccggcgcccctcgccaccccccgccggccgcctccgaatccgcggctgc

SEQ ID NO: 129662 - DNA, 517 bp, Homo Sapiens
  misc_feature (281)..(298): n is a, c, g, or t
aggaatggcgtcattctcattcttaagaacaaatatgccttcccgatcatctttgttccaattcagttgtacaactagaggtttctcatctatatccaatcttctttctccgctgacatgcacttcatagagtgaatacttgggagaggacagcattcgcatatcaggtcgaaatttctccgcgagcgtttcgattacatcttgagtggtggcagtactagagacccgaatacattttgttgcaaagtttccagcagctttatcttgaaaataatatctgnnnnnnnnnnnnnnnnnnttccatcctgcctcgcctcctcgcctcccgtccctcaggtgcgcaccctcattgagccgggcgggcaggtgctccaggatgtgatcttctccgggcagctgcgagtaatcctccgcttgggcgctctccactgcctggtccttgtcctgtgggccgtgggggcgggcggggggcaacgccagcaaggggttgggcctgttcaggaggcctggggttggg

SEQ ID NO: 129663 - DNA, 2066 bp, Homo Sapiens
gggcagaggctgggctgcagcatttattacatgtgctttggcgaaaataaataattcttcacacacatatttcagcaggccatgaaaaacggggagggaagggcagctgcaaagttcccaggagtaaaggggcgggggaggtgctcgggcagcacaggggagggaagattaaggcacaggtgcgcggggcctcagcggcccaggggaggggtgtggaaacctcccctctcagtgcagctggtgagtggctggcgagggggcccacggcaaagacccctcttggcaactgtgagtcccctcatctcactgcgcagtggtaatggaggcgtctcaggcagggttcctcgagagggtcggggtctcacagccccagggccccgatcacgggccgggcctcgggagcaggggtgctcagcaagggggcaggcccggccggctggtgctgcggggatgctgggtccgcgggggcgggagccgggtcggcgggtgcgcgcatgcgcagagcttcgggcgggaaggccacgttggtgcagaagaggccgagcagcagctggcgctggcactcctcccacttggccagcgcgtcccccagcgagaggttgttgcgcatccagccgggcagtgcctctctgtaggcggcgcaggacagcggcacggacggcagcgactggacgcggcgcagctccacctgctccggcagcctggagggcaggtgcctgcccagcttcctcttggcgcgcatcaccaggtactggcagatgctgcccgtctgctccttcatccaccggatgtcctcgggaacgtcgggcagccactccagcaagcggatggtgaaggacagagcgctctccagcggcagcgtgtagggcaccatcatggccgtggccagacgcacaggcagcatgttggagagggtggtcagcaggtccgtgggctccacgcaggcctccagcagggcctcattgagccgggcgggcaggtgctccaggatgtgatcttctcccggcagctgcgagtaatcctccgcttgggcgctctccactgcctggtccttgtcctctgggccgtgggggcgggcggggggcaacgccagcaaggggttgggccggttcaggaggccgttccgctgcagaaagcgcaggccatcccggtatccctgcttgcacatctctcgcagcaccaggggctccggcgggaagagggccttggagaggcggtagaggttgcgcaggttgaactggatgctggtgttggtgacccgcagctcgtggatgttggtggagctgtcctgcggacagatgtcactctcgcccgagaagggggacactgtgatggtgttcttaagctcatagagtggcaggttgtctgaaatgccaccatccacgtagcgcaccccctggagggagggagggatgagcccacagtacacggggatgaaaccgctgcagacattggcctggatgagctcgtccttggagttgaagtgggatataatgacattctcgccgtctgacacgcgggtcagggagatgcccaggcgcccactggcatgctcatggctatcagcaggcaggaccttcagcaggaaactgcggatgatctttaccaggttgaaggaggggtgcagggggcccaggaaccgcttccgggcctctttagatacctcaatgaacttggcaccagcctcacccaggcagaccccggtgaccagcgccgtggccgtgagcgccccggccgaggcgccgtagatgtgcgtggcgttggccaccaggaagggcgcgtgctcgcggaggcaggaggccacgccgacgtagtagacgccgaggaagccgcagcccgcgaacgagatgttccacgtcttctcgcggggaaacatcgcggcggcggccgccgggccccgggttccgtgggcggccaggcctctgtgagccgcctgctcgccgctcgctcgctggagccgggggccgggcaggtcccgctgcggctctagctcggggtccccgccctcgtgccgaattcgccacccaggcctcgctacttaggacctatggggcccggtgggggga

SEQ ID NO: 129664 - DNA, 994 bp, Homo Sapiens
tgggtctttcccggcccccgggggaaagagaggggggcctctttgcgaagaagggcccggttaaagaaaggttttcccccacaggttttgaaaccttgagatggcctgggttgttggggtgaacccccgccaggcttccgtgggatttttggggggaaacttgtccctgcgggccaggatgtgcactctccgcccggggaaggggggaccccgtggatggtgttcttaagctcatagaggggccgggttgtctgaaatgcccccatccccttggcgcaccccctggagggagggagggatgagcccacagtacacggggatgaaaccgctgcagacattggcctggatgagctcgtccttggagttgaagtgggatataatgacattctcgccgtctgacacgcgggtcagggagatgcccaggcgcccactggcatgctcatggctatcagcaggcaggaccttcagcaggaaactgcggatgatctttaccaggttgaaggaggggtgcagggggcccaggaaccgcttccgggcctctttagatacctcaatgaacttggcaccagcctcacccaggcagaccccggtgaccagcgccgtggccgtgagcgccccggccgaggcgccgtagatgtgcgtggcgttggccaccaggaagggcgcgtgctcgcggaggcaggaggccacgccgacgtagtagacgccgaggaagccgcagcccgcgaacgagatgttccacgtcttctcgcggggaaacatcgcggcggcggccgccgggccccgggttccgtgggcggccaggcctctgtgagccgcctgctcgccgctcgctcgctggagccgggggccgggcaggtcccgctgcggctctagctcggggtccccgctggcggaggcgaagaagctgggtctggccctgcctgttcaggctttggggctgcctgcgtctgactggggccgcccctcgtgcggaattcgccacccaggcctc

SEQ ID NO: 129665 - DNA, 771 bp, Homo Sapiens
gatgggccaaagggaggttttaaatcataaatcagacacattaattataactttaacaaatgttattaaaagcagcaattaaaaaccatgaatctttttgaaggtgcagagggttataaggtcagttggcagtaatgcagctattatctggtatgaatgaaatgctggggtggggagtcagggtgacctcattaggccttgtgctatcttcccaggtggtgcagacaccccctccctccttttccctctccaggcccacagcctccccagagcccaggtagggaaggtccagatgtactgtaacaggattgctcatcccaggctatctcagaagtctggaaagcaggcctagaaggttgctgggctctctgaagccaggcaggaagctacaaattggatcccagttcccacagcacccctgggctaggggttggcttctcagctccccttccacctggccctagttggcccctgtggcagcagctgtggggctgaaaagggggaagaactgggtccaacgccagctcgtctatgcctgggctgtgccagggaagcagaggaaagtgggtgggctgtgcacaggaggtgaggtccccttaaaaggcactgtgggagctgaggtctaagatgggggggcatctaaactatctcagggaccccctgaacgctcacaggtagagaggggtcaggcctagcaatggaaaaacagctcctgcaggcctgctgccccgccagtgcctcttgctgtactaccacttcgccttcctgctg

SEQ ID NO: 129666 - DNA, 501 bp, Homo Sapiens
tttccattgaaggtattatttatttgcaggctcatcttaagtgacaaaattccatacagaagactataacagaaatcatatttaatatattaaaattaatacttcaaatatctttcacattaagatgattatctattgtgtaaatctttcctaggtatgtgtgtctgtttcttgatgtgtaaaccaaaactctgaaatattctcttgatctaactttgacttttaaaaactgacattgtattgaatttacataattctcaatcagaaaaaaaattactgtcagactgcaatgcaagtctgccccaatgaaggcaggaggagggatggctggaagtgtctcagggcactctgaaagtttagcaagcttatcaaggagtcctcaaactaaagctggccaaaaacttcagcataaaaactatcctgtctgtgtattatatatatttattaccaaatttaataaacaaaaaccacttttgaaccaggtaattttatctagtgtga

SEQ ID NO: 129667 - DNA, 998 bp, Homo Sapiens
  misc_feature (660)..(689): n is a, c, g, or t
  misc_feature (734)..(734): n is a, c, g, or t
  misc_feature (767)..(767): n is a, c, g, or t
  misc_feature (810)..(810): n is a, c, g, or t
  misc_feature (817)..(817): n is a, c, g, or t
  misc_feature (879)..(879): n is a, c, g, or t
  misc_feature (884)..(884): n is a, c, g, or t
  misc_feature (962)..(962): n is a, c, g, or t
tattattaaataaaatcattttatcatatggctttcaaaagacaatgagtgaaaacttaaggcaatacaataagtcatatttatgagtacgttcaagaattcacaaaaaagggtacaattctggcttctctttaatcattaaatttcagtttttacaaataattcaggttcaggttttgagggggaaacagttcttgtattattacatgctcatttttcttctgtaaatgactctattggctagatttacaaacattgtcacagaaacaaattttttaagccatagatcactgcatttatatttacaaaaaagccataaacatgcatttctcctttattaggacttaaatagatgcttgaatattaaggcagtgatgattctaaaacataatgaaattctaagttaaggctttatgtttcttttgaaacccacactcataggcaactgtgaccaaaccaaactcttacctactaggttgagctcatctgcccgggatatgttatttatccattaccaacacttcttttgtgtcaaatgtatgggataggaattagtagcaaaaccatcaatttactttaatgaatcattggtccccttactaggttttgaggatttagctttcagtaatacaggcatgtgccacagaaaggagcatgtcnnnnnnnnnnnnnnnnnnnnnnnnnnnnnncaatgtggagaacttacaggctgcactgattcctacttgactggnacttagcaacaattaagatccaggatctcctanatacagaaatccccaagctacttgatcatgctcctacctcaanaacacanagcatttcttgatattgaagcataggtctcaccttgtttcttttgagactggtatcctcgtngcganttctggctcgagggcaattccctaaggagtcgtataaatcgtatcagtcaagctgttctgtgtgaatgtatcgccaantccaacacaacagcggagcaaagtgtagctgcgtgc

SEQ ID NO: 129668 - DNA, 704 bp, Homo Sapiens
tttttctgcccaagtaactttattcgtgtcttctcaaacatttcagatcaaataatgccattttctaatcttgaaaccagcaagattagaaagagaatgaggccatcctttcactcagactttcccagttactcaagattgtattcaggaacgaagtcaaactcggcctcacttcttaattagaataaactagaatcaggtccattgcataactgctaattgttttgcaccagggagccacaaaggaagctaaaactagcctttctaagttatcctaagtttttactatctaaccagcacttctgattttttttcccttaaaactctaaagtacaggtgttgtatgtctgccgcatctgaaaggctgccccggaaatcagagcctatctagcgggaatgtctgggcagtcacccccatcctgcgcgcagatagcaaagggctgctggcaggtgtcagacacacggtaccgcaacagcagtcccgaggtctgagattctcaatgtcagcaggtggctggagagtatcaccagagccactcaggaaccagccatgcggaatggctgggtttcttattgaacatgaaatgcttcctctttggcctggactgttttgctaaaattgttagtgggttttggggcaggccagtgtatgggaaactttttttgttgttgagggggggcgatggagtctccctctgttgccc

SEQ ID NO: 129669 - DNA, 803 bp, Homo Sapiens
ttttttccttgccaaactttattgtgattaaaattccagagacagtaccagctccacatacctctagccctgtctttgccctagttcccgagtgtccttcacccccatcttccaaatcatctctggtttcacggggaagaaaaaacctagggctgctgtgaatgtgccctctcaggtccctgagttggccccaggtagagctgtaagagatcaggaagagggcctccctgcctgacggcgatgatcctggaggcaacgtgtggagcagaaagagaagtcgaggtagtgaaagggagtcaggccttggagggatgccccacaactccagcagcgtcgagtattgacgattgcagagtcagggattggagaggtaggggctcccaactgggcagcgagtcggcgctctgcagccagagctctcttctctcggtcactgagggcggcaaatcgccgctgctcttctcgttcacgctcctcctgctcctgctgcctctgctgctgttcctcccgttgccgccgggctgccttctgctcccttttccgtgtagcctgccgtgcctccatttctggtgtcaatggtcctggcacctgagccttgttgtaatcgtaggcatctggattcttctccatgaaccttcggaactcattacgtgttgatttgtcagccgcaacagtataaggtggccgggcccgagagtccctaggtgcaaaaactccaaaaatgggtttaacttgcctcctgcctttcccaacatcacccaaccagaccagggaatattgccaagtagccatgccaactttaa

SEQ ID NO: 129670 - DNA, 744 bp, Homo Sapiens
  misc_feature (631)..(631): n is a, c, g, or t
  misc_feature (670)..(670): n is a, c, g, or t
gaggatataatactttattcactaacacgggccgagggaatgtagtgatgtggggtgggcactgtttccagggaccccggcaggggattctccctgtctcccagttccagggcagccgggcctgccgtcccctcaatttcccagacccggaggccggggcgaggaggagcctgggttagtgcagccaggtcgaagccccagcgcgcccctccgcagccctgcgggactcagctgccctcacactccgggcaacgctcggtggcagtggcggccgtggcgccagggggcagcttgaagtccctgccgcagccggcgcaaatatacaggcggcgccgcatgtgcgcgcgtcggtggcgaatgaagtgcgagcttaggcggaagcggcggccgcactcggcgcaggggtagggccgctcgcctgtgtgcgtgcgcgcgtgctccgccaggttggagcggtggccgacgcgacggccacacacagcgcagcggtgcggcttctcgcccgtgtgcacgcgccggtgcttggccagcgccgagctctgagcgaagcgcgtgccgcagtcggcgcaagcgtagggccgctcgcccgtgtgcgtgcgtcggtggcgcgccaggcacgagctgccgccanaggcgcgtccgcagtccgggcacgcgtacggcttctcgnccgtgtgcacgcgcaggtgctgtgcgtagttggagctctgcgcgaagcggcgggcgcagtgcgcgcatgcgtac

SEQ ID NO: 129671 - DNA, 958 bp, Homo Sapiens
ttttttaaaaacaaaacaggttttaatggttaaaacagatgaattaataggtttataataaccattaactaagggaagccctagaacaagaaataaggatttttaattgcatgcaaaacctagttaccataaaaaccaatgcaataccaaaatatctcagcttcctagcatagactccaggtcttttcatttccaatacttggcagtcataatatgtacactttcatatgcacctggttgtggagggataagctcattcacataggactacaaatatctctcacaggtaggagggcacaaaagaacaatatcttcctccacttttttgggtccatcttgaaaaacaaaaaaggcactcccaaaggttccttggtaacacctttgttaggtttcttaattactaacataatctttacatgtaaggttaatggtccactcatttcatagatctgggaaccatcaggcattggaactgcctttaactcacatgccaaacaactggctttcttaaacaatgacaaaaactgtatacttgttttaaaaacatttgggctttgtttccttgacaacttatatatgcttaatcactggactttggcatgcagagccaaacatatcatggaactgaaagaaccacaatatgacatggtgacagaagactctttgaatcattattctgttttccactatcagctgctccagctcccttatactaatccaactttgtccctcagagcacccatgctctgaacctaggtttaatctctctgctgacagatttattaaagatacttagataaattaccaagtctttctctacgatcatcaaagagtaagggaagtcaaatgctcatgggcagttgtccactattcacagaatctttagaaactatttgcccggacgcgtgggcggacgcgtgggtcgacgatatcccgggaattccggaccggtaccagc

SEQ ID NO: 129672 - DNA, 1488 bp, Homo Sapiens
aaggatgcccaaaagcttgattcagggttcaaagatggtggccaggccacccccatcattgtccagcacctccgtctccagcattggctttgtttttttgaaaagtgagggaagattcttaatgtgaacttcttttcggaactgctctcccaagggtttcccaatgcaaccagcaatgaggcgtttgaattggtcctttcggcgcttgtcagccactttctgcagggagggttttaaaaggcttgcagtcaaactggtccagtgagtccttctgtatttcagggatttgctccattccagctcttatctccaggtacctggggcgcagtgcctcgtatatctggaaggccagatggcccagggaagccatgcacccgtcgtgctgcccgtgcatctgtaagcctttcagcacactggtgaaaagccacgtaactgcatctgcgagcagtgtccctgacagcacttgtttgaggagaggccagcagagctgtgaggttgtcctctggcaggacagagtatctttccaggccagggaattgaaggctgtaattaatagcgctgtacaaacatcctcatgcttcatcagacatttgcccaggtctgtaagctctgccatagctgagggggtgacctctgtggccatcatttcttcatcgtctccatctgctgggggagcactactgtggtcagcacccttctttgaaacacagcaaaccgtgattaggtccatgacttctcgggttaacatcctcaccagttgctcctccagcatctcttgagactctgggttttcatctgcagcctcatcttctccacacagcaggctcctttggttgataacttgccatttctgagaaagcctcatatggaggtaggtgaaaagaggtccgaggatgggggataccagggcttcatagtgctctgggggacagaagagcaccagaggctttacaaagacacgaagcatgggtctgagtcggtagtcaggaatattgttcaagttgacaaaggctgagctgagaagctgggtagcaaggtcctccacagtatagaagtcttgctgcatggaagggcctgccttccctaggatatgaaaacagttttcatagagggtagagaagaaacgctgcattctttccaagacggttttgaagacaggagagtcattgagttccaagagaggttgaggtaatcctaatatagcagatttttccgcgtcaagcatatccagagccttggtgaaaggctctgccattttggctagcatttctggtgcatataatgtattgtgggttcttataagcgcaagcaaattgtcaagaagtttcagaatctgctctgtgcaggggttacggaagattggatttccactggatgtataacccaccacaaatcccccagctttggcctcttctaggtcagtgggccagcaagttcgtttcacccggacgcgtggtcgacgatatcccgggaattccggaccggtcc

SEQ ID NO: 129673 - DNA, 989 bp, Homo Sapiens
  misc_feature (706)..(706): n is a, c, g, or t
  misc_feature (766)..(766): n is a, c, g, or t
  misc_feature (796)..(796): n is a, c, g, or t
  misc_feature (822)..(822): n is a, c, g, or t
  misc_feature (827)..(827): n is a, c, g, or t
  misc_feature (835)..(835): n is a, c, g, or t
  misc_feature (882)..(882): n is a, c, g, or t
  misc_feature (903)..(903): n is a, c, g, or t
  misc_feature (940)..(940): n is a, c, g, or t
aaaaacaaagaaggacacatttattatttgttgtgcacctttagaaatggtccacaggtccactgcagtgcacaagctgctgcatgcacaccgcacgtgacaatccagtctgcctgactcccaggacagcctgtgtgatatgcaaaatgccattcccatgagggcgcatcatgtttcccaggagctctgaaggacacagatagagcttgtgctctaggctgcccccctgttcccgtgctggctccatgctggtgtccagaatgagccagttcacactccagtgccacgtggggggagaagtggctcccaaactcccctgctgacctccccccggcccctaggtgtaccttccaagtcagatgacagtcataggctaacatccccagctttgcctggaactcaggaaaggatacttacgggtagacagaaagattctgcagtgggcttggacttggccattgaagaccctgagaggacatcttgtccaccctctccaggctaggccctgtctgtgctgcctggagccagaagaaaaagattccagccttggaatctgcagggagggagactccttgcagtgagctttcttgcatttcattctagtatttgccacagatgctgatttcttgcctgagtcatatatattgaagtttttgctcatttcttactaggcttaagaattggaattctctgcccttacaatccnagggctaacatgctccaacccatgaacagctttgagatctgaagacaaacccagctctanacgtaatgacatcacttctgccagctgganagaagagactgtgcctctggtgtcangagcnagcactangacaccagggactggtcccttgcttgtcttggacacacttgatatangcatgatgtcttcctgtctgnacagcactgtttgccaggcttggctgagcctctctgnagtctcccatccagtaagtgtctatcctactcaaccctgcgatctgcca

SEQ ID NO: 129674 - DNA, 754 bp, Homo Sapiens
tttttctactaaaaataatttaattagaaacggagttttggcaagggaggcagaagcggctccttttctccccttggccgcccactcagcaaccaacaaggaggaaagcccccgcagtgctcggccagtgccgcgccatcgccaccagggagcgccccgcgcgcggtccacgtggcagaggtcgcggcctcgcggcgcggggaggagccgcacgccacagtggcaggtcccaggccgtcactccgagctctcgccttccgggccgctgtccggcgtgggcgggaggaggggtctccggcgcgagcgcttgacccggcgcgagggctgcagcagcctccgcttcagcacagcagccactgtgtcctggctgtccgctgtgggcccccagtagatgctctccccgcgtcggaagtttctgtgcagccgtgtgcagagcgtggccagggtgagcagcaccagcaggaaggtcagggccatggcagcccaggcggcctcttcagtgcgtggggtggggccccgggctgcccgtggaggcgctgctgcgcgaggggccggggaagcctgacttgaacagacacagccccctgggctgccttgcccgttgggcacctgagcctctgtcctggagctggcattgcctccaggcgcccccggcagcagggagacagtgggcagcccaggctggctctacccaaggcatctccagcgccagcccccatgcagtcagcacaggggccgatctgcgtgaggctga

SEQ ID NO: 129675 - DNA, 1166 bp, Homo Sapiens
ttatgcgtcctcacccccccgagccttctgtctaataccgggtggaccggtccggaattcccgggatcggagcggctgggcggcgggccgggcccggggccgcttggaatggcgcctcctccgccttcgccccaactgcttctcctggcagccctcgcgaggctcctgggtcccagcgaggtgatggctggaccggcggaggaggcgggagcccattgtcccgagagcctgtggcctctgcctccgcaggtgtcaccaagagtgacctacacacgagtgagcccagggcaggctgaggatgtcaccttcctctaccacccctgtgcccatccctggctgaagctccagcttgccctcctggcctatgcttgtatggctaacccttccctcacccctgacttcagcctcacgcaggatcggcccctggtgctgactgcatgggggctggcgctggagatggcctgggtagagccagcctgggctgcccactggctgatgaggaggcggaggaggaagcagaggaagaagaaggcatggatctactgtgaaagcctttcagggcctgctccctccgagccaactcccggtagagggaggctgtgccgaagagggtgtgtgcaggccctggctctggcctttgctctgcggagctggcggccccctggcacagaggtgacatctcaagggcccaggcagccctcttctagtggtgccaagaggcggaggctgcgggctgcccttggtccccagcccactcgctcagccctgaggtttccctctgcttccccagggagcttgaaggccaagcagtccatggcgggaatccctgggtagggagagtaatgccccatctgtgcccactgtctccctgctgcccgggggcgcctgggggcaatgcccagctccgggacagaaggctcaggtgcccaacggggcaaggcagcccagtgcggctgtgtctcgttcaagtcaggcttccccggccctcgcgcagcagcgcctccacgggccagccggggcccacccacgcactgaagagggcgctgggctggcatggcctgaccttctgctggtgctgctcaccctggcaccgctctgccccggttgcccgaaacttccgacgcgggcgagcttactgggggcccagggcccgccggcccgcggcg

SEQ ID NO: 129676 - DNA, 1351 bp, Homo Sapiens
  misc_feature (100)..(667): n is a, c, g, or t
  misc_feature (697)..(714): n is a, c, g, or t
  misc_feature (1245)..(1245): n is a, c, g, or t
gacgacctacccggattggtacctacgcgtgagctttgggaagcccacgcttcccgagggagaaagcggacagtatccggtagcgcaggggtcggaccannnnnnnnnnnnnnnnnnnnnnnnnnnnnnnnnnnnnnnnnnnnnnnnnnnnnnnnnnnnnnnnnnnnnnnnnnnnnnnnnnnnnnnnnnnnnnnnnnnnnnnnnnnnnnnnnnnnnnnnnnnnnnnnnnnnnnnnnnnnnnnnnnnnnnnnnnnnnnnnnnnnnnnnnnnnnnnnnnnnnnnnnnnnnnnnnnnnnnnnnnnnnnnnnnnnnnnnnnnnnnnnnnnnnnnnnnnnnnnnnnnnnnnnnnnnnnnnnnnnnnnnnnnnnnnnnnnnnnnnnnnnnnnnnnnnnnnnnnnnnnnnnnnnnnnnnnnnnnnnnnnnnnnnnnnnnnnnnnnnnnnnnnnnnnnnnnnnnnnnnnnnnnnnnnnnnnnnnnnnnnnnnnnnnnnnnnnnnnnnnnnnnnnnnnnnnnnnnnnnnnnnnnnnnnnnnnnnnnnnnnnnnnnnnnnnnnnnnnnnnnnnnnnnnnnnnnnnnnnnnnnnnnnnnnnnnnnnnnnnnnnnnnnnnnnnnnnnnnnnnnnnnnnnnnnnnnnnnnnnnnnnnnnnnnnnnnnnnnnnnnnnnnnnaagaattcggcacgaggcgcggtgtaggcnnnnnnnnnnnnnnnnnnaacaaatccaagtaacaactttattgtagtatacagcacaatttttacatacatattagtggttttgacagtgttacttttgagtagaccttaaatgaatccacaaagttaatatattaaaaataaaatatacacagtaaaacaacaggcatccagatgttcagaatcatgcagataggagtggtttggttggtgttatcactgggtaccttgcctatttaactcgccagcaaataccacttcttctgtttctcattcccatataattcatcaaaatcagagagttctaaacatatacaaaataaacctcttttaaagccacatcagtaaaaaatttcaattaataaggttatcatcaaaccaagaattccactgatcatttgatcagcccattactaggaaacaggcaatatcagcacccgatctaaaggcaagcctatttcatttattaaaacaccaacaagagagattaatcaacagagcaactattaacaacatgttaatcttaatataagacactgagagaaaagntaaaataatacataaatatcactccactgagccaggatataactcatggactacagatacatgagtttctacctgtcagacaatgctttaaatattttttctaggg

SEQ ID NO: 129677 - DNA, 1026 bp, Homo Sapiens
gcattgttttacatcttaagccctttattgactacaatgcagaacattttattttaagacacagtgggttttgtttttgttgatgttttcaccaattcaactgaagacgaaagtcaagacaatcaaatggtaactagtagcagcctatcagtaaatgagggcaagtatagagactgttctttggactgaggttaaatcaattagtcaataaaggcttttccactgtctaataattataacatattaacagtcgccaaatagtgttggatgggactcctctagaaataactaaagcctttcattttatacatgaaatagccacaaaatgtagatgggttacatcaactcattggatttgcccatcttaaattactctgagattcagagaaatcaaaatttcatcatatgttgtgcaacagtttcttcaaatactttctcatgctcaataaaattaacatggcatccagacaccctttaatttcaacacatgacatataaatggtcacatccatcatacacacatagatgattagaagacttgaggactacgcaaggatggcaagaaatcacttgattcttcggttatgccctagtgacaaatatatatttcttggcaaccagccaatcaattttggaaataatgttagcccatgacctaatacattctaacagcctatcactcgcttttcatgcaccattagggccgggtcaccaatctcctgctgtctttccccaggcatacattccttttctttggaaaacctgaaaatgcccctagataaatgtgcccctcctcccagagaacacattttcccacttccattacaaatccctgacttcaaaactaaatttaatacaggcaggcaaatgaagggctccttaagaaaactcctttaaaaatgaccaaagtttgggggatgtttacacctatcccattggtatctgccatggccaccttattttaattttaaaaccccctgggggtatttaatacaacatggttcaatgggctttacaagtttaagg

SEQ ID NO: 129678 - DNA, 750 bp, Homo Sapiens
  misc_feature (73)..(84): n is a, c, g, or t
tttgttgggaaaattgtttttattttaaaatggaaatggaaatataatatacaggaaaagcttgtgctttccnnnnnnnnnnnnacttcgcataaacaataataatgcaatccaggtcaaagcacgaggcagaaactcgagaaaagaacagttattaaaggtacatggtcttcttttcaaatatccatgaaaacatttaacgacgggatggctagtacctatagaaagctccaaagcaataatctggcctttaagtttcgacgggactattttgaatcttagatttatcagtcactcctttcccattctacttgttctaagaattaagtatataattaaaataaaaaggccacatcctgactttaaatctccactctcctaaaaacctgtttgaggaaacaaaaatggggaagaagatcagaacaaaaatattgttaacactggccgtcctcatgcaggtgggctactaccaacgctggttgttactccaggaaaatcgaggtgaacattattacatttatatcaacaaacccataatcaacaggttaaaaaatcctacattacaaagaatctgatcacttatcagttggtggtctggaatagtttgcctagctccctctgggctgctacagctcagattcacaagtagaaattacatttacacaacttaagtttgcacggacgcgtgggtcgacgatatcccgggattccggaccggtaccagcctgctttttgtacgagctgttcata

SEQ ID NO: 129679 - DNA, 464 bp, Homo Sapiens
ttttttcgtacaaacagaggttttattgcgtttggtccacagtcgtatttcacattatctcacggagcagggcccctgggtggggggtccctgtgcagtaattggcggggcatgtggccggggaagatggagcagtataagctggtcgggcccagaagggaggagggctggggactccttaaaacctactgagggcctgggcacggtggctccaattgcacatttttaaggtccacataattaacaaatcagcaagttctatttatgtttttatgcgaatctatacgtctacaaggttaagtgtagacatacactgatacatttagcaagataaatttagtttgaaaacactttttttcaagtgacaggtttttgtctgatagctttcaataagtccaatattttaaaaacctaatgactgtgcttcattttaaatatctggcaaatcaaataaattacagcag

SEQ ID NO: 129680 - DNA, 862 bp, Homo Sapiens
ccaattctctgccgctccttgattttcaatcaatgtttcttcaagagctgatttccttttatcctatttctataactttttcgtcaaaataatctgccctgcacaatacattatcccattaggaacaatatacgcctttttctatgcttcatttataccaacatatacaggaaatttcatcaggagaatccctgaaataccccatgtggtaacctgagtttctactcatctccaactcaataatgtctggcacatcaggcaggatcatagtaaaacctccagtgaagtttaaaattcaggccctgttgcatttctttcttcgttttatgtccttcccagcaaggatatcatcaaggaccgaccttacactgaagtccaggcttcgcagaaagtgacatcagatggcttttcaggatccgagttcttcacaggaactctccagaagtgatagaaatctgtcaggtcaaagaaaggcttcataagtgatgtgttgctacttcattctctcgaagcgtcactggagacatcagccttcacagaatctctacttttcattcacactcagttgttttattcacacctcgcggacccctcacccgaccgggcctgcgcttcccggccaccgtccagaccaattgcttgacagtctgcagcgaccatgcagcaattacccacgatctcgcggtccgactctccgagtcgactgcagattacaggtgtgagccacggtgcccaggccctcagtaggcttttaaggagctccccagccctcctcccttctgggcccgaccagcttatactgctccatcttccccggccgtaatggccgaattcccgggcatatgtccggtaccgtcgactg

SEQ ID NO: 129681 - DNA, 2260 bp, Homo Sapiens
  misc_feature (206)..(426): n is a, c, g, or t
  misc_feature (437)..(445): n is a, c, g, or t
  misc_feature (1053)..(1065): n is a, c, g, or t
  misc_feature (2149)..(2183): n is a, c, g, or t
tggtccacagtcgtatttcacattatctcacggagcagggcccctgggtggggggtccctgtgcagtacttggcggggcatgtggccggggaagatggagcagtataagctggtcgggcccagaagggaggagggctggggactccttaaaacctactgagggcctgggcacggtggctcacacctgtaatctcagcgcttggggnnnnnnnnnnnnnnnnnnnnnnnnnnnnnnnnnnnnnnnnnnnnnnnnnnnnnnnnnnnnnnnnnnnnnnnnnnnnnnnnnnnnnnnnnnnnnnnnnnnnnnnnnnnnnnnnnnnnnnnnnnnnnnnnnnnnnnnnnnnnnnnnnnnnnnnnnnnnnnnnnnnnnnnnnnnnnnnnnnnnnnnnnnnnnnnnnnnnnnnnnnnnnnnnnnnnnnnnnnnnnaccacaactgnnnnnnnnntctactgaggccagagtgagttggggcggggagcatggagagggggtcaggcttagccccaacaactcagaatttcacttccttgtacggccctcactttctccacctggccccggggcaggtctgagggtctgaagtctgttgatctgaaggtcctaggcaaatccagtcacttgggagccggagatatttaacatcacggcccggtcccctttcccaggggactcatttcctagcactctctccactgtccttgccccacccctgggggaaaaaatgtatttttcttttgtgaatacttcctgaaacttgcgggcatagaaaccacaaactgctcagctgacaaaagggggaagaggcgaggcaaccagaaaccgtcggggaccggttccttccaagcccaggtctcttcttcccagcacagcctgaatgtgccagcagggaccctcgccctacacgtattgggatatggccttgaccccttcccccacagcccagtggctcagccttgcgaaggatcaaggcaaaggggaaaaaagctctgctgcctgatcccacgctgacactcacagacccttggttgactggcagcactgaacgggttaagnnnnnnnnnnnnngatgaaaacacagaaaaacccaaaagcccagatggggagacgatgtggggagagagcgtgctgggagcctcagtagccggcctcctcctggtagtaagggggatattcagggacctcccccgggtccgggcagtcgccggtgcccgagggagccccatcggccactgtgccttgcgggcagtacttggggtcatatatctgccggcccaggccgaagacctggccgctctggttggcgccctgcgtgtagcccatctgcagggacatggaggagttgtcacacttgtcggttcccagcttggtatcatagatgtgccgccgggtcccgggagccgtcatgcccacctggctggcgcacttgttcgtgcccatctggaggctgatggtcgagtggtccatggggggcaggatatggttcttggggtcatagagatgccttctcgtgccgtaggcagtcatgcccgactggctggcgcatttgttggtgcccatctgcagcccgatgacgcactggccagccttcatggtggcatcgtcgaaattccgctcctgcttctccgagtacttgacgccaatgtccaccccgctctgcagccccttagtcttggccttccccgccagggcgagaagagacacctgcacctgcgtcatgttcccactctcaaacaggtcgttggcctcgaacaggtccacagggttcatgccgtagctgaccatggccttgatgaagttggacaggttttctagctggtgccagttctgcatggagcggttgatcttggggacggagcccggctgtagcttgttcatgagtgtgcataagatagttccatccttcaggcccttctggaagtcggggccgatggagaggccggtgagtccctcgatccaggtgcggagctctgcctccttctgggggtcatatttggacaggagccggttcttgacctcggccgacagcccgtacgaggggcccttgttgaactgcgtggagctcatggctggcgggcgggcggcgggacggggccgcacccccggccgtaatggccgaattcccgggcatatgtccggtaccgtcgactgnnnnnnnnnnnnnnnnnnnnnnnnnnnnnnnnnnncgccgcttcctcgctcactaactcgctgcgctcgtcgttcggctatacgacgtagcccctataggatcgatacatcc

SEQ ID NO: 129682 - DNA, 1138 bp, Homo Sapiens
  misc_feature (47)..(63): n is a, c, g, or t
  misc_feature (65)..(77): n is a, c, g, or t
  misc_feature (192)..(192): n is a, c, g, or t
  misc_feature (313)..(533): n is a, c, g, or t
  misc_feature (544)..(552): n is a, c, g, or t
  misc_feature (1028)..(1062): n is a, c, g, or t
taaaaaagctttcttcgaggggcccgaaggccggcccgacaatgggnnnnnnnnnnnnnnnnncnnnnnnnnnnnnncgtacaaaccaggaggttttattgcgttttggtccacagtcgtatttcacattatctcacggagccagggccctgggtgggggggtccctgtgcagtacttggcggggcatgtgnccggggaagatggagcagtataagctggtcgggcccagaagggaggagggctggggactccttaaaacctactgagggcctgggcacggtggctcacacctgtaatctcagcgcttggggnnnnnnnnnnnnnnnnnnnnnnnnnnnnnnnnnnnnnnnnnnnnnnnnnnnnnnnnnnnnnnnnnnnnnnnnnnnnnnnnnnnnnnnnnnnnnnnnnnnnnnnnnnnnnnnnnnnnnnnnnnnnnnnnnnnnnnnnnnnnnnnnnnnnnnnnnnnnnnnnnnnnnnnnnnnnnnnnnnnnnnnnnnnnnnnnnnnnnnnnnnnnnnnnnnnnnnnnnnnnnaccacaactgnnnnnnnnntctactgaggccagagtgagttggggcggggagcatggagagggggtcaggcttagccccaacaactcagaatttcacttccttgtacggccctcactttctccacctggccccggggcaggtctgagggtctgaagtctgttggtcctgaaggtcctaggcaaatccagtcacttgggagccggagatatttaacatcacggcccggtcccctttcccaggggactcatttcctagcactctctccactgtccttgccccaccctgggggaaaaaatgtatttttcttttgtgaatacttcctgaaacttgcgggcatagaaaccacacactgctcagctgacaaagggggaagaggcgaggcaagcagaaaccgtcggggaccggttccttccaagcccaggtctcttcttcccagcccagccccggaccgtaatggccgaattcccgggcatatgtccggtaccgtcgactgnnnnnnnnnnnnnnnnnnnnnnnnnnnnnnnnnnncgcacgccttcctcgctcactactcctgcgctcgtcgttcgctctgacgagtagcgcctatagtgatcatcagtcg

SEQ ID NO: 129683 - DNA, 960 bp, Homo Sapiens
  misc_feature (37)..(37): n is a, c, g, or t
  misc_feature (98)..(98): n is a, c, g, or t
  misc_feature (148)..(148): n is a, c, g, or t
  misc_feature (442)..(464): n is a, c, g, or t
  misc_feature (477)..(490): n is a, c, g, or t
  misc_feature (527)..(537): n is a, c, g, or t
  misc_feature (639)..(667): n is a, c, g, or t
ccccctctagggtgagaggagtgtgtacaccagaatnggggtggcgggcgggaagcggctttgagaaggaggtatataccccacaccccgctctctcnacagacgaaaagaatccgcgacgcgggcgccgcggattgcgagttatttnttattaataaaggggagggacggccagatggacagcgccgcggggtgtgtttgtgagacccccacgaataataatgggctccggcaagaaccccactcctctgggggagttgttttgttagaaaaaacgccactggtgtataccccccccgcggggcgtgtgttttatattgtgggtgggggagagacagaaccacctttgttctttttcggcgcggtgttttgttttgggagggaaaaacaatggagacccaggtgcgttttttcacgtttgggggcgcccccgccgcccacnnnnnnnnnnnnnnnnnnnnnnntttttatagggcnnnnnnnnnnnnnncgcaaatttttatattggttggattagtgagtttaannnnnnnnnnnttttgttctctatggaacggtggaatgtgggaggaagttggtgattttagttttgtgggtgatttagggtaggtagcggtgtaggtatgataggtttgtggnnnnnnnnnnnnnnnnnnnnnnnnnnnnngttttcgtacaaacagaggttttattgcgtttggtccacagtcgtatttcacattatctcacggagcagggcccctgggtggggggtccctgtgcagtacttggcggggcatgtggccggggaagatggagcagtataagctggtcgggcccagaagggaggagggctggggactccttaaaacctactgagggcctgggcacggtggctcacacctgtaatctcagcgcttggggaggcggaggcgggcggatcacacctgaggccaggagttcgagaccagcctggccact

SEQ ID NO: 129684 - DNA, 1408 bp, Homo Sapiens
  misc_feature (622)..(644): n is a, c, g, or t
  misc_feature (673)..(683): n is a, c, g, or t
  misc_feature (743)..(743): n is a, c, g, or t
ctctatatatccgctctacatagccctttttataaaaaagaaatatcccttatattgtttttcaaaaacctttataaagaaaaaatatttttggcacaccacccccactgtgggtataacgtcccaagcgtcccccaaaagtcctccccttttgacccttacttctctccacaaatactccccaactgtattataatatggccgcacccaacagtcctctttaatgagagtgttaaattagagagcgagctgtctcacaaaatatctcgctagattggcgccagaaggtcccccagcgaattatatttgtgcctccctaacgcgcccccacaaattgtgggaaaatccttcaagggttccccgtacaccacacctctggggaggaaaatatatcttctccagacaaagctctggccgacattaattaagaaataatgcgccccaagtgtcttagagaactcttggacacactttctacgggcactatgacgcctcttatatttaaagagccgtaaacacaaatttatggaagggatggccatacaaccgccctctaaaaaaaggggttctccgcttgaattaacccggggtgccccaaacttttactttctcccccccacannnnnnnnnnnnnnnnnnnnnnnaaaccgtaggctttgaaggacacgcaggnnnnnnnnnnnctgaaaactttgtattcacatttggctgcccattaattaaaacttcaatggacttaagcnatttgaattataaactctcatttaataaaacacccacacaatgacaagaatgagactttaatcagttttaagtggagtttataacactaagagataaagggttgttaacaaacacaataacaaatggacatctgattgggatgaggcattatcctgtacacatcatattggtatttttgtgtatcctcagtgcatagcatttacacacagagccactgctgcacagcacaagagtatctgaagaggctgaatcagagtaaggctgtttaacagactgaaattttttagtatatatattctatatgaaaacaggttgaacttttgaactggcaggtagaaggcaactctgccaaatactacagttaaagcccccactttagtgcacagttccaccccttccatctgcatgcatgacacattaacagtatttaaaggtaaacgaggcactttgtggcaaccacagccatcgttatgaacatattgcacaaaatttctagaactaaacattaaacttgtaccctacttttattttttaaagctgaaacatttgatgctgccggtaaactccacttaagtttataacctgtgccacagcaaagaatggtgatgctatttattcaactaccctttttaaaagtatggcaaacatgttcaggaggagctac

SEQ ID NO: 129685 - DNA, 302 bp, Homo Sapiens
aaattctcagattcagactcaggctttcttccggcacttcctgaggccacgcacgcgtcctttgggcccttcaccaccttcctgcacccagttccttgtggcccctgcttctctgggtcgagggccgccgctgctcacctcttcctggaacagtcctaaagccgctgaggcagaaaaggcccagctccctccaccccgacgggagggatccgcgctgaggtccgatccgaacatgttccagacccccctgcaggactggacccggtcaccccgcggcctctgcacgacgctcacccgggctg

SEQ ID NO: 129686 - DNA, 1036 bp, Homo Sapiens
  misc_feature (53)..(63): n is a, c, g, or t
ggctaaaattaccctcactaaagggaataagcttgcggccgcggctgtaggcnnnnnnnnnnncaggtttgatgtaagcatgggcttacatcccccaggtacatacttttacttattgtgggataacctggcactagtaggcaggtaaagtcacaaatttggtgtcttttcaccttttgactgttgacttaatagctcctctcactctgcctggagatacttcctgcctcagatgaggagccagaagaaacagagcccgacttgaatgaactcagctcagagttctaaggaccagcattctgggggccattttctctacaggcaaatggaattgcttttccataacatccaaattgtaatgtggttgctgctgaaggaggaggcagcagcgaggtcctgcggtacccatggggtgatgctacttctgcatgcatctacagggcatctgacacctaacatgagacgtggcatgtgagatgagacttggcatgtgagacatagggtcactagagacccttctgggtcagaggagagagactgaattggactaaacccgtcctctgttcccagcacgtttctcatatagccctcagtcattgagggagtcccccgcaggattggagaggcacattcccttgggacagaggctacaggttggagcttttttttcccttggtccccaaccccatccccactccacttcagaacatggcaccccacccatctggccaagtgttatgtgatgtgcttactgagagcactccgggtgtcttttacatgttaagaaaggtgaagtttaggaaaataatatagaatacagaaatgctttaccggagattttttcccccattgtttgtttaccatgaacattttatttattccgaagaaaggaaagaaccatcccaaaggcagtcctccccgtgtcggattgttgcccctgcgatctgtccaggcaatcccaagatctatatcgacagtaagtttctgggaatgtacgcaatcaaaaagagtgacaaatgagctgggcagatatatc

SEQ ID NO: 129687 - DNA, 819 bp, Homo Sapiens
  misc_feature (691)..(691): n is a, c, g, or t
  misc_feature (695)..(695): n is a, c, g, or t
  misc_feature (764)..(764): n is a, c, g, or t
ccttttgctatcaggaaataaaactaaaaatggtgtcattgagtaaaaacaaaacaaatggggagaaaaaaattctccgggtaaacggcatttctggtattctatatatatttttccttaaactgtcaccttttctctacattttaaaagacacccggagttgctctcaataagcacatcacttaacacttggccagttgggtggggtgccatgttctgaagtggaggtggggatggggttgggggacaggggaaaaaaagctccaacctgtagcctctgtcccaagggaatgtgcctctccaatcctgcgggggactccctcagtgactgagggctatatgagaaacgtgctgggaacagaggacgggtttagtccaattcagtctctctcctctgacccagaagggtctctagtgaccctatgtctcacatgccaagtctcatctcacatgccacgtctcatgttaggtgtcagatgccctgtagatgcatgcagaagtagcatcaccccatgggtaccgcatgacctcgctgctgcctcctccttcagcagcaaccacattacaatttggatgttatggaaaagcaattccatttgcctgtagagaaaatggcccccagaatgctggtccttagaactctgagctgagttcattcaagtcgggctctgtttctctggctctcatctangcangagtactccggcaagtgagagagctataatcacatcaaaggtgaagacacaattggacttactgctacnatgcaggtatccaaatagtaaatattactgggggagttagcatgctacacaactg

SEQ ID NO: 129688 - DNA, 904 bp, Homo Sapiens
tagaaggaaattgctttaccatttgcaaactaaggtaattaaaatacagtgagtttcaaaatgcctttttaatgacaatgtatgaacttaatttattttaataaaccaaaattattgttattgagttaaggctattttacactgaatgtgtatcttgccactgatgttaacttatcccatcttacccaaggttgtaggtcaacagatggtaacaatatactattgtgtgactgtggaataacatctctagtgatttctttgtcagtggtctttaacttaccataatttggagaatatgattcctacaaattaacatttttgttttcttgtaactacagattattatgatggttgtaatgaagattatgagtataattggagctatatgtttctgaattctgaacaactatttataaaattttatcctacttttttctgttgaacatatgacttctctggtctgctaaacacatacagacctttagttttggtttacatggatttaaatatatagatatatcactgtaaaataaacttcaggtgtaacagatttatagagaaagtaatcatatttgtttatggttgtgtacctactttgagaagaaaagaaaaatattagaatgaacagataattttacaagtgttgatcacttaccagcaaaccagaaacttcagagattttgaaagcaaatctattttctctgctgtgtattaaattcatttatctaaaatgttattgctcctggcttagaatcatcttgtgcaaattctcttttttttgttgtttgtctgtttgcctgttgctcaccatagacataattttcttttcataaaacattctttgtataatcacctcagagattatgaaagtgactttgataaaatttaatggtgttcacaaaat

SEQ ID NO: 129689 - DNA, 2487 bp, Homo Sapiens
  misc_feature (71)..(71): n is a, c, g, or t
  misc_feature (248)..(248): n is a, c, g, or t
aaaagaattgaagatggtcccaaaaaaagggaaaggagggaagcccatttgcgtttatttccacgttgctngagcctttctctccatgttgaacaatctgaagttttaattctcggtagaaataatgtataaacattctctgaaaccatagcagccataaacagtgctggtcaaagatcctatttgtactcctttctcccccccattgttagtgaggtaaaggtaaaacaggtcttagtaaaatctcnacttttctcctacttttcatttcccaacccccatgatactaagtatttgataagtaccaggaaacaggggttgtaatagttctaactttttttgacaattgctttgttttttctaaacttgtaatagatgtaacaaaagaaataataataataatgcccggggctttattatgctatatcactgctcagaggttaataatcctcactaactatcctatcaaatttgcaactggcagtttactctgatgattcaactccttttctatctacccccataatcccaccttactgatacacctcactggttactggcaagatacgctggatccctccagccttcttgctttccctgcaccagcccttcctcactttgccttgccctcaaagctaacaccacttaaaccacttaactgcattctgccattgtgcaaaagtctatgaaatgtttaggtttctttaaaggatcacagctctcatgagataacacccctccatcatgggacagacacttcaagcttctttttttgtaacccttcccacaggtcttagaacatgatgaccactcccccagctgccactgggggcagggatggtctgcacaaggtctggtgctggctggcttcacttcctttgcacactcggaagcaggctgtccattaatgtctcggcattctaccagtcttctctgccaacccaattcacatgacttagaacattcgccccactcttcaatgacccatgctgaaaaagtggggatagcattgaaagattccttcttcttctttacgaagtaggtgtatttaattttaggtcgaagggcattgcccacagtaagaacttggatggtcaagggctctttgagagggctaaagctgcgaattctttccaatgccgcagaggagccgctgtacctcaagacaacacctttgtacataatgtcttgctctaaggtggacccagtgtagtcaccattaagaatatatgtgccatcagcagctttgatggcaagaaagctgccattgttcctggatcccctctggttccgctgtttcacttcgatgttggtggctccagttggaattgtgatgatatcatgatatccaggttttgcactagtaactgatcctgatatttttttacaagtagatccatttcccccgcaaacaccacatttatcagtacttctttgtggagtctatgatgcgatcacaaccagcttttacacactgtccttgcacacagacagaggtggaatctgggctacatggagtaccatctacaaccttgggctgcaaaacgaagaagtagccaatgcctttggcttggcagatgagcttgcacctgtcctttggtgagacgccagcgtacttgggaatccattccaccgcaggcccactcccaaaggaagcttttgaaaactcgttgtgtgcttcacattgttcctctctaaaggtttttccattattgtctggacagtcctcaaggttacaggatctgtagcgcactcgtttgccttcacagtacttccctccattctttgggactgggttgtcacattccctcatcgtgtactggactcctccaccgcacgttctcgaacagtctccccaaggcccccacattccccagcttccatgaaaaggcgtatcacaatgctttctgtcggttttgttcacacacttgccgttgatacaccatttcccttctccacagctggtgccatccgcccacgggaagtgtttggtttgacacaccagcaccccaccagaggtgccggtacaccacaaggtgctacatgtgctggctgcatcagggcagtgtttggagtcctccccaaatgtaaactggcactgccggttggcatcgtacgaggtgccagggagatcgcctgggagctgtatgggattctgaggcttgtccatcaaacattccccatgaccattatccagaaatgatgtaatcatgtaggcactgcaaggagaccaaggctggctgtggtccaggttggaaagcattgacgccatcatgtgggaatcctggttcacaccattaaggctggcacactgctttgcatcatcatgtggcatgttaaacacgtggcctaattcatgggctgtggtgaaggcagcttgtaaaccatcatcttctatgacggagcagcttctgctcggatcacacacagttccaacatcagccatcccaagagtatcacatgtgtggtccccacacaagtcctgtc

SEQ ID NO: 129690 - DNA, 1349 bp, Homo Sapiens
  misc_feature (1237)..(1271): n is a, c, g, or t
tttttttccaaaagtgttcttttatttctagtaacatatattgtataaatactctattttatatgcacttccacaaaagcgatataatttaaaagtttttttcattagaaataaatgtataaaaataaatatgttattataggcatttattactaactatagtccttcttggaaggaacacccaaaccaatacttataaagtacatgtaatttatagtaacatattttactatatacatatggaaaaaatcatattctcacagaagagctgaacagacattcaccaggatacgactgttggaccagctgctggagatggacctgctacccctcagcagcctccccaccacaagacaagtgatctcaatgtccccaaacctgtgggaccctgttctacacacctcatttttgttccggcgtttcatcctccttgtgtgattgtactgattttcatgagacacaagttacttctttacatccatattcccaaagcagggttacatggtaggaaagaaaggaagttggaggtactaagctcattgtgtctcctctagcttttaccagcatctaatgcttcactgctttttttccattgtagactttaatgcacttgaataaatacatggagttgttttttcctcaaaatgaattacacaaataaagactgagatggtccaaaaaaggaaagaggaagccatttgcgttatttcacgttgctgagcctttctctcatgttgaacaatctgaagttttaattctcggtagaaataatgtataaacattctctgaaaccatagcagccataaacagtgctggtcaaagatcctatttgtactcctttctccccccattgttagtgaggtaaagtaaaacaggtcttagtaaaatctcacttttctcctacttttcatttcccaacccccatgatactaagtatttgataagtaccaggaaacaggggttgtaatagttctaactttttttgacaattgctttgttttttctaaacttgtaatagatgtaacaaaagaaataataataataatgcccggggctttattatgctatatcactgctcagaggttaataatcctcactaactatcctatcaaatttgcaactggcagtttactctgatgattcaactccttttctatctacccccataatcccaccttcctgataccccggccgtaatggccgaattcccgggcatatgtccggtaccgtcgactgnnnnnnnnnnnnnnnnnnnnnnnnnnnnnnnnnnncggccgcttcctcgctcactaccttcgctgcgctcgtcgttcggctgcgacgagctagcgccctatagtgatctatcc

SEQ ID NO: 129691 - DNA, 1784 bp, Homo Sapiens
  misc_feature (143)..(151): n is a, c, g, or t
  misc_feature (472)..(577): n is a, c, g, or t
  misc_feature (580)..(580): n is a, c, g, or t
  misc_feature (1668)..(1702): n is a, c, g, or t
tttaccgccaagaggggggacacaagggtttttgagatttccccccgtcggcgggattctcagaggttttatcacactacccgcgttttgtggaagggggtttccacaatgttggcgcaaaaaaattttttaaagggaatttnnnnnnnnntttctttccaataaaatgggcccggggcgggggggtataattttaataattgggggttccgcttggggactccccgttggaaaaaatccccgaaaaggaccctccagaaactcccatttgggaatttgtttaaaaacccctctggttttccccccgggcgtttttttatttggggggagaatcccaagccctatgtctaggcccggggttttccttgggaaccaggtatgggcccaggttcccttcccttctggggccccggcgcccaacaggaatgtttttaaaaaggtttttgaggggccgaggggggcccacaagggnnnnnnnnnnnnnnnnnnnnnnnnnnnnnnnnnnnnnnnnnnnnnnnnnnnnnnnnnnnnnnnnnnnnnnnnnnnnnnnnnnnnnnnnnnnnnnnnnnnnnnnnnngtntccccaacatgtttaattttaagaatagagataatggtcaactcttgagaagaaccaaatgctggtgccatcttggaagtgctacatcacctcctcctcttacttccttgaacagcaatatttctggatttcttctgcaagccccaggcagtgcaggatgcgtttcttttcagcagccagttccttctcagagaactggcccaagagtttctggacaaatatattttgatctttcagaaatatgttcttattcactcctacatttggcacattctccaaggacccagacttgaaatggaagcttaaatatctgtttcgttttagaccaggtcctttttcttcaatccatgacagtggacttttcttctctgtctccagacacactgtcattttcatatactgatcttcctttcgctcttccaaagtggcagacacaagagaaagctccccaaagagggagaccagccaggtcaggcgagagatgccgctgaatgcagggaagccaaaccgctcttcttccaacgggccagctgtgaagaggagcgaccctttcagcaggtctttccccaccacttcttttttcaggaaagcgaattcctccatcaagagttcaacatgctcctcgtgcaagacttttcctttctgctcagccagctcccacagttcctgagcggccgccaatgacagtgtcatggggtattccacaaggacgtgcttgccagcattaaggaactgcctgatgtagtcctcatggctggagctctcactgcagatataggcgacctccacctcttggctggaaagagcatcctccaaagaaatctgctggactccatcaatgctcccgagctcccttctcgacacgaagccaatcaggttcaggaacgctgaggaagggtgtggattccgcaagtccctcatccgcacggagccggctcggccaacaccaaccaccaccacgccaaacttcctctcgggctctgtattcatcttggtctcttccttcggtcactgacgcgggcaccgctctccgtgcccccggccgtaatggccgaattcccgggcatatgtccggtaccgtcgactgnnnnnnnnnnnnnnnnnnnnnnnnnnnnnnnnnnncgccgcttcctcgctcactgacttcgctgcgctcgtcgttcggctataacgacgctagcgccctatagtgatgtatacactt

SEQ ID NO: 129692 - DNA, 1141 bp, Homo Sapiens
  misc_feature (1022)..(1056): n is a, c, g, or t
gataatgtccgaagtgtggaaatatccgagacagttgaagtagtaggtactggaagcaggtgctgtactctcagccggactcagtatgagattacctcattggtcaggagaagaaaggtacataccaagtagtaagtatgagtgttgaccaaagtaatagacatttttagtatttaataaattaaggaacatcccggagacagttatacaagttagttcaaaagtaaataatttcaggaaaaatgaactgtattattaccgtttaaataaaacatgaaaaaagatacttggatgatggttttaattttctccaatagtcttcatgaaggttttgtagctgatggcaatggagcttttcctttccacttagcagccttttccattttcatcctttcctggtatcgtctttcaaagaaagccatatcatcctcttcaggtctccttaatgaagaaacttgactacttgtacctacaatcccactgtcatctaaccgcatgtagccttccgccagcgagctgaaaccagttaatcctcccatggctgcataaggaatgtcctgtcccactggtttttcctgagccaatctttcttgcttagtttccactactgtgtcatgggcatatgcaggctgaccacaagcacaagtgaagcagctatggaatcctgaacacttggaacatgtattgcatgtaaagccaggcgcagcactgtgctgatcagcaaagtgtttgcacctgcagcgaatgggctggctaccattcaaggggacataaaggtaagccctgcactggcagccagtcacttggcagggcagatcaatggggcactgctgaggaatcgcttccaagtcagttttatgttgtttatacctccggtactccaggtactcgtccaccgccgccgcgccgccgagaggcaacgtcaaccgctccattgccggtggggaagccaaaggcttccctgcggaccccccggccgtaatggccgaattcccgggcatatgtccggtaccgtcgactgnnnnnnnnnnnnnnnnnnnnnnnnnnnnnnnnnnncggccgcttcctcgctcactgacttcgctgcgctcgtcgttcggctataacgacgctagcgccctatagtgagtctatagatttt

SEQ ID NO: 129693 - DNA, 1464 bp, Homo Sapiens
  misc_feature (42)..(65): n is a, c, g, or t
ccctcactgaaagggaataatgcttgggccgcctgctcaggnnnnnnnnnnnnnnnnnnnnnnnnaagataaggaatgtgtgtttagctttaatgtctattaaataggttggaaaaacaggccaagtgtagggacctgactcctgcaaagggcctaccgcagccctctgcactcaagcagcagccccatccagaccaggagtgtgttctgttctcctggcaggcagggctgataggtgtaggatggcgtctgtttcctttgcagtgtgggctggtcagaggagaaacagcaacttcctgctccttctcactgtgtcgttggctcaccatagaccacgtcctgcattccctctgattctctcatggggagagccctggaccttctggtggtgtcccagctgggtgggttcaaggctgctaccccgcttggggcagctggcctgcagggaagggccagacggcacctctcagtggagactgaatcttccttccttcaggaggctgcctccagggaagacctggggtccttcctgcgctcagcgctggctggctgtcctgttcatgcagtggaagacattacagaagaattcatacgagaagaacatgaagcctgtggagagggcagccttcagcaagctgggggacaggcccttgaagaagcccagggcgccttccttttgtagcacctgcttggcacagtccatgaggcccttgtatctccgtacctggccaaaggcagctctggcatgctcaaaccctccaacctgtagccgcttcttgaagaggtccagcggatatgtcagggtcttgctgatgacaccagctccactgccacaaagcaggttttggaggttctcatttttctttccttcggctggtatggcccacttgtacaggtgcttcaaggagctgtagcaagagaactgcagcccggcgtaggggaagatggcgatcaaggtgggagccaagcctttgtagaaaacctgggggccttcgctcctatacatggtccccacggcgtggcgcagcgtattatagaccttgggctcaccctgagctgcaaagcgggtgcgcagaacatccacggggtgcacagtgagggtggccatacaggcagccaggccaccacatacaaagtgcactgagaattcccgggcgtcgtacacgctgcctctgtggaccagctccgtcagcatttcaaatgacaagaattggacagctccatagcctatggagagaatctgagctgggacgtgtcctttccagaaagctgtcggaccctcctcctgcagaatctgcctagaggcctggaggatgccatggtactttgcgctggggtcactgcgagacaggcgctcatgctgaagacggctcggcgggtgcggcccggctccgcgctctccgctctctctagctcctcgcctcgtgccgattccaacccaggcctcgctacctagccgtaatt

SEQ ID NO: 129694 - DNA, 1025 bp, Homo Sapiens
tggccgccttaaaaccgggcttcctttgccccctggccatccgaggcccttatttcctacctgccaaggcacttgcaatgccaaccctcacccttaccgcttcttgaagagtgcaccgaaatgttcagggtctgctgagaccccagctccactccacaaccaggttttggaggttctcatttttcttcctcggctggtatgcccacttggtacagggtgcttcaaggagtctggtagcacagagaactgcagcccggcgttaggggaagatggcgatcaaggtgggagccaacctttgtagaaaacctggggccttcgctcctatacatggtccccacggcgtggcgcagcgtattatagaccttgggctcaccctgagctgcaaagcgggtgcgcagaacatccacggggtgcacagtgaggttgccatacaggcagccaggccaccacatacaaagtgcactgagaattcccgggcgtcgtacacgctgcctctgtggaccagctccgtcagcatttcaaatgacaagaattggacagctccatagcctatggagagaatctgagctgggacgtgtcctttccagaaagctgtcggaccctcctcctgcagaatctgcctagaggcctggaggatgccatggtactttgcgctggggtcactgcgagacaggcgctcatgctgaagctggaaacggatcttgatgacgtcgaagggactgatcagcgcccgagtaacaagtccagacacagacccagccactgccacctggaacttggtgttattcctgccatctggtttggggtcatagccaaccatccctgcctctggcccacacatgtccatcagtatcaagatacggtctgtagagttgtacaagcatagaaagaagtctgtaaccacacacatcaacaggtagttggtaactgatcacagggagaagggacggctcggcggtgggcccgctccgcgctctcctcgtgccgaattcccacccagcctcggctacctttagccttatatt

SEQ ID NO: 129695 - DNA, 1097 bp, Homo Sapiens
gccctagcgggaccccgatttctggaaccgcctgggagggcccccccagtgggccggcctgaaaacccgggcctccctttgtagcccgcgtggccaactccatggagccctgtatctccgtacctgccaagccagctctggcaagcctcaaccctcaacctgtagcgcttcttgaagagtcccagcggaatatgtcaggtcttgctgatgacaccagctccactgccacaaagcaggttttggaggttctcattttttctttccttcggctggtatggcccacttgtacaggtgcttcaaggagctgtagcaagagaactgcagcccggcgtaggggaagatggcgatcaaggtgggagccaagcctttgtagaaaacctgggggccttcgctcctatacatggtccccacggcgtggcgcagcgtattatagaccttgggctcaccctgagctgcaaagcgggtgcgcagaacatccacggggtgcacagtgagggtggccatacaggcagccaggccaccacatacaaagtgcactgagaattcccgggcgtcgtacacgctgcctctgtggaccagctccgtcagcatttcaaatgacaagaattggacagctccatagcctatggagagaatctgagctgggacgtgtcctttccagaaagctgtcggaccctcctcctgcagaatctgcctagaggcctggaggatgccatggtactttgcgctggggtcactgcgagacaggcgctcatgctgaagctggaaacggatcttgatgacgtcgaagggactgatcagcgcccgagtaacaagtccagacacagacccagccactgccacctggaacttggtgttattcctgccatctggtttggggtcatagccaaccatccctgcctctggcccacacaatgtccatcagtatcaagtttttcaaggctagctcctctcatccaccagagctcagctaaaaagcatcccttccaggagatgtacttttttcacggctcggcgggtgcggcccggctccgcgctctccgctctctctagctcctcgcctcgtgccggattcaacacccagcctcgtactagcc

SEQ ID NO: 129696 - DNA, 1712 bp, Homo Sapiens
  misc_feature (532)..(542): n is a, c, g, or t
  misc_feature (547)..(619): n is a, c, g, or t
  misc_feature (621)..(624): n is a, c, g, or t
  misc_feature (1598)..(1632): n is a, c, g, or t
ccgctttttcccccatgggggagaaaattttatatccaagaggggaccacaggtgtgtaagatcccccgggggggatttcagggtttcaccaacccgcgttggggaaggggtcttccccgtgcgggcgagaaatgtttaaaggaattttccacccggttttttggaaaaaagtggccccgggggcgggggcgtataatttgatatattggaggcccccgcttggaacccccccgggggagaaagatccccgctaaaaggaccctcaaggaaactcccctttggggatttggtttccaaaaagcccttgcggttgttccccccccgggcgcttgttttttatttgggggtggggaaatcccacaacccccctatgtgtccttgggccccggggggttttcccttagggaaacccagcctttaggggccacgaggtctccacttttccccaaatgggggccccgcgcgccccaaaaaggaaatggttttggaaaaaacttttttcgaagggcccgaggggggccccaccaaaannnnnnnnnnngtttnnnnnnnnnnnnnnnnnnnnnnnnnnnnnnnnnnnnnnnnnnnnnnnnnnnnnnnnnnnnnnnnnnnnnnnnntnnnntttaaaaagaaaaagtgtttattataggcaacaacaccaatgggaactggtatttgtctacaccaagggagtgcaatttttcatcttccaatggcggcctcaaccttgaggcgaatccactggcgaaagatgcctttctaggaagcagagctccctgactgggctaagatagttcagattgatcttaggtcaatggtaagacctatgtagttcatgaagtcttggcttttcggcgctgggtcgcccaaagcagaatggagacggatagagtggtggctcccagaatcccgaagaacataagcagtgagaacgagccctggcgcatacacttgtatccatggaaaccatcagcacaaacacactgcaaaagacctggaccatcaggtacacaagatccattctcaggacacatttctgggtccccagtgttattgcaaaggttcttttgcccttgacagatttggttgtctatataagaggtgatagtattccaggcattaattcctccaggacagttgacatgttgtggcagtatcagagtctggagctgagtaaagccacggaaggtgttggccaagtcacctttgagggggtttgcttgcaggtctatgatgacagtggtatgtgcctgatgaaagtttggaccagggtcctccagagaacagttctggagatccagccccaagatggtgcccttctgattcaggcagcaacgggcatgcagcattagctctcgtgtcgttttacaataaaaggccacttttgacaaattttgcacgctccctggacattgggtgcatatctcgggtagcgccagagccctttccacgcccagagcgaggagcagggcggcagcccagggcaccagggtcgtaagactacccgggccgtgaggcgccattttccgttcccttggtgctccccccggccgtaatggccgaattcccgggcatatgtccggtaccgtcgactgnnnnnnnnnnnnnnnnnnnnnnnnnnnnnnnnnnncggccgcttcctcgctcactacttcgctgcgctcgtcgttcgctaacaacgagctagcgccctatagtgagtcgtataca

SEQ ID NO: 129697 - DNA, 1055 bp, Homo Sapiens
  misc_feature (937)..(971): n is a, c, g, or t
aatatccaaggatctggcaaggaaagccaagagttcagaagtctggttttcgcgtggttcgccaaagcagaaggagcggatagatggtggctcccagattcccgaagacatatccagtgagaacgaccgtggcgcaaaacaactggatcccagggaaaccatcagcacaaacacacggcaaaagacctggaccatcaggtacacaagatccattctcaggacacatttctggtccccagtgttattgcaaaggttcttttgcccttgacagatttgcttgtctatattagaggtgatagtattccaggcattaattcctccaggacatgttgacatgttgtggcagtatcagagtctggatctgagtaaagccacggaaggtgttggccaaggtcacctttgaggggtgtttgccttgcaggtctatgatgacagtgtgtattgtgcctgatgaaattttggaccagggtcctgccagagaacatgttctgtagatccagccccaagatggtgcccttctgatgtgtcaggcagcaacgggcatgcagcattagctctctgtgtcgttttacaataaaagtccacttttgaccaattttgcacgctccctggacattgggtgcatatctggctgggcagggtcgggaagcgtcagggacgaaatcagaaccgcaggcccgccgaggagaagggggagccgctggcgagcgcgacgcacggctggccagtgaccctgcttcagcccgacctcaaacttgcttctgtacctcgggtagcgccagagccctttccacgcccagagcgaggagcagggcggcagcccagggcaccagggtcgtaagactacccgggccgtgaggcgccattttccgttcccttggtgctccccggccgtaatggccgaattcccgggcatatgtccggtaccgtcgactgnnnnnnnnnnnnnnnnnnnnnnnnnnnnnnnnnnncgccgcttcctcgctcacatgactcgctgcgctcgtcgttcggctgcaacagcgtagcgccctatagagtctataagtcctttc

SEQ ID NO: 129698 - DNA, 887 bp, Homo Sapiens
  misc_feature (29)..(29): n is a, c, g, or t
gggaacggaaaatggcgcctcacggcccngggtagtcttacgaccctggtgccctgggctgccgccctgctcctcgctctgggcgtggaaagggctctggcgctacccgaggtacagaagcaagtttgaggtcgggctgaagcagggtcactggccagccgtgcgtcgcgctcgccagcggctcccccttctcctcggcgggcctgcggttctgatttcgtccctgacgcttcccgaccctgcccagccagatatgcacccaatgtccagggagcgtgcaaaatttgtcaaaagtggccttttattgtaaaacgacacgagagctaatgctgcatgcccgttgctgcctgaatcagaagggcaccatcttggggctggatctccagaactgttctctggaggaccctggtccaaactttcatcaggcacataccactgtcatcatagacctgcaagcaaaccccctcaaaggtgacttggccaacaccttccgtggctttactcagctccagactctgatactgccacaacatgtcaactgtcctggaggaattaatgcctggaatactatcacctcttatatagacaaccaaatctgtcaagggcaaaagaacctttgcaataacactggggacccagaaatgtgtcctgagaatggatcttgtgtacctgatggtccaggtcttttgcagtgtgtttgtgctgatggtttccatggatacaagtgtatgcgccagggctcgttctcactgcttatgttcttcgggattctgggagccaccactctatccgtctccattctgctttggggcgacccagcgcccgaaaagcccagacttcatggaactacatagggtcttaccatttgacctaagatcaatcctgaa

SEQ ID NO: 129699 - DNA, 855 bp, Homo Sapiens
  misc_feature (660)..(727): n is a, c, g, or t
tgcctttgttcattatttcaaccacagctcctaaactgagcctgatatatagttggtactcaatcaatattgactgatttcctgccaaaaaagctcaatggggaagactcctcaaagtctaggacagctaaagaaggttgaaattgtcgcctactcctgtttggggtattgaggtactcagtgacagataccacatgcaattagttccttaaaataaagaatacgagattaaaagaggaaatgtagttaaatactgaaattcagcctaaagatggcaggagaatggtttgagaagtggtatagagtaatgaggtggaaaagggggaagagagtgagagcaccacacaaaggacaggaaaaacaccagcaatacatcagctttacacagcaggcaagtttcctgctctctacaagtacagatggaacttgtcttgtgaattaacatcctgactacttttgttgatcatcacattttttcctcatgagagaaataatagtgttttataggctcctgagaataggtttactaaagtcatcgagatctgggttcaaatgacactgcttagggaggcattcactgatcaagttacctaaaatagcaacaatctatcatccaaaatatcatttgccagctttgattttgcatataacacttacttnnnnnnnnnnnnnnnnnnnnnnnnnnnnnnnnnnnnnnnnnnnnnnnnnnnnnnnnnnnnnnnnnnnncagtctgcaataaaatgtatgcttctcaggggagaaatttttttctaatacattcagtgctctatacccagaacctggaacaataccttgtacataataggtgatcaataaatacttactgaatattg

SEQ ID NO: 129700 - DNA, 2344 bp, Homo Sapiens
  misc_feature (48)..(74): n is a, c, g, or t
aattaaccctcactaagagggaataagcttgcggccgcctgctcaggnnnnnnnnnnnnnnnnnnnnnnnnnnnccatggcaaaacagccctttatcaagagttgcaggataaaaatagtctttgcagccagacatccctccaggcatgtcttctgacctgagaggggccagtgtcctgtacagtagaagccggggtttccgtgctgcacccgcagcaccagggcacgcaccgtggggaggcagccttgggctgtgcccgcgacagggcccctgcatgctgagcaacagcctcacatgagcaggcagcacggcctcctctccacgggagcctccaccgccggggctgtgagcttgagcaggggtgggtccccgcctgccctgaagccacagtcaggctggggggtcaccgtgtcaccaggcaggccaggctcagctgtctcagggctctcgggcccctcaggtgggggtcgctgcagcttggcagcagctcgctggcgcttcaggtcagccagggtgtggtgggccttgtcgtggaccagggtgtggggggtggtgctgtccagggggctcagctggtaggagacactccggtctagtcgcttggagtatagatgccgcactggggagccccctactcggccattgtgcggcctgaccacttcggggttgtcctcctccgggggcggcggcctgagctctgcgcctgtctggcggtcatcgttgtcctcgggcggctccgggctggtgggcggcggctgttgccacacgatggcctcctgggcgtgctgcttgcggtacaggtcggtgcgctgggttaggctcacccgcttcaccaccttcccgcggttgccggcgctggaggtgcggcggcgcagcaaggagcgctggcggctctgggcgcgcaggagggcgtcgtgcttgtggttcagctccagcaggttggcccgcacctcttcgtccccgcacacatcaaggggcgtctcgtccatcagggactttgcgttcaggtcggccccgtgcgccacgagcagctccaccaggggcacctggccccagtaggccgcggcgtgcagcggctcccagccgtcttggtccttagcgctcaggctggctcggtgttccagcagcagggcagccgcctcgctgaacccgttggcggctgcgacgtgcagcagcgtggccccgtggtccaggggggcatggaggtctgccccggcctgcagccggctccggatgtcgtccagcatgcgcagttctggcacggcccgggcggcctcgatgctgtcctgggtgatgccacggtcggccatggcagtctccaggcagtccagcgtctgctcatcatcacacaggtcatagggcatgttcccgtcggtgttgaccgccaggagattggcgccactggcgatgagcagctccaccaggtgcaggtggccgcaggtggccgcagcatgcagaggcgtccagcactcactgtcacaggcattgatgttggccccagcctccaggagctgctgcaccatctctcggaaatcatcaatgcagcactggtgcagggccgtcaggccgtcctcgttggccaagtcagggctgaccccactcccaaggaactggcggacttcttccaggtcatttcgggcagcggcctccagaaggacaacactgggagggaagaggacctgcttcaggagcccttggctggctgcctccttccggggacgctccccaggacccttcttgccctgggcctccttgtcagcctgggcccacatcttcacctgctgggcgcgccgcttctgggcatgcttcagccgctcctgtgtgctcatcctgcccaccatgggcatctctgccagcagctccaggtgctcggccatggcggcggctgcttgcccacagggctgctcggggcaccagagtggggagcttgggggccaggctgggcctgaggggtggggcagctagctggactggcaccctcgggggcatccccttcccagagcttcgtgcccttggctgggtcaggaggccccacacaataaccaggcccaggcagccctggggggcatgggccggggcagggagggcagtgtgggagggcaccccaaacctgctccccaggccagcctctagctgtcgacaagcagcgcctcgcctccctctcggggtcagggtgcacaacctatgggaggcagccccgagacctggccggcctcagtgcagggtctgaaactaattacccagataacaaggttccagcttccgggcaccctgctgagggggaagggagggcagggccaaccagcagtgagagcccctgtgagcccctagagtctcttttca

SEQ ID NO: 129701 - DNA, 1439 bp, Homo Sapiens
tatagttctgccatatttattaaatggctcttgaagtatttgatctgtggttgaaggcagaagatatccacaatggtttgaggagctctgtcttcagaaatctttttgtaaatcactcttcttaagaagttctccttttcgggatttatccagattttcaagaaaatgttcaaaaactttcacataaggtgctagactggtcttcttataatctctggttctatgtttgacatcagattcagcttcattctcctctttttcctcttcattagtggaaatggcatccaattcacggcagatgaagcttatggtcggaacagtaaatggatcaaactggtccactttctgcaaatcaataggcacagagatgcgacctgttttaggatgaacactaaaagggctcttcagtagatgattgattcctttgctgacattgatatccagccgtggaaaacagtactggagcataatctcccactccagccagggtccatatttgtcatttttgatgttattctgatatctgctggctactttcttcaagtgctcccaacgctgaagtgaattgtgagacttttggaagctttgttgaagttcatcatgaattgtttcaggaacaagggctaaaatcttatcccagctttctttattttcgagaatatcttgattaaccaaggcatattcttcaaagtatttttttattatgtttatagattttctgataaaagggtgaattttttcacttaggtgaactttctttttaacgtcttgaccaccctttacaaggctcaaatactcaactatcccagaacgtactgcagaagacagttttctaactgattcatcacagacccaacaatgaacacctctccttccagaatatacccagagacgatgcttaaatccaaagtcctccttcaatgctctgtcaatgatgcgtatggccattgtcatgagggtccagcacttaggacatatgtctgcagaactacaacatctcctcacatcgtcatagtctgtcatgtcaatgtcaaataccagttctttttcctgagcctggaaagctcccagcttcactgtattgtgttgattgggtctgtgagaatatactgcgcctatatcaatcttgtatggattcattttctgcatctccttttccagatcactctggttgttgaaggattggtagcgaatgtaaatatcatctttcaatgtgaatgaaaattcacggtgttgaaagtaattctttatcactccaccgtagttgagccagcgatagtactgagagtagggaaagagcctccggtaataaagtttaagcagctcgggcagctcggtggggtcaaacgtctccattgagcgcggaactcgccacggtaagcctcgtgccgaattcgccacccaggcctcgctaccttaagaccgttagagttactgcc

SEQ ID NO: 129702 - DNA, 236 bp, Homo Sapiens
gttttgtccatttttattggatttttattcaattgtaaaagttctttatacaagtcctacatcagatagaatttttacaaatattcgtcctagtctatggcttatcttttcatttttaatagtttcgtgcattttgagaaacaaaagcgttttattttgatgaagttcaatttattgatttcttctatcatttacactttttgtgtcatatttaagaaatctggccaggtgccaag

SEQ ID NO: 129703 - DNA, 407 bp, Homo Sapiens
gaaaactaaagtacacatatttattttaaaacatttgtcatatttgctaataaattgataaggaacaaagaacgcctgaatctacttaaaagaaccttaatctcaaatgaagtaaaatatataaacaatcagcaaaattcttattaacttgtagaaatgtaatttatttcatgcaaagctacattctttcctatattttaacagctaatcaaataaacatttcaaaaaattcattacatcacaataagttaaaatactacaaaggaactgcaagtcaatcaatttatcaaaaccaaactgagcgaacactatgcatagataaggccaaagttactaatttgcttataggtagcactttgcagctttttccaagtacatatttgaaaatgtagtgagaatctacagag

SEQ ID NO: 129704 - DNA, 760 bp, Homo Sapiens
  misc_feature (693)..(693): n is a, c, g, or t
tttggttcaggttgtctttattgatatgttcactcaccagagattctacattctacgtaaaagctcaaatcgccagatactgttattactattttaggagggcttggctaatacaaatctggaccaaatgttggcccatgctaaattatatcaaaagaccaaacatccaagaaaggcaggaattcaaagatttcagaagataaaaatgcttgattgggtccctggcatgcacccagcccatcaaccccctcactgccctctggcaggacccagaagatgagctcccttcttgccacgagaaatacattcacgaggctctgctgattttcctctctaggcctgggaggctgcttgaaagagctgctgtgaacgtgggctccctgatctcagcaacagagatagacagaaggaacaaaatagggcgctcatcgtaagggatagggcatggaaaccagacctcgagctgtgggtcccaggaatgaaaaaggccagacgcccctaagatatggcctagtaatgaccttaactaaagacttctgggccaacagttctgtctcaagtgccaaggtaaagtcaagatctcccacttgatttccagaccttaaatggagaggaagtcaaatgtatttttgaaggaaaacttattttaacacttagatgcatgttgtgaaccttccttgcagccttccccanagaggtctgtatccattcatctgggactacagaagggacgggaaattggcagctgcccagtgccttg

SEQ ID NO: 129705 - DNA, 550 bp, Homo Sapiens
aaccatttgttaaaaaaatagcttcttttatattgtatgaacaagttggaagagtccccttgcgagtgctcactggccaggtccccactgtgcacatgggtaatctgcaaattcattcagggtctttagtttctttcttacttctcacatgtctgctttaccactctggtaatgatttgggttaaaacaaccgtttctttagtaaatactatctttctgattcctgggagagtcatcaagacacgactggggtcatatcccacaacttaataaccttgtcagttccagaagtcagtaaccatcctctggttgcatcgaaatgcacatgcacaatgttatgtttactgtcatggaaggtggctgtgggtgcacgttcttcatctgtgatggcctcgtggcagctgtcacagaccctcacttcaaactcgaagcccatcagggggatggaggagcgcttggagctgcacttgccacagacggccttcccacacttgcggcagtggtgctgtcttagaccaattttcttactgtcccacatttgcttgaagtt

SEQ ID NO: 129706 - DNA, 861 bp, Homo Sapiens
tttgaaggtgattaattgtctttattggaggaaaacaagaagtcatcaatctcattatcattatgatagaaatcttgatatgtatacatgattgtcaaggcagagaatcatttgctacatagacccatgaacaattttgcagtgccgcaaacctatgtgggttaaacttcttgcagagtttattacatgcatggaataaattcacagtttcccttcttttggacaaacatgtttttatgggaaaattgaaccaattgcaagcctggtaatagtagatgtggggacattcctggttttgatgttgtaattttttgggaagcatgctcactgttgggggagctgaaagaagggagattacattatgtgtagtgacaaaagccaattgagagattgttccaatgtttattctggacagagggtacctttgaggtcttctcacctgaacgtgggactaagataaatgttctctgaaacatggcgccccatctttcgaagcaaagactctgctgcatgcaatgtcgctgcatttctgccaccattcggacagcatttcatgtccctctgatagggccaagtgccccgggaaggagagtggcaggtgtcagggctgagagacaaacatccgagctgatgttcttgttcctttttagctctctcgcagcctggctgccaaccacgtcccagggcccctgtgccctgaagtgcagggcttccaggagagcctgggaatctgaatctgtctagattaagattttcctccgagaagcaatttaactagagtttggggtttctgagcccctgctgaagtcttatctctaagagtaaaaccaactcctcctcattttcttttttcctgtccat

SEQ ID NO: 129707 - DNA, 608 bp, Homo Sapiens
  misc_feature (423)..(432): n is a, c, g, or t
ggcacgaggttttatattgaagcaataattccatttttaccctttgaaataatgtttttttgatttttgatgtttggtacaaatagaactatatatatttaggtaaaatagatctatcgtgtttaaaaccaaagaaatcaatggaacccttgcacaaaaaagtgtgataaatatttttaaataaaaacttaatacaaatgtaatttgttaatattgtttcatgttttatgtgtagatctaatagctgaactgattcaaactgtaataagctcatcaatttcatttctatgaaaatgtgctctgttgtcacaggatgtttctgttgattttattcatttcctgggaattggtaaacatcatgttcctgatgataacccagtagcaaaaacatttgtactgagtggtacaagccttggggactgnnnnnnnnnngattaaaaccattaaaaagaaactcatttttacgctgaatgaacatttatatgattgcattgggaccagtcatttcctaagctacatatggccatcttgacagtgttttttcttttgtgtgtttaattattatgtgtaaatcataaagacaaataaatttcactgtgccacccagc

SEQ ID NO: 129708 - DNA, 1057 bp, Homo Sapiens
  misc_feature (345)..(354): n is a, c, g, or t
ggaattctcgggatcgggctgctacatgtactattttcagtatctgagcaaaacctactgcgtggatgcaactagagagacaaatcgcctaggaagactgatcaatcacagcaaatgtgggaactgccaaaccaaactgcacgacatcgacggcgtacctcacctcatcctcatcgcctcccgagacatcgcggctggggaggagctcctgtatgactatggggaccgcagcaaggcttccattgaagcccacccgtggctgaagcattaaccggtgggccccgtgccctccccgccccactttcccttcttcaaaggacaaagtgccctcaaagggaattgaannnnnnnnnnacacacttaatcttagcggattacttcagatgtttttaaaaagtatattaagatgccttttcactgtagtatttaaatatctgttacaggtttccaaggtggacttgaacagatggccttatattaccaaaacttttatattctagttgtttttgtactttttttgcatacaagccgaacgtttgtgcttcccgtgcatgcagtcaaagactcagcacaggttttagaggaaatagtcaaacatgaactaggaagccaggtgagtctcctttctccagtggaagagccgggaccttccccctgcacccccgacatccagggacggggtgtgaggaagacgctgcctcccaatggcctggacgggatgtttccaagctcttgttcccctaacgtctcaacaggcgctcactgaagtgtatgaatattttttaaaaaggtttttgcagtaagctagtcttcccctctgctttctcgaaagcttactgagccctgggccccaagcacgggccgggcatagatttcctcttccacaagctgccgcttttctgggcaccttgaagcatcagggcgtgaaatcaaactagatgtgggcagggagagtgttgcttacctgccctgctggggcagggtttcctgaaactgggttaattctttatagaaatgtgaacactgaatttattttaaaaaataataataaaaattt

SEQ ID NO: 129709 - DNA, 750 bp, Homo Sapiens
  misc_feature (99)..(99): n is a, c, g, or t
  misc_feature (127)..(127): n is a, c, g, or t
agtctcagtgccagtttcccaggacgagtcaaaaactgcagctgcttggaggtgagaatcttccaaggctccagaggccagctcgctgtcctgttcatntgctgacatgctgccgggagcagcttcnagagaaacccgttctattcttcgggtgattcagccagtctcaaaataaaataggtagctgagtgcagggagaaagaactggaaaccactgaaatttgagtcttgagggctggtctgttctcgggagctgctctgttgaactctaaaaggaatcttgagccctgggcgagggagtggcctgacctggtggaaagactgcgggcctgcccgtggagtctatgtctggccctgcctagctcagtcaatctcagcagctcatgtctcctcttagaccctcagattcctcatctacagaaggagaaagaagaggagattgaatgatttttaaggtctttatcagcttctaaaagtttgatttgatgtttgtaggagcaattgttctttcaaagcaccatcttctaacctcaggaaggaaagcccaggggcccctgggatgtcctgccaaactgggaagacaaagattgtgactgagaaggtgggggcagggcaggagaagggggaagaagggagaatggatcaaccccaggccggggaaagagatgaatgaaggtccacgccagagtgacatgctctaagtaggggaaatcttcctaactagagttcccatgactttggcaacatttg

SEQ ID NO: 129710 - DNA, 1004 bp, Homo Sapiens
catttggacaagcttaaaacacgatgtggctcgtttttattttatctcagaaaaaaacattccctttagaaggaaaggcagttagacaaggcctctcactgggtagctctgcgctactcagcacatgccagtggcctgccagccccaacctctcccctgggacctgggcccatgctctggcactgctctgttacaactccctgtccttgatcccagctttgtcactccaagagatggccctgggactgagaagtggatggcagctgtgacagcaggagaggactgcctgaggctccccgggcagaggctctggtgccaggttagcagcaggaccgacggcagacccagcagccagagagtgaaaggtaataaaataaaaagggtttcctcacacttacatttttcctggaaaaaagtcaaatgtcacctctgggcccagcagctcctgaaccctaggagagtctagggagagtggtgtgtgggtggcaggaggctgttggagccactccccagtctcagggccaggccagtctgctgtgcccaagctgctctgtggagacaaggtggtgcttccagatgcttctgcagtggagggctgggccctgcccagcaaagatgctgctggtgctgtggcccccacctggtgcaaggcctcacagcatgaaacatctgcttcctcagaacccaagcccttcttgctgggcctcatgctgctccagcctggggctcccttctctcagtccaaagtaggaaccggctgccctcagggtctcctggcactctctctcttctcccaacgtgactggtcaagccaaccagaaagataaagatctccttcccttaggaaggggcaaactccatgaatcatcaggacactcctgctccatcctgggccagggggtcatctaggccagggggctctgggcacactcccttgagctcatggctaaggagctccacgtctgggaggcccgtgttcccctgggactcttgggcctcgtgcc

SEQ ID NO: 129711 - DNA, 1208 bp, Homo Sapiens
  misc_feature (732)..(732): n is a, c, g, or t
aatattttaacatttttcttttaattgcaattagacaaatgagattttctttatatagttttaacagtcagaagtattttacttttaaaatctatgaactagttaatggacaatattttaataatctggtatattaaattcaaagtttaacatctggcaaaactttgcttcacaaattcacttttttagaatgataggaaatatatacaactcagaatccatgtttagacaaatgcccttttcctttcctcaacataaaagctttaaaaagtgcagtataaaagttttagatatgaaggcactgcataacctgcatcatatggctgtcttgcttagctgcaagaataatgaaaatattctacctcaattttatggagcataagaaaattttttgaggaaggacttaactctcaaagaaaaagaaaccttttaccccatttagttaatgaattcctttccaagattgcttttcaaagatttgttggaaaagctatctagagtatgtcaaccacaaatatgcctgatctcattctgcatgagtgtcagaggaaatggggaagagtactacaggtgtgaaaatatatatatttccaaaatagtaacgtatctattataataaagctaaatatacctttctaaatccatggtttttatataaatactgccaataacatgatctattaaaagaatttttaaaggtcatggtatttttagaaatcaaatgaaccaatntgagccattataatcccctattcttaaacacagggagtttgtattttctcccgatattgtatttggtcttgaattcactggacaataatgatgtatgattcaagaaatgctctgatattctaaactctgttataaggacaaaaaccatagccaggggaccttattaacaattagccatatttgttcttctcttaccaaacaaaccaaatgctgtccaacatctcatgaactataatagtagccataagaggcttcacggtggcttgggaaattggatcctaaagttcttggtagcatatagttgatttcaaatcctctttttaaggacatgccaaaaaagaatggaaatctgccccttaaattaaaatgataccatatgtcttcacaggaagaaacattttagttgaagtaaactttgttctttcaaaggccagtaaaatagtggtccaaagactgtctgggaggccaagacatcc

SEQ ID NO: 129712 - DNA, 858 bp, Homo Sapiens
actcccacgccgcgctgttaccgctccctctctgctgactgctccccctaggggcagagacggtcccgacgcccgccatcccgccccggcctcacccctccccgccaggcggaacgacgcggggaggcgggcgctcggggctcgcgcccaggggccccagaatccttcggggagagtgggtgggaggaagctgtgtgggcggggagccccctctgccttagggagcggctgggcacccattcgccccattcaggggctgcactttatagacgttccctaggctgtttctaggctcccccaagtccctcctccagcctcgtcgggtccctcagaccccagcccaggacctgcggagggccgcagcgaggagaggccaacaggcctttccctagagttgaacctgggccgggtgttgcatctggaagaacccccgatttcctggggacccagcagggcaggcggcctggctccgcgctcaggtccggacgcttgtttatgagaagaatttcctctttcttaaaagggcaacgatgcgagtgggtccctcaaggagagaagagatgggaccggtctggtgcgacctgggcaagcgctgcagagggtacctgggcaagagggccgcccgcctcctctgggtttggcactggagaagatgggtccatgccagctgaaggaggagatggatgggggacgtttagcgaagaaaggcatctcccagatcctttagcctcctggaagtgcccccgttgtaccccctacacacccctcttggcattgagtgccagtcctctgccaggctctgtgttacaagttggggagggcggcaaagtcccgaattaaagatgtcagttctcaagg

SEQ ID NO: 129713 - DNA, 803 bp, Homo Sapiens
tttttttattttatagaaaaataagctttatttcaaagcaatctgaaaacagcagtcagggggaccacatttacaaactgataggaaggagcacacagttacatgtccatttagcaaggtatcaagtcaggaatctcaccaattcctgcccaacacctactgagtttcctcttcaggttgaaactaaaaagtagacttgaacatcccagtgatgtctttgttatccaaacatgctccaagttcaggaaagaggacacctgggctcaacttattgagggatttgcttaattatttaaaaaatatttacatgagaatacagctaagttagtagctttcttcacattttcacgtttcgaaagagccacagaggtttcattcatgttttaaccagttgagttggtaaagaccctgtctccattttgtaagagatggattacattcaattactcctcacgacagccaaatggaagattattctattgcttttgaaagattattccattgcttttgaagtgctggttggactggcatctgcaatggtagccaaataaatgagatttctatgtaacacatgctggtactgcacgcactcgttcccgcggcccttgttctgatactccacaatacagcggatcagctggtcattctcctcaaggagccgctggatagtctcttgattgacttccgccttgcccctcagccagtccggtacgaaggccaccgacatcccgaggaacctccggaaccacgacccccggccgtaatggccgaattcccgggcatatgtccggtaccgtcgactg

SEQ ID NO: 129714 - DNA, 991 bp, Homo Sapiens
  misc_feature (159)..(159): n is a, c, g, or t
  misc_feature (724)..(724): n is a, c, g, or t
  misc_feature (830)..(830): n is a, c, g, or t
  misc_feature (837)..(837): n is a, c, g, or t
  misc_feature (920)..(920): n is a, c, g, or t
  misc_feature (940)..(940): n is a, c, g, or t
cacaatcaaaaagagatgattattactttattaagttagcacagattggacttttacaaattgtagaaatggtcaacaaatagaattgtcctattaggggctgatattcagaaaatatataatcaactgttggtgtgataacaggataaaattccaccnctgtatatgagtaattccatttttatccatccatttacaataattacttctcacttttgtttacttagtcatatacagagtgatataagtgatcgtcaaaaaggatccattttcaatgatttctacaccatattatatgtattctccactggaaaatttatttttccttaggtctttgaagtgtgaaaatatatacatatgcctgatcttatttctaaaaatgcttaaatcaataactacaaataccacatgaccacatttatacactatactgtcagaaaaatattttagaatattttgagtcgtgaatagcttatgatttcagtggtgttggtgggtataattgattgcttttcactttcaagcacattcaaaatttattacaaaagaagaatggtgaaacaaaatatatgatctgctcttggtatttcaggatgctcagcagtcacacagaaacaaatgtttaatttcttgaggaagcagaacaacagcccttcagagaggggtgagcctctcatcctctgtcatgaaggcatcattaatatgccctcccttcatgtccagnggatcagaggggatgcattttcaattgtgatcatgttctccacttatcttcagcgtcatcacttcagatggttcttgttcttttctctacgtgcagatcctgatanatcagtntgcattgcactatatgatgcaaattcacacaatatatatcagattgcacaatggtcatggtgtgcagtgtggaggattttaanatcaagttgtcattaaagangatgttatcggtctgtcatctaggcgatgactcacacagaggggtatttta

SEQ ID NO: 129715 - DNA, 871 bp, Homo Sapiens
ttttttcatttgcaaaacccctttaatcagaataaatagagtcccaggcagggcagagttcattggggatgcccaagccggattcacccacccttccagctccagcctaggcgcagctgcggctttcgagaggcgaaactgtcttccttgtcctggtgtcccagcagggtcactgggaggcaacagtgtggtctcagggtgctgggcgggcccgtgaggcccatcgccgtccccctaggcatcctgttcatctgtgagcagggcagggggtgccgcagcctcctcggttgtcccaaccctgctcctctcctccctctccttcctctcgtagatggagtgaagcttgttgattaagaagattttgtcctcaccctcattgctgatctgctccttgagcaggcagatgaccttgcgctggccccgcaccacctggatgttgaggtagatcacggccagcagcagggctgacaccaggaagacaaagaaggtgttttccatcaggtaccggtgcacccagggcagccaggagaccctggggcctgccgcctccaggtggcgcacccacaccctgccggcctcgtacatggtgtccagggtccggaaggggccgcaggtgctcgagggcttcacctgccagacggcgtagcagaggaagacagcggcgcccaggaaggcggggaagcagagcagcgtgaggaagacagtgctcatgtgtgaggccagccagggccggcgcggcgcctggcagttggccagaaggctggtcttcggacgtgtggacggacgcgtgggtcgacgatatcccggaaattccggactcgtcccagccttgttttttacaccacgtcagggttcgtctatatatggggtg

SEQ ID NO: 129716 - DNA, 1622 bp, Homo Sapiens
ttttagctttaaaaaagtgttgtttactctcttagaactgacagacttattgccagaaatcactgatgttcattgtttttgcaactgtttgagctgctgtaagagtctaaagttgacaagttagttcatgttaggtgcatctttataaagcaaagatgttgtatatcctaggcctcccttttatatttgatagaagttatttgctaatagcttctattcttacgttgaaaatagttgtaaaagctgatgaacctgaaattgtgtagcctctacaggctgctgaggttctaaataaaaccttttagtggtgcctttatggtgaaacagaatttgtcacctgccatttctacttgagctaaggtagtattgtgtatcctctttccttcttaggtatccataatccacaaagcatatttaaaaggctcttggcacgggcagcattggttgagcaggtaggtttggctagggggaaatgtttaacttgttctgaaagaaaaattatgtctgtagggtccaagaaacagctattccagagtcagtgtcagctgagtctggaacatatgaagtgaggtttacttctaagaacacaagtgactgcacactaatttggtcaaggcatcttttcactactttgctgtagatttttcttcttcattggtcagtttgtcattgtctttgtagttctctttatgataatcctttatacttgctctcagattccacaggcctctgtttatagagtggcaaaggcaggcgagctgtggtttattgtttataaatttttttataaatgttatggtattcaaagccactgacatttaatatttactgaagccattccttagacagcagtggtctttatccctttctggaaagaaaaggaaaatgaagggtaattactgtcaccatggagattgtagaggtaaggttggggtataggtcaggcctggcctttctttgtcatctgcttatagtctagtgctaagtatgccactaagtttcagatatatggaatactttatttttttaaaggtatataaactctgagttattgagaattaagtattcactgtatattaaggggaagcttttgccaagttgtggtcttcaaatttatgtttactcttcctattggcagaataggtgctatttaagagtaaaccaaaggataagcagagggagtccctataaccaaagatggacagcatagccctggatagccagataaaccactctttgtattaagaaatgtttctttcctagtggtgaggggtgggtaactgtgaaagagctttatatcttgtctattcatggtattatagctgtatattcccaggatgataagcttgattgaaatcctgtatttagtcatatattatttgcgctgcttcatttgtatcatgtgcaatctctagaccaaccctatttttaaactctggtacagcatcattttgtacatattcccagctgcagaactagtatcacttatctcagcaaaagagattgtttgcatggaaagattaatagcactgattagatttctaatattttgcatttttgaaatgtttgttttctacgtgattatatttaaaactttagtaaatactaacatgaaaccaaaa

SEQ ID NO: 129717 - DNA, 587 bp, Homo Sapiens
gcctccgagatgtgtttacttattcttctgtgtccccaaaacccctttccaaaataacatttaaatgattgttctgtgctgtgtgttcaaatggagataatcagatgccagtggctttacaatgtgggttgcattccattttcccaggcgcccaggtcctgggtctctaggccaccgcccgccgtggccgcccctctgctcaccagggaggccagacaggaaccctgcagctgccagagcaagcacgtcccacagccttgggaggcctcccaaaatgtgtccagattcccacaggcagagagagagggactgaaaggctgaagtgaagtgaccgtgcctgcccagcctgggactgagagcctgaagaccagctttccagactctgtcccagaacccccttggccctcagcaaatcccctcctcctggcctgaaacagactccaggcttcttgcagagacgtcttctgtggagaaccagaaagattgagtccaccctgactgtcccgggacagagctgctgagcagggtgcaggagccacaaacaccggatctttcgaggcacatcagtgaccctcgtgccgaattct

SEQ ID NO: 129718 - DNA, 751 bp, Homo Sapiens
tatggtggttgttgtcccaagccacagccccgttttatttacactcatcccaaagcacatgatggggctgaaggacgaatctcaggggagcagaaattagctgaaggccacagaggatagagacggggggcagggggagaacagggaaaggacagcgaggatggacaggccctcctggagcgttctccgtgggctcccgcgtctccttcaggatttggacttggacacagcaagtccgatgagtccggccagtcccgccacacccagggccatgcctcccacgatggccatgcccacgagtccatctttcttcatggccttgtcaatgagccgctccagttccttggcctggttgttctggggctctgtctgcagcaacccgcggacgtactttaaggccttctcgtattccttgagccggtagttccccacggccaggtagaagacgtaatcccgctgttcctccttgctccctttgggcagcagctcctcgagcagcacgatgcctttacggatgtcatcattgtacttgctccgcaccaggcaccaggcgtactcaaactgcgtgctcttggacaccgagcctgctgccttctcagactgaaatttcttttcaaacttcagcaggtcctccacagacaccagctcgttcagcacggcctccatggccactgcccccgcgagcctcacactacagtctactgtgccacagtctccatggcccagtggcaggggcggagaaccacttccg

SEQ ID NO: 129719 - DNA, 1037 bp, Homo Sapiens
aggagtttttcccttttaaatgctacacaagtgccactaatccacagatctgaaaaagtacagctctccaggttgataaatcagattccaggctttttcttgtcagtccgcttatgagatcacgaatatgatctccctaaagccccagattcctactagagccgctggggacactgatgacgaagcaatcaactcatctcctcaagctcaccagggctcaccttcccaaggccggcaatcatatggggtgttctctgtccctggcctgaaattccgttcttgtccacctccaaatagcatagggtagagaggggtaaattcaccaagtcctcgtatataaagtgcgccaatcctgggaccataaaacttgtgccccacgattggtaaggaagtccacgcccaggtcctccacatccacgcgctgcttccccaaggcctgtgcagcatccgtgtgcacgaggatgggaggtagcccagctgccacccgttcctggttcagggctttacatgcgctgactgatttcagggacaggcatgacaatgccagtctcattgttggccaggcatgatggtcacgaggcgtgtggtcgggcggactgccgcgaggatgtcgtccacctctgcctgcccgctcaccttggacaccgggacaaggtgacgctgcacttgttcttccccaggtgctccaggtgcagccggattggagtcgtgtccacgaggacgtactgacatggggctggccgccttccactgggctgaggtgccactgtgtgtcctttgcaggtctgttgcgttgaatgttcgccagaatggatactcgctcagtgatcgtgcccggagttaggatgcttttgaggtcccctatcgctcgcagctgccggcgtttaacctggcgtctcgctgatcggctgtgatcccgtcccagctgcatgcggaacgggcggggcggtactaagggcggggttcaacgggccgggagcccggcggggcggggaccgcggacggacagtttgtgctttttctccgttattttcctc

SEQ ID NO: 129720 - DNA, 1397 bp, Homo Sapiens
  misc_feature (1261)..(1261): n is a, c, g, or t
aaagttgtacaaaaagcaggctggtacggtcggaatcccgggatatcgtcgaccacgcgtccgcgggaaggaggctggatgcccggcagcagtggggcggggatggaggcggcgtggcgccggggagggatgcgccggcacccgcggcgagtcagcccagcggctgcgggaaacacaactcgccggagaggaaagtttatatggactataatgcaacgactcccctggagccagaagttatccaggccatgaccaagggccatgtgggaagcctggggaaatcccagcagcccgtattcagcaggaagaaaggccaaggatattataaatgcagctcgggaaagcctcgcgaagatgataggggggaaacctcaagatataatcttcacttccgggggcactgagtcaaataatttagtaatccattctgtggtgaaacatttccacgcaaaccagacctcaaagggacacacaggtgggcaccacagcccagtgaagggggccaagccccatttcattacttcctcggtggaacacgactccatccggctgcccctggagcacctggtggaagaacaagtggcagcggtcacctttgtcccggtgtccaaggtgagcgggcaggcagaggtggacgacatcctcgcggcagtccgcccgaccacacgcctcgtgaccatcatgcgtggccaacaattgatggactggcatttgtcatgcctgtccctgaaaatcagtcagcgcattaaaagccctgaaccagggaacgggtggcagctgtggctacctcccatcctcgttgcacacggatgctgcacagggcttggggaaagcagcgcgtggatttggaggacctgggcgtggacttccttacaatcgtggggcacaagttttatggtcccaggattggcgcactttatatacgaggacttggtgaatttacccctctctaccctatgctatttggaggtggacaagaacggaatttcaggccagggacagagaacaccccaatgattgctggccttgggaaggccgcggagctggtgacccagaactgcgaggcttatgaggcccacatgagggacgtccgcgactacctggaagagaggctggaagctgaattcggtcagaagagaatccatctgaatagccagtttccaggcacccagcggcttcccaatacctgtaacttttccatccggggacccccggcttcaggccacgtggtgcttgcgcagtgcccagtgctgatggccantgtgggggccgcgtgccactcgggacacgggggaccgccgtccccagtgctgctgagcttacgtggtccccttcgacgtggccaggaacgcgctccggctcagcgtgggccgccacaccaccaagggcccaagtgg

SEQ ID NO: 129721 - DNA, 2595 bp, Homo Sapiens
  misc_feature (19)..(19): n is a, c, g, or t
  misc_feature (31)..(31): n is a, c, g, or t
  misc_feature (37)..(37): n is a, c, g, or t
  misc_feature (49)..(49): n is a, c, g, or t
  misc_feature (59)..(59): n is a, c, g, or t
  misc_feature (65)..(65): n is a, c, g, or t
  misc_feature (83)..(83): n is a, c, g, or t
  misc_feature (92)..(92): n is a, c, g, or t
  misc_feature (412)..(431): n is a, c, g, or t
  misc_feature (2486)..(2520): n is a, c, g, or t
tttaggaaccagtttaagnccagtccggaantatttnattctaccaaanccccttgtcncaattngcattaccatttatgccnggaaattangggatataaatgattatggagttagtgattggttttttcccaaaaggccattagactaggtgtcttaactttttcttagagggccaaatagtaaatgtttttagacttgcaagtcatacaactctgcagttgtggaaagcaaccacagacaaaacataaatgaatgagtgtaggcttgtttcaaagaaactttatttacgtaacaggtggccaatccatgggccaaagcttgctgacccttgtgtttaaagattcccatcttagtagcatgaataaaatggaccagataaatttcagttaactttgtcaaatttatcttnnnnnnnnnnnnnnnnnnnncctgtttcttcctatagaaacacccatattcctataaataaaaatgacttttaaaaaagacaatcctagcaggcaaataaaaacagacatttgtctttgtagtaagttgaattagctaaacgaatccttgtatttatttttcacacagcacaaatgcaggtagtacacagtaagttcataattccccacaaaacttataaacttaacaaatgggaatctaaacataatattctgaatcacccatagctatccactgtgtggaatccattctacagcagcagaggagtaccttaatttaaagcaccaagtttccaggcattactacaaatatcttcttttcattctctaatacatgcagtcaaactgcctatgaagcaaataccaattcatcttacgctttaacagataaggtaaagcacttgggaaatcaacattattcttaagtctgaaagtgattctacctctttaccttattatattttctcccatgaaattttaaacttttaatggagttatatttaatatgagaataaattaaaatttgaacttaatgtcttttcagattcatccagcagtttagaatgtttatatttgttttatgtcttgagggaaacaaaaacgtaatttctaatttagaatattctggctatctttattaaaagttacatttataattttatagcaaagtaatatcatctgtttgtccaaacattacagattttaaaaaattcccctaatgtatgtaaatacaaagcttattcccagtacacattttatagaggtgtgttttcattttttgaagcagggttcaatggacatttttagggtcttgctaacatcagccctatatactcagagacgattgaatctagtaaatggacaatgaaaactggttgaggctgctgatgaatgcttcaataaaaatctgatacacacagatttcattgtcatattcaacaaaaccaagtcttccttaaaactgtgatcctgataggctgaagatagagtaatggactgttagttcctcatgccaaaaatacatgggtctgtcatacaaaggcttcattctctgcctgtcgtcagtaacttgagagccttttgtagattctggacagcagtgcttacatcttcatactgcaaagcactgccagcatatttgcagtacttctgagctctagcaaagtcttctggggttagacgaacatccccctgggaaattgtattgaaaagtgcgggatcaatggcaggtatagtctgtggagtaggtttggatagtattacttgctaccacctgtgctgtgaggcacttctgctggtgtattagctggagcgtgtgcacccggaggaatctgtattccagtatagttgcctgatggcatgttgcttgggtcataagttgaagatgatgatggctgagttggctgagtgggcagagaggctgctccagcatcttcattttcttcaatatcattatcttcttcaattccaacagggcctgcttgaggagtctccccattctttaaacaattatggatgtatgttgccttccatctggcatacttcctgtgtttcacattttcatcagtgagttctccaaatactgttatgacatctatcaaaagacttgcagtatagaaggacttgatcatgtttttgtgaaatcgtccagcacgatcttcattgtctgcatacaaaaacattttcaaagcataattctccaaatgggcacagcccactatttcttgagtaatagcttcattatcacccaactgcttctttagagcttctaactgatccattaactttgataaaaatttgcgacattcaggagttttactatcgatcttcattccagtctgcattgcgtataaacgacagtaataagccaccacagggtctcgcttgtcatgctcctgagccgtcctcagatgatgctgtatgctcttgaactgtgcggggagcgggggcagcggtgcaagcgcggccatctctactccgaactcccccggccgtaatggccgaattcccgggcatatgtccggtaccgtcgactgnnnnnnnnnnnnnnnnnnnnnnnnnnnnnnnnnnncggccgcttcctcgctcactactcctgcgctcgtcgttcgctgcaacgagctagcccctatagtgatctttcatt

SEQ ID NO: 129722 - DNA, 1118 bp, Homo Sapiens
  misc_feature (74)..(86): n is a, c, g, or t
  misc_feature (111)..(123): n is a, c, g, or t
  misc_feature (127)..(151): n is a, c, g, or t
  misc_feature (171)..(179): n is a, c, g, or t
  misc_feature (202)..(300): n is a, c, g, or t
gggggggtcccaacccccttttgagtccgcagtccccttggggaacccctgggcgcttttttttttcttaatgnnnnnnnnnnnnnaaaccagggttttaaaagaatttcnnnnnnnnnnnnnccgnnnnnnnnnnnnnnnnnnnnnnnnnaatatgattgtggtggaagnnnnnnnnngggtctaggttggccggcatggnnnnnnnnnnnnnnnnnnnnnnnnnnnnnnnnnnnnnnnnnnnnnnnnnnnnnnnnnnnnnnnnnnnnnnnnnnnnnnnnnnnnnnnnnnnnnnnnnnncaggagtttacaatttagtttttatttggacccaggttgcttggcgctgcctgccacaggaccccgggacagacactggccatcctctgacttgcagaccggccagttgtcagttggagaagcgcagcagctcctcatcaccatcaccagggacaccgcagtactctctgcactccttctctgagtagaacttgttcccgttgccctggcagcccccgtaggggaagaggacgcacttccccttgacagcatcaaatgcccagagctggatgaaggctcggcaggggccccggactatggggagattgcaggccgccacagttcggcaggtctgcagacactccttttctgtgacgaagttgttaccgttgcccatgcagccgccgtactggaaagtctcacaggccatggatgtaccattatagaaatacctgctggtcattcccatgcagggaccggccgagtagcccagctggcaggaatcttctttcttggtgacttcagttaccagttgcccaccccctgatccttcctcttcttggggtagcacagccctccggactctcgggattaagatgggctctggttcctgctccccagggacacattcacctcggtcagccatggtgaagatggagtcctcagggatgcccacaccctgggcaaccattctgaagtctgagggaaaggtttccttagcttgcgcgccccgccgtaagctttgcagtaatgggggggtcccatgaggcggctgaattctttgtccagaaaatggcctactatcataatttggggtggaccacatagattcatggtta

SEQ ID NO: 129723 - DNA, 919 bp, Homo Sapiens
  misc_feature (78)..(78): n is a, c, g, or t
gggggatttgtttggttattatttgggagggccttttctggccaggaccaggtgatttggagttttaattgcagaggnaatgggtattaggaaaatggggatggtacaaaggaaaaagagatggagagaaaaactgggatgaagggttccgcactgggtgtcccacccaaccaggccttcagcagccctgccacggatctgcccgattctttcgcatcaagaagttgatcttgcgagccatttccatgttgtagatccgccggcacctttcatagctttccctctgtcgccggcggcatggcttctcataataccgccgatgcttaatgtcctcaatgagcccatccatagtgaggattctgtttagggtcctgtatgcgctttccacgttcccttcctgtaccatcacagtcctggcgatgaacttcagatgttttgccatgaccttggatttaaaccttcactctgtagagcctaaaggatgatggagaaagggcgaggaaagcagaaagagaaacgcaacataatacaaactacaccgcgcggcttatttaggatttggaaattcaacatgctcagggacgcgcgagatggagcacatggaagtcatcctagaaagtagacgtgaatcgttgtctcttattctcactgccagtccaaatcctcgcatagagaagaaaagagatggcagcagggcgttaccacaaagacgcgtcgccgggcatgagaaggacacgagcgacaaggatgcgccacagggtcccaaccaccacacatagttccaaaaggggttgagttgggagttggggaaggactctttgttggtctttggaaaagggggcgaaagcccgcaaacctgccctctcgccaagccagccttcctttccccaaaccctgcacaactcctcacctcgcgcgc

SEQ ID NO: 129724 - DNA, 764 bp, Homo Sapiens
  misc_feature (48)..(171): n is a, c, g, or t
tgtgcttcatgccccataatcccagcactttgggataacaggcgtgannnnnnnnnnnnnnnnnnnnnnnnnnnnnnnnnnnnnnnnnnnnnnnnnnnnnnnnnnnnnnnnnnnnnnnnnnnnnnnnnnnnnnnnnnnnnnnnnnnnnnnnnnnnnnnnnnnnnnnnnnnnctagagtactttcagactcagtttcttctttcacttaataaaagacagggtccactgctgactaatgggattgtttgtatatttggaggccttcttgcagacatgtgatttgagtttattgcagagaatggtaataggaaatgggattgtacaaagaaaagagatggagagaaaactggatgagggtttcgcactgggtgtcccacccacaggcctcagcagccctgccacggatctgcccgattctttcgcatcaagaagttgatcttgcgagccatttccatgttgtagatccgccggcacctttcatagctttccctctgtcgccggcggcatggcttctcataataccgccgatgcttaatgtcctcaatgagcccatccatagtgaggattctgtttagggtcctgtatgcgctttccacgttcccttcctgtaccatcacagtcctggcgatgaacttcagatgttttgccatgaccttggatttaaaccttcactctgtagagcctcgcgcgctcagtacctagcccaccggaagccccggccgtaatggccgaattcccgggcatatgtccggtaccgtcgactg

SEQ ID NO: 129725 - DNA, 855 bp, Homo Sapiens
tttttgcagacatgtgatttgagtttattgcagagaatggtaataggaaatgggattgtacaaagaaaagagatggagagaaaactggatgagggtttcgcactgggtgtcccacccacaggcctcagcagccctgccacggatctgcccgattctttcgcatcaagaagttgatcttgcgagccatttccatgttgtagatccgccggcacctttcatagctttccctctgtcgccggcggcatggcttctcataataccgccgatgcttaatgtcctcaatgagcccatccatagtgaggattctgtttagggtcctgtatgcgctttccacgttcccttcctgtaccatcacagtcctggcgatgaacttcagatgttttgccatgaccttggatttaaaccttcactctgtagagcctaaaggatgatggagaaagggcgaggaaagcagaaagagaaacgcaacataatacaaactacaccgcgcggcttatttaggatttggaaattcaacatgctcagggacgcgcgagatggagcacatggaagtcatcctagaaagtagacgtgaatcgttgtctcttattctcactgccagtccaaatcctcgcatagagaagaaaagagatggcagcagggcgttaccacaaagacgcgtcgccgggcatgagaaggacacgagcgacaaggatgcgccacacatagttccaaaaggggttgagttgggagttggggcaggactctttgttggtctttggaaaagggggcgaaagcccgcaaacctgccctctcgccaagccagccttcctttcccccctcgtgccgattcacacccgcctcgtacctagcctt

SEQ ID NO: 129726 - DNA, 904 bp, Homo Sapiens
  misc_feature (510)..(522): n is a, c, g, or t
aattttaaattatcttaaatagattagagagtaatgataaaatgtatagtcagtttaaattaaaatagaaatttaagtaattaccaattggataattggatattttatctgtaacgtcagatgtttattacccttatttatagaggtagatgctaattttggttcatttacattattatactaattcaagaaatactttatcattttaatttttcattaaggtaccttaaaattgtcatttaaaagtactttttcaaagttcaacttaccattttgtaatattaacctattttctaaaattacagacccattttattaaagtcttactgttgtgtgattaatgttctaccctatcttagtaaatttacaaaatgctgtgtttacacttagttctcattgagctgttactctcccgagtctggaacttttttcataaagctaaattcatagtatttcagttactttccacagctgtgttgctcaataatagcatccagtgaactttagtannnnnnnnnnnnncctgtattttattaaaatatttcatctagagataactgaagtgatgtagagatacttgtattaatttgtatcccccatctacttttggatccctattgcattgcaaacctataaatctcttttaacttgattgagatagaaacgttaatgagacttcagctgtcaatcaataaagaagatgtagattcatatgtggtgtcctagaatttccactccatgtatagttggaactacatcaagatcagctttaatctataatttccttattctgtaacctgtgtaattgtttcataatattaactttgaggatgatgaatggtgctgatgctcctaaatttgtaggtaatgattgatatatatgtcaataaaatactttcctaat

SEQ ID NO: 129727 - DNA, 632 bp, Homo Sapiens
tgtggttccaactgttttatactgaaatatgtctgagctgatccaaaaaagcgttgggtttgggggagaaggaaatgatggaagtggggtgatctcagagctccatgttagcaactctgggagtgtgggccggtccatctgtctgtctgcccaccctggcaggacaatcaggcctaggaggtctggaggagctcgccgagctgggcggaggaggcaggccagtcccatgctggaggggaccccacggccccttctacagggcaggagagtcctcagctgaagggcttcaccagcttcatggcagcatagttcgggaaggcgtagatgaagatggccaggaacagcagcaggatgaagaggatgatgaagaggatgatggcccaccggaaacgccgccacaggatgaacttcatggtcttgtatggggaggtaaaccacaggaaggaggtgtcggggcgccttgggtcctcaagcttagggttcatgttgggctcatcccggccctggccagcaggccgttcctcatgctcactctctgctacaatctccaaggtcatttccagcttgcccgccagtattttcttctcaccctctttctgctacacagggccaccagcccttcactgttttct

SEQ ID NO: 129728 - DNA, 831 bp, Homo Sapiens
  misc_feature (292)..(320): n is a, c, g, or t
agctctgctggcctctcccccgtccttccccgccacgctccatgcccaccaggccctcccggtgctacaggcccagcctctttccctggtcaccaagtctgcccactaagctccccccgacccctgcaggctgtcacatgactcattgagtagtaatgattcagaagaaaaagaaaaaggagactttattggtcaatatttgaccactctggactgttctgtaaagtggttggtaacaacagcactttacagtttgtagatgtaaccagtagctgatcttaaggcttttttnnnnnnnnnnnnnnnnnnnnnnnnnnnnntctttataagaaagagaactgaaaagtagcgtgctattcgtcctgtaggtgctgtggtggatggacctgggcagagggcacttctctctcttacctctcttgcactttctgtctcctgtctcttctcgcccctgccgccagccccagctttcagtggagaaagcggtcctctgaaatggtttcctcccaacccccgcatttaaagggactcaaggtgcctgccacttcctcagcgaagaagtctgtgttcctccccgtccttgccagtggcgatcatcccttcacaatcccagagtggcaggcgggaccagccccatggtctggctcctgtcacctgggtccgtgccagcacaatctgccaaagttctagagaccctgttcccttccccagtcacctgcacatgcttcttcgtgtgtgtatttctttttgtttttatggtttttggagcaatttaaactcccagttgtttattttcacaaaagaaaataaaattgcagttgcaagaccttt

SEQ ID NO: 129729 - DNA, 721 bp, Homo Sapiens
  misc_feature (721)..(721): n is a, c, g, or t
ttttttaaaggtcttgcaactgcaattttattttcttttgtgaaaataaacaactgggagtttaaattgctccaaaaaccataaaaacaaaaagaaatacacacagaagaagcatgtgaggtgatggggaagggaacagggtctctagaactttggcagattgtgctggcacggacccaggtgacaggagccagaccatggggctggtcccgcctgccactctgggattgtgaagggatgatcgccactggcaaggacggggaggaacacagacttcttcgctgaggaagtggcaggcaccttgagtccctttaaatgcgggggttgggaggaaaccatttcagaggaccgctttctccactgaaagctggggctggcgagttcgggcccactgagggaggggacgctggtggcagcaaatcaggccaagatgtcttctcacatggtgatggcctcacactgggcagaggacagaggacgaagaagaacccacggtattgagcagacgatgaaaacttgggctgggtaacaggaaatgtcacaatggcagagctgcagatggagtcggggaagctggggcaggcggcaggggcgagaagagacaggagacagaaagtgcaagagaggtaagagagagaagtgccctctgcccaggtccatccaccacagcacctacaggacgaatagcacgctacttttcagttctctttcttataaagan

SEQ ID NO: 129730 - DNA, 1194 bp, Homo Sapiens
  misc_feature (220)..(254): n is a, c, g, or t
  misc_feature (266)..(266): n is a, c, g, or t
  misc_feature (287)..(287): n is a, c, g, or t
ttttcccacagcgcggattttcgcggaaaaaacttggaaccattgccccttaatctttggggcccggccccccctagaacaggttcttaatttcttgaggggggaggcccccccaaccttaggaaccaggccctgttttctggccaaaggctttcggggcaggaacgttcgggggtggagcttttttactcgcggcgggatcttttttgcgggaactttnnnnnnnnnnnnnnnnnnnnnnnnnnnnnnnnnnnaggccttagtancaggtgcttttttgggagaangacactgaaaaacattttattaataaagaatattgacatgagtataccagtttatatataaaaatgtttttaaacttgacaatcattacactaaaacagatttgataatcttattcacagttgttattgtttacagaccatttaattaatatttcctctgtttattcctcctctccctcccattgcatggctcacacctctctgtctgttaaactgacgaccacggacaccttgtctcaatgttgtctgaagtcttactcgtctgaaaggctttggttgactactactagtatctacagatgagctagaaggaggatcctggctggtggaggggagatctgactcatcagatgcttgaaccggctcttcttcctgctggctatcaatttctaggcctgcttctgaactaataccttcagattctgcctccacaaatacttcatctccatcatcacctgttgctgtttcatttgttgtagataaagtgccagtggatgtagtcaccattggaacagattgagaggcatgttccgaagcatcagaggtggtgctctcagtaaatacagtcactggggctgctacttgtagtggagtagtgggaacacttcggccacctgactcttcttcatgagctaggaacaggggtgtttcatacattcctaaacctcctttgagaagcaagctggccaagatcagagtgactagaacttgtttgtggcatatcttcagggtggccaaccggaatctaggacacagcaactgcgggaatgaatgctcagaaatcaccatagatgtgcacacagattgggtactggactgtcgtctcacacaaaatgcgtgcagcactatctggatcactgagcatctaagcgcctcggtatcgatcctgatgtggccatccgagtgg

SEQ ID NO: 129731 - DNA, 1423 bp, Homo Sapiens
tggtggcccaagtcctgaacccctcttagaccaggtgaggtgcagaggtggttgctgcttccagtttcccttcagacttagctgtgtgaaccccactcctatcctttggccttagttttcccatctgtaaaactcagaaacgcagttggaaagtccttattcatttagtaagcgaatatattataatatgtatagagcgccttttgtgtaagtcactggtcagaatcctcactgagctcccagtccagagagaagccagacaattaaaacagtaatgacaatgatgtgtgtggcctttgtctactcaaggtccctttctgctcccctcttctagtctcacttcccaaggctgtgagctctaagccctccctatgtagagagaagtcaccctccccttgctccatgttcagctcaggaacttgcgtggggttgagctggtacctacatatgctgccaagtggctcaccaggggaaatgggttgtgtatgcgggcaggagggtcaggtccttgtcccactagggggctaggtctgggatctccagggtgcagcctggactcctaagtgcagattagggctgaggactggatgatgctcgtggtgggcttgggcctgcccaggtccctgggactcagaggtacccaccctaagttcctgggcaaacagccagaatcgtggagagagcccaggtcccgtccgaccctccggagtttattcacttccagcggtactgggctggaccgagccttggtggcatccgattcagctccagcagcatcccaggtcctatccagcatgggcggggcaccgcctgtcagagctctggccttcaggaatcttcggactcgtccctttcctcgaagtcgggctcgggctctgggtccggttctggctccagttccggctctggttctgcttcagcctcgggttccagctctggctctggctccggctccggttcagcctctttagaggcctcagcttccagctctggctctggctcctccggggtcccggattgcaccgcctcggagccctcagggcccccggcctcgtcagggtctgaagctctgggcaacccggggcatgtggtccccgagccgggtgcctccggcgtccagtggcctgggcatggagggtcatagctgcggtcccggtagccctgcgctcggcatcaggcagtgcatccaatgcctcgtactctggcccggtgagcacgccccgcgccagcagcgcgtccaacagcagtcccgagtccgcctgcagcgtctcgaccaggcgtttccgctcgcggtcgatagtctctgacggccgctcctgcgcgttgcccattgtcggggctcgatcccagccgccggacggctccgcaagcacaggacctggaggccaacacggggaactcggtgtcctcctgcctctccaga

SEQ ID NO: 129732 - DNA, 891 bp, Homo Sapiens
ttttggtatttaaaatgttttaatgtatatgtgttatgggtcataggtactcattagtatgcttcataatttattcacgttagatatactctttatagatatcaaatattacatattataatttcttaaaatctgctgtggtggaaataaatgaacacatgaagtctccctgaaagaaaatcagtgtttcttgggaagaaccaagattccctgacagaagctaccctatgtagaggacaaagtaggtcttcaataaatattagttggtttactgcttttcccaaggatacatctggagggtctgcattcctttctcattggtgccgcctgaccacagaactagctttttccgtgacatctaacctaaaccccgcagtcctaagtcctgacacgtatgacaagatgctgccacctggtggatacagaatagatttaatgaaatggctaggaagtctttcactctagttggtggaactggcaatagggtgagagggaagcaggaatgagaagacaaaaattaagaaacaggaaaaggaaggagctccatctctaatatggaggtagaaaaaaagggactatcatctaaatgagactgaagagtccctagaggagaatggcttccctctccttccttctgagactagaaacgaggaaagaggctacagcttgtattgagggaaatgcaagactgaggagaaaagaaagcaggtctagctgatctcaacttagcaagctaaaataagagtagcctggtgttagcggccacccaagcaactccctgctcctagtttccacttggggaatccatgtgattttggggaggctgacccccacccttttccccaaaggtgttgtccatgatatagaataagcaaattagcatgtatcatc

SEQ ID NO: 129733 - DNA, 912 bp, Homo Sapiens
tttaaggatcaaatgacatctgtttttaatataaagatgttttcttaaaatctctgtatgaaattatctccggagagatgccggcattgttaacgaggccccacatgcctttctcagggtccttcaggctcgagcggacaatctccaccactttctccacctcttcgctgctgcagacattgagctggacggttctcaatcggtcactgtttaggctgtccagctccttgaccccatcatggcctttgtccttcatcaagcagccagcaaacacaaggaagccttttgaatgcagatgcttggccaatgagaacccaaatccagagtcacagcctgtgaccaggacagctttgctgccaaccggctccgccgcactggcataagtccgacggccaatcgggataaaggaagtagaaccaagcaatagtgggcgtcttgctccattttcgtctatcacaggcacttagggtttttcctgggagccgtgacaggggtctggagaggcgggtggccagcatggtagcaacgggtgttagaatggcccagttcctcccggtggttcaggacatttgcagcgtcacaaaagatcctgtcagcgcgaggcctgcaggcggccctccatagtgaaatatgtgcttctgcaacccctcaaagtaggaactgcagggtgactctgcatcagctgactacaggcagatttccaggctgactggccaaaaccaaatgggcagggggctccgctgcagagggctcgccgaggctctcgccttcacccggcgccgcgcaggtgcccgctctcctgcggggagagccgagggggggcgctgccgcagggtctttctggaagcccctccaccagcactcctgcggcctgcggcctccgccacccgacgcttctacacgcgaagcgcg

SEQ ID NO: 129734 - DNA, 1581 bp, Homo Sapiens
tttaaggatcaaatgagatctgtttttaatataaagatgttttcttaaaatctctgtatgaaattatctccggagagatagattcaccatgtttgccctgagatttagaggcctctgcctgccactccacaccctgtttgtgaaggcccaagtcactcactatgcaaagaagtcattccctctagttagtgttaaaaccagttatgggtcttcctggcatggtggataatccacacgtggataatcaagagttgactatatgggttcctccctcccctccccttccaccagggatccctgacagaggccacagcgagactcttcagcggatgtagatcatgtcggagatggctccaggcaagtgggtcatgatctgcattcgcagccaccagtagtagtccatggggtggtagcgggtgtagggggtggtggcggtcagggcgtgtgtgacagcatcgatgacaggggacgtgtctgtggagccactgctgcagtaggtctccatcttggcgatcttttcatcaaagtacttcttgccgtagtccttgcgcacgacctcaggcagctcctcccacatcttcttggcgatggcctgaatgctctcagggctgtaaaggctggtggcagcgatgaagttgccgggctccaccacgctgaccttcacgcccagggggtacatctcatagcgcaggcagtccgagaaagctctaccccgaacttggtgatgcagtacggggagcgggccgggttgggcatgcggcccagcatgctgctgatattgacgacgcggcctttggcccttcggatgagggggagaaaggatttcgtcatccgcactgtgccccaaaggttcacttctgccacctgcttgtaggtctccaggctggtgaactccacctccccgaacgttgagatgccggcattgttaacgaggccccacatgcctttctcagggtccttcaggctcgagcggacaatctccaccactttctccacctcttcgctgctgcagacattgagctggacggttctcaatcggtcactgtttaggctgtccagctccttgaccccatcatggcctttgtccttcatcaagcagccagcaaacacaaggaagccttttgaatgcagatgcttggccaatgagaacccaaatccagagtcacagcctgtgaccaggacagctttgctgccaaccggctccgccgcactggcataagtccgacggccaatcgggataaaggaagtagaaccaagcaatagtgggcgtcttgctccattttctctatcacaggcacttagggtttttcctgggagccgtgacaggggtctggagaggcgggtggccagcatggtagcaacgggtgttagaatggcccagttcctcccggtggttccaaaaccaaatgggcagggggctccgctgcagagggctcgccgaggctctcgccttcacccggcgccgcgcaggtgcccgctctcctgcggggagagccgagggggggcgctgccgcagggtctttctggaagcccctccaccagcactcctgcggcctgcggcctccgccaccccctcgtgcc

SEQ ID NO: 129735 - DNA, 693 bp, Homo Sapiens
  misc_feature (231)..(249): n is a, c, g, or t
cttatcaaaagtttgttttattttcaatacaagataaataccatgcttgttactagtgcagtttaaggccgacaatggccatatatcaaactgccgaacagtcacctaaatgctaaagaaaggaaagacaaagtaaacattaaacacaaaattgcaattacaaacattttaataaaatggaatgagctttttaattgaagctaatatgaagtctaattctcatggacagcnnnnnnnnnnnnnnnnnnngtctattagatcaattatcaccttacctttttgcacagaaatcttattgtgaagtcaccatagagtcaatagctaaaattttaagactttctttggccttctgatattaaacaaattatttacaaactgtgatcagtaattcgtggatattggtaaaatgatacaattttttgttgttgttgttaagggctttccattaaaaattgtaaaacaactttgtaaggctgtacagggctgtaaactactttgctaatataccatgggatgcagaggaaggaataatagaccttttttttaaggctaaagttatcaatgttatagatgcattccttaaaatacattatgatttatacccaaaggatcctttcccattaaataccacctgagtactacaattttcaaagtaaaaaaataaacatgaattcaccatagttattttaaaat

SEQ ID NO: 129736 - DNA, 1030 bp, Homo Sapiens
  misc_feature (888)..(888): n is a, c, g, or t
cataatttaattattgtttttatcattttggagagagaaaatagggggaaaatcacatacattaacagtccatgatgccaagctcctgaagagtaaaagtttcccagctaagagggatgtttccctcagtttgttttatcagtactaataaaaagcatctgcccctttaccagcaagtcctctactcagaaagaactgacccacgcaagtctgggagagtgactagttcaaatgtgcagggctgaagcttccaaacacagccactattttctgttgtatatcttcatctcaatggtgacatggccactgcccaaggaacttgtggcagggatcccaaggtgaggcagcaacagatgtctgtgaacattgtgcgttaacagtggctcagagcctctagattcacagctctgcatggtgggcttctgccttcaacaactcactgggcttcatgaagatgccttccatggctttccagtagttgttctgacttggctgggccatgccatgcacctctttttgcccactgataggtcgaccatattgttctcctgtgacagacagcagtacctcagtggaagagtgtttgaaccgcacctcaccatctctcacccagtagggtccattacagagcactgtccagtcatccagataatcaccttcaccttcctcaccaaaagcactcacttcctggtttccagaaagaggtgaagtgaagtggtgactatggaggtttcggccagtgttgacatgtgtcagccggatgggctggcacacttgatgggggttccctctcaacactgtggactcttccccgtatctccagtactgtgctgtcatcacagaggtacactgtcactgactgtgccacactgcagttagaaagaagcntctcttctctgcatggcacatgtcaaaagagctgatgcgccagatcactcactgtaccacacatgacagggaaacctgctgaggtatggtatatatgtctacagaactgaacgctcaccagatgctaccagtgactgaagtg

SEQ ID NO: 129737 - DNA, 1230 bp, Homo Sapiens
  misc_feature (32)..(32): n is a, c, g, or t
gagacaaaattaaggggggggaaaaaatccanccataccatttaaaccaggtcccatggatggcccaagcctccctgaaagaggtaaaaagttttccccagctaaagaggggatgtttcccttcagtttgttttatccagtactaataaaaagccatctgcccctttaccagcaagtcctctactcagaaagaactgacccacgcaagtctgggagagtgactagttcaaatgtgcagggctgaagcttccaaacacagccactattttctgttgtatatcttcatctcaatggtgacatggccactgcccaaggaacttgtggcagggatcccaaggtgaggcagcaacagatgtctgtgaacattgtgcgttaacagtggctcagagcctctagattcacagctctgcatggtgggcttctgccttcaacaactcactgggcttcatgaagatgccttccatggctttccagtagttgttctgacttggctgggccatgccatgcacctctttttgcccactgataggtcgaccatattgttctcctgtgacagacagcagtacctcagtggaagagtgtttgaaccgcacctcaccatctctcacccagtagggtccattacagagcactgtccagtcatccagataatcaccttcaccttcctcaccaaaagcactcacttcctggtttccagaaagaggtgaagtgaagtggtgactatggaggtttcggccagtgttgacatgtgtcagccggatgggctggccacacttgatgggggttcccctctcacacactgtggcactcttcccccgtatcctccagtaactgttgctgtcatccacagaggttacacctgtcactgactgctgcccactacctgacccatagcgcacgtcgtgtgagtgcagtcggacgttgtggcgcgtattgagtagcttcaccacggagccgcaagtaacgacacccaggctggacgctcccacagcgctccacaaaccccccaacaacagcagaggtactacagccatcctaactgtatcgcggagccccaaatcttcgaagccccggccgtaatggccgaattcccgggcatatgtccggtaccgtcgactgatacttcgtataatgtatgctatacgaagtaatcggccgcttcctcgctcaatactcccgctgcgctcgtcgttcgcttaacgcgtagcgccctatatgatcgaataattt

SEQ ID NO: 129738 - DNA, 773 bp, Homo Sapiens
  misc_feature (16)..(16): n is a, c, g, or t
  misc_feature (52)..(52): n is a, c, g, or t
aacacagccactatgntctgttgtatatcttcatctcaatggggtgacatgnccactgcccaagggaacttgtggcagggatcccaaggtgagggcagcaacagatgtctgtgaacattgtgcgttaacagtggctcagagcctctagattcacagctctgcatggtgggcttctgccttcaacaactcactgggcttcatgaagatgccttccatggctttccagtagttgttctgacttggctgggccatgccatgcacctctttttgcccactgataggtcgaccatattgttctcctgtgacagacagcagtacctcagtggaagagtgtttgaaccgcacctcaccatctctcacccagtagggtccattacagagcactgtccagtcatccagataatcaccttcaccttcctcaccaaaagcactcacttcctggtttccagaaagaggtgaagtgaagtggtgactatggaggtttcggccagtgttgacatgtgtcagccggatgggctggccacacttgatgggggttcccctctcacacactgtggcactcttcccccgtatcctccagtaactgttgctgtcatccacagaggttacacctgtcactgactgctgcccactacgatactctcgctctgttccaggggctcagtgacagctgccttcctgagccgcttcggttacctttcgcacccacgagacgaaagcttccgagagcgggagagagaacaagaaatggcccgcccactcccggtgacccc

SEQ ID NO: 129739 - DNA, 1623 bp, Homo Sapiens
  misc_feature (274)..(305): n is a, c, g, or t
  misc_feature (645)..(645): n is a, c, g, or t
ctaattgtttcccaccagtccaattttatttagattttatgtgctcacatatagacacacttaaagagcatacgtttatatatacatatataaaatatagatgatatgggagtttctgacaaagtgatttattaatgaaaattcattcactatataacctttgaataccagagaaacttcaatatgtacaaatcagcatgaagttcccagttctcaaactttggttatatgaatatgcctcaagcaccacaaaagaaacattagtcctaatttnnnnnnnnnnnnnnnnnnnnnnnnnnnnnnnntcttcaattctcttgaatctgttttctttacaccacatcaggaaaacctccttttattccacatttcctttcatctcaggcagtctccaaaactggtataaaaaaatactgatcagaggaaaaaagacagacaaaccattacagataaaaatgatacctcaaaagtacaatttctggaaattattctatcttaaataaagaaactattttaacctaggaggtttgcattatgcaacacatatgaaaaaaaccctaattattaattttcagaatttaaaaacttaaacaatgcaagcatattaagagttgagtggaaggctcacagggagatttttagcanaatcagttaaagagattcctggatttcaacttgtttcctggcatcgctggcatctgcgggctgcagaagcaactggtataatatatgggcaggaagaaagaggacccgacaggctgagcacaaccttccatgggatttcacaagagatctgacagctcaaacaggacgtctctgtgggagtgggaggagatgctattcgctcggctcctcaggtccctgtcctttgccctgaatgggtcagcggtctctgcacaggactcgacagcatggtatatgaatggataaagcttgatgtctggtccaggggtggaacagtttctgcattcttcattgtagtatcgtagcaacagcttatacacatctccaacagtgagtttcctttcagtaaggaaaatgtgcatgctgtaaatgtctctcatcaattctgagtccccaaaggtgagataaaccacatctcgctcagctgcagcagctgccaatatctgtattaaggcttttaacctggcatcacccccaaaggcaccacagccccagtttcctgtggccactgcagaaagattctctgaagaaactccaggacggagaaatccacagtaagccttgttcagctcgcgtctcattttctcaggcacaaactgatcgaggtagcgtctgaagtgaagagcatcgatggcaacgatctcagtgcagcgccgctgccagtcgtccctttcactcccatcttcgtggctccgggaccaacgatatgtctcagcatagcctgtgtattcactgtactgctcagtacctgtgataattagacattcattgtgatccagcacctcagtgaagagccgtgaaataatcaactcaggattgattaaaaagcggatttcttcttgcacaagtcctgcactggttacaccacctccaacaaaacgatttgcaaaatccacctgtagcatgccttggccattttcttctatggtaccttcgtaa

SEQ ID NO: 129740 - DNA, 1304 bp, Homo Sapiens
acatattttgttgatttctttgttgcttcaggttagttaaacaactttattaacatagtcaagcagtgattaacattcacatctattatgtcacatcatacaaatgtaaatacaaaattactacagtacaatatatattctctgcatgatccaaaatatttggtggccccaaaaaactctctttaaaattcagcagcttatcaaaaattaaaaccgtattctatttaaaatggagatctgttagcacagagttagacttcaagaaatatcaatttagtacagtttgagaagttgcaggaggatatgtttgaaggacacattctaacatagtgtggcaggtacaggaaacatcagatttaaagcttttaagcataactcatacaacctaagttgtcagcagaaagatccagttatatttgtaactaaagctaatgctactaaattattgcacccaatgttaacatattaagtgtaaaactgttttgtaatatgaagtgatttaccacgtttaaacatctcttctcacaagatgataatctattaagtaaaactaattatacagtattgtctaattattgtctccataaaaatcacccaagctcaatttgcttatatatccacaaaggaaaacaacaacacagtaatatgcggaaagtacagtggaacccctttatgaggccaatattagaaggggaccaacactgccttataggctaaccatgttataataggcttttaaaaagatgtaataccagcgaaatagctaatcttgaataataccaagccacagtataaggaaattctatggcagataaacaaaaactgcaataaaaggaaaaactgcttttcttattagtgatacactgcttggcaaatagatttggcctggttttaaaatgtaccaagaggtgaaaaaaaatcacccattttaacttctttcaaagtcatgcatacatttcagctattatgcatcttttaaaaaacacaacacattctgggatacaaaccacaatgaacaattgtgtaatttaaatgtataccttaaaaattaatatgtataataactaggcataaagaattatctacgtaagtaatgctaatgggtgaaagatctatgtaagattgaaaaaattagtcacaattcacttggaaaggcctaaaggtgaataaaactaacttttatgtaaaatttaattttagagaggcattagaagtatctccatatttaatacagtataaaatgcactaagttggtatacaacgctatattgcatggtattattaccagataatattgttaacaa

SEQ ID NO: 129741 - DNA, 1826 bp, Homo Sapiens
  misc_feature (759)..(759): n is a, c, g, or t
ttttagaggcatgaatatgacaaattttttatttcaaaaatctcaagttgtaaccagcatagcaccactgacatggatgccttgatagaactccttgatagaactttatgatctgttcaccagaaaagattctacatgatcacgccagactataattaaggctaaccaatcaaaattcaggtacccaaaaccagttataatccaggtagaaactacagatcataggaaccctgggactggttttccagggaaccctggaattattttttaagtgctacagcatgtacaaggacactggcccacaagcttgcttctcacacgtagaaactgacagactaagaggtagatgagagattccaggttccatctagcagtggagaggcagggctccagcatgtatcagagataagccccaaaagcaaagtccacttatgcttcagcagaggtaagcgggcaggctcctggcaccacctcctccaaatggaagggaaggagggctgcaccgctctgcctgtgtcactggctcctctccctgggtccaggcagggcctctcattttctccaggctaacccactgtgtcccaaggttaatctcacaagacactggtccctacatcatgtaaagggtggatggggagcctcctaacaccatgtcaacatgactgctaacaaggagccacacacacaactgaatttcacaggacctcatatcctccaatgggctctttcccacatctactcgaaaggaatcgtgggttntcctttgggcttttcttcctgggaatcagtccatgggagatgccaagcgcccctggaacatgaaattatccacacatgtgtaactgcacactctagattaacaggagagaaaacacgctcatttttgtttccagctacacatacttagctttctagacacaaaaactgaataatttatctgatttatgaatgatggtttggtatgtctaagaaagctatataaaacataaaatgaactcatgttcatgcatgaattaaactgacttcatgagttctagggagacgcattaacctgtgctgttcccctggacgcacacttggcctcatacaggtgccactaacagccctgatggcagtgtcagaggacagcaaggtgaggctggggaagtgaggctgtagggcccagagaggccctagtgcctccaacagtctcagatgctacttgattacttctatgctatgggctgctaactcttacatagcctagaaaatatttacccatgaacactaccatgtttggatttcaaacaactttaaacatttggtatcagattgggggagcaacaaataataaaatttagggtctgtactgttaaaagtatagtatataacagtaataaaacctgtgtggggcatttttggttaatctgtcgtcgaaaacggtaatctaaacctgggagagttgctatatggggaggggagagtgaagaaatggagaacaggcttgtcctcgggtaggatgtgtcagcctagactggccctcaacatctggacggagcaacaggtaaatgtgccatggaagaccccacaaaacatgactccacatcagcagaacaaagacaaacacaagtcttttctgacttcctaacatggaactgtaacatctgtaatacaagttggttaaaatactgctcaaacagcacatagggaaacaataccttgtcactctctacaagtacacactccatttacaatttggtttttaaaccagaaaaaactgttaaaacatctatccaacagtgatgtattcaaaagtatatacatctaatagtccaagagaatgctca

SEQ ID NO: 129742 - DNA, 1402 bp, Homo Sapiens
  misc_feature (188)..(200): n is a, c, g, or t
  misc_feature (1301)..(1331): n is a, c, g, or t
tttttttcatgcacaagtcttaatttaatgggtaaaaacattaaattattacaacattttttccaataaagcataataaatagaatccatttcttttaaaacgctgtacaagagactggaaaacaagcttccaacagaatatgaataactcataactcattctaccttcttattgatttgggacgctnnnnnnnnnnnnnatgcctgaagcaacgtgcacacttcaggtctctgagcacagccggccaaggccaccagcttctaggctccctggaggtcatgacttcactcttaaatgctctgcccttgggtctcgtctgaggccccagcagcctgaggcgcagaagaaactgaaccgtttaggtggctgtggcctgcaggagcccttctctgtccaacacaccaaaaggagtgagaaaaacaaatgagaaacgtccccccaacactcacaccccccttacctacacctataagccacaaactgtgctcctcccctactgcagcagtgggcaggagaaacaagaagagaaagtgtttcttcccctctcttctgatacataaccccacggggttctcttgctggagagggtgaccccagatcacagcggggccaccatgtggccctgcaggatgtccacgaggtcctgagcccctctctgcagtgccagctccaagggtgtgagacccctggcgtccctgcgatggagatcagattcagctgccagaaagctgaccacagcagtgtgaccctcttgaactgccagatggattggaagtgccccggtgccatcaggcacgttgacatcagccccgtgctccactaggaccttcagggtgtccaggaatccagtgcgggctgcgtcatggactggactggtaccggaggtgtcctggacattggggctggcaccttgcttcagcagctccagggcgatggcggtgctgccaaacatcatgacctgcagcgccgtcttgccgaagcggttgagggcgtcgggatgcaccagctcgcggtgcagaaggcggcgcacctcctgcacgtcgccccgggccgccgccccactcagccggtcgccggcgcgaacctcctccagcagcatgtcgacactggcggcctgcaaagccccccgccccgccccagcccggcgctgtcagcgcggagcagccggcgggcgctggcccgaacagccctcccggggcgcgcacgcggtgcacccggctgcgctgctctcccgtcccggctccccccccggccgtaatggccgaattcccgggcatatgtcccgcgtaccgtcgactgnnnnnnnnnnnnnnnnnnnnnnnnnnnnnnnatgcggccgcttcctcgcacactactcgctgcgctcgtcgtttcgctaagaggccctatatgactatcaac

SEQ ID NO: 129743 - DNA, 1698 bp, Homo Sapiens
gactgtatcaaataaatgtttattgatttttttccagggtttttgtgcggctcagtttgtggtgaaaaacagggggcggggccctccaggcacgtggcggaggctgccgaactacgggtcccccatgcccgccgcgcggccttgtggggcttgtagtccgcgacgcgcggccttgtggggcttgtagtccgcgacgcgcggccttgtggggcttgtagtccgcgacgcgcggccttgtggggcttgtagtccgcggtgggcaagagagggacccgccagctcccggcggcccatgcgcgccgcccggccaggcccgcaaagaggcctccgagcgccatggctgcgcccccggcccgcgcggacgctgatccttcgcccacgtcgccacctacggcccgagacacaccaggccggcaggctgagaaaagcgagaccgcgtgcgaggaccgcagcaatgcagagtccctggacaggctcctgccacctgtgggcactgggcgctctccccggaagcggaccaccagccagtgcaagtcagagcctcccctgctgcgtacaagcaagcgtaccatctacaccgccgggcggccgccctggtacaatgaacacggcacgcaatccaaagaggcctttgccattggcttgggaggcggtagtgcctctgggaagaccactgtggccagaatgatcatcgaggccctggatgtgccctgggtggtcttgctgtccatggactccttctacaaggtgctgactgagcagcagcaggaacaggccgcacacaacaacttcaacttcgaccacccagatgcctttgacttcgacctcatcatttccaccctcaagaagctgaagcaggggaagagtgtcaaggtgcccatttatgacttcaccacgcacagccggaagaaggactggaaaacactgtatggtgcaaacgtcatcatctttgagggcatcatggcctttgctgacaagacactgttggagctcctggacatgaagatctttgtggacacagactccgacatccgcctggtacggcggctgcgccgggacatcagtgagcgcggccgggacatcgagggtgtcatcaagcagtacaacaagtttgtcaagccctccttcgaccagtacatccagcccaccatgcgcctggcagacatcgtggtccccagagggagcggcaacacggtggccatcgacctgattgtgcagcacgtgcacagccagctggaggagcgtgaactcagcgtcaggtctgcgctggcctcggcacaccagtgccacccgctgccccggacgctgagcgtcctgaagagcacgccgcaggtacggggcatgcacaccatcatcagggacaaggagaccagtcgcgacgagttcatcttctactccaagagactgatgcggctgctcatcgagcacgcgctctccttcctgccctttcaggactgccgtcgtacagaccccgcaggggcaggactatgcgggcaagtgctatgcggggaaagcagatcaccggtgtgtcccattctgcgcgccggtgaaaccatggaggccgcgctgcgcgctgtgtgcaaagacgtgcgcatcggcacatactcatccagaccaaccagtttacgggagccgagctcactacctgaggttgccaaggactcaggagaccacgtgatcctcaggatgacgggtcag

SEQ ID NO: 129744 - DNA, 1460 bp, Homo Sapiens
tttcatttttctaaagctttatttattttataaaatgcatagaataaattatactagtaacattttaaaaattaacatctttgtattcagcagtcctgggtcaggaggcaggaggagggtggtggggacgggatggctcactgggcagctaacccgtgtaggccacttcctcctcgtcactgccatcggggaccgcgtctgtcccaaagtagcggtcgccaaagttcccaatgcctgggatgatgcggaaaaggtcattgacccgcttgtccaccgccgtggtgatgattctcactcgcggaaatgcataggccactgagtgcacgcccatctctgccatgagcagcgacagcaaaaagatcttgtcctcaggcacgtcgtggtccaggagcacgcgcactgccatcatggccgccgcgcccgtggacacggtgcagtccatgaggatcacgtggtcatcgctgatgtccttgggcagcctcaggtagtggagctcgggctccccggtaagctggttggtctggatgaggatggtgccgatgcgcacgtctttgcacacagcgcgcagcgcgggctccatggtttcaccggcgcgcagaatggacacaccggtgatctgcttccccgcatagcacttgcccgcatagtcctgcccctgcggggtctgtacgacgcagtcctgaaagggcaggaaggagagcgcgtgctcgatgagcagccgcatcagtctcttggagtagaagatgaactcgtcgcgactggtctccttgtccctgcggcgtgctcttcaggacgctcagcgtccggggcagcgggtggcactggtgtgccgaggccagcgcagccctgacgctgagttcacgctcctccagctggctgtgcacgtgctgcacaatcaggtcgatggccaccgtgttgccgctccctctggggaccacgatgtctgccaggcgcatggtgggctggatgtactggtcgaaggagggcttgacaaacttgttgtactgcttgatgacaccctcgatgtcccggccgcgctcactgatgtcccggcgcagccgccgtaccaggcggatgtcggagtctgtgtccacaaagatcttcatgtccaggagctccaacagtgtcttgtcagcaaaggccatgatgccctcaaagatgatgacgtttgcaccatacagtgttttccagtccttcttccggctgtgcgtggtgaagtcataaatgggcaccttgacactcttcccctgcttcagcttcttgagggtggaaatgatgaggtcgaagtcaaaggcatcttgtagaaggagtccatggacagcaagaccacccagggcacatccagggcctcgatgatcattctggccacagtggtcttcccagaggcactgccgcctcccaagccgatggccaaggcctctttggattgcgtaccgtgttcattgtaccagggcggccgc

SEQ ID NO: 129745 - DNA, 467 bp, Homo Sapiens
caatgccagcggacaggggctctaggcctcccaggagcagccacgctggggctgagaccagggacctacttttgcagggggtccagggtcagggagaggacaaaggggtcctcgggggagctgggcgggggcccaccttgtagaaggagtccatggacagcaagaccacccagggcacatccagggcctcgatgatcattctggccacagtggtcttcccagaggcactgccgccctcccaagcctgccggcgggagtggagaccctctgtgaggaacaggcaggctgccggcacagataggtcccagaggtgcccatcccgctgccgctgcctgcggttgcccggcttccttctcctgctccacaggcactggaggggagccggaggcaggcgtccggcagcaggtcccacccccccgctgctctcaccgatggcgaaggcctctttggattgcgtgccgtgttca

SEQ ID NO: 129746 - DNA, 347 bp, Homo Sapiens
tggtgggggaggctgtggagcagctgtgggcacagtagggccctcacccaatgccagcggacaggggctctaggcctcccaggagcagccacgctggggctgagaccagggacctacttttgcagggggtccagggtcagggagaggacaaaggggtcctcgggggagctgggcgggggcccactttgtagaaggagtccatggatagcaagaccactcagggcacatccagggctttgatgatcattctggccacagtggtcttcccagaggcactgccgcctcccaagccgatggcgaaggcctctttggattgcgtgccgtgttcattgtaccagggcggccgc

SEQ ID NO: 129747 - DNA, 359 bp, Homo Sapiens
ccacaggagtggtcctgcccatggaagggccagttcaggtggccggagctcctgagctgccctaggggactgctgtgggtctgaggtggtgatgtcccccacggctgcctgcgcctgagcccccacgcatccacccctggggccactctgctgttcaggagcacccacccgtgtcctcgaccatgagcagccccccagcttaccctggcatcaggatctcagggtgccgggcccttggagcagaaggcagcagcaatgcagagtccctggacaggctcctgccacctgtgggcactgggcgctctccccggaagcggaccaccagccagtgcaagtcagagcctcccctgctgcgtaca

SEQ ID NO: 129748 - DNA, 483 bp, Homo Sapiens
aaggggcgggcccgaaatggggtttggcaggccagaaaagaggcgtgacagcggcagggaaagggggggggccggagcaggaaagagggcctagcgggagcagcggggcaaggggctacgggaaggcgggtcacacagcagcaccacggagcacactgctcacatatcccaacgtagcttcctctgacgctgagttcacgctcctccagctggctgtgcacgtgctgcaccatcaggtcgatggccaccgtgttgccgctccctctggggaccacgatgtctgccaggcgcatggtgggctggatgtactggtcgaaggagggcttgaccaacttgttgtactgcttgatgacaccctcgatgtcccggccgcgctcactgatgtcccggcgcagccgccgtaccacggcggatgtcaggagtcctgtgtccaccaagatcttcatgtccacgagctcccacagtgtcctgcctcccaaggat

SEQ ID NO: 129749 - DNA, 744 bp, Homo Sapiens
tttactttcaaaacattttctattataagtcagaaggaaaaaagcttactgtatgtgacagtcttcctgaaacctaagagaaagttttaaccaggccctatggcaatgcagaaacactaatacattttacagtgaaaacctactttaacacatctcaaaatgataatcgtataaaactttctagttctaatttgcactctacgcgaaccaatatttttcttttcttaacacatactgctcttctataccaaacacttgccctttaaccttcagataaaaacctcaaataccaaaaaatgcaacaagcttttgaggtgttgggaattgttggttgttaaaatcccttttattttataataaattatacaggcaatccttgctttttattaccacactggattgcttctgtacacagctaagttgcctgaagcatggaaacttggacttctccatctgacacgttctggaagcctcaaggcacaagctgacagttctgcttctacagaaaaactctcacactgctctcctctcaacagtactgcctgttcccactactccacatgacacctacgagggcactacatcacgtgagggaagcttcttcatgagggcagacaagaggaggcaccacccaggcactggtctctgcctggcatctattccgagggcacctggcacagtttctaaattaaggcatatctaaaatgcttttctacctttagtttttatttttgctatattttt

SEQ ID NO: 129750 - DNA, 817 bp, Homo Sapiens
  misc_feature (65)..(100): n is a, c, g, or t
  misc_feature (439)..(487): n is a, c, g, or t
  misc_feature (742)..(742): n is a, c, g, or t
  misc_feature (747)..(747): n is a, c, g, or t
  misc_feature (768)..(768): n is a, c, g, or t
tttgtagtaaaatggccagatgtttattattttgttacattatttccattgcatattccacatcnnnnnnnnnnnnnnnnnnnnnnnnnnnnnnnnnnnncacaaaggtacaaggaatttcagaaacaacattaaaacaatcattcaaactgtttcaggcacggtttcaattaaaagcatagatttgatttctgacttcctgtttccttctatgatacaatctcaagttttgtttcaggaagcacaattattgtagcgttaaggtggatacctgccaaagctcatctcctagtgctgtcctcattctcagaaagttcctgagtcaacagaaaggggacgcccagggtatggaataaggagatgagagcatgctctgccaactggctgggacctgaatgtgctaggcaagttccactacatcagctcaagaacataaacnnnnnnnnnnnnnnnnnnnnnnnnnnnnnnnnnnnnnnnnnnnnnnnnnttacctatccctctcccttgctgtgaaataatttaaataatttattctagatgtaaaaataataatacaaaaaagtttgttcaaagacacctgtgtcctgtttgttaagtgtgcagtctgggtcccttggggtggagggagctggccaaggaatggcattgtgcagaggcataccgggaagctctctggatgcaaccccacctctaccgcttggcagtcaatgaccttggcatgatgtttcttcacttctctgangctangtctttgattctgaacatggngaactgtatgcctgctgacctgtgttagaacagcatgtgtcactgagtg

SEQ ID NO: 129751 - DNA, 705 bp, Homo Sapiens
taacatttaaaaatacttttagtaaaatactctgtaccctgtgggaactcctttggcacacagtaaatcatagtgaagaacaaacatagcagaattgccttagttgaggctacagtgtaagagagaatacaacttagaaggtaataatagaaaaatcatagcattttccagcaattgatatgacagtaaatttataaagaaatacaataatttcccagtgactcttaactgttcaggatgccagtgctaaaccaggttgccatacataattcaaagaaagctagaaaacacattccacatattaaattgaagataatttttgttcagagagcaactgaaacatatagtaagttatatattttttagatataagataaaattcttttgcttttagttaaaatgatttttttcatacattctaatggacatatgaaaaagatatttactttttttcatcactaaccctgaggaaggaagaacaaatgtggagtaggccacaaaactcactaggaaccaatctccacacttttcccaattgtgaatagcaattaatgggagaagttcaggatactacacttgtttaggctcccatacacatcagcttaaactatttaaaatagatacaacatttggggcaactagcacagtggcatttctctgcttcaactgagaactatttaatatcatcactttatttcctacact

SEQ ID NO: 129752 - DNA, 1455 bp, Homo Sapiens
ttcagacagttaaataatcctttatttgggtgggctgggggaggggtgactggcccaggagggcaggcgaggccgggcccagacccccatggggggtggcaggggcctcgggcgggctaggatgcacctggcacccagaagtgccgcgggggcactggctcctcaggggcccgagcgggcggggagcagtctcctacttgtgccgggcctcggtcaccctctgcaggcagtactgcgcggcgggcagcgacaggaccaggctcgcggtgcggcggcccatccagtacaggctgtagcccagcaggccgaagaaggcggccttcacggccaaccgagacactctgccggagacggacggcgggggcacggtcatgatctcctggatgttgaggtcggtgctccagttcttctcgatgccaggcacgtggcccatgcccacgacgcccacgaccacggaggggacgcacttcctgggctcggcgtcagaggcccgaggcagctcgaggcgccgcgcggcctggcgcagcatgtaggttaggtagacgtcgcgctccgagacgatggtgcggtgcaggtctgggaactcgccaatcatctcggccatcatctgctccagtaggtccttctgcttgcagcgttccacgtcatccttgctgatggggtctgacaggaagcacaggccccaagccagcctgaccttctgccagaaggagagcgctgcgatggccctcttgaaggtgacggggatgggtcggtcacccaggtggaacttgcagaaaggcaccttgctggcctccttgaaggccctccctgaactcgccacctggggccatgcccagctgctcggtgatgtgtgcagacaccttcagcagcagcatctgcatcagccccgacatgagcccgttctgcctcacggcctgctgcagcttctccaggctgagctcctgggcctcccgcagcagcgtgctctcgtccatcttcagcatggacacacgatattggcagagctccacgaccaccacgtcaggctgcacctcccggatggtcttcacaacgtccctcttgctgtcgtcgctgaagtgggctgtccccaccacgtacaccctgctcccgtcctcagccaccaactgggtcacagtgcgcggcaggttgggccgctgacgccgccgcttcagcttcatctccaggagcaggttgaaggcgtccacgtcggacaggttctgggggtctccagaaagcaccctgggcaccggctctgaagcctctgacggcacaacaggttccacgttggcctcgtgcggtggctgctgctcctccccgtccatggctgggcggcggcttcctgcacctgtggggagcgcgccgtccgcgccgcgcggcgtaccgaggcgaggcagcggcgctcctcagccggcctccatgcggccctcgtgccgaattcgccacccaggcctc

SEQ ID NO: 129753 - DNA, 1380 bp, Homo Sapiens
gatctcctggatttgagttcgtgcttcatatcttctcgatgccaggcacttgcccatgcccacgacgcccacgacgacggaggggacgcacttcctgggatcgctgtggggaaagacaagggttcagtacctgctcgggcctcagcctcacagggggtcccacgctctgcggcgtccgtcaccgtcagaggcccgaggcagctcgaggcgcgcgcgcggcctggcgcagcatgtaggttaggtagacgtcgcgctccgagacgatggttcggtgcaggtctgggaactcgccaatcatctcggccatcatctgctccagtaggtccttctgcttgcagcgttccacgtcatccttgctgtggagagggatggctgcagccccgcagggatgggcaacgggctgggggggtggggctggcactgtggacaccgggcagggaccacagcacgtttgtttgggatttgtggcggaaggaaagggcagggaaggccttgagtgaggattggctgcgcttggacctgcacaggagggcctggagcctcccacagaccaccctgcaggccggccagggtcccgggggcagccctacctgatggggtctgacaggaagcacaggccccaagccagcctgaccttctgccagaaggagagcgctgcgatggccctcttgaaggtgaccggggatgggtcggtcaccccaggtggaactttgcagaaaaggcaccttgctggcctccttgaagggcctccctgaactcgccacctggggccatgcccagctgctcggtgatgtgtgcagacaccttcagcagcagcatctgcatcagccccgacatgagcccgttctgcctcacggcctgctgcagcttctccaggctgagctcctgggcctcccgcagcagcgtgctctcgtccatcgttcagcatggacacacgatattggcagagctccacgaccaccacgtcaggctgcacctcccggatggtcttcacaacgtccctcttgctgtcgtcgctgaagtgggctgtccccaccacgtacaccctgctcccgtcctcagccaccaactgggtcacagtgcgcggcaggttgggccgctgacgccgccgcttcagcttcatctccaggagcaggttgaaggcgtccacgtcggacaggttctgggggtctccagaaagcaccctgggcaccggctctgaagcctctgacggcacaacaggttccacgttggcctcgtgcggtggctgctgctcctccccgtccatggctgggcggcggcttcctgcacctgtggggagccgaggcgaggcagcggcgctcctcagccggcctccatgcggccctcgtgccgaattcgccacccaggcctcgctacctt

SEQ ID NO: 129754 - DNA, 1049 bp, Homo Sapiens
  misc_feature (50)..(70): n is a, c, g, or t
attatataaacttaaccttttaatactgtttatttttagcccattgtttnnnnnnnnnnnnnnnnnnnnntttaactgcttaaaagtaaagttttgccattgcttggagaaacttttttttccttctctgcgctgccagctgtaacacttcttctggattgcttgcattcaactctgtctggccgatggctttgattgcaatttgtcttttatctgtttctcctcttttatgatgaagataagtcaagtattccaaaatggtaacatcccatatgtagtcgtagtaggagtccatagcatcatgactgttttgttcttgcagagatttaaacgctgttttgtagtcaatttctctgaggaactgacataaaatggccacctgtgtgtggcaattcagcaaagaacaacattttatcattcgttttattacctggtctgtataaacatcagggggcacagccttgttaaagaagtcagaacacacagctcctgcctggaggtaatagtgaagagctgctgaatactgattcgttgcaaagtaaatatctgcctggataattaaccaagaatggttatttggatttatactgagtgtatatcgaactagctctttcactgtgattgccacagcttcaaagtccacagactggaggttgggaatggaagatggccaaatagaaatgtgttcagctgtaatatcattcacaatgtcctcccgaacattgtgaagtttcacaaagagtgataaaataatagtcaaaacgagtggttcctatgagaaagaaaacacagaatccttaaacagtgtatgtatatttatttaatattgctcctgtcaacctcacagacatcaagcattctaaaagacccttgccttttgaaaatgtagcatctgttttagcatgtgctttagcacactaaaaatcaactttttaatcgcatgtgggggcggggcgtggaccatagcacataatttacataaaattagcataaatgtttggcttatggtgctatctccacgctcaactcctcacatgaatctcaagtaa

SEQ ID NO: 129755 - DNA, 951 bp, Homo Sapiens
  misc_feature (329)..(379): n is a, c, g, or t
cgcatttgctgaataacaacaatttaggaatgctcaatgtgctgttgattctttcaatccacagtattgttcttgtaaaactgtgacattccacagagttactgccacggtcctttgagtgtcaggctctgaatctctcaaaatgtgccgtctttggttcctcatggctgttatctgtctttatgattgcatgattagacaatgtggaattacataacaggcattgcactaaaagtgatgtgatttatgcatttatgcatgagaactaaatagatttttagattcctacttaaacaaaaactttccatgacagtagcatactgttgagnnnnnnnnnnnnnnnnnnnnnnnnnnnnnnnnnnnnnnnnnnnnnnnnnnnagcatgctcagttttgagacactgacaagattaaggtataccaacaaaagtgcagtagtgtcacttttttgctgtcaatatatagagacttgtaaatgataatcattcttgtgttaaataaaagaattttaaaaaagatggatttgacacactcaccatttaatcatttccagcaaaatatatgtttggctgaaattatgtcaaatggatgtaatatagggtttgtttgctgcttttgatggctacgttttggagagagcaatcttgctgtgaaacagtgtggatgtaaattttataaggctgactcttactaaccaccatttcccctgtggtttgttatcagtacaattctttgttgcttaatctagagctatgcacaccaaattgctgagatgtttagtagctgataaagaaaccttttaaaaaaataatataaatgaatgaaatataaactgtgagataaatatcattatagcatgtaatattaaattcctcctgtctcctctgtcagtttgtgaagtgattgacattttgtagctagtttaaaattattaaaaattatagactccaaa

SEQ ID NO: 129756 - DNA, 696 bp, Homo Sapiens
  misc_feature (649)..(649): n is a, c, g, or t
ttttattccatagacttcatttattaataagcatattgtgaaaatctacatttgttttagatttcatgtttacagagcttttcacaattgtattaggatctttcacaactactctctgggttttatgaacagtaaagaatctggctcatgtgaccctctattcatagctcccctttggctcctgtgaaggagctgatagttccctggagtaaataaatcaaaacaagatatccttgggagatttttagctgttaatctactcctggaccccatcctgggaactgagggaaaactcctagagagatatacaaatctttgaacaaaatatttacatgaaaagtggccagttttcttccttggagtagcaatctgtaaaaataagtgctgctgtttaaaaagtagcatgccctacaccataccaatgtattagtgagaatttggcgattctcaccaaacaacaatgaagtttcacatttggtactggatggagcttgggttagatctgccttttaaggcaaagtcaactctttcaacttaattctttttcaagggagtaatgtactgtctacacttggcttaaactaacttctattatggactactttcaatgtacatgtaaatgttcatgcatcagaagccaatttctttntacagtacatagaaaaggtatattttgggggtgctaatgaacacttc

SEQ ID NO: 129757 - DNA, 1081 bp, Homo Sapiens
  misc_feature (104)..(120): n is a, c, g, or t
  misc_feature (128)..(129): n is a, c, g, or t
  misc_feature (138)..(139): n is a, c, g, or t
  misc_feature (143)..(333): n is a, c, g, or t
  misc_feature (959)..(959): n is a, c, g, or t
  misc_feature (1019)..(1020): n is a, c, g, or t
  misc_feature (1027)..(1027): n is a, c, g, or t
  misc_feature (1061)..(1061): n is a, c, g, or t
gggggggagaaaccgcgggttttcgtgtcgggtggttcctttggaaaacaaaagaggcccctttttctgtttttttcggggccgcccggccccccccgggtggnnnnnnnnnnnnnnnnngggggggnntggcctccnncccnnnnnnnnnnnnnnnnnnnnnnnnnnnnnnnnnnnnnnnnnnnnnnnnnnnnnnnnnnnnnnnnnnnnnnnnnnnnnnnnnnnnnnnnnnnnnnnnnnnnnnnnnnnnnnnnnnnnnnnnnnnnnnnnnnnnnnnnnnnnnnnnnnnnnnnnnnnnnnnnnnnnnnnnnnnnnnnnnnnnnnnnnnnnnnngttgtgtagtctcatttattatgaagattcttccagtatgtacatacgaaccaaaagtatcagtttatcagtcccactcacatcccacccccacaggcataccaacagggtcaatcttccttcatggtacctagaaaaactgtctttttccttaggtaaatggctaaaaatgtattcatgactgctgcagtaagagcatccacctatgtatctttacatactttgagacagtgtgataaagctctttcagcacagcagtctattcattcaaagtcatctaaccaaataccttcccccacagctaagaaagaatcccagtgtttccctagtttagagatgaagatactgaaattgcaaaagcaaaaaggctaggactaagatccaggtcagtagttcagctataccagcagtacacattagaattacgaagagttttaaaatatacctgtaggggcctattctgactcagaacagcctgggctgtgtgtccttaaagagtacttgagatgactcagttgtgtgactaaggctgcaaaggaagtagagtgttcagataacacagacaaaaggttacatcattcttagtttttagttttatataaacacccccatttttagttttatanttaccaagataatatggttcacttttatttaaattcaaatgggtgctatactgtcacgtnngctatcnccactttacaacttcatgctggatgctggtagcnactaagatattttctctttt

SEQ ID NO: 129758 - DNA, 959 bp, Homo Sapiens
  misc_feature (391)..(403): n is a, c, g, or t
  misc_feature (719)..(731): n is a, c, g, or t
gtaagacctggccctcccctgctgccctgaagaccaccccagtctacctcggtgctggccaggaaacctttcggctacctctcccaccatcccagactgtgggcagggggatggggagggagtgggcctggatctgggacctccctccagaatttcctccagatgggggcagtgcccagggaggggttatttgtcttccctgccatggagtgggaatccccagccgaggccctaggcccctcagcagggaagggatccccggggaggcaggtcccaggagcagaccctgcccccagcccccacagacacaccccaatctgaaagccatgcgtgtcggtgtatataggaaccatgtacagagcccagagaagccccctacatccccccgggnnnnnnnnnnnnnctagacagaaactcatctatatattctgtatctggagttccgttttgaatattaactgtgttatttttatacactttttaagccttaactcgccattgatttaccagtttaacgtttcctggggtttctttgcccatggggttctctgcccccacccccggccctttgtttgacttgcgtcgtctgatactcagtattgtagctttttgtccgcatgttactccctgtaaatacgctgttatacatactgttaacacccctttgctttttctatgggacctccaggccaccatatttagaactagttaccttattnnnnnnnnnnnnncagtctgttggcttctcagtctgcatcttggaggcagggaggtgagggcaggtgcccctcagacacttcaggaaggtagtttgcattctatttaaaaaagggagtggggagcaaatgaaaatcaaatgtggggggaaaacactaaagggggcaagaaacaaaggaattacaaaccctctgctctttgtatttctctgttgtgaagaataaactgtacctgcacccggg

SEQ ID NO: 129759 - DNA, 1070 bp, Homo Sapiens
acttttattagtctttttattcttcttttattgatcacctctgaagttcagtagcacactgcataattttttgcattagcatgctgttgtttctacctaaaatgaccggggtccttgccttctgcttcccatagagattgtcccaactccataggtccatagtcacaaatgaggacagctttacatgtaacatgaatctaaaagaaaaaaacaccacccttaattaagaggcaaggaagctatgacagatccctcccaaatgcagtaataggtcagctattactatcccaacttccagagctttcacaggcatcgttcccttagcgtaagattatacttcattttacaatttcagagatccaaccatcttttgaaacctgtctgaaactagcccacatgccatataccagattacaacatttaggccagcttcactattacttttcctccttttacgaccaccaagacccagtgttcagatccgatgggaaagggatcaggaggattaagctgatcaactttaccttaaagcacagctccagaaacaagctcacctcctcagtatcacacactgccaggaaacttgggggcaaccaggtcccctgcatttcatcactgtcattaccccggaagtcctcgatcaccagaaaaatcaccttctgtcatcttaagagtcttcatctgcttaagtacgccgggatctctgtagactaagtcagtcatcctgtaggccccactgcccacgctgtgccaatagctggtgtgctttttctcagtcttgatgggaccgttttatccgcctgtcagcccagagcgcagcgttgcgcagtccgaagcgagagaagggcgcggcccccgcgggctcccgcccctctcactgccgagggggcctttcggagctcgggcccaccgggttggaaggcccggctcctccgtgccacattcaccaccatctcgaggccgtgggaggaaaaacccggcgagtgcgcgccagcagcagcgactagcggggaacggcgcgcaggaaggcaggcagaggcttgcagctagtaagtcgacaccgggaatgc

SEQ ID NO: 129760 - DNA, 1030 bp, Homo Sapiens
ccggtgtcgacttactagctgcaagcctctgcctgccttcctgcgcgccgttgcccggctagtcgctgctgctggcgcgcactcgccgggtttttcctcccacggcctcgagatggtggtgaatgtggcacggaggagccgggccttccaacccggtgggcccgagctccgaaaggccccctcggcagtgagaggggcgggagcccgcgggggccgcgcccttctctcgcttcggactgcgcaacgctgcgctctgggctgacaggcggataaaacggtcccatcaagactgagaaaaagcacaccagctattggcacagcgtgggcagtggggcctacaggatgactgacttagtctacagagatcccggcgtacttaagcaggtagtaatgatggacagatgaagactcttaagatgacagaaggtgatttttctggtgatcgaggacttccggggtaatgacagtgatgaaatgcaggggacctggtaggtttctttttggagactaactgggggctgcctggtgggacagaaccagcatgtttccaagggctgtggctggtcatagccatgggatctccaactgcattgcaagagcaacctggaaaagactttgacagcgcaggtcagtacaattacctgcaagctgccactcagctttcctataatgtttcaggaccagggctggaagccttccatgttgtcaacttcaatgtagatgggtttctataatttggaaacggagtcttggctcctgtcacccaggcttgctgagaactgcagggggatttgatctcaggactacatggcaaccctctgccctccgggggttcaccgcgaatttcattagctaaatcctcccccgagattagcgtggaagattaacggtgttgcaccaccatataacacccaaagtctaattctccccgcacattttaggtcaaagatcgtgtttacacccatgtttgggcacaaatgggttatcagaactttatagaccccggtatgatccgcccgactggggcctc

SEQ ID NO: 129761 - DNA, 780 bp, Homo Sapiens
tttacttttattagtctttttattcttcttttattgatcacctctgaagttcagtagcacactgcataattttttgcattagcatgctgttgtttctacctaaaatgaccggggtccttgccttctgcttcccatagagattgtcccaactccataggtccatagtcacaaatgaggacagctttacatgtaacatgaatcttaaagcacagctccagaaacaagctcacctcctcagtatcacacactgccaggaaacttgggggcaaccaggtcccctgcatttcatcactgtcattaccccggaagtcctcgatcaccagaaaaatcaccttctgtcatcttaagagtcttcatctgcttaagtacgccgggatctctgtagactaagtcagtcatcctgtaggccccactgcccacgctgtgccaatagctggtgtgctttttctcagtcttgatgggaccgttttatccgcctgtcagcccagagcgcagcgttgcgcagtccgaagcgagagaagggcgcggcccccgcgggctcccgcccctctcactgccgagggggcctttcggagctcgggcccaccgggttggaaggcccggctcctccgtgccacattcaccaccatctcgaggccgtgggaggaaaaacccggcgagtgcgcgccagcagcagcgactagcggggaacggcgcgcaggaaggcaggcagaggcttgcagctagtaagtcgacaccggcctcgtgccgattcacaaccagcctcgtactagcctaatt

SEQ ID NO: 129762 - DNA, 1660 bp, Homo Sapiens
ccggcaaagacgcgctttaagcttactatgaaatacaaaagtgcactcttctatatctacatataaaccatattagaaataaaactgtgtaaaatgtttgctgtgcaaactccaaaaagtcaggtgcgtctgctcctgcccctactgcagggagtcactgttctccaagaccagcccgctgatgtgggcaggggccagggcacccgcatcctcctctgtgctgtccacagactcgtcctcgctctgccctgccatcatgacctgctgcaccgccagggtggccccgtccgaggacagagactgaaggctgtccacgttcatgttcacgggcgtggtgatggtgacaacagctccttccgacatggtgagctcgctcggcggtggctgtgcgactcctgatgcaatagaatcaggccaaaacctctgaactggccggttctgagcagtttttttctttgttttgggggtctctgaacaacttgaatccaacattggctgaagaattcgtcttctggcattgatgaaccagttgttgacttggagtagtgtcaaatttgtctgagcagcaatctgttttttctcatcctctgttgggtagggatgcccgatgtgctggaagagccaggaccgcatcacgttcgtggcatgctttggcaggacgcccctcttgttcttagatgaaccatcatcttgatgcaagatgctgagatcttggtttaactgtaactgaagctgggagttctggatcctaattgtcccaggcgacaatgtctgtgtgaccacttggccttggggagtgacgaccgtgacaggctgatacactgtgccacctgccaccgtcgccatggctacgtttccctgctgcagcgcggacgccggcaccacaattccctgagggctgatggtgcctgtgatggcactttgaatctgctgggactgcactggtgagtacgggcttccaggctctccactcaacagagtttcactgttcatttttgttttcagacaagcaatgtatcgactgcagaaatctttgcagagttcgttaaccttttccagctcaagaagatgaatgcgcaaaacctggattgcttttaccattaaattatcggtttctggatcttcacaaaagaaaggtttcccttccttctcttgctttcttacaaaattttcgatgtctacatcaaaactggcagaagttgtgccttcagagccctgtgtagattgttcacatttttcaaacaacaaagctaataatggaaatagtggatgcctataaatggcctgcttgtccacatccatcggggtctgagactccacagggggagggctcactccttctgcatcgggttcagagcagtttggatcttgttctgtctttaactctgttactacttgcatctgttgcccatcttgatagctgtctatacttaatgtctgtgtagccatcatggttcatcagagttttataagacatcaaatcatcttgggtgaaaagcgaatggtgtctgggtgccaatcttcatcacactgacaagcggctgcagcaatcgggacccgcagtgccgcgcccgcgtccaaccgtcacgccgacgctggccacgtaacacagcctcgctcctcgtgccgattacacacccaggcctcgctacctagcctt

SEQ ID NO: 129763 - DNA, 699 bp, Homo Sapiens
  misc_feature (347)..(347): n is a, c, g, or t
tttttgtttaataaaaatttattgacttacaagtgattatttatcaaaagaccattaatagcaggtactgaaatgatgtgttactgggtggtgctgggagactaataggaaatcaatgcagctggccggccagaatgcatatgagaagcccaccccccggcagccagcgcaatcacccccgcaacacacgccaggtgccacccctggcgcaatgaaaagttccccctttttatttatcgtttacaaatgaaatgatcaatacttttaatctagagcaaaatttattaactttcccatcggagagagacatattgactgggggagagagtggggtgtgcatgctgtanaagatggatggctgcgtggccatatcctaacctgtccgcgaggcagtgcacctgcagctgcccttccagcctacggaccgggccaactgggacaagtgcacctggagaagccgagtctggccacccgggatgcacagcaggcaggtgggacctatgacatggggggatccttcatgcatcaggggacactagcaagcaatagcccagaaaatcaagttcctggccaattccaggaaggaaatggcaggattcagagacccagatttccacaggacaacagggttagtgcccactgtttgctgtgccgtgaaggcacacgatggcacccaaatgctgtcactggtctgggaag

SEQ ID NO: 129764 - DNA, 961 bp, Homo Sapiens
tttccttttccaaagatggaaataatgagctagtttatctaaattaatgacctaaatcacagatgtatcaaaattacggcagtttatcgcaaacgttaaactttcacggcattaacagcacagctttggtaggtgaaatatgcatgcaacattatgaaaagtatagtaagaaatttatgtgaggagactaagggtaaaggtgctgtgttttgcttcttaaataagtaaccaatcaattataaaatctgcagcatattttaggtgtgatatgtctaaggtttattttgttagagcaacagcctagaaggcaaaattatttgccataaacatttccatcagtgggaactacctggcaggaggactttagtaaaatggggtgtttagccaaagatcatttttatgataaaaaatatccgtagactacatattctggtttttaaaatgtcttcagtatacatatgacagaaattttagtatgatcctgtaataagttacaactatactagtgagttgtaagtatcacgctgtctcaacgtctaatgcataataaaatgaaaggaatgtaaaacagtttgttccaaaaagatcagagattaaagactatccatgaaggtttcacttttaaggcaagaacccttttttatgcaagactatgtggcatcagaaaactaaaatgtgattcaccaacatgccagccaatgttcattaaaaatctgtcccttactatcaggtgcaacagcgaccgggaacatcaccttacacagtataacgtggaaagaaaagacaacattggcgcacttctcctctcgaaaaccttatctttctattcagcttatcaactactgcaggactggcactactgcacacacggagagatggagaagaatctacatcatcctagggactgctggaggtttaagctccatggccttctaacactaagcaaagctgacataaactc

SEQ ID NO: 129765 - DNA, 896 bp, Homo Sapiens
tttaccttttagatttttattagtagttctctctgaagaatcaaaatagttagcaaattattttagattcaagactgtatatcctttgtatttagatctttaatgatgtacaacataatacaaaacaaaccagagagactgatttctatgactaggtgttattcattgtgtcatcctaaagcagtgggctggaggggaagctgttcaaggagaacagaggtggagttagtgctggccaactaaatcatggcctgtctgcttacccattcaatgtgctgggaaggggccaatgatttcttaaactgtttcctagagcaggggctctaaaaccctgggtagcagaggactgtggtccaaaccaagccaaaagaaacaggctggggtagggaagcgtggtgactgcctggcagaaaaggcaaactctgggccccatagggaaaagtgcattctttgcacctcagagatattgcagaaccagtgttaacactatgagactttgttaggaggggaaaaaataaaaccctggaagaatctttcacttgaactcaacttgactggagttcagtcaaccagtctcaggggaagggggaagcacctagctccacagcagcactgagtctggccctcccgccccatctccccagcccctctcagcaactaggccaggcttcagctgaggacataaacaccccagaaagactagggtagtctctccggagggctgaagtgggaaggacacttctcaaaatgcaaatgcgtttaatacggaaggagccaggacagttctgggggcactcacatgcccgaatcttccccacctccccagctcagggctaggtcacagaactgcgagcatctcacactggactctaccccaaagaaatcggagtgccctc

SEQ ID NO: 129766 - DNA, 878 bp, Homo Sapiens
  misc_feature (812)..(812): n is a, c, g, or t
ttcaggaggcagtaatgctggtttattccccatggccaccggggccgcactggtgcccactcctgccaccattccagccacacccaggccgtgggcagccaccctccgagacacctgggccgggggcagggtctcagcagaagcgccgtgggcagccaccatccgaggcacttggtggtttcctgaggcccaaggaggctgctcccagcacagtgaccccttccctggtccgctggagggaccacctccccactgagctcctttctcagagaactgggcatagccagagctggggtgagaaagcccttcagccctgctgcaccgaggctctgccagttctcataccccctccccatcccatcttggcaaagcgctggtgcagcttagggcagctgaagcactcggcggggacctctcctgacacctgggcggccgcaggactccctgcactgccccacagcaagctgcccatgggcccggggtcaagccaccacccacatgtcccaggagtccggccagcccaccacatccgctccctagctccggcgaggccaccccttctccaagcggcatgcggtccctgctgaggcagtcaggcagctggcttcggcaggccgtcaggacccaggaggtgggcgcaggggtcatccaggatttgaggccctggccccacctgagtgacaatgatgtatttgaccccaccgggggtcggctccatggccagcgcagcctgaagctcagctgagagaaggggccggcctcacctgcagccccttcaaaaccgttgtctcatttcgagctggggggaaggncccgtgcacaccagcagccacaactagcacaatggtcgtccagtggaaaaataccggcattgcgcc

SEQ ID NO: 129767 - DNA, 1645 bp, Homo Sapiens
  misc_feature (1232)..(1232): n is a, c, g, or t
  misc_feature (1296)..(1525): n is a, c, g, or t
atattatttcacctttattttatattctattttactcaattgcaagcttattaagaacataaaaagtttgatcataacttactcttacctcatccatattacactagaattaaatcatatagaaaaacattgtttccattagttttataagatgtatccacagtgtggtttatttttagttatgtaattttaaaaaaccactttggtgtagatttctcaaaaatgataaccctgaaattaatgaaaattgtcattaaaagatttctagttttgcttttataaaaatcattatttcgaatttcacagtgaagaggtactaaattcctcatagaacatgaaattatataaaaatagaagaccatagacatctttaaatctttaatcctttgattaagcagcaagcatatcactcttccaggccaaacactgcttaaacaaaaaagaaaaataatgacgtgcaaaatatttacaaaatatgcaaagcacacaataaagacatctcactatatacatgtgtcatattactaatgaagctaacgtttttctactgtgtgctctaatgcatgtaaatcaaattacagcacatccctcagatacagcaccttggcccatgtctgggatagaagagattttttaatgaatcacaatatactgaacagctggacagatgctggtgctgaccaacttgactgacatatcccacatactgtgtactgaaggtctactgacaagagacaagacaataaacgctgtaaaggtatagtatgcacatacgtaagacaatctaagtgctttaaaaaatgttttagatattttaagatatttaactgtcccctgtggcttttaaggaaaaaataagtataaattcttgaatattaagaattttaaatcagctaaattcagggccaagaactatttaagatgattcaatgagaaagaaaaggacctaacctggaaaaagagtttcaaatatgccagtacgtagggtatttatggaaatacacagtctaaaattaaaaattaaaactaatcaatgaatttaaatctatagcactttaaggctgtggagccaacaatagggaatactttgggaacacatgatctttcaaaacataaattagggccttagatgttgactattttgtgaagtattctacacgtgataagaatgtgaatgtgcaaacatttagcctatgtccactagtatagcaatctaagtgatctgtctgtcnctttgcacaaataatgattccaatatgaaatcactgtatcaaaaatcctcttgccgaattcttnnnnnnnnnnnnnnnnnnnnnnnnnnnnnnnnnnnnnnnnnnnnnnnnnnnnnnnnnnnnnnnnnnnnnnnnnnnnnnnnnnnnnnnnnnnnnnnnnnnnnnnnnnnnnnnnnnnnnnnnnnnnnnnnnnnnnnnnnnnnnnnnnnnnnnnnnnnnnnnnnnnnnnnnnnnnnnnnnnnnnnnnnnnnnnnnnnnnnnnnnnnnnnnnnnnnnnnnnnnnnnnnnnnnnnacgcgcgggagaggggtttggtattggcgctctcgcttctcctcatgatcgctggctcggtcgtttcgtgcgggacgtacacccactcaagcgtatcggtatcaagaatcaggatcccag

SEQ ID NO: 129768 - DNA, 678 bp, Homo Sapiens
tgtaaaacatccatttattatatccaatgctaaacactaccactttggactctaagatatgtttatgcctctctgtttattctagttttttaaaaatcaaatatacaagatctacaattatttatatccaagatgtctacaccactgcctaagaagctattaaaatatttgtatttgtgcaatggaacccattattcacatggtcctagaataaaaagtcaatttatattgtgaataaatttatcaaaaaacatgtcatccaattcccacaaatgagacattttaaatacagaatacactctgttcatgaatataaaatccccaggtgaaagtcccttaaaacactattatggttatgtttcctagaataattttataactttttcagagaattcctttaaacttgttaaaataccttgttgctagtgctcagaacatctaggttcagtctttatttttaagacagtatctatcctaggcaaatgagagcttgtttttatgtatttaagagtttcctcttgtcatttcaatgtcaaattgatttgactcaatttcatgatttcatctcgctcaaggccatcaaccggtcagagccagagcccttcaaaggctgtatgtgagtatatgagggaaaactttccacataattttacatcatttctatctcatagcagtttt

SEQ ID NO: 129769 - DNA, 910 bp, Homo Sapiens
aaaagcaactttacatttattcaactgttatgtagacccaaggcattttctttggttatgcgtgtctacattggctttctaatttattgttgtgcataaactacagataatgtctacaacttccattattggatttttaaaaatggatcaagatcttaaatcttttagtggagccatctgaatagtaacagtgttagatttttatccttccatcttagtttcctctcactcataattactgtaacatgttttgttcagtaatttgcttttattatgcctttacagagcattcaacttcccttgggaacaattttacatagcaatctggtataaacaggtttacggaacctgcaaacgcattcttggtaggcattagtgacactcagtggttagaagaagcatgcaggggtgcccactagacatgggataactgactgttttacagaggtaatggagagcattggacaatcaaggaagtcagttaaggaggttttagagcaattattgttgttgatgatttatcaatcagaccttctcagttttctagattacagctctgttgggaatgctgtgctttgttatcgatttgtatttggcattggcattgtgtaccatacttattaggtgtatgtgaaaaacagacaaaataacgttgatgaaataatgtattttctttacagattgcatccaaggacttatcagtctttatggaggaagcatggacagaaagtgattccgaaggttacatgtgcattgtatgctagaagaaatgtacaaactagaattttaggtattgcgacatgtggccctgcattcaaaccttgtgtccccagcccttgtagggaccagttatcatggaagacgatttgctgtggaatcgcggattgcgttcaggatgacctggtgcccc

SEQ ID NO: 129770 - DNA, 1057 bp, Homo Sapiens
  misc_feature (729)..(729): n is a, c, g, or t
  misc_feature (746)..(746): n is a, c, g, or t
  misc_feature (835)..(836): n is a, c, g, or t
  misc_feature (838)..(838): n is a, c, g, or t
  misc_feature (881)..(881): n is a, c, g, or t
  misc_feature (1002)..(1002): n is a, c, g, or t
ttttttcagagagtctttgcttcttttcttttatttggatctataattcagcaaatacattttaagaacaatttacaaactcaagttcataactgctggaaatacagccagagaatactcttttaaatgacaaatcttcataaccagttactaataaataatcatcatcacaatagcttcagtaaaaaaaccaattcaatttaaaggtgctttcttattgttaccttgaagccaccgaacttgtgtagctggtccatatcccttttcattctttgctgatatcctgaacacaatggcaggcctggatgtataatcaatatgtgcatttgcaagttgcccagcagttactatacatgatgtcttaagaccacaataaatcctcatgaacacaagttgacttggattatcttgtatctgtgctgtgcggatagccaagtaggctgaatattccaaaatatttccagaaggtgaggttggaggttcccaggaaaggtggataccttcaacattctttgaaattctgactgcagaaggagctccaggaaaaccaggaatacaagttttaaattcactgattttgctgaaaggacctatcccacaaccattgattgcagcaaccctgaatctgtatcctgtgcctggaacaagatcttgtttcttaagcaagctgtagtcaggtacatctgcatttcctacctttgagatgctttgcttcccttttggcagcanataaactggctcaccanagctgtattatttttaaaaattcccacatcacaccattgtcgttctcccgctttcactggtggcactggattttgaggagtctctttannanacggcgttgctgtagcatgtgtctctacacggctgatcttcgntgcaggcagtgcatatgtttcatcaacttcagatttgggtactgatggttgtagttgaagttcaatctttacactgcccatttgtactggatgatcagtttaatggtctgctgggtacatnagttgtgtgctgaaaagtactggtaagatgttcaggaatacgtcttaatccagca

SEQ ID NO: 129771 - DNA, 701 bp, Homo Sapiens
  misc_feature (685)..(685): n is a, c, g, or t
ttcctgttttttttgttatcagctttattagggaaaacatcaggtctctttacacgttgaacaggaactgctggttaacaagacacgattaacttgctaggaatggacaaggacagcgacaggatggtgcttcacagtgcctcctgctgatggcaccttcattctggctgcagaattctcccaggaagggtcccgggctcttcaggaggcatttacttggaagtacaggtcagcgttatccaaagttgtccagcctccggcctggcccatgtcttcaggcagctctgaggcaagaataaaagggacgagttccctgccccctttttacccgctggatcagcttctacgacttggtcaaactatctttctttctgtctgccatgccaggaaatccagtgacagcaagacccagagtcaggcacatttggagggcaggtccatcggccactcctcacttctgtgggctccgatgccagcagagccacctgagcggctgctacctcttgccggaggcagtttcttctggcctcacccacccaaccatggctacgtcagggcagaagggagagaagaaagagagatgagagatgaaaggatttaaaatgggcaaccatctttgaggtttcccacatctgcaccgctccacagtgtgaaaagggctttctcactttcacatgatccctgngggctactatccccct

SEQ ID NO: 129772 - DNA, 1285 bp, Homo Sapiens
tcgtgtacacatatacatgttatcccaggatccacaaagcaaacagaagtggtaattgagcctagcaagcagtttagatggactacattcctcattccagctgaggagagatctcacaaggagaaaggagtgctaaggaagagcaagaccccacagccttccaaagatcccctatggtccaaagtcctttgaccatctcagtcagctgctttgttttctgttggcagtggagggacaaggtgagaggagccaggggtagtcatgaacaccagtgggttctgccctgggcagctccccaccttctttaagagagtactgtgtctcagctccagcagtctcaactgggaagacccaggactcctgctcttttctctaatccctgggagacgaggtccagctaaggtagagtaagcagtcagtgaccaggcaggctggtttgggaggtcactgcctggaggacgggatcttgtattcttcggaagatggctgggaaattcttccctccattacgtagaactttcttcccctcctcagttgaggtgcctagatgtcccacaacggggtcttcactcaggtcctccagaggcacacgctcaaacagtgggtgctcttcgaaatgagtgcacatccagtcgtgtagctccagcacatcggttatggtatacaccagccccccaactcttagcacgtaggcatattctgctagcagggtgggactgatgattcgccacttgtgctttgtccgcttgaaatgtgggtcggggaagaggaagaacatctttgtcagctggcccttgtagaagaagttaggaaggtgcttcatggcattgctacggagacaggcgatgttctggaagccacctgcaggagctgcgcgtagggcccgaatccggtcttgtacatagtctgagaccttcacccggatctccagacccagaataagtgtgtctgggaacagcggtgacagttccactaacaggccaccatagccacagcctatgtctgcaaactccacttgggcctgagctctcttttctttcttatcctttgggtcatcgtggctctgattttgagtgagtggagcgaagaactctgggtatagctcagaccagtccatctcctctggcttcacagggtagcgcagcgtgtggtccgccatggggttggagtgagcacgttgccggtagtagcgcttctggggcggtggggcctctgctccggccacgttccgagtctcggctgccatgatcccagtccggggtttctctaccaaatccacgtgccc

SEQ ID NO: 129773 - DNA, 678 bp, Homo Sapiens
gagtgctttcacattttattttcaagtataaaggcttcatcgcagaaggaggccagggttacaggcagtgggcaaggggtctggaagcccaggtttaggtggacgtgcaggctagctggctcccaggtgccatggccagtcctgtggtccctgtctgtgcctgggaccctcttctgggtgccaagaggccgaggtagctgtgagaggagctggacatggggtggaggggcatgggttcacatgaccgcacaacactggcacgtcttttgcttagggccacttgcctcttcaccctcggtgggggcagatggctcaggctgccgggcaggcgcgtaggtgggcacagggtgggcactggggttggcgctgggcccctccccctgaagcagtggctggcattcggcgggctgctctggggctggggtctctgccagaagaggtgtggcatcccccaaggggccttggccctcagcagcggtttggggcttcactccttcctcctccagggctcctactggcttctcctggggctggggtccttccttctctggccttgtctccgtgttagcctcaaggggaggccctgcctcattcatctcctctgcctgggattcacttccttccctagacccttgttctagattcagatctccctccgtcccttgggtcttctctgtc

SEQ ID NO: 129774 - DNA, 645 bp, Homo Sapiens
  misc_feature (535)..(557): n is a, c, g, or t
ttttttgcattccacaagtatttattgatcttactgcataccaggccctcagatggggacacagccacgaatgaagcatggtccctgctaccacaaggtcctcttcacttacacacacactgaggactactgcttcgtcacgctttccgaagcagctgagtggggctatgtaagtgaccttgcagatgaagtcgccacctgcaagaactcacaggtgagaacagagggtggccaccaaaaggtcactgaactcccccgagaaaactgttgagccacacacatgtccaactttccaggtccaagacatactgcagtactgctttgtaatagccaccaggtgcaaagccaggaagaaccagagggaaacaggtttttctcacatgagggaagagcagcctgcatcacttaatggttggactgagttaatgcaggacttaggcctcttaaaaggcaacaatgagaacccttacttggacccactccccaccacggttgatctctcattatgctgagcatatctcttggaaaggggcannnnnnnnnnnnnnnnnnnnnnnctggttttgctagagacacgtgcccaggccctatgggcacacccacttgaacatatattcaggagccagctcagaaaccaagagactc

SEQ ID NO: 129775 - DNA, 1870 bp, Homo Sapiens
  misc_feature (159)..(169): n is a, c, g, or t
  misc_feature (393)..(459): n is a, c, g, or t
actactcgcacgtcataattatgtttcttgctttttttcagcatcacttttagcagccgctctgaattgtctttgaaatgttctcctccactgagggcttcttatatattcctgttgtgtgagtagtagttctgttccccccactattgtgttccgctnnnnnnnnnnnaggtgttgggtgggccgtcttctccacgggggtgtgcccggtggtgacgcgttttgttgcgccgtcgtgcagcgctttttgtaatacacctgcgctctgctgctctcgtgtgtttatatagcgtcccctcctattgtggtgcccccccttggtgctcaacaaatacttgtgtgtcgcccgctcaatatgtgtgggtcccccctcggggattcatttgttggcgnnnnnnnnnnnnnnnnnnnnnnnnnnnnnnnnnnnnnnnnnnnnnnnnnnnnnnnnnnnnnnnnnnngttttatttctaaaagccaatttaataaattaataaacgcatgccagaaaaaataccaaattacaactgaaaaccaataataatttaacagaaaatgctgtgttgtacactttttattggtatggataacctttattaaagtaacaaatctgaaaacacattttgcttttgctggaaagaaagtactatgttagagaagaactaagagaaaccagaaatcatttgtaaaatgtaggcatgtgatatggtttatggtaatgtaacagccagaggtgctgttttatccatttgtgtgtgcgtgtttgtacaagcatcagaaaccaatgacatagaccccaaaagcaaagtcacaacaggcttactctgtgaaacatgctggattacaagcacagactacccaggacgcagaggcggtgcaggcgcaggtttgttgtttcttctgtatggggtttccttgccagatagggggctaatcatgcaatagcttgagtttctctgaacgtgataaacacccaggattactagaaccagaaagcgtgtgttcactgttttacaagacagctgagcggtgctacaaaaacaacagaaagttccttcactttaatctggttatatgcccaaacctctaatcaagaaataatgcagctacaggagcaaattaaattactataaaacattccttcatctgtaaaacatttcttttcccctcaaattaaaaatttaaaataaaatgtcttcgtttttgataagcagctccaccaccagtctctgataccgtatatcattcaatgcagccatggcgtctagttctggagatctcataagggtgggtccaaagacgattccaaggttctctgcattcataagattctccttttcgtggagggtcactctctttagatgtgccatgaggtaccggagggtttcgcagtgagcaggtggcagtagtttcagtgcttcatgaagggtttccaattgctcatccggatccataattttggcagattctataaacttagggtaggcatcatatgtaatgagtggaattggcaaatccctgaagtacagtttaagtgcaccagtgataatgttgatatcttcatacatgttcacagaaatatctgccttctcaccatctctgtcgaaagccatcttgacatcttcaattaggtcactaaatcctgatactcggtatagtccttcagaattaagacctctagactcaatctccctgatgcacatgtctaccaccattggccgcttagtggtatgtgctttcacgagcgtcgtaaggtcacagctgtacacctttttgacatgcttcaagtctggcttacagtcatttgggaccatcttgggccactgcttatgaacatgcataccacaatctggacattcacttcctgaccaa

SEQ ID NO: 129776 - DNA, 908 bp, Homo Sapiens
ttttcccgattaaaaactttttatttcagcaaaataaacgtgcctgtgaaagaaccacacggtggcttccgagagaccccactgtgtacctgagccccaggtggccacacctggtgttctggaaaagggagtccagggccagtattcaggccctgctgtactgcaccctggaaactgcaccaaaccccagctccgcccccatccacggctcccagaatggtttctggagtccctgcaacagacctgtgaggagagggcagggcagggcctgcctcctgcttccccgtgatgacctgggggatgcactgggcagggacagcttcctccatccacacagccctgtgggcaccaacaaggccactgtgacttcacacgacagcagtgttccccagctcagctgagccggggtgcaggggacagtacagggcacagtcctgtgccgcaaggccctcgtgctcctggaagcctctgggaggaggcgcccgctggtgggacgtcgaagtccaggcgctctcggcagcgaccccaggacggcgcacctaagctatgccgtggtgcaggggacgtgctggagggacaggagcaggcgagagagaagccacctgtggtcccagccccaccccagctcacacgaattccggctgcctttccctgcaggagcccagcgtcatccgcccgccacggagcctcatggggggcagtggggcctgcagcacgttgttggactggttggtgttgaatcctgagagctgctgggccgggccgtcctcgtccccgtccccgtcctcccgggctgtggcctccagctgctcctcactgccgctgtggctgccagaagccacctctaggctggcctcgctctgctgctgctccaggaagctgaggtggcccagggcactggcctcccc

SEQ ID NO: 129777 - DNA, 1333 bp, Homo Sapiens
  misc_feature (738)..(873): n is a, c, g, or t
  misc_feature (886)..(1277): n is a, c, g, or t
ttttttgtttcaaccacaagtatttattgatggatcgaagatacaattttaatggaacaataaggcacaaccgtggattaaaacactttgctatacagccaaaaggggggaaaatctataaccttaggaactttatgccaatcaagaagcctctaaagtacctctctaatagatcagtatcagacattcttcccttttacataattcctatattacatcacttaatcataaaatctgactgatacttcataaagaattcctcattcatttatatttgagccatccagcctggctactcccctgttctccacccttttccatcactttgcagtggtattttttagcaatcttcaatagttttccaaagcaaggaaacaagcaagcaagcaatgagtcagaaagtcaaccaagggcagatgtgtggctaaatacactcatagagacatacattaggatagcaatagcctgattcactgaagtctaaactaagctgacttggcagaaaagttgctgtggctcgctcaaagatctgtaatgccaccttaggttgtgctactagtgccagacctcttgtttttaagggattagcagtggtctaaacaagaagccagggagctaatgtaaccaggcagctaatgacacaacagtcaatgctttggacatgtattaggagcagactatggcttccgtcattaacatttgccaagtgtaaaattcataaagaattttgcggctgannnnnnnnnnnnnnnnnnnnnnnnnnnnnnnnnnnnnnnnnnnnnnnnnnnnnnnnnnnnnnnnnnnnnnnnnnnnnnnnnnnnnnnnnnnnnnnnnnnnnnnnnnnnnnnnnnnnnnnnnnnnnnnnnnnnnnnntatggtggcacannnnnnnnnnnnnnnnnnnnnnnnnnnnnnnnnnnnnnnnnnnnnnnnnnnnnnnnnnnnnnnnnnnnnnnnnnnnnnnnnnnnnnnnnnnnnnnnnnnnnnnnnnnnnnnnnnnnnnnnnnnnnnnnnnnnnnnnnnnnnnnnnnnnnnnnnnnnnnnnnnnnnnnnnnnnnnnnnnnnnnnnnnnnnnnnnnnnnnnnnnnnnnnnnnnnnnnnnnnnnnnnnnnnnnnnnnnnnnnnnnnnnnnnnnnnnnnnnnnnnnnnnnnnnnnnnnnnnnnnnnnnnnnnnnnnnnnnnnnnnnnnnnnnnnnnnnnnnnnnnnnnnnnnnnnnnnnnnnnnnnnnnnnnnnnnnnnnnnnnnnnnnnnnnnnnnnnnnnnnnnnnnnnnnnnntaaatccccggccgtaatggccgaattcccgggcatatgtccggtaccgtcgactg

SEQ ID NO: 129778 - DNA, 2881 bp, Homo Sapiens
tttttgcacttcccatgagcatttttattaaattgaaacaagttgttgattcgataattacaagacttgtacaaaaattcacagcgcctgtgaggagcctttggctggaactggtgacacctgtgcctctccggacagaggaaggaagtcccaccccgccttccagcagcagcgagcctgtgtctggcattccctgttccgctgctcccaccctcactgtggggcagcagttctttaggaacattcagctgtcaaaggtgagaaccagccccacaggcctgggcctcgcaggcttaaggagcacttgttggcactgttagctcagcacctctcccagctccagcccatcggctggagaggaaaagggcagaaaacacaaatctcactctagaaacacatacacacacctactacacagatgataaaatcccacaatcgtatctgttcatgtttctgggttttgcactgaacagagattggaagggagtaaggactctctcccttctgcttaacattcacatcaggaaaaagaagaaaacaaagttgccctttcatcttcatctgcttatttcagaggacacacggaggcagactgaccgagcagtggggcttcatcttcattcttgcacttctcaccctacaaccatttagcaacagaaaccgtggaaagcgctggctacggggctccaggcagccaccccccttattgggcaaaggagttaaaaagagcatcaccacgacctcgctactggtttttggcctgtctgagggagagagttcccgcggagccggcctgggcgtggcccgcagccctactgctgggcctgcctcttgcagtagttgctgtaggcctcctcgaacatggccttgcaggggaagcgggccttcagcttggagcagatgaggaaggagccccccatcttcctgtgcagggagtaggtttcctcgggtggggggacgagacggtgcctcagcatgacgggaatcaggttgtggatcttctcggtggtgctctgagtgccaaaatcaaaaggctcatcggaggcgaaggcctcccccaggatgaggatggcatccaagtgggcgtcttccatgaccttgacctcgtagccggtgaggaacttcatctctatggatttcgcccgcacagtctccctgtccctgtcggcagcagccctgatgatctgaatgtagaggtcggtgaaggatctgtcatattcccgcgttgccccaaaatccaaaagagccaccttgtgctgctgggggtcatagaagaagttggaccagttggggtctgtttgcatgaagtggaactcgaacagctccctcaggcacagaaccaggatgttgtagcagatctcgttccgaatctcctggctgagcccttcggcctggtccagggggaagccagacaccagctctgtggtcagcacatgtgggctgcagagctcatccacaatctcaggcacatagaagaaggggtggcccttcagcaggtccctgaacttgcgggcacaggcggcctctcgctggtagtcacactccagggccagctcccgcctcagcacgtcgatcaggtgctcggggaacaggccttctggaagcatgttgctcatgttcaacacggccatgaggttgttgacatcactgttgatgctctgggccacgccagggtactggatcttcatggccacctcgcggccgcccttcattcgggccaagtgcacctgcccaatggatgcggcggcgaagggccgctcctcgaagtattccaacttgtcccgccagttggggcccaggtcgttgttgagagttttcatcatctgcttcagtggcatgaagtccgcgctctgccgcacccgctcgaagatcttagccaggtgggggttgataaaggcatcatcctggatgctcagcatctggcccagcttgagtgccgcaccacgcaccttgcagagcgtgcgcacgatccgctctgcattggcctcggacaggaaaggactggaacccagcacggccttcttccctgaggggtcctcggagcgcaggctcttcttggcgacctctgccagtgccccgaagcccaggcccacggccagacctccgaagttggccagccggccaatcctcgtcacaggcaccttccgctcccgggcatgctcgctgagcgtctgtttgtgctgcttgttctcggggcgagccttagcctgccgggccttctcaatgtcctcggctgtgaggcccccaacaggggattggtcctggtggaagaaccttcgctgaaagcccatggcagagaatgagtctctggggtttgcaaagagcctcccgttggccctgcccagaggggaggaggcctggccggggaacccggcttctctaaagggtccactggccacgtaggcaggagctgggccctcgctgtgggcatgacccagggatgggggcgctgactggtcgggagcggaggctgaagagaagtctgtggaggctccggctgcatgcgggactgagaagtggaactccccttctgggccgccgaagttctcagcaaaatattcttcatgtttatcctgaccctgcaccttccccaagaacatgccaatctgctccacagccgtggactgcagggccctggccgccatgatcagctcccctccgatgcccaagtgctgcaggtgggtttccacggccgcctgggtcagcttgacaaggcctttagccaccatgatggtgtctcccaatatggcagccatccttcagggctggctgcaggaagctgggatccgcggtcaccttctagccgcctccgcgcccgcctctgcgcgctggccaccgcgctgacgcccgccacgcgctccatcccgggaattccggaccg

SEQ ID NO: 129779 - DNA, 666 bp, Homo Sapiens
  misc_feature (645)..(645): n is a, c, g, or t
ttttctaaaaacaatatacttgttttatctcatagtctttctgtgggccaggcattggtaaacagagtagttccagctcagggtctgtcgtgagattgcagttgagatgacagccaagggtgcagttatctgaaggctcgactggggctggaggctctgaatccaagacaggcctgccaggttgttcttcctgttgacaggaggcccctgtttctcaccacatggatctctccacagaactgcttgactgtcctcacggcatggcaggtgtcttcctccagaataagtcatctgctgtatggccttggacaggtggcttcacgtctctgggcctcaggtgcctcctgtctcctctagggtggttttgagaatcaaacgagatcctgtacttgcagaggagagaacgcaaatggactgtcgcctcctctgccttccttgggaagagcatcgttcatctcagggcttgttagccttctgctgggtacgaggaactgctctgggcacgggctactggatttttctcattttactctctgtgacatctttggacaagtcttaggttccaggccagttgatttttcttgctttcttccacatatactgctgtttctttttctgtgctgtttgctcattcaccaggaacanattggcagcaccttgatcttg

SEQ ID NO: 129780 - DNA, 753 bp, Homo Sapiens
  misc_feature (113)..(122): n is a, c, g, or t
  misc_feature (302)..(311): n is a, c, g, or t
  misc_feature (689)..(689): n is a, c, g, or t
taataaaacaagaaatatctttaatcatatattataaatagtgttagtacatgagaaatgtattcactacagacagaatatcttattttattgtgtcgcataatcctttcctnnnnnnnnnncactgcttctccccagttacaagagactaaaagcatactaaaaacactttatcgtcattactaaatgcattaaatacacatcctaaatggaatatgctgtatatccgatgaaatacatagaacgttcatcaaggcaaaagaaaagacgtagccaacaatggaaagatggcacacacaagnnnnnnnnnngaacagttctcaaatattgcagtaacttttcaatgtatcatagatattctatgacttttctatgaaacagaggaggaccaaacattatacacagtttgaagagactaaatgccagagaatctacagatattagcatccaggaataatttttattcctggcccattttctgcccactggaaaaaattgcattgtttttccttcccaagaggacacacaaaaaaattctttccattgttaggtccaatcttcaatactgttttcatggtggaacgcttgccatggttgcagaatgggaaggacaaatctgcccattcaaaaaatccacattgtgcttctctaggtagaggacaggcataaaactgcctgcccttgttttncccatccttcctcacaactcggagaatgcagaggcggttgtgtttactgcagcgagggctgtca

SEQ ID NO: 129781 - DNA, 876 bp, Homo Sapiens
tttttacgagagaaaattaaatttggttttattagtcattgtgaataggaatgcaagcaattatgatttttttcaaaactctaatagaattcatatatttaagttgaaagaataagtacattttttattttaaaccttaatttagtgttttatgaacttctgatgacccagaatcactgctggtcaatttaagagcaggtagaaagcaagcacatacttaggcctccttttactatgtaactgtgttgctgttttcttttcctctggactctttgaaagatcatctcctcctggtagctcagggggcagcggtaaatcagcaagaagacatcggagtttcttttctacttcttttttaactgcttttactgaaatatttcctcgtaagctatcagcttctttatcttcaggcagcatgggaggcaaaggtaacggtggtaatgtagaggtgactaaagctacatgttgctccttctccttggctcctatgcttggtgtaagtggtttggttttctctttaagagatactgattcctcctttgtagcagcagatttactctcctttccaactatgactgctttcttggtggctttatctacaatcaaattattttccaccttcgttacctgaagaggtggctttgtttttgctttgtcattttttaaagttccaccacttgagggagaaggtgcatgttcaattttaattttcttcacatccttcacatggtttgtttgtgatgcactggcactagtttccgtgttccccttggtaggtgtagaagtgtttgaagcttttgcagccttggcagcagcctcagcagccttagttgcttctgcagctttcgctgcttctgcggctcttgctgcctctgc

SEQ ID NO: 129782 - DNA, 753 bp, Homo Sapiens
atggtatcaagttaaaaactctttaatatctcaaaatatcttatcagattgaattatatccaatatcaatttgatggctatattcaacacatattaagaacctactgtgtaccaggcatagttttaagtgctagtgatatattggtaagcaaagaccttgctctcatggagctgtggtctggtgggagagacagataacaaaaacaaacacgtatataaatctgtgagaagtgttataaagaaaattgagcagggttatgagaataaagctacagaatgggggatatctcacacaggatggttagcaatggctctgcggctccaggccctgcctactctctcacttttcctcagtttctccagatgtctcaagctcatttatgcctcaagatctttgcaaatgtttcttgtctggatccccttcctcttcctgtcaactttttccctagttacctcttacaatccttcagaactcagatgcaaatcactttctcaaggcctcacggaagccttctgtggccctccggaacagatcaagttcaggttcctgcttatttaccccactgagctccttcattgtactgatcacatatataattatatgagtattgtttaagcctttgtcccctccagactgtaagctccatgaaagcaacactgtgtctcattaacttattgttgagtccttaaactttgtagtttgcggagtaggtaccaaaaatattgtcaatatctgaatattttcatatccca

SEQ ID NO: 129783 - DNA, 746 bp, Homo Sapiens
  misc_feature (158)..(168): n is a, c, g, or t
ttttttaaataaaagttttattggagaaaaatagaaccaccacgtacacagggaaaagagcacaaaaattcaactgatacagaacaacaactgaaagtcacaattatccaatgtagtttgcaattacttttcagtttcttaaacagctcccctcaacnnnnnnnnnnnaacagtcttgctaatttttcagctgaaacagcatcaagttttcaaagaattaagagcctcggggaggggacccgctttcaagatactgaaggtgacatcaagagtctcctcctaacaggaccaactctatctaaaagttgcttacgagtaacttgaatcttgtgtaatagtctacatctcacagaccatcagggatgagttagaacactgttgttgatggtccggtatgaagagagggtaaacaaaatagctgcatttgcttgtcagctgagctcatataaagaaatcagtgaggagctgagaaaatataggcaatggctgctcaataagaattacaagttccgaataccacatatagttagacaccagtgtgcaagttgatgcaactagaaagaaatagacgactttttaaaatacctggccacaggtctttgagaactcaagcaaacaatcaacagtagacacaagagtcaaaaatcttctcaggttgaagattaggacataggtaatcttcctaacggctccaacaggcaaggaaatatgctgtggcaaaaagcattaagtagttctgattttta

SEQ ID NO: 129784 - DNA, 820 bp, Homo Sapiens
  misc_feature (771)..(771): n is a, c, g, or t
  misc_feature (791)..(791): n is a, c, g, or t
ccttcatcaattttaaataaaagcagaataaaaatcacatttttctcaggcaacagtagcagttcagtaggtaagtggcttgatcacatttgtttgtattagtaacgcatgcaagcagctctagtactcggtccctcgcgcagccacccagctccgcttacaaggtccctgcataggtgccctccggcctccgggccgcggccgccggcgtctggggcctgctggggccgcccccgccctgctcaaagggctgtggggggctctggccatcggcgggcagcggctcgggggcggccacctcctggatgaccgagccagccccgtccacctcctcgccggcgtcgaaggcggggttggcggcggcactcaggtcaacattcacggcgtcagttctcagagccacgatggtggcggcgtcgccccgccgctcggcgtagatgcgttgctcgaacacctgtgccgcggcgggcgggaactcggggtcgaggggcacgctggcggcggcggagcccatgaccgtgcggtacatctccacgccctccggcagcatggacttgatcttgggcagccagcgcttgcgaacgcggcgggcgttggtgcacatgttcgcggcgatcacgttcatctcgctctccttgaagctgggggcgaagttctgacagtacaatttcacagcgttcaggacccggctgtccagcggctttcggctggggtcgctggtggacgagcggatgccagtcccgcagctgttggccagtgtgttcctgtcanagaaggtggccaggagcctncgcagcaagaccttatgcttcacccctgc

SEQ ID NO: 129785 - DNA, 739 bp, Homo Sapiens
  misc_feature (707)..(707): n is a, c, g, or t
aagttaaggctgtaggtttattcacatatatacacatttatatgtaagtggtctatcccatgtgaattttttgatgctgggtaagccttgagctacgattaaaagctttgccacagtcattgcatttataaggcttctccccggtgtgaattctctggtgtataattaggtgtgaacgccacctaaatatcttctcacagtcttcacactgatgcagtttctttatagtattaacctttttacggctcacaaaggtggacccttccagggcattcccatattcgtaaaaccactgggccctagtgtgtattctctggtgttcaataagatatgagctccggctgaaggcttttccacactcactgcactcatagggcttcacccctgcatgaattatctggtgttggaaaagggttgagttttgactgaaggctttcccacattcattacatttatagggcctctctccagtgtgaaccctttgatgtattgtaagctgtgtgctcatactgaaggcttttccgcattggaggcattcgtagggcttctctcctttatggattctctgatggtaaataaggctggaactctgactgaaggcttttccacagtcattacacacatagggtttctctccagtgtggattcgctgatgctgaataaggtgtgagccctgaacaaagctttgccacactcatcacatttanatggtttttctccagtgtgagttctctgatgg

SEQ ID NO: 129786 - DNA, 957 bp, Homo Sapiens
gacaccccgaggggggggccccggtccacggcttgcaccaaaaggaaattggcatccacttcatcgggcatttcgaatctgcttcaagaacagtatctgccatttttttataaaatttcccctgaaatggctccttgggagtgttcaaaaaaagtttttttcaaatataaaaccaggaaaatcacacacgtagtaaaaaatattgggggatttttttcttcatagaaaccttcagggcccggctccaggcaggcgggagaggaggagctggggacacaatttgctgtgcaaagtcccactcgtgcgctcccctcccacaccagtggccgttctccggcctctggactcggcagtgggcccagtgcaaactttgcttgtggctctgaagcaagagcagcagccaggtcaggcggtgactatggtgacctctccccaacagattcagtgagcaacaacgcagccacaggtggtggcccagccacggcgctcttccaggccggccggcgcccacccgccctcaccagggctgcagtggccggtgggtgagacacataggactgtctttcgaaaataaaataagtatcatgaaccatgctcattaaataaagctgcaacagaaggaccacgattctaaatgggactgggggagaggcctatttcttcccaaagcatgaagttcatcaaccgctaatgatacttagaaaatcaccacggggataatgcagaaaccgaatgcagacagcacagggtgtcagtgctgatagacccggcaacacacagactggccttagatgcccaagagcctggtgctccgtactagctcacgcactagacctacagtctctaacaatccagaccagacagcggctgagcccaggggcgcccagaagccccttaggcacaggagcgggacgctccaggcctcctatccccgtgagccagaagcacaacagcgcc

SEQ ID NO: 129787 - DNA, 907 bp, Homo Sapiens
  misc_feature (742)..(782): n is a, c, g, or t
ttacatttcaaaaactaactttattgcatttaatacagatataagcacgaataagacaaattagttccattttcagacaggaagaaaaacattttgggtagggagaagttaattgctggtaaagtgtagtagtattattattctaaaagataatgagttcagaagtattaaggaaatatgtgtgtgtgtacgcataggtattcaggtaaacaccaataacaataaaactctataagcggtcacagacaacacaagtacaggaggaacatttaaatgttaaccaatgtcatgaaagaaagagtgatataagcaattctatacagcaaaaagagaatgattaacaatttattgagttttatttatctacaaaaatatagcaatacagtgaacttcaccaaatcctaaatattcagtacctgaactggctacaacaccgtgtgcacacccagttcctgcagaatctcttgcagatatgggagagtcagccagtgaaaagatccatttcttgggaatccttgtcaacaagaccagttcagaaatccaggatatatagaagcctactgtaatttaaaaacagtaacaaaaaccccaacaaaacccaaatcaacaaagaccaagataaaggtgtgataaacattaattgtaatggttttcctttacatgcaatacatgcattttaaaatcactaagaaacacgaaattttgtagagcaaagtttgtgtttcacgtaagtgcaaatgannnnnnnnnnnnnnnnnnnnnnnnnnnnnnnnnnnnnnnnntttccatacaaaagcacacagtgttaatctataaaatgacatccaagtggatgatgattgtttttgcatgtccccctgcttagattttttttaaaatatatagtcaaaaattaacatccttcttt

SEQ ID NO: 129788 - DNA, 921 bp, Homo Sapiens
  misc_feature (104)..(166): n is a, c, g, or t
  misc_feature (263)..(326): n is a, c, g, or t
aaacagctacaaaatccatgagcagtccaaccaatactgaacagttctgtttctgcaggtcatctggggtcttaatcatcttctccttcatcatctgtttctcnnnnnnnnnnnnnnnnnnnnnnnnnnnnnnnnnnnnnnnnnnnnnnnnnnnnnnnnnnnnnnncttcatcaagtccaaattcttcttcctcctcactgacttcatcgtcgtcctcatccccttctacatcttcatcttcatcatcttcttcatcaaactnnnnnnnnnnnnnnnnnnnnnnnnnnnnnnnnnnnnnnnnnnnnnnnnnnnnnnnnnnnnnnnnttcatccacaccatccacctcggcatctgagtcaggtgcttcctggtcctctcggtcatagccatccaagtaggtaagctggggcaggagcttgaagacactctctcggtagtcattcaggttggtaacctcacagttaaagaggtccaggcttttcagacattctaactttttcaaaggttccaaggtgctgatatctttcagtttatttccacttaagtttagatgtgtgagatttggaagtttttcagctaacatgtccagacctccaaagattctattttcactgagttcaagctttttcaatttaggcagcttggggagatttgaaactgagatcaagcctacatttattaaactgaggaactctaagttcacaaattcagctgttaagccctcaatttttccatcatttgatttgcaattgtccaagacaagttctcgaacagctgccggggtccggttcctcagctccaggtggatcctcctcttcatgtccatgttcccctcttcccccctctaacactctcacctgttgaagctctttgtgacgggcgagctcaggggagagtctccgtcgaactggtaccgagca

SEQ ID NO: 129789 - DNA, 1109 bp, Homo Sapiens
gggcaggtcccaaccccaatttctggaaccagtttctgttttttgccaggttcattctggggttcttaaatcatctttctccctttcatccattcgtttctctctttgcctctttttcacttttccccaccttcttcctcctcttcatcctcatcctcatcttcatcttcttcatcaagtccaaattcttcttcctcctcactgacttcatcgtcgtcctcatccccttctacatcttcatcttcatcatcttcttcatcaaactcctcttcttcaccatcctcatcgtcctcgtcttcctcatcttctccttcttcgtcctcctcctcttcatccacaccatccacctcggcatctgagtcaggtgcttcctggtcctctcggtcatagccatccaagtaggtaagctggggcaggagcttgaagacactctctcggtagtcattcaggttggtaacctcacagttaaagaggtccaggcttttcagacattctaactttttcaaaggttccaaggtgctgatatctttcagtttatttccacttaagtttagatgtgtgagatttggaagtttttcagctaacatgtccagacctccaaagattctattttcactgagttcaagctttttcaatttaggcagcttggggagatttgaaactgagatcaagcctacatttattaaactgaggaactctaagttcacaaattcagctgttaagccctcaatttttccatcatttgatttgcaattgtccaagacaagttctcgaacagctgccggggtccggttcctcagctccaggtggatcctcctcttcatgtccatgttcccctcttcccccctcttcaaacttaactttccgcggcgggggcggaggggggagaggcgtcccggcttgcgcagcgagggccgtcggaagggtttgctagcggcggaggccggcggcgcggtcctgggtggcgggcggcgtgcgggcaggcgagcggagcccccggagccaagttactcacgggagcggagagaaaccatggagggaaaagggggctggagcgcagcgctgggctcaccctcgtgccgaattcgccacccaggcctcgctacctt

SEQ ID NO: 129790 - DNA, 976 bp, Homo Sapiens
  misc_feature (320)..(333): n is a, c, g, or t
gcaaagcatgaaaaaacagacccaaaatgttaagattttatttacaaagcttttttgttgtacagaaagtaaaaatgctgttacaatctcagtgtaactggtagccacagacggttgactcaccaatcacagctatccacgctacagcaagaatcttacacaaaaacctaacaacgcttacaattttgttggggtgaagtccacaagcttggtggtagattaccaagagggactacatggaaggaaggcggaatgtcacaggaactattctttggctctttgggtgggtgggtgtcctggggtttgtatcacagctaccnnnnnnnnnnnnnnaaacagctacaaaatccatgagcagtccaaccaatactgaacagttctgtttctgcaggtcatctggggtcttaatcatcttctccttcatcatctgtttctctcttcctcttttcacctttcccaccttcttcctcctcttcatcctcatcctcatcttcatcttcttcatcaagtccaaattcttcttcctcctcactgacttcatcgtcgtcctcatccccttctacatcgttcatcgttcagtcagtcttcgttcagtcaaactcctcgttcttcaccattcctcagtcgtcctcggtcttcctcatcttctccgttcttcggtcctcctcctcttcatccacaccatccacctcggcattctgagtcaggtgcttcctggtcctctcggtcatagccatccaagtaggtaagctggggcaggagcttgaagacactctctcggtagtcattcaggttggtaacctcacagttaaagaggtccaggcttttcagacattctaactttttcaaaggtttccaaggtgctgatatctttcagtttatttccaccgacgcgtggcgacgcgtggtcgacgatatcccgggaaatccggaccggtaccaagcctgcttttttagactgtctatagtacatgcg

SEQ ID NO: 129791 - DNA, 1138 bp, Homo Sapiens
  misc_feature (22)..(22): n is a, c, g, or t
  misc_feature (107)..(107): n is a, c, g, or t
  misc_feature (1060)..(1079): n is a, c, g, or t
aaaccatagcgtaggtacgagngctgggtgttgaattcggcacgaggaaaacggccaccacgcccaaaggcagcagctcctggcagacaagtcggccgccagcccanggcgcctcatggccccctcaggccaagccgccccccaaagcctgcacacagccaaggcctaactatgcctcgaacttcagtgtgatcggggcgcgggaggagcggggggtccgcgcacccagctttgctcaaaagccaaaagtctctgagaacgactttgaagatctgttgtccaatcaaggcttctcctccaggtctgacaagaaagggccaaagaccattgcagagatgaggaagcaggacctggctaaagacacggacccactcaagctgaagctcctggactggattgagggcaaggagcggaacatccgggccctgctgtccacgctgcacacagtgctgtgggacggggagagccgctggacgcccgtgggcatggccgacctggtggctccggagcaagtgaagaagcactatcgccgcgcggtgctggccgtgcaccccgacaaggctgcggggcagccgtacgagcagcacgccaagatgatcttcatggagctgaatgacgcctggtcggagtttgagaaccagggctcccggcccctcttctgaggccgcagtggtggtggctgcgcacacagctccacaggttgggagccgtcgtgggacctgggtccccaccgtgaggaccccgtgggcgacagcaggtgtggccagggtggggctccgagccccgggtcaccgcccgcccagcgttccaggcacatgaagagaaagcattccaaagcctctgattgttgtttcctttttctcctcccgaaggaacagctgattcatgctcctcccgcaattgtcacgtctgtgatttatttggtgtttcgggcgtggcctctggagccccggcacgtggtgggccacgctgctggcgctcatgggccctggtgtttgcaccgcactttgtaatcagtcccgtggttgtctgtacagaattaaactattttccgatgacnnnnnnnnnnnnnnnnnnnncctgagcaggcggccgcaagcttattccctttagttgagggttaattttagcttggcac

SEQ ID NO: 129792 - DNA, 1347 bp, Homo Sapiens
  misc_feature (161)..(224): n is a, c, g, or t
ctggaccggtccggaattcccgggatctgccaagcaccgcgcagccgcctccgccgcaggatcccccggtgcaggcctccgtgctggtgcggatcctggagctcagccgcgcgcgccctgcccgatcctgtgccgacccaccgcactatgcgcgccgtgcnnnnnnnnnnnnnnnnnnnnnnnnnnnnnnnnnnnnnnnnnnnnnnnnnnnnnnnnnnnnnnnncagcagagccgagtccgtctccgcgccgcggcccgaacccgagcgcgagtcgcggccaccgcccggcccggggcccgggaacaccacccggtttgggtctggggcggcgggcggcagcggcagctccaacagcagcggcgacgccttggtgacccgcatttccatcctcctccgcgacctacccaccctcaaggcagccgtgatcgtggcgttcgcctttaccaccctcctcatcgcctgcctgctgctgcgcgtcttcaggtcgggaaagaggttaaagaagacacgcaagtatgatatcatcaccactccagcagagcgagtggaaatggcgccactaaatgaagaggatgatgaagatggaggactccacagtattcgacatcaaatacaggtaaaacctgtttcccagcctggtggcatcctgtggaaagttggtcagctgccacctggggtgtgaaggactggacctggaagccctcttgcgtcggaggtgttgaaaccaaaacgaacgttatgtcataaaaccccagcttccatcgtgcgtgtcaggcatctgctcagactgtcactggcaagctcgtttccacgtcaccacaatggagttgcttctgccaccctttgggcatccctttaaagtgccccctacttctactccccatgtaagaggctttgtgccttgctaaggagcaaagggtagaaacagtgttgacttttaaagaagttctttttaagacaattgttgacaatagtaaaagagatcaggaggatcaagaatctaaaacaagcctgaaggatgtccaactgtgtatttagaatttccgacattcttctctactggatctacacattggaccccatctgatcctttgctgcttttttggcttggtcaggtcctggcctcattttggcgttacctgtgtcagagttcaaggtggatgtgcttagagctggtcagccccttccagacctggacacgtctgtggctccttttctttcttcctgtgacatgacccagggatctgctgctggcttctggagacagggccttgggctgacttctcaggttgattgaggcctcctgactagcggtgttcccaggctagaggtgattggctccatc

SEQ ID NO: 129793 - DNA, 1281 bp, Homo Sapiens
  misc_feature (540)..(550): n is a, c, g, or t
  misc_feature (599)..(634): n is a, c, g, or t
  misc_feature (1172)..(1223): n is a, c, g, or t
ttttgcgtaaaggcaagaggaatccagctttttccatgagattcagctgcaagttgttccgaaaaccctgtggtgagcccacgcagttttcaggttcaaaggttttgagggggggcgaacaagcttgcgagggtgggcccaggcttcccgtggagtcacccacctcaggcctggaggtacacccggtggagaggagagattaaagcagccacggcttgttctgttgccagtccccacccctctggcaaaacagatgggggaaacagagaaggaaagtcaacacaagaaggtgaaatgcagggagcagagactacacgcaggccccccgtggctggcaataccatgcgtgctgggccagctgcgccaccctcacccagggcttcccacgggctctgctctttcctgcagaggcgaaactgccttcctggcaggcggaggctgccgagctcccatgccccttcccacatatcccaactcttctcagaaaactgaagaaccgaagatggaggtgagtcaggaaaggctggagttttcatcccnnnnnnnnnnngagcaggacaataaacaggcaaatacacaaacctggagcaaagccaggnnnnnnnnnnnnnnnnnnnnnnnnnnnnnnnnnnnncacctttctagagagagcaaaatcccagggtcccgaaggcactgctaatagactaatagaagcatctttgttgcagccaatcacctctagcctgggaacaccgctagtcaggaggcctcaatcaacctgagaagtcagcccaaggccctgtctccagaagccagcagcagatccctgggtcatgtcacaggcaagtcctcacttcaccagctcagaggtgagccactctcacctgaacctctgccttccggcagggacctcctgggtcctgtggggtctcctgggtccaggtgggttcctagtccagccccgtttcgactgacttcaaatatagtcccctgacagtgtgattttttccagccagccaaatcaccgttcatttttaaaatggtttttaaaaattacatttttaaggcaaacaacgtagaactgtgacagggcagaggaacaacaaaaaagcccaaagaatgttgctaatcacaggctgcctagcactttcctttcccttcagagaaggggaaactgttttataggtatnnnnnnnnnnnnnnnnnnnnnnnnnnnnnnnnnnnnnnnnnnnnnnnnnnnngtttttccctgatactggaaattctttgtgaactagccacgctgatttctgctgaacc

SEQ ID NO: 129794 - DNA, 728 bp, Homo Sapiens
  misc_feature (69)..(79): n is a, c, g, or t
ttttatctcccccttttttcctggctttgctccagggtttgtgtatttgcctgtttattgtcctgctcnnnnnnnnnnnggatgaaaactccagcctttcctgactcacctccatcttcggttcttcagttttctgagaagagttgggatatgtgggaaggggcatgggagctcggcagcctccgcctgccaggaaggcagtttcgcctctgcaggaaagagcagagcccgtgggaagccctgggtgagggtggcgcagccggcccagcacgcatggtattgccagccacggggggcctgcgtgtagtctctgctccctgcatttcaccttctttgttgactttccttctctgttttcccccatctgtttgccagaggggtgggactggcaacagaacagccgtggctgctttatctctcctctccacggtgtactcaggcctgagtggtgactcacgggagcctggccacctcgcagctgttcgccccctcaacctttgaactggaactgctggctcacacagggttttcgacaactgcagctgaatctcatggaaaagctggattcctctgccttacgcagaaacacccgggctccatctgccaggtgcttgccactggtcctggcagaaatggcggctgctgaaagtgaccttccaaatccttggtggcacttcagcgccacaggctctccaataaaaaccctttacacatatcccaactcttct

SEQ ID NO: 129795 - DNA, 644 bp, Homo Sapiens
tttctgataaaattatgttttaattgcctatggcatatattacataatggctcaaaattaatagtctggctgaaattaagaaaaacagctgatgatgacttagtaaatccttaattttaagtaagcttttggccaaaagtcaggggtagaattgactcaaaattaacagccttcaccatcttttattcattctgctgtgatacaactaaaatggccagtaaattctcccctgggtctcaggtaacagttttccaaaagtgaagtatcactttctctgcacagtggtgaaagccggcatttggatgggctggatcgggtggacaggctgaaacactggcttctttctcacttcagagtgtgttttcactgcagggagcagctgattccttttgatgatctgtaaggccagctgagtattaccattctgcagttcaaggtagactgccagcaagatggcctcagggggcatctctttaggatggctcatttgagccgcctggtggagacactttcgggctttgtcatattcgctcctcaggcagtaagcgctgccaaggttgaacagcatcacagtcctggcagagttgacggaactggggtagcactgaggggcccgcttaccagaggattccattgcctcgtgc

SEQ ID NO: 129796 - DNA, 591 bp, Homo Sapiens
gggttctatcctgactcatgttttatggggggctgggtgggagggttctgtgctggctgaggagctctgctctgctctgctccttgggagacggcctagtggctgccggtccttggatgctggggcttggctggaggcacagcccccactttccaggggtcccctgcacctgccagcttcctcagcctcaggatttcgtgcttgtacctgcccaggtgctggtccacgtactcctgtagctcagaaagttgctcttcagccatcgtggcccggaccagcagctgtgcccgctcccgttccagctctgcctgggtgctgcgggagaagtcccggagcttctggtggatctgggcccaggatgcagcgtccaggccctgtggctctgatgttcccccctgggaggctccaccgggtctcttttttggggatgagagcagtgccccaggcccgccgtgctggtcctcccgatggctgaagtcagtgaccaggggcacgggcaatggttccaggtccaagctggctatgtcaaaaatagcttgggggttcccaggtgccctgtaggcaaccagtagctcttcatgcctgcggctc

SEQ ID NO: 129797 - DNA, 797 bp, Homo Sapiens
ttttgaaattcaggcgatttattgtaaacaggataaccctagcactccaccatactggctgtgtcacatgctccctctttcacatcaactggtcaaaaaagaagactttcttaagaagcctcaggtaactaataacttagttccacaaatctcatttactaagcactgcgtaaactgcagtatctggggtagtctgttattgctcatggactgcagcttggacccatctaaatgaatccattagtatgcctgagtgatcaacagcagctctagatccaacctggaaattggaaaatgctgacgcataccaaacaattgcaggttcatggaagactacatgagattgctctcagatctcttcatgtgtcattctcataaaaaagacacttaaatttcacccattttttaaaaaaagagctaaaagttactcaatagcacataattttccacataaaaggtaggtggatttttatttactagtacagtggtggatcggaacactcaggcctaatttcagatctgtcttgtatatacttgcagtttaatgaaaagctgcatagtctacaaatacataaaaccagaaggaagtgatgatttcacacaccttctgatggataaagacaggcttcatataaggaggttcttgaaggtcgggataaaaagatggttacagcaccacattgatctgacagtagaaatggagccccggctttgaaagcagccccataattgtgactatatcgttcttgcccaacattgagattcggcaaatgggcagtgttaaactttagatgtga

SEQ ID NO: 129798 - DNA, 813 bp, Homo Sapiens
  misc_feature (710)..(710): n is a, c, g, or t
  misc_feature (717)..(717): n is a, c, g, or t
acctagaggttataggaagggatgaacagagatgacagacaagacaaaaaaggttatgagagaattcctcattatacatgggtagaattcaccccagaaaccaaagaacttttcataattacaagggagggacagcacagggcacaagatctttgaggtgttagaagacaggctgacagaccaagcttggtgactggcttaataagtctcctaccacttgaaattctgtgttatttatttaaagagaggcagaggaagagttcagaagccagaagatttttggaagagaagttgagcctcttgcattttcttacatcattaatttccttcaccagaagatatagttggaccaaattgcaatagggttcgccaatggactccattatgtagtcgacctgtgctcctcactaggccctgatttcgctatctgataacaaaggcttctgaactcttattcttttcctcactaacaaacctcaataatctacacttagcattaaggtctccaattcagggttatggaagaaactagtcttccataacccaacgtttctacacatctcaagtccttatcagagttataggttcagttttcacatttccagggagaaaatctgctccttggcagtcttcaaactttacctgacatacattatataccctcagcccagggcctcaatctcttaacatctccatgaacaccccagcanacaacanaatatatccatttatcacacttcaatcccacttgaacatcagtagccactatcttgatatacttgtgttccaaaggtgacggagtgtccaacagca

SEQ ID NO: 129799 - DNA, 577 bp, Homo Sapiens
  misc_feature (552)..(552): n is a, c, g, or t
gaaaaagtgattttaatttattgactagccacaaaacattaagcttcagaaagttctgcctctaagttcaacgaattgctttttaaaatttaattttcaagtcctcttcatttgcaccagtttcaaattaagcaacttattgccaccacattttattcaatttcctgactttccaaggtctgtaagtccaagttaaaaccggcatctttgagcagaacaaagtctactctgctggttaactccctttggtgccatatgtaagtattgcattattttctcgcagaccaatttctccataaaagcagttaaaagttaacaacaactcatgtgcttgtagtaccttgacagaatgattatggaaatctgtaataataatctcattattgctatttacagctgcaaaatggggacctgcaaactgcctgtccccatttcctcggctaccaaacctggtgactattttcccgtttggctggaagataacacgcagcacgccttgttgtccacaacaataatgtgcccattgcggtccacagaaactcctttgggtcncatcagctttcctggatcaattttt

SEQ ID NO: 129800 - DNA, 2009 bp, Homo Sapiens
  misc_feature (161)..(210): n is a, c, g, or t
  misc_feature (1899)..(1933): n is a, c, g, or t
ggcatttataatagtctttaatgtggtttaaaagtacaacaatatagttaagaactaccttccctggtacagaatactaggtcattctgtgaccagaataacaaaatatgatacaaagaggtagcatgatgttaagtttcaggtagaaggaaatgaaaaannnnnnnnnnnnnnnnnnnnnnnnnnnnnnnnnnnnnnnnnnnnnnnnnnaatggcaatttcttctccacttgttttagacagtaagttgaagtgctttgaagaggaaaagtgataaactcccataattacagatccaaataagagtaaattaaattgtcctaaaacctggacttggccagagtatcaatgacaaacgatcttcaactttgggaccttctttaagaaaactctcccttcatccctatataacagtatcagctttaagagtgagctaaaatgaaagtaatgtaaaggagttttgaggttagctaagaatgacttttaaagtattttctttaaaaaaagtggcattcaaagagctattgaacatttttgtatcactgttacaacacaaacaatttaaattcaatatctgagatgcagaaattggaaatctttcagaaaatgctctgaaagcttcattaaccaagttaaatgttgggggaatgggctcattcacagttccctgcaaagaaacaccaatttttgacattttatattaagtgggaacagtgaataagggcacataatacgggtggctattagccacctttagtcattttttaactataaaaataaacataagtaactaatggaataacaaaataaaagtttattttattagaattaggaatgttctttccctctgggcaacctgaacagtccagttacaatgaaatctaagaacagttatttccacagcatagggtgctctatgcacaaaattacagggttaggagcatttaatcaatttaccattctgattgtctcaccaacccaccccatcccatcccccaagtgctctattaccggggtttgtagctaaaataatttgttacattaactccttttccctcttctactaaatttcagttcctaatcatggttgaaccactttattacacagcagattcaaccatttcaaatgaagtcagccagtcttggatctgttgtatatgggtgtatgtatacacgtgtatctaacatatttatttaaacacacataaaacacatacaatctgggttgtggaaaattacagataatttagtctgatattatatgctactcaattttaccactgtggtttgtgtcctgagctttggatcaaaattttattttaaatcactgaaagtccatctgctgctgaatgaattgttcaaatgaagcatgcacttttcaaaagacaatgaaactgacctcaagacatggagaccttggtgcttactgtgaatagatccctcagataagacttctgtaggtgaaacagggaagctgtcatggcttgcctatcccagctgggggcactgaatctactaataacacaagcaattcactctgggaattctgtcaaatatggtggtatctgttaaaagcttggaagtagaaaagggccagttcatcttgatcatacaaattagggaatgcacccacaactgcaataccctcaggcagtatgccaacattgaaatagaaagcatctctaaaaagcactgttcctccatgagtgcgtactggtcctcagtctcatttttaatccccagccactcgttgattttcttctgccgggcgcctttctgggtgagccacctgagaaggaacaggaaaggtgggcttgtgcagttgtgtgggtgctgagcccacagtcccccggccgtaatggccgaattcccgggcatatgtccggtaccgtcgactgnnnnnnnnnnnnnnnnnnnnnnnnnnnnnnnnnnncggccgcttcctcgctcactactcgctgcgctcgtcgttcggctgcaaccgagctagcccctatagtgatcgataa

SEQ ID NO: 129801 - DNA, 1478 bp, Homo Sapiens
  misc_feature (94)..(94): n is a, c, g, or t
  misc_feature (139)..(139): n is a, c, g, or t
ggccccacaacagcagctcccccccctgtggcccatggcggggcaaccgggccttaaggaagcttgcctgggcggccggctctgcatgttcttngttgccctgtcgtctgtaactcttagtgttcgacattcgccggtngctacagtggtgtcacgacgtgtgtaactgtggtcagcagaccttgttccgcgtggacgcctcaagtggattaatttctggaagcctcaatctgtatgtttgagtatttacatgagaatgttatttgaatggaattttcttaacccagaaggtagtatttataatcatttacttgtagcgaactgtttaaagttaacacttgtttaaatttttttacactatagcatttatgcaatggtttacagaattcatggagttatttttatcagtatgggaattaattaaaaccttgaatctttgttttgtctgcttctctgagcacaagcctggtcagctggtccctgcgggtcctaccagccagcttctctgtagggctctcggccgcgtccacctctgctctcccaccacaaggtcacaaactcccacgcagtcctgggtcaccccgcagctgctctggagacttggctctgggcgtctcgtggcccaagtgctccaagttggaagtttctgtgggcctcgtgtaggggatgccgtgctgggtgagcaaacctttcagccttttgatctcctttgagagttctttatgagccttcctgcagttttccagggtctcaaaccccaagctgtcaggacctccctccagctgggtgggttcattttcttctggggtctttaagtagccagcatcctcaaaaagtgtcctcagcaacttctcatggccctggggggtgatcagctcatcggccaggtcctgctctacctggtcccactgccgctgcagggcctctggcagggttgggtacactagcaaggcgtgggggtggcagacgaggggggtctcgaacgtcagcgcgtagacgcaggtgctcggctcggacacatgggccagccggttgctttttccacacgccagctccaccttgctctgccggctccgggaacggcaggcgtcaccgtccctcatccacatgcccgtgaaggtgttgttggcgatctcccactcgtgccagatgccgaggatcccactgtaggcgttccagcggaaggtctgctcgtgctgggtcacgttgtggaacgggcagaactcatacttgtacgtggactccaccaggctgaagcacttgcccgagagtcggaagagatgcacgggtccagacacgggtgaaggatccctcttggcctggaggcgactggcctgaggcaagaacgggttgttcaccccaaacgcgttgggctcctccaccaccttcatcttcgctgcacctgccggcgcgggcccgccggccgagagcccgaggagcaacaggagccgcgccagccccgccgccatcgcgccgca

SEQ ID NO: 129802 - DNA, 3356 bp, Homo Sapiens
  misc_feature (2921)..(2929): n is a, c, g, or t
  misc_feature (3202)..(3280): n is a, c, g, or t
ttttttttaaacaaagaactctggtttttaatagttttgatcattaaaaaagtttaaacctgcatagcaatcatttcaaaaataattatttaatgttccataattaaactgtacacaacctagtcttgggacacagaagccagtgaggtgagtttggagcagtctggtgcagtcccaggagccaggagttgagttctcattggcctttttgtttttgtcattctgctcatctaagtttttggatagttggcacaatctggctctgctgatgagtggatctgcactgggaagagagagcagcttgacccccatcccttcttgcttcccctcccccactcagccggattcctcaaagtcgctcaatgtctcggtatttcttcctcaaaatagagacctggtctttaaagaggacggggtcgagcctcatctgagagtggatcagcggcatgtagccaaaccagctggcaaacgtattcatgcagctctgtcgctgggcaaagtggtcagggtcagcccaacgggaagcccgagaagtctgtcccatcattgtctccttatactgcttcttctgggtcactttgattggaggcaattttgtcacagcagacaccaggaagttcatgagaatgtcctcacaattggccaattggtccaccatgttcttcaggctggctggcaggtaatgggagtataggtagtgataatatttgtggtaaatagcagctcctgtcaacaccatggagtagtcgttcgtccactttgatgtgtatccccaccgctccttagagttatcccagaagtggctgcgcgcggggtaccccacaatcctctcagggaagctctgccacactgtgaaggcgaaatccacctctgttgttgaaagcaccgtgtcctcgtcaaggctgagcacggcgtctgtgatgatgttgtcgtagggcagaaaacggctgctcataaccttgctctctccttcaatgacgacgacaggcacagcagtggcaggccagcggtgtttggctggtaggggcttgtcacaattccatagaactatgatctgggcacagtactgggacttggctgcagccacgagaagcttcaacactggctgggactgagagaccaggggggtcaccgcatggatgactgcagtgaatttggaggggggctttaaacctaaattagcatagtagtaaggaaaatctcccagataagatgaatactgtggtagtacgaacaatcctccaggatgtttgttccatattaaactgttacgtgatatgtgcttgaatattctgtcctgaataatctctagtgtagttaatacatcttctcaactgaagaaaaataagcctcccacaagaattgtgtctgctgtctaagtgctaggattttatcctgatgaatagacctgattgtagaaggaatctgtaataacaatctctcatcgcctatgacggcagcttggttccaattaatcacttcagagaatggcaactcccatccattgctgagcatcacagggacgcaggcagcctgcaaagcctccaggaatctgaaggacccaagcctgcgaccacgaggaaccagacagaaagtggcattgtgcagcatttcccgataatcatacttctcatactcggtgttgtctctgtcacagcgagaatccttgtgcttttgccagtctttgccatgcttgcaggtggtgaggagcacaacgtcctccccgttatggacgtgatataaggcattcctggtgtctgatcctatccctgtcaggtacctcttccccttgaataccagcatgtacttcctgagaggagggatggtgttgaacttcaaaaaccccctctcccctcctgtcctgggatgatccttagaaaagaggggaatagaaacatcaaagttgggtcggaagttttcagtactgatgctggctttggccagcatcgcctggccgatgtcaaaccccacgtcctcggtgtagtcaggccaagtgccggaatataaattaaaaattaaatgattcctaccattgttccacaagtggagactctgcactttggatctcaaattgtgcacatactgaggtgacaactggtctctgtctaaagtatccagactcaggacaaagaggcacgcctggctggggtccgaggtgtagaacctggagccctcgatggccgctagaatgttttggtaactttcggcgattttctcccctttttgctgtgggtatacgtagactttgaagccgtttttcttgcaaagggtgaaatcgaagcaggactccatgcggcacttcttgcctttgtagatgctggagttggcatctcgcttctgccggggggaaatgtgcacgctggaatcctcgttttccaattgatcccaaggaacgaaggggcgcagagcgtccgggaagcggggccagaaatgatccggactggggtggtgcaagccattcctaccgctgtgttcttctctccggctgtggctcctcgatgccctaaactgcaagcctccgaaataaaacaaaagggcgagacaagagccagctgagagcaggatgaaatagcgttttttggcctgcatgtgtcctgcctgggtcaagaggattgtaaataaacacaagaatcacccaagtttcccaatcaacactttcagctccagtccgccatcttcccgcctgtaaagacttcaaactctccgctcccaccttctctggatgcctttccccaagccgtggactgatccagcgcatgtgggcgatttctttaactttctccccttcggtctttcatctttgggttgcacaatgcacgggagagagcggggctgaatatctcgcacccagggcgggcgagcagcggactgtaattttcttgcatgcaacaagacggaggaaaagaaagagagaggggagnnnnnnnnngctcccgatacccaatcaatggcaagacgaagtgattgccttgcctctcggattcctctcggcagcgtggaaaatgagccccgggaaggcaacttcaactcatccaccactctccgtgcagagcactccggttccaacaagtcagccgatcccgggttcagccggctagtgcatcttgcagctggggcgccgtaacctcacaaatccctgcatctctctttattcccttctgcagcggctccaagactccggcggtgtttactcctgcgctcnnnnnnnnnnnnnnnnnnnnnnnnnnnnnnnnnnnnnnnnnnnnnnnnnnnnnnnnnnnnnnnnnnnnnnnnnnnnnnntcctccccgcgggcagtgccggccccgagcagcgcttcgcaggcccccgcgcgaacgctgccgaccgccgcgttcg

SEQ ID NO: 129803 - DNA, 1232 bp, Homo Sapiens
  misc_feature (340)..(357): n is a, c, g, or t
  misc_feature (362)..(500): n is a, c, g, or t
cctctctccgcctgtgtcttttttgccctcccgcgtcgcgcgtttgctcgttcccctcgctgcgtcgtgtcgcctccctaccttgtctctccacccccccaccgcggctgctggtcgcttcctccctctccttctatgtcctcttccgcctgttttgttcgccctccctccctccgccgttctttgactgccgccccgctccgccccccgctccttgtctttttgtcgccccactccttcgggcgcgggcggtgccgccctgcctccgatacattccggtggtcgtctgtcaatcttttgttttcgcccctctcccgcgcgtttgtctattctcatattnnnnnnnnnnnnnnnnnntctcnnnnnnnnnnnnnnnnnnnnnnnnnnnnnnnnnnnnnnnnnnnnnnnnnnnnnnnnnnnnnnnnnnnnnnnnnnnnnnnnnnnnnnnnnnnnnnnnnnnnnnnnnnnnnnnnnnnnnnnnnnnnnnnnnnnnnnnnnnncaaaattcttgtggtcgttttttaaatttcttaccggtaaattgtctaaaccatgttggcaggggttcttcaggggaccagtcccaatagagggagaagaggcagggcttgtcctgcctccagtgccagctgtcagtggcagcagaggccttgagggttgagcatcttctggatccagcagaggcctcccaggaggggagccaggtggctgaaggcaagcactgggagggctcaggttctgccctgggggatcctgggactggagattggcacctgcccccaaggcttggcctgtgcccttggtgccccctttgcctgcccaagtctactgcatgtgagctcaggatcctttccccgtaagccaggacatgtcgccagtctccacctcccgcttccggatggcacggcctgaggccagcacctcagcgaccttggacacaatgggatcgtagttcatgctggccacggcgatcacctcgtcgcctctgcaaggagaggatggccaagcctgaggactgcgaggcagcagcccctttttgaaaaccctgatgcactgctgtccatctggggcccagggaaggacctaccccagggcaacaagaatggcctgagcacccagccctccctgctttgcacatcgcggcttgaccgtgcacaagcttcgggctttcctaaggaagctccagcactcctcagcggggctcagggctgggctcttgttctgggatttgc

SEQ ID NO: 129804 - DNA, 521 bp, Homo Sapiens
tcaatgagacagaagccagttttataaaacataaataatcatttatactccatgattagcaatggatcctgtctgaagtaaacaaggacaattaatacagtacaagatatttgtggttttgttttttataacccactaagccaagatttgtatctctgtatggaactgattttcaaatggacagaaatggtctttgatctttctgaaccacttgtcttcaaattcttctgaggatacagtcaccaaggcagtcagggctacggagccaacacacttcacctctgggtgaacttcatcttttattttttctgggatatcttctcccataacctcagctatcaacagcaaagtgtcttctttgaagctgaaccctttcattttatcttcaatttcctgctgagtccttaagttcctctccaaagcaaacgatgtttgctgaggttgggtaaactgaagcagaagcctggttcgtataaaagaggcacatgctttcagctgagtctctatcaacactgtttctc

SEQ ID NO: 129805 - DNA, 1595 bp, Homo Sapiens
gggcccgccctgcagaggctacaccctggcaggacttaatctcctaaatctctgccgcttaccctagtcttttgcaccaatttaatcattccttcacgcagggtctactgagcgccatcccttgtgctggactctggctacttaaataggaatcaagccaggtccctaccattgctcagcccgcagccgagtgggaaagaagctcgcaaaagcagcaaacaggcagtaatcgagggaagatggaagagttgagtcaggccctggctagtagcttttctgtgtctcaagatctgaacagcacagctgccccacacccccgcctatcccagtacaagtccaagtacagttccttggagcagagtgagcgccgccggaggttactggaactgcagaaatccaagcggctggattatgtgaaccatgccagaagactggctgaagatgactggacagggatggagagtgaggaagaaaataagaaagatgatgaagaaatggacattgacactgtcaagaagttaccaaaacactatgctaatcaattgatgctttctgagtggttaattgacgttccttcagatttggggcaggaatggattgtggtcgtgtgccctgttggaaaaagagcccttatcgtggcctccaggggttctaccagtgcctacaccaagagtggctactgtgtcaacaggttttcttcacttctgccaggaggcaacaggcgaaactcaacagcaaaagactacaccattctagattgcatttacaatgaggtaaaccagacctactacgttctggatgtgatgtgctggcggggacaccctttttatgattgccagactgatttccgattctactggatgcattcaaagttaccagaagaagaaggactgggagagaaaaccaagcttaatccttttaaatttgtggggctaaagaacttcccttgcactcccgaaagcctgtgtgatgtgctatctatggatttcccttttgaggtagatggacttctcttctaccacaaacagacccactacagccccggaagcactcccttggtgggctggctgcgcccctacatggtgtcagatgtccttggtgtagctgtgccggctggcccgctgaccaccaagccagactatgctgggcaccagctccagcagattatggagcacaagaagagccagaaggaaggcatgaaggagaaactcacacacaaggcctctgagaatgggcactatgaattggagcacctgtctactcccaagttgaagggttcttcccatagcccagaccaccctggatgcctcatggagaattaaagagagaagcctccttaaggagccacaggatggtacctggccccaaaaggaatcctggagaggaggacagtgacaacaggtgacttcattctttagagtgaactttccaaacccagtccagctggaaacagcttatctataatctgaaatgctggctcaaacagttatggggaggttcccagattgcgtagcattcagattgatttgagcagctcctactgtgataagtgtatcccagatccacaatgtaaatatatgtgatttgtaagaaag

SEQ ID NO: 129806 - DNA, 773 bp, Homo Sapiens
tttcttttttaacatgttgagattctctagttgttttctttggcgtatctaaccccttcttttgttttctgagacctggtaacccacgctcttgcattgtggattttaaaatgtatactctgtacggttctgtaaaccgaaaaacttttgtaaatatataaatatacatagacataaaaatactgtatgtgacagcacatagagtagttttcccacaccaaagttaatttttatgcatgctttaaaagtatatatcgggaccggcagaaatggaagtatccatacatttttaaaaagcaacaagtttgcacagctagagtgtttttgtaaataaatgtatttgtataacacagtcatgtaatatacagaactataagcagagactttgcaaaactaaataaagggctgcatgcttattattttttgtaccttgtcactataactacttcctagtcaaagaacgaaatgtaactgttaccgagttaaatgtttttccgctttgagggatgtaaccacatccactcagaggacactacttttctgaaagctctggggtgactaatgatgagttcctaataaattaattgcaagtgtggtgccttggatgtggcctgttggctcgctttcttctctgtggcttatcaaggtgtagatgacagaaagcaaacctggatacagagtttccaccctcagttcctggaggggctcttattattttctctctttttaaaaaacttccagtagaagtaaagtggaaataaaatgtctttatc

SEQ ID NO: 129807 - DNA, 1007 bp, Homo Sapiens
  misc_feature (272)..(324): n is a, c, g, or t
ctgcttcagaattatttattattttgtacagtcttcatttaggtaattttttcttatgtctgttatattctaaacacacacacacaaagttcaacaaagaaacacatctcagtgaaggggcactcccctaagccattcttctatttggtggtacccagccataaccatgaatctcagggcaaaactttccttgtgctcactatgagtctctaaggttggaatgtaagtttctgctgcatttttaagtttgccaattataggagataaatgannnnnnnnnnnnnnnnnnnnnnnnnnnnnnnnnnnnnnnnnnnnnnnnnnnnngctctagaatacatgcatgataaacatttatagacacacatttttacatagcactgtcctctaggagtcgtctatggtaatgcctacttcccttctaaactacaagcctcctgaaggcagggggccccaactcctccacacccagcctggggagggtggtgcccagggaggtcacagcctgagccatctgggaccccattctcatcagagctacttcccagacccagggcccagtggcttcaggtggaggtgaaagccattcttggagcgcaggacaagctggggcatcttgatgggcagccgtgaggggtccagagagaactcaaagcggagcaagcacatggctgtgaccaccttcatctcactcatggcaaactgctgcccaatgcagttcctgggcccagcagagaagggcataaaggcaaagggatggcgtttggatgcattctcagtggaaaagcgcagagagtcaaagacctcagggtcgggccatacagcactgttcctatggagggcatagatatgcatagagatcaggcttcctgcaggtagagaccggccatccacaaaggtgacaggcttgctgagctggcggtacacctggggcacaggtgggtagaggcggaagctctccttgatgcacatggtcagataagtcattttgcccagatcatcccactgga

SEQ ID NO: 129808 - DNA, 1345 bp, Homo Sapiens
  misc_feature (42)..(42): n is a, c, g, or t
  misc_feature (53)..(590): n is a, c, g, or t
  misc_feature (635)..(670): n is a, c, g, or t
ttttcggtagccgcaggtcggacaggggacgcaggagagctncccggggaacnnnnnnnnnnnnnnnnnnnnnnnnnnnnnnnnnnnnnnnnnnnnnnnnnnnnnnnnnnnnnnnnnnnnnnnnnnnnnnnnnnnnnnnnnnnnnnnnnnnnnnnnnnnnnnnnnnnnnnnnnnnnnnnnnnnnnnnnnnnnnnnnnnnnnnnnnnnnnnnnnnnnnnnnnnnnnnnnnnnnnnnnnnnnnnnnnnnnnnnnnnnnnnnnnnnnnnnnnnnnnnnnnnnnnnnnnnnnnnnnnnnnnnnnnnnnnnnnnnnnnnnnnnnnnnnnnnnnnnnnnnnnnnnnnnnnnnnnnnnnnnnnnnnnnnnnnnnnnnnnnnnnnnnnnnnnnnnnnnnnnnnnnnnnnnnnnnnnnnnnnnnnnnnnnnnnnnnnnnnnnnnnnnnnnnnnnnnnnnnnnnnnnnnnnnnnnnnnnnnnnnnnnnnnnnnnnnnnnnnnnnnnnnnnnnnnnnnnnnnnnnnnnnnnnnnnnnnnnnnnnnnnnnnnnnnnnnnnnnnnnnnnnnnnnnnnnnnnnnnnnnnnnnnnnnnnnnnnnnaagaattcggcacgagggatgttggagcggccgcggctgtaggcnnnnnnnnnnnnnnnnnnnnnnnnnnnnnnnnnnnnctgcttcagaattatttattattttgtacagtcttcatttaggtaattttttcttatgtctgttatattctaaacacacacacacaaagttcaacaaagaaacacatctcagtgaaggggcactcccctaagccattcttctatttggtggtacccagccataaccatgaatctcagggcaaaactttccttgtgctcactatgagtctctaaggttggaatgtaagtttctgctgcatttttaagtttgccaattataggagataaatgaagtttctcgaacgaaataggtgctcaccaaactgtttgttgaataaatgaatgagctctagaatacatgcatgataaacatttatagacacacatttttacatagcactgtcctctaggagtcgtctatggtaatgcctacttcccttctaaactacaagcctcctgaaggcaggggccccaactcctccacacccagcctgggagggtgtgcccaggaggtcacagcctgagccatctgggaccccattctcatcacagctacttcccacacccacggcccagtggcttcagctggagtgaaagccattcttggagcgcaggcaagctggggcatcttgatgggcagccgtgaggggtccagagagaactcaaagcggagcaagcacatggctgtgaccacct

SEQ ID NO: 129809 - DNA, 250 bp, Homo Sapiens
gcttcagaattatttattattttgtacagtcttcatttaggtaattttttcttatgtctgttatattctaaacacacacacacaaagttcaacaaagaaacacatctcacgtgaaggggcactcccctaagccattcttctatttggtggtacccagccataaccatttatctcctataattggcaaacttaaaaatgcagcagaaacttacattccaaccttagagactcatagtgagcaccctcgtgc

SEQ ID NO: 129810 - DNA, 543 bp, Homo Sapiens
tcaccattttggacattttatttatagaaatttccagcagagccattgttaagtacctctgtcaggagatacctgtgagaacctagacgggaaaacagccacaggttgatctgcatctgttcctccccaacactccacacacaccagaacaggaatagccaggcaagcctctgggtgcccggtgatgcactgtctgaggcacagcccagcacgtgcttcctcagcacatgctacacacacagatctggacgaatgacagaaacttcacagatgtaacttccaagtgcgacctcaaatgacaactttctcaggtggtgcctggataggaaaggcaccggaacagaatctgtagaaaaccaaacctatcatgatcagcattcctacccgacgttaacctcctagactagctgaccttatttattttgaaagcaaatcaagtgtatacagtctctttttaaaaaactgtgtaaacgttgtaaagtttttaggggctgtttataatctgaagatttataaaaaattactggacttgttaggactata

SEQ ID NO: 129811 - DNA, 978 bp, Homo Sapiens
  misc_feature (454)..(471): n is a, c, g, or t
tttattggctgagtgaaagtgcctcatcattttcattcagacccccagttcattagtttgaccattgattcattattcactcattcacattgattgagtcaggcattgtactaggcactgggattacaaaagagaacaagataaaaataatccctgacctcaaggatcttacaaaccagccattttttccctcccctcaacactctcaccaacttgaaactgttcctcctccctgatcttcatccacagagctgtaagcagaggtacaattctggtttatagaaatgccaactgtcactggaaaaattcctttagtatatcagcctcgaatttaagaaataattaagtttaaaaataattttcattgtatagttttaagtggttttcttatttgtaaaaacaattcatttgagcttcacaacatatctgggctgggtggaaatcactgtttcannnnnnnnnnnnnnnnnngaacaactttattgagatataattcacatagcatacaattcactcatttaaaatgtacaattaaatggttttcagtatatgcagagttttaaatacaaccatcagcacaatcaattttggaacatttcatcaacccagaatgaaacctgtacccattagctaacctactttatgtccttagatttagctattctgtacatttcatgtaagtggaatcgtgaaatgtatggtctttgtgtctggcttctttcacttagcataatgtctttaacgcacatccacattatagcacatgtccatacttcattccttctcacagctgaacaagattcccttctgtggatatatcacattttgtttatccattcatcagtagatggtgtgtttaattttataagtgaagaaactaaggtaaataagtgcctgggttgggaccattcaaagccaggtcccctggctcccaatccagggctcactccattaaatctactaggtcccataatttta

SEQ ID NO: 129812 - DNA, 870 bp, Homo Sapiens
  misc_feature (738)..(738): n is a, c, g, or t
  misc_feature (744)..(744): n is a, c, g, or t
  misc_feature (787)..(787): n is a, c, g, or t
ggtttttatgggtttgcgggttctaagatttaaatgattctttatttcaataaactttaacaaacaatatataatatttcttccttaaaaagctcattcaaagatcataggcagacttcttccccattgtattttagttggggagataaaggcaaaaagaggaaatgtaagctatcttacagtcattctgagaacctctggtttcatgctatactttcccagctaaaagttactaatttacgaagttcagatactgaaacttaaaaatcaagatccatatattaggatgtcctgctgtcacactggtggtggcccattgtgtcggagtctggtaaatggccacaagatatgttctagagacgtccatgagtcctcttgctgtgtgggagcggcatccacagacttctggaataattggcctgtgaggaagctcatcaaagctgcaaacagtacaatgaatgcaatagagagccagagggccttattagcctttctgatggaggacttgagatttgttgcccaggaagctattgtgtcataaactgaagagacatcccactttgatggattatttttcttttcagaaagacttggcttccttgtcctttctactgtttcttctccagatggctctgagtcatctttagtttttagttcacatttttcttcttcagcatctgcccaggaataggtgctaataaatcgaggtaatgagggacggtgttcactctgctttgnacccanaatacgccactgcttgacttctactgatcgatcattatttccnatccagcacattcctgcattccatattctgggtaactcgtgcgaatctggctcgaggcaatcctaaggagtctataatcgtat

SEQ ID NO: 129813 - DNA, 813 bp, Homo Sapiens
  misc_feature (184)..(192): n is a, c, g, or t
  misc_feature (360)..(377): n is a, c, g, or t
tttcactagccacaaacatttattgttggggtcaatacgtatatccttttgagaagtgtttcgagccattcatttgataactacaaacacgtcagaatctgttttactggtatatttttggcttgcatgacaagggaaaagagattattgcaaaattatgaatgaagtccaaaaggcctgattnnnnnnnnntctataaaatggaaggattaaacactgcccagccctactgtgtcaacaaagacggtacaattcaaatcaagaagacaatcccatacaagtccagcaaggcagatgttggcaagtagaagttaagcaatctgttatacaaaatgcaaaaggagttaaagataaattacnnnnnnnnnnnnnnnnnnttttagtcagaaaactattactacataaagccatataagaatgtgtattagttgtttcctttaagggaaaaggaaatcaaactgttggttttctatttattcagaagaaaaaataaaggaaagtgtttggaaaatatttctgatattaagtgaattatttctcatctgctacctagagtttacaaacaactgacttatccttgtcaatctgtggaaatgagaaaataaaatcagcgtctggccttcgtgggatactcataacacccgaatgaggtccagagtaatcctagatcgggggatgtcaatgttgagtacttggacttccactctttctccggggcccagtccaaggcttcttctcttctttgtttttgaagttttgcttctgttacatttcgtatgggaatcagcccagatttccccactcctatatccc

SEQ ID NO: 129814 - DNA, 1177 bp, Homo Sapiens
  misc_feature (118)..(159): n is a, c, g, or t
  misc_feature (876)..(900): n is a, c, g, or t
agtaaaaaagtacaattttaatatagtgaatgtaatatatatgtaattactcataacaaaatggtcaaaacctttaaaagatacacaataggcatctaaaaagctcagcaatgctaannnnnnnnnnnnnnnnnnnnnnnnnnnnnnnnnnnnnnnnnncatacgtttttaccaagaaatgttttatttttcttgcagtagctttgttaattgcacaaaattatgttttgtttttgccatttaaatattatcacagaatcctattctgaaagacaaatgttcattaaaaacaaagcaaaaatagaaattcacaaccattaattacctaggtttgtcatttaaaggtttaaagaaaaaaagggaggagctttcctacaagccttttcacaagtgtcacattttctctttaaaagggaaggatttccaaacaaaggtgaaatagcttaaacagaaatatttgtaaaaataaactttacagcattatcaaggatattaagacaacactgactaaccggtttcattaccgcatcttcccccacccccaaccccagtgtgtcccaccaggactagaacaggctttacattcagacagaaatgcttcaaaatccccagtgaaatgaactgtgctaaaaacccgacaggcatcttccctgccctccccgctgccgctcgtcttctgcaatcctctaacccaggttctactctgtgaaaggggccaaagctgtgagtggggagggaacttgccccagcgtggccaccttatatataattatatattctaccataaatgctggccttcttcaaattatgattttggaaaatctaacccatacagagggataaaaaattgacatcccttggacaacttctccttgnnnnnnnnnnnnnnnnnnnnnnnnnaacattccaagctctctctggtcccctatccaaggagaaatgctagggcctcgaggatgtcgctatatatttttataactaaatgataaatttatattcaaattgtttgaatacgtttccaaaactttcagagtacaagtcattgttaagtttgcctttactttaaaaactaaaagaatacatttctatataaactagcagtcaggaatttgcctgttttctagcttcttcacggacgcgtgggtcgacgatatcccgggaattccggaccggtccc

SEQ ID NO: 129815 - DNA, 709 bp, Homo Sapiens
  misc_feature (374)..(390): n is a, c, g, or t
ttttttttgtgttaccaagaagtgttttatttttcttgcagtagctttgttaattgcacaaaatcatgttttgtttttgccatttaaacattatcacacaatcctattctgaaagacaaatgttcattaaaaacaaagcaaaaataaaaattcacaaccttaattacctagatttgtcatttaaaggtttaaagaaaaaagggaggggctttcttacaagctttttcacaagtgtcacattttctccttaaaagggaaggatttcaaaagaaaggtgaaatagcttaaacagaaatattcataaaaaggaactttacagaattgtcaacaatattaagacaaaattgactaaccggtttcattaccgcatcttnnnnnnnnnnnnnnnnnagtgtgttccgccaggactagaacaggctttgtgttcagacagaaatgcttcaaaatcccagtgaaatgaactgtgctaaaaacccgacaggcatcttccctgccctccccccactcgtcttctgcaatcctctaacccagtttctaatctctgaaaggggccaaagctgtgaggggggaaggaccccgccctagtgtggccaccctatatataattacatattgcatcgtaaatgctggccttccttctgcaaattatgattttggaaaatccaacccatgcagagggataaaaaactgacatcccttgggtaactcc

SEQ ID NO: 129816 - DNA, 969 bp, Homo Sapiens
  misc_feature (328)..(382): n is a, c, g, or t
  misc_feature (495)..(547): n is a, c, g, or t
  misc_feature (560)..(645): n is a, c, g, or t
tttcttttagaggtgtcatgtttactttttatttaggagtacaaactgagacaaaatcatccttccagttagtgaggttttgagggatcatactaaagagaagacaggaaaacaccagtaatggtgaaggtcttgagaaaaggacaggacccgcagatagcgagagatcagaggaggccctaatttctttcctcatttcctttccaaatatcccaaatgtgcaatgcatcacctgagacagaaggcagaaagcatcaagctctctgtttatcccaattcaatgacaaccagaacttattttttttgagatggggtctcgttctgtccnnnnnnnnnnnnnnnnnnnnnnnnnnnnnnnnnnnnnnnnnnnnnnnnnnnnnnntctcaagcaaccctcctacgtcagtgtcctgagtagctggaactacaggcatgcaccaccacacttggctcatttttaaaaaatttcttgtaaagacaggatcttgctacatnnnnnnnnnnnnnnnnnnnnnnnnnnnnnnnnnnnnnnnnnnnnnnnnnnnnnttggtctcaagcnnnnnnnnnnnnnnnnnnnnnnnnnnnnnnnnnnnnnnnnnnnnnnnnnnnnnnnnnnnnnnnnnnnnnnnnnnnnnnnnnnnnnncgagtctttgttttttgcctaggcttgtctcaaactcctggcctcaagggatccctcctgtcttggccctccaagttgtccaaataataggggggaacccggggtgcccaaccccacaacagaactttccccagacccttgggttttgggcccttggggaatcttctgcagggcaaggcatcctggacccctctgaaaaatttacccggggggacatccacctggccctcccggtcactccctaacccccaccgggtagttccccccccgtggacacctggaaaacaccttgggggcgggtcccccaaaagcttgtggagaccc

SEQ ID NO: 129817 - DNA, 969 bp, Homo Sapiens
ggccaattttggaaaaaataacccaaccggggggggatttttctgttttttcggggtacacagggccaaggttaagggaaagttttttccaggggaaggtaccctggtcccatcttaaaaaagaaaatttggtccatcttttccccttggttcaatttagtatgttccagctggaagatccctggatagggattttccacaaggtggggtagccatcataagcctttccatttacttttgatctgttccccaaatatcccctaaaggcttttttgccccagggacagagtacagggttgcaaattggagcaaatgctgacccagatttgtatttttccaggatttttcaaagcccagatcagagctccatgacctcccatggagtggccaaaaatagacatcctttggggatccactggaaaattggcatttatgagttggggaagctcctctgtgacataagagtacattctgtagttggttttccaaggatcttcagtggcatcaacataaaatccagcaccagtgccaaagtcccagctctcatcttcacctttaatattgcagccacgagggctggtatctggagcaatgacaacaagaccatgttctgaagcagactgatgataaccagattttgatataaaattttgctctgtgcaagttaaacctgagagccaatacagtgcagggcactttcctgtttctgcctttggtggtaagtagacagcaaatttcattttgcagtttagttcaacactgtcatgttcaaaaactttctgcaatcccccaaagcacttgttgctggaaatctgcttcaatgccattcttttcctgtccaattgctgattgctttttgcttgcaccaaatggtaggcgattctacggtggcggagtgaccagaagaagcgggccgaagtaaaaggcggcggacgcgtgggtcgacgatatcccgggaattccggaccg

SEQ ID NO: 129818 - DNA, 1011 bp, Homo Sapiens
caaggtagcgaggcctgggtggcgaattcggcacgaggcccgcttcttctggtcactccgccaccgtagaatcgcctaccatttggtgcaagcaaaaagcaatcagcaattggacaggaaaagaatggcattgaagcagatttccagcaacaagtgctttgggggattgcagaaagtttttgaacatgacagtgttgaactaaactgcaaaatgaaatttgctgtctacttaccaccaaaggcagaaacaggaaagtgccctgcactgtattggctctcaggtttaacttgcacagagcaaaattttatatcaaaatctggttatcatcagtctgcttcagaacatggtcttgttgtcattgctccagataccagccctcgtggctgcaatattaaaggtgaagatgagagctgggactttggcactggtgctggattttatgttgatgccactgaagatccttggaaaaccaactacagaatgtactcttatgtcacagaggagcttccccaactcataaatgccaattttccagtggatccccaaaggatgtctatttttggccactccatgggaggtcatggagctctgatctgtgctttgaaaaatcctggaaaatacaaatctgtgtcagcatttgctccaatttgcaaccctgtactctgtccctggggcaaaaaagcctttagtggatatttgggaacagatcaaagtaaatggaaggcttatgatgctacccaccttgtgaaatcctatccaggatctcagctggacatactaattgatcaagggaaagatgaccagtttcttttagatggacagttactccctgataacttcatagctgcctgtacagaaaagaaaatccccgttgtttttcgattgcaagagcctggtcgggttaagagtggactacatagcttgaagcggatttcgtgagattcgtgtattgaatcaacactgaatgagcatgctagtagtggtccagaagtctgtttagatttctgccg

SEQ ID NO: 129819 - DNA, 1113 bp, Homo Sapiens
  misc_feature (87)..(100): n is a, c, g, or t
ttttttttaggttttatatctttattcagaggtgattcaactatagaataaagcccttttagcactataaaatccaatgttttgaannnnnnnnnnnnnngctcagcaatacagttgcattttacaacttttataatcctgaagagattctcttatttggagttttttcatgcattcaggtatttagcatgatgtctgatgtggtcagtaataaaggttgcaatgaagtagtagctatgatcataaccctcttgcaatcgaaaaacaacggggattttcttttctgtacaggcagctatgaagttatcagggagtaactgtccatctaaaagaaactggtcatctttcccttgatcaattagtatgtccagctgagatcctggataggatttcacaaggtgggtagcatcataagccttccatttactttgatctgttcccaaatatccactaaaggcttttttgccccagggacagagtacagggttgcaaattggagcaaatgctgacacagatttgtattttccaggatttttcaaagcacagatcagagctccatgacctcccatggagtggccaaaaatagacatcctttggggatccactggaaaattggcatttatgagttggggaagctcctctgtgacataagagtacattctgtagttggttttccaaggatcttcagtggcatcaacataaaatccagcaccagtgccaaagtcccagctctcatcttcacctttaatattgcagccacgagggctggtatctggagcaatgacaacaagaccatgttctgaagcagactgatgataaccagattttgatataaaattttgctctgtgcaagttaaacctgagagccaatacagtgcagggcactttcctgtttctgcctttggtggtaagtagacagcaaatttcattttgcagtttagttcaacactgtcatgttcaaaaactttctgcaatcccccaaagcacttgttgctggaaatctgcttcaatgccattcttttcctgtccaattgctgattgctttttgcttgcaccaaatgagtaggcgattctaccctcgtgccgaattcgccacccaggcctcgctacctt

SEQ ID NO: 129820 - DNA, 840 bp, Homo Sapiens
  misc_feature (255)..(284): n is a, c, g, or t
tttttttataaaaatgtttagtctttgctttattgagttacaacaaatgagcaacaagttagaaaaattggttttattcaaacttcctagcgtttgacttgtgcggcgtactcaaatggggggcagtgtgggagggggagggattgcaaccagagttcatactgcaacacgtacaccagatatgtctcttggttttccttcttttaaaagttaggactaactgaaaaagtgcactcaggtatctaaaattgtccnnnnnnnnnnnnnnnnnnnnnnnnnnnnnntcaattcatggtgaggctttgagctaaaatcttgtcaaataccacaccgagaaaaggcagtgaagaagagaaatgaaaaccaaagccattcacctctgtaccctccagataggaagatcttattgttgttgttttaatgtcacaatagtactgatcatgctaacagaggcgggagcctcttctgctggtatttagaaaggtgcttaaagaagtcagccacctgctacccagttctcccagggctggctgggcacagcctggcccaagaggccgagcagttgagaagccagatcccctcttggcagttcagaaagccttgtgtggggctaaggcagggacccccaaaaaggcagccaggggaagaactggaaaggaatttgatttggaagatctgccgtctgtcacctctctccaagttgagacaggggcctggatttcagcccttcctgccgagaaatctcccaaatttcaacctacctttaaaaataaagtctccctacttaaaatccagtagatatcatggcactaatgctaacacccctttccccaaattaat

SEQ ID NO: 129821 - DNA, 693 bp, Homo Sapiens
  misc_feature (145)..(145): n is a, c, g, or t
  misc_feature (438)..(462): n is a, c, g, or t
cctgcccaggccatatcctttattcctgctgagcttcctggctgaatagatgaaatgggtcaagcccaggcagctcattcactacctgtgatccacctcagggcacgggcaaacacataggcttgcgtcttaaagccagctcctntgccagacccccttgtaatgtgccacaacaccctcaatagtcagggcaactggtggagcatggaagtcgaatttccttttctgttaggagctactcctgggaacccctctcagggctgcagcttacaggtgggcagctgtgattgcacaacttgaagggccatcattcacatctattcagtgggagtggggtccctgggattgggcagtgtggtggccctgtgtctcctcacctctgctcctgtcttcatcaccttctctctggaagggaagaggagttggaaggtctctggnnnnnnnnnnnnnnnnnnnnnnnnngtcaaaggtttacttccagcatttgagctctggctctcacccctgaagctcagttatagtgccctgatgaactgagaggatgcgtgtggatgtgtgtgcatgcctgagtgcgttttttggggaggggtgtttatttttagtaccccattctggggttctctgatgcagtgtggatgtgaagatatggtaccttctccaagtgtagctctttcaaatatagtcaatgctggg

SEQ ID NO: 129822 - DNA, 676 bp, Homo Sapiens
tttttacatgataagattatcttttattagagatcttatattacatattcccaaaaagatataaaatcttccaagagaaaatatcaaaacctgttgattccaaggtgaacaaaatgatcaaaatgaaagcaaacattttcttccagacaaaggaatatcaaaacacttcggcacaagtacaacaaaggcatgggaagatcatgataatgttttacatcacattttacagcattttattttaatcagtatttgtagaaaacaaggatgctgagttcttgaacactgcagtcacaaactcaaactaaaatttccaaaaaaaggaaagaaaacactgaactacttggtcaactgaacatctgtaataataaatgtaacgaaacctaaccaaataaatatgccactgagatcacaactgaagtgtatggtttttagtgtgtgccagagacattaaattatttaatcagtttttgactacaacccaaagcaaagcatcctctctgtttccctgatgatttattctaaaagtaaccttaaaaagcagaaacttgctggctaaagagaatttctgctttacctgtgaactgctggtagcaacacaagctgaataaaaccccagactgacatgggacagatccatcgcaaagaaccataagtgggaaaccactgttattgcatc

SEQ ID NO: 129823 - DNA, 797 bp, Homo Sapiens
  misc_feature (575)..(575): n is a, c, g, or t
  misc_feature (756)..(756): n is a, c, g, or t
ggcaggcaactatggaaaaccatgtttatttttaataaaggatgacatttccaatcagtaaaatatcataaaagtataaaaatgtactaagtacaatcattagcattatgttataggggaatagtggttataacttttccctgtaagatggcacattggatggtcacagttggcttgatttacagaggggcaagagtaggtgaccagttgtaccagttgctccagtttcctaggatttgggactctgtaaaaatgagaaagtcccaggcaaactgggacggttggtcctacaagaaaaagagcagcatcagagtgttggctatagtttggaacttaggaacaggatcagacattattttttaacttctccacctattttccctttagctgtgaaataaaaatcccttttgttattactgagggtgttacagctttcagaggcttttttaccactgggtttcatgtaattttgacttaatacctatgtcaagcctgggaagaaaggcagttctaatcaacttgcaggtgtggcattctgcttcaagccacctgcatcctagagagcaaggattcanactcagatctcctgaggccactgttctgttctttctggcttttagtagtagccagaaattgggggaaaaattgaggtacctgagattcaagttttgactcaatcccctcactggaaacattcacatcatcatcactttgccaggtatgtgtacctgccccttattgggcatcctcatgcangatcctccaataccaccagctggctatgctggatcatatat

SEQ ID NO: 129824 - DNA, 384 bp, Homo Sapiens
agagctgataattgatctttattatacagaaatgtgaaggccataagcattaaatgagaaggagtttggcagtgaacattatgcagattcaaactgaaggtatcctcgtcttactgagatataaaaataaacactaagagttgcaagaaagaactcaattcaacttctatctcccaatcaagctataactttccacaggaaaacctggtttcaattcatgccgaattgttcaaagaaaagaaaaagctaaatcagttagagacaacacatggactggcttttgtcctattagagagccagactgaagctgtattcagcctcacatttagagactgtttcctattacaatttatatctctatttgcctaagagatacctaaagtg

SEQ ID NO: 129825 - DNA, 1021 bp, Homo Sapiens
  misc_feature (474)..(482): n is a, c, g, or t
  misc_feature (956)..(956): n is a, c, g, or t
ttcacttgtgaaatactttattccctcaaccgcaaacagaatgtgctacacaaaatatcgttaaggatttcctaatattcatggggtttttgacattgttcatattcccatgtatacacttaaaaataaatggtttgcctaattgccaaccactagggctaaggggagtggaaaagcaaagcacaagccaaagcttgttaaaaatgatcacctaacattgacatacaaagtataaccaagggcttggatatatgagataagagaaacagtgaaaaaaagggattaatttattttacaattttacaaatgataaaacaataatacccggttgctatacacaaacaataagaaaacagtgttgaacagaatgaacttgaacttgacagaataaacctcatctttcagttccacaaattctataagaaatactcagtagcaattattctctgcagcaatgctatctctgtaaactcnnnnnnnnncctgctatttacatttgaaacacttgtgcttttgcctacacaaagaaacggtttttattaaaaggtgctacttaaatgagaaacacaaggcctggagccacaatctgaaaactgtaattcgaatacattgctagcttgaagcctttacttttcttctttattattaagatttggacatactagacccttactgtaactctacgtatgaacgacatagaattcagttataaagtagatacctcttaaagcacgttagtaactgaagtctcaaaagaacttctttattctaaagtggacttacttatctccaggggagttcacagtgcagaccctgaagatgttagcataacacaaatttagtgtatacatattacagactcagtgtgtatacagacatatacacatatataacattgtatatatgcatcacacatgtctatttgtactatataggtatatctatagcacatatantataaaatatctatttctaggtgggctttatttggattttctttcatcaaatacaaataataacc

SEQ ID NO: 129826 - DNA, 577 bp, Homo Sapiens
tactgccataaagaatattatttaatccatgagacatcgtccgtacaaagttagcgttacttttaaaaatgaagaccgtgatataaactggtaaaaaacgggcctgatgcgcctcgagcactccctgggagcaggccctggggtggctccgcccagtgtcgttctacctgaggtctacttgtgtctccccccttgttctctgcccccagaccatggccaaagcctttcccacaatgtcccatctgagagccttatggatgggctcacagggcagaggtaggaggagaaagaggaaggggcatggtgggcacccagccctgggggcaactgagggcacagccacgtccccagcaagggcacgctccagtagtagtgggggagaaggcaccagcagaggcagcgctgaggacctgggaagaaaaggaccctgccccaggagatggtctcagcaaggagcgggatattaggaactgagacccaagactcagagaggcaggtgccttgggtgtgcctgagcttgggtcaggatctcacaggcctcacgccccagaaaaaccccgccttaaccaaccatctc

SEQ ID NO: 129827 - DNA, 1350 bp, Homo Sapiens
  misc_feature (182)..(270): n is a, c, g, or t
  misc_feature (327)..(345): n is a, c, g, or t
  misc_feature (375)..(460): n is a, c, g, or t
  misc_feature (1154)..(1167): n is a, c, g, or t
aaagggggccaaagggtttttaatccccccgggggatttccggtttaataaaacccgttggggaggggttcccctttggggagaatgtttaaggaattccacccttttttcaaaaaaggccagggcgggggttaaattgaaattgagctcggtgggacccccgtggaaaaatcccgtaaagnnnnnnnnnnnnnnnnnnnnnnnnnnnnnnnnnnnnnnnnnnnnnnnnnnnnnnnnnnnnnnnnnnnnnnnnnnnnnnnnnnnnnnnnnggttttctttggaaacagttttggcccttttccttttcctttggggcccccgccccnnnnnnnnnnnnnnnnnnnttttttgggggccgggggggccgccaaggnnnnnnnnnnnnnnnnnnnnnnnnnnnnnnnnnnnnnnnnnnnnnnnnnnnnnnnnnnnnnnnnnnnnnnnnnnnnnnnnnnnnnnactcatatcttgtattttatttcttatgaaaatggctacccaaagaagtcattgtagcaggctactattttaaggcagcaactgtataacttaaatgctaagactcactccataagacagaaaacccttccccagggctgtaatgggcatttaagtttcccaaacccagggacaactaatttttattacctattgaatagaaacaaatggattttaatagttcccctcccctatagctgaaaaactccacaaacaataattgactctatctacatgatctgttgactcacgccagaaatagttactaaaacacttagaattgtgatgttcaaactggcctctggctacttctggggggttatttggtgttacgcaatgacatattgccagcgacatggtgaatatactgtctttatagtcagcaatgtttagttgaggctaatcacgtatttattttttcaaaaggttaaatgtaagcttttcccaactgaaatatatagaaaaccccaatgtatgaaacaagttttaggcattggtgttggcagcggtagtgggctgatgtgtcctccctgcacacagctgggggcatgtagccccttcccctttgggtgaaccctggggaaattttggcaccctcagcctcactgcctttcaatttcagctcaaagactgggcatcctgcctggggccacgnnnnnnnnnnnnnnaccaatgtccctcaagggagtacaagagtcaccagcatgactgcccatcctgcgtgtcctcctttcaggtaaataagaggtagcatagctgggatttcgcgtgccgaagtctaggtctttaaatctaaactttggggcttttcagtctttttggaaacaacacatttcaacaaattaaaactt

SEQ ID NO: 129828 - DNA, 1085 bp, Homo Sapiens
  misc_feature (837)..(837): n is a, c, g, or t
  misc_feature (845)..(845): n is a, c, g, or t
  misc_feature (854)..(855): n is a, c, g, or t
  misc_feature (952)..(952): n is a, c, g, or t
  misc_feature (1019)..(1020): n is a, c, g, or t
catttgtttgtttattgaaaaaacagacatacataatcagtttataagataaaagtactaattaaaagactatatctgtagaaactttatttgtacatcctagaatctgtttccttttaaaaatgtctaaatttgcttttgccatggcgctaatgctaatggtaaattattgattgcgtggcccatgtgatgctgtgatattcagcccagctgtcgctttatcagtgctatatttatctggaatatagaggctccttttactgtttttaaggtgctttgtgctaaggatgaagatacaattcctcagctcttggtagacttttgggaagctcagctagtggcatgtctcccagatgtggtacttcaggaactctttttcaaactcacatcacagtacatctggagattgtctaagaggcagcctcctgacaccacaccattgcgaacatcggaggatcttattctcctggtcattccttggtagatatttggaataaaataatcacactgactgtgattgggtagatcacattccatattctcctgtgagtctcagaagatgcttcattttgtagaacggtgtaagtggtttccattccagcatgaatgtggtcggtcacatggcagtggagtaacaaattccaggtgttcttggaaacatttctagggtttggtatgttccagggaaaatgtcaaagacatcagaactataaactcccctgtgcttgtattggaagctatggccgtgaaaatgtacagtgtgtacgtctatttcattgcccaatcccatcagataccagttgacttcatctcccacgtgcattgtgaggcttgtangtttccanacatctccnnatatagatgcatttttatgcttctagaatcctcacatcttgttacttctcgggtgatagagtagtttgatgtgtcactaatacaaatcatctcacanactagaaagagggaatccattcctctggatgatactcagtaggctcacaaatcagggcatatcacgnnagctactgtcaactgataagcatgaaagaactcgtcatcaatttcggatccacgagtaattccgg

SEQ ID NO: 129829 - DNA, 1331 bp, Homo Sapiens
  misc_feature (1212)..(1212): n is a, c, g, or t
tccctcatacctgcccattccctctgaatattaggtgtgatgtcaacagcatgttagaaggatcaatgggaaggcaatgattgaaaacatttcaatgaaccttaatagtgttcctttgaggagcacccaggagaatatctggtcatagatctttttttaaatgcagtttcataaaaccctaacagcggtgatatcattagactgtatgaatcagttttattacctagtgtacaagtgtcagtcatgtatcattatatagtctgttgatctttccatttgcaaaaaattaatagttttcccccacaaatgtacaaagttgtatgcttccagtcttcttttaatgtttatagtcattccaaagtaacattctattttacactttcacatacattgttatgaatcattggtttttctcttttttccacttatcaccaatttatttcattcagccagatttggtgtcttcattttgtagaacggtgtaagtggtttccattccagcatgaatgtggtcggtcacatggcagtggagtaaccaaattccaggtgttcttggaaacatttctagggtttggtatgttccagggaaaatgtcaaagacatcagaactataaactcccctgtgcttgtattggaagctatggccgtgaaaatgtacagtgtgtaagtctatttcattgcccattcccatcagataccagttgacttcatctcccacgtgcattgtgaggccttgtaggtttccaaacattcttccattaatagcatgcattttattgctttctatgaattcctcatcatctttgtttactttctcggggtgatcagagtatgttttgatgttgtcatctaagtaccaagattcattctcatcaaaaactagaaacagaagggcaaattccagtttccttctgggattgaatactttcaagtaaggtcttcgacaaacaatcagggggccaattaatccactgtagaggtccttaacttgatccacagttgaataataagcccatggaatacaagcagatcctctgttccagctccagatttttctgggattttccatacgtaagtgagagttctcactggtatgttggagtactgtagactctctgtttgtacccattggcatgtatgagtagggcttgtggcatgttttaaagatatttgacttgtctcccacactgcatgagtgtggactagatccangatgtctctcagcttctccccactggacacggagtgtatcataactgcgatacacttctgtactgagccagtaactctcctatctaatgattgacatctgctggtatgagactctttcc

SEQ ID NO: 129830 - DNA, 739 bp, Homo Sapiens
  misc_feature (51)..(61): n is a, c, g, or t
caactgccagctttaccaatgcagcatttattttaaaattaaattaaattnnnnnnnnnnngattgcatcaccaggtagttttctcgattaaggaggcagcctgaccagggtgggccgtggccgggcggcagcagcatcacactgggccatttaaggcagctccttctggcggggcatctgtcttcccgtcctttgtcactgtccccagggtggccaccatggctggggctgctgtgactgccatgatgggccctagggggaccgccacggccagtgcagaagagactgctggggtgggtatggcggggccagccttgctcagtgctgtggtgatggccacagtagcctcggggggcacagccacggctggggcagcagtcacttcctttggcgcggggcaggcagggcttaacagccggctgtcagcacacccgaccctgccgacagcctcctctgtcctggccactgtgggcagcgggggggcctcccggccgggacccctgctcaccgcatccatggcactcgctgccttctggtcgccatcctcgctgtgggagccccagaggagctactgtcagaggccagcaggggggccttcctggtgacacacacgttccaggcacatggagaagccgggctgaaggctttctcagggccttggctccggctgccctcagcatggctgcattctgtgtccaccggagagctgcacctgggccctgactcggagcagcagaa

SEQ ID NO: 129831 - DNA, 591 bp, Homo Sapiens
  misc_feature (56)..(66): n is a, c, g, or t
ggtttcaactgccagctttaccaatgcagcatttattttaaaattaaattaaattnnnnnnnnnnngattgcatcaccaggtagttttctcgattaaggaggcagcctgaccagggtgggccgtggccgggcggcagcagcatcacactgggccatttaaggcagctccttctggcggggcatctgtcttcccgtcctttgtcactgtccccagggtggccaccatggctggggctgctgtgactgccatgatgggccctagggggaccgccacggccagtgcagaagagactgctggggtgggtatggcggggccagccttgctcagtgctgtggtgatggccacagtagcctcggggggcacagccacggctggggcagcagtcacttcctttggcgcggggcaggcagggcttaacagccggctgtcagcacacccgaccctgtgtggcaaacatggactccggttacgggcacccccaccctcagtgccaccccgcctcatgcccaaggaccagctggacaaaaaggtccaggcggcctgggagcaccatctttggcccctctcactcctgccctttgtggggtggc

SEQ ID NO: 129832 - DNA, 1308 bp, Homo Sapiens
  misc_feature (1169)..(1169): n is a, c, g, or t
  misc_feature (1215)..(1215): n is a, c, g, or t
  misc_feature (1271)..(1271): n is a, c, g, or t
gaatatagaacagtggtcaaaaagcaggctggtacggtcggattcccgggatatcgtcgaccacgcgtcgcagcagcgtactacacggcatcgagcctcggctgaaggacttccaccagctcctgctcaacccgcccaagaagaaagcgatcctgaccaccattggtgtgctggaggagcccctggggaatgcccgtctgcatggcgcccgcctcatggcagcactgctgcacacaaacacacccaggcatcaaccaggagctcgtgccggctcaacacgatggacttactgctggacttgttctttaagtacacctggaataactttttgcacttccaagtggaactatgcatagccgctattctctcccacgctgcccgtgaggagaggacagaagccagcggatccgagagcagggtggagcctccgcatgagaacgggaaccggagcctggagactccccagccggccgccagcctccctgacaacacaatggtgacccacctgttccagaagtgctgcctggtgcagaggatcctggaggcctgggaagccaacgaccacacgcaggcagcgggtggcatgagacgtgggaacatgggccacctcacacggatcgccaacgcggtggtgcagaacctggagcggggccctgtgcagacgcacatcagcgaggtcatccgagggctccctgcggactgccgtggccgctgggagagcttcgtggaggagacgctgacggagacgaaccgcaggaacactgtggacctggtgagcactcaccaccttcactcctcaagtgaggacgaggacattgagggtgctttccctaacgagctgtcccttcagcaggccttctctgactaccagatccagcagatgacagccaacttcgtggatcagtttggcttcaatgatgaggagtttgccgaccaggacgacaacatcaatgccccgtttgacaggatcgcagagatcaacttcaacatcgacgctgacgaggacagtcccagcgcagctctgtttgaggcctgctgcagtgaccgcatccagccctttgatgatgatgaggacgaggacatctgggaggacagtgacactcgctgtgctgcccgggtgatggccagacccaggtttggagccccccatgcttcagagagttgctcanagaatggcccagagcgtggagggcaagatgggaaggcgagcttggnagcacacagagatgcacccaatgtgatctgcgatggctgcaatggggctgtggtangaacccgctacaagtgcagcgtctggccagactacga

SEQ ID NO: 129833 - DNA, 734 bp, Homo Sapiens
  misc_feature (699)..(699): n is a, c, g, or t
cagtctttgttttaatgtttattggtagaaacagatcttcaatgcatactttgtgtttatataaactctacattctcttaaaggttttcgttttgttttcactggagatttttagcctccaagtgaacttaacatattgcctatgcatctgattctttatagacttttagattttaaaactaaatttgagaaaccatgcatactgtataccttatttaataatccaaagaattgtttgcactttcaaaaaagttacaaaaaggctgaacacaagttaaataacctatatgatgtaaattttccatttctgaatactttttcagtattatatattgcttgctgtctaataagttagattgtcagagacgcttcagtaaattatctctactttaaaattatatctgaatcccctttctctgagatgaacttgccaatattaaacattgtgccatatgcagtattagcccaaaagcttaaataagaaccaaacttgtagactgaatattttaaccttaaaattatatacctatatatacacctatggtatgctgcatattaaatttaacatttcaagtaacatatatatagcaaacattcagccaaatactctttcatgaaaagatactgtccttaaaataaaaagttaatgaaaagcttatttagacacaaatgtctagatataagtactaagcctatganacttgaagctaaagtctgctgtactattaagaaaa

SEQ ID NO: 129834 - DNA, 1713 bp, Homo Sapiens
  misc_feature (54)..(104): n is a, c, g, or t
  misc_feature (550)..(577): n is a, c, g, or t
  misc_feature (760)..(781): n is a, c, g, or t
ccatctacattccccttatgtttcagtgtgagcaatgaagaggtcttttgatgnnnnnnnnnnnnnnnnnnnnnnnnnnnnnnnnnnnnnnnnnnnnnnnnnnngaccttttaaggaagaagtattagatcgacatccctactatctttttatgaacttttcatgtttgggattgtatgttgagtatactagagaaaatcagtattcactaaatgaaagaaacacaccaaaaatccaaacagccacctcctcactgtgccctggaatgataaatggactggtgctttcatacccttagctgccatcatcaccatcatcattattaacggccctaggcttttaggtctgctcacattttctcatgtttttattagctctcatcaaaaaaaccaaaagaaaatgggatacaaatcaatgcatggataatatcaaattacaaaatctagggtccactgggctggtaaatatgtaagtgtaagcaaatcatgtagtcatctccccatcatcccctacagtgttttcaaataatctaaaacccagagagtgtttnnnnnnnnnnnnnnnnnnnnnnnnnnnnccctcacctgtacttgattctattgtcagcttgctgtgaacaatttttgctttaatatatgaattacattaatacctcacgttacatatatgaagccaaattacactaacttagtttgcttacaacctcaaatcttactcccagtacacattccaataaatttattctgtaaaaacaatacannnnnnnnnnnnnnnnnnnnnnacagtaaacttttcaactacaaaccgtgaatacgcgaaagatgttccaaggacaagcattaacaggattgataaaacccaaactgactaaatgtgttctcacaatataagctggcataaaaataaataaaattctctattatcacaatagcaacaataatgtacacataataatggtttaaggatgaatattaactattctaattgtagttccaaaagaaaacagtttattttaaaagtctacatttaaaagtcaatgctttgtctggtttcccatagggctgttgctgattccagctttaaaatgtaaagtatccaccttgagtgcttagctcaaaattgtattggcactgggaaaaaaataaatcattgcctttattttggagtaacacaaaaagactcactaacttcacatatagaaacttagtttgtgtacataacaatatgaattttgagaagtataagctgtcaactagctatttctaatacggaatagatattttacaatatggttaaactttacacatggcctcaaaactgaaggacaattttaatttcgtcttcaatataccaacgttatgtatttaggaattaattcctgggttctgtcacagagaggaaattccattcttaagcattatgttgagtggtcatctaaaaaatgttaatttatatttaactgagtgtttgatgatggtggggtcaaggcaggaaaacgatgatcataactgccttgataaaaggatcctagacatgtataagtctgcgcaaaaatcttgataatccttagtggttaagggcaacttcatgcaaccaaataacatgaaattaaatcagtaacttttaaaaaaggctaaaatgtcttttccccccgaaacacaacagagaggaatatgaataatgtacatacaaactggggttctgtcaatgaca

SEQ ID NO: 129835 - DNA, 1134 bp, Homo Sapiens
  misc_feature (28)..(28): n is a, c, g, or t
  misc_feature (532)..(540): n is a, c, g, or t
cattaaaaacttgtccttaaaaatagangacagaagtattaaaattatcttttcttttattttacgtcttctgccttctttcttgagtttgctcctgttgacttcccacagcacagataattgacatgtccctttgtgtttataaatactactaaggtgacctagttggtctccttgttgcattaattaataactctttgcaaaatgtctcctttgagacagaggcatttcagatagatacccaccatgaggtgttctgggcatctgaaggtattaagagttcagtgggaaaaatctctctccctcgcctttttttctggtttagtcaaataacgggtgaacatagaaacctgttgggaagaatatgaaaagttatgtggcctctgaggctacaggcacttgcaaatccgagaggaaagtgccgtctttcatagctggtctctgtataaagagtatgtagcaacaactgtttaacatccgagatgaagtggacctgatgctgtatttgggtatttttctcctctaccttctnnnnnnnnntaccataagaagaatcagaatgtaccataagaaatcagatgcaaagcacgttaatgtcattggtaagttttacagagtctaaaaggattagcaaagggtagcaggagcttcagggaattcaggaaatgccagcattggaatttcgtggcataagttactaaccttctattcttataatatgttgtagttactagtgaattcttttaaaagcaatacctagagttagaacactatgtactctgcaacaggggggatgtgaagctaatattgggcttaagaagaacttcacctttatggatttgacaatgggttaagagagaaaggtaatagtaataggtttccattggttacccgttagcctattggcccttttgccatgatctgcgtcccaaaaatcccccggtggtgggacatgaacttattacagtaagaagctatggcgcaactgaccagtgtgacgatgaacacacagagacacaaaacatgtcccaagggggccggtctggataagggacagggaacggaagataccaaggaggaggtggaacgtgacaaccgccgcaagaagagcagatcaagacgtgagagacccaa

SEQ ID NO: 129836 - DNA, 684 bp, Homo Sapiens
ttttactgtgaaaatctttcttttattactgtctcatgtggcaaaataacattttatacaaataagtcacctagtttactttggacacaaagacaataaaaactggaatgtgattttgggggaagcgggaaggaggaggaaggacagatcaggtcattgatgtttcttatattctgtaaaaaatagatttacaggaaaaaaaatagactttcacaacttcaatgactttacacggtcctttgtaaaaccagtggtaaatccacctccaccaaatccttcttgaggctgatatgttctgtgacatggaatgtgagtaacacaatggttcaatgattaggctcctacaccaggtacagcagcacctgatgccacaggaatcctcgtgcactggggtgaggagtcagtcctgtgaatttcaggacacactgtcctcatccccagacctcactgacatcatagtgacactggccatcagaagaaagtgactttacagaggggaaaagagtatcctggaagcgtaccggtggggcaggacacactaaggcaggactcacccagtttgtacattagacacagcctattaaatccattccagaaatgagttccacttcaactgaaaaaataaactgaagattgcccaatcactgccatttcacaaatttccagtttatggtcagccccaaa

SEQ ID NO: 129837 - DNA, 459 bp, Homo Sapiens
ttttttttgaatattaagtttatttatttaatgttgaagatcatggaacaaaatatgaatatccagatatcttttactgctaaagaagcttctgctgcctggtgttctcatgagggtcttctgttgttagagggttgttttagcggttgtttacttccttactgacaaaatagggaaccttatgagagtccgttttgctaagtgtctccacattcttctgtgactttttttaaaattatactctttagctgctgatgaggtgggcacagcggccgttggcagctgctgctttgggttgctttgtcaatctctgccccggtctgatgttttctacagggagatgccttggatccaggttcagggattaaataaacttgtcagccgatgctcggattggatgaagtggcaaaggtaaccccgctggttcgggcgtttggctgttcctgtgcctggaccccc

SEQ ID NO: 129838 - DNA, 419 bp, Homo Sapiens
agccaagttgaagggacagggcaacaaaatacagtagtagtttcttttgtattttgtatattcgcctgaagatcatcccgcaaggcaggctggaggtgccggtgggcctgtgttgctgggattttagtctgtgctgggaggcagggctccgctgcgcctcagctgtgggggcctcaggcaggtccctcagttctcacgccttcctgtccagtggaatgggggccaggagtgctggctcctcgtgtttggtgagggtggagtgaggcccctgcagagctgctgatgaggtgggcacagcggccgttggcagctgctgttgtgggttgctttgtcaatctctgccccggtctgatgtttcctacagggagatgccttggatccaggttcagggactaaatacacttggcagctgaagatga

SEQ ID NO: 129839 - DNA, 959 bp, Homo Sapiens
  misc_feature (725)..(725): n is a, c, g, or t
  misc_feature (838)..(838): n is a, c, g, or t
  misc_feature (857)..(857): n is a, c, g, or t
ttttttttgtaagtcagatgttcatttattaaatacaagttttgaacaaacactgccaggcaagtttgacaagaagtaaccttcctggaatgtttcaaaatacagtcgcgttgatcaagttttatttcaatcaaccttttcattttctgtttctaggttcatttcctgttgagcagttagagcatgtgcattatttcctcacatgacatcaacagtgcagcatcagcctctggcatgtaaaggcacccagtagacttatgctctgtgcaatggctgcttagcaaccaccatcaaataaagtaatgaagcttttgtagagtgtgatatcaaatagcaactggcaccttcacttgcaccattaaaaaacctttaacatttccttcagttttcacatatccattaaaaagtatattaaaaaacaaaacccagactgcttgataaaacatacttaaacaattttccaagtttagtattagcctcttggtaagttatgagcaataccagagctgagtaaaagagtcttcattttgctatcatactccagcaaagccaatacacaaaactaggtatgttagaaagtctgctctactagatttagagctgcttctaagttccagacaaaacacctttttaagcttccaagtgtatatacacacggttgttgtaccaagataactttttaaagtctaattttttttgggacatcctaaaatacctcacacaangaaacaggcacagaggacacttggtttccttaccagtagtggggcttaactacacacctgcttgggcagaggttaaaatattcagcagcataatggggccatagcattccganaagtgtcaggacaaaaaanagaagaaaaccccgtgcgactcttggctgaggccaattcccacaggagtcgtaaaatcgaaccagcaaaggggtcctggggattgtaccgcccaatccaaac

SEQ ID NO: 129840 - DNA, 553 bp, Homo Sapiens
tttaatatttgtgtatttttaataagatatttaatacgtgttcaggtagaagtaggtacaatgacagaaaataaggtagaggaatgtgctagacaccacagatacgtaatgatggacaataaatgacatgatgtggagagttcacccacacatgcagacttcttatgttcacataaacatttatctgcatgcatcacccagtagagacaaactgcacttacactgtgaagtcaacgaggagataaagtaaaaatcaaatacttatggagagagtcagtctctccatttagtgggaaacccttcagaacacgcacacagcatctcccctcccttctgaataccatccatagcctgcagcagtagatggcaaatcacagcctgggccacccttcccagaatgtcaaaaacatggacatgcagaccacagaattcaccagatacccaagctgggtggtgcgaggctctgaaagacatgcttcaaataagagggactagaaaactccgcaagggagcaacagggatcagggattccaggaggatccaggggcctgtg

SEQ ID NO: 129841 - DNA, 1088 bp, Homo Sapiens
  misc_feature (98)..(474): n is a, c, g, or t
  misc_feature (883)..(946): n is a, c, g, or t
cttgatgctctcagggggccgagcatatgaaaaacccagcaacgggcctttaacgttcctgacatttgctggcatatgctcacatgtctttcctgcgnnnnnnnnnnnnnnnnnnnnnnnnnnnnnnnnnnnnnnnnnnnnnnnnnnnnnnnnnnnnnnnnnnnnnnnnnnnnnnnnnnnnnnnnnnnnnnnnnnnnnnnnnnnnnnnnnnnnnnnnnnnnnnnnnnnnnnnnnnnnnnnnnnnnnnnnnnnnnnnnnnnnnnnnnnnnnnnnnnnnnnnnnnnnnnnnnnnnnnnnnnnnnnnnnnnnnnnnnnnnnnnnnnnnnnnnnnnnnnnnnnnnnnnnnnnnnnnnnnnnnnnnnnnnnnnnnnnnnnnnnnnnnnnnnnnnnnnnnnnnnnnnnnnnnnnnnnnnnnnnnnnnnnnnnnnnnnnnnnnnnnnnnnnnnnnnnnnnnnnnnnnnnnnnnnnnnnnnnaagaattcggcacgaggacgtttttcatttgatttaaaaaatgcagaaattaatatactgagtcccttttaagacagaggcctgctcgttaatgtaaaagcttggaaaagttatacaaagaacactccgaaaataaagtttttgttattaacacaaatgattttgtaagaagcaaaacatttttttcaaaagcaggatttgttctaagtctaggttcacaaaggtattcatttctataaatatcaacttaagactgtgagaaatgatgtattctttttcacacgaatatgttcaaggtaagtaactaaaaatgtacgcttttattgactaaatggaaagctggcctataatagtcaaattgatgaacattcataatgagtttttagaaatttagaattatacactcatnnnnnnnnnnnnnnnnnnnnnnnnnnnnnnnnnnnnnnnnnnnnnnnnnnnnnnnnnnnnnnnnatagatatatgctgcttaagacctatcaccctaaacaatcagggcaaaaaaaattcaatataaaactatataaatcaaacagatttgttcccaaaacatagcacaaaatgtatacatttaatatttcaagatttgacacatt

SEQ ID NO: 129842 - DNA, 1308 bp, Homo Sapiens
aacttttccttacttcttgacagatttgaagcctttgttacagtcacactgacagctggttggaacctcaggacatcttgacatcacttaagttgtaccctcaacaccaggtttatagtttattctgtctttcccagcagtgcctggcacataatatgtgctcccttaaaaagcagggaatgtgtagaaaacaagtggcctattttataaaactctaaatttattcaaaatgttaaaagattttgttctccctccaaaatattttacaattaaaaaaatcaaaactatatcctattttctcagccactgtacaagttgctgtttccatctcaggactagtctctggccctccaacactctgtccctccctcaatcccccacctcctttcaatattgctgttaagtttgtttataaaaccctccaccctctctccccaccccataccctgctctgctctgcccagagtggtgtctctttgcgattccaggccgttggctgcaggtgaagccgaatggatgggtacgatgtacacaagcaacacctgaggggcaagagtatgctttgtgcttctgggagaatcacttttttcttggtcaagtggaggatcgttcttttttgtcccatggacacctgttctgagccaaatatttggcttatagttgcccacagccatgtagctctgcttttttctgcacgttcctctgggcgtgggtccgtgacagatggctcttatgactaataagactgtatgctggcccccgctggacacagataagaccacacggttctccagctgtttgcccatcatctccacagggctccaggcgtcctcatcctgccctgtgcccagctggtagttggtgcccatgccccaggcgaaaacacgaccatccttggtcacagcataccccacagaggccccacaagccaccgaggagacagcaggcagcctggagatgagggtgggtatgctcttctcctcagcaccctctccaaggcccagccgcccatactcagcccggcccaggctgtatgcttttccttccgaatccatgcagactgtatggtgctggccaccagagaagcccacccaggacttggtggaattcttgaaggatgttaggttctggggtatgaagcaagattctgtgcccggagttccaagctgatggtagttggagaggccgaagccgtacacgtggccctcatgggagatggcaaaggtgaaataggcaccacaaaaggcatcctggaatctcacgtggccccggcctcgtgccgaattcgccacccaggcctcgctcctt

SEQ ID NO: 129843 - DNA, 738 bp, Homo Sapiens
ttcacgtacatagaattaaccattttgaagtgaacaatttggttgcattcactgatgttgagcaaccaccacctttaactatttccaaaacattttcatcactccaaaataaatgcctgtacacactagcagtcactccctatcttcccctccacctgtccgctggcaaccactgatctcctttttatttctgtggctttttctattctggatatttcatataagtggaattacacaatatatgtggtcttttgtgtctggcttcttctgagacagtaggaagggggcttggctttggctcacccccactagagcattttttcatgcattcccactgatcacaaaacccatactactacctcattgacaccatacctgctaacctcgaggctttagtcatacaaagaaaatggcctttctgtattgttcttctgtgctctcataatgcttaaccatgtcttttacttaaacaattccaggaactggccttaggagatccaaatagggaaccaagattgcagagtgtcccatcttgggagggaatgctgaataattaattgatttacagccttgttgccgctggccagaccaccaggtggcccattactcgagatgatcatcacaaccagatgatgctaacctatatcctctacccttcgcgtgctttgtctgggaagtcttttggccccatgtcagtttctattgcattgagagcccaagagcccctggtcagtcagg

SEQ ID NO: 129844 - DNA, 674 bp, Homo Sapiens
  misc_feature (653)..(653): n is a, c, g, or t
ttttttgcaatgaaaaccctttaatgttgggctttctttaaataaaacagaaaggttgcagctttcccatggtggctgtaaggcaagaacagcagtgagggcgggcgtgttctatcgggcagtgctgcagcccttgactctggctcaaggtgggcttcctggaggcagcggcaaggaggcagttctggatgtgcaggcacagatgtaggggaacaggcaagcgggcacagggccctgagctgacaagcagtgacccctgcacccagctagatggggcaccccctctctgggagctgagggcatcagctggagcctcaggctgggaccagccccaactttgccttggtgactctgggccattccaggcctcagtttccccagctgtaaggtgaggcattaggcaggagggggtggccccagccagtgtcctagtagcctggtgtctccattagggagacctgagaagctgccaggagaggctctgctagcgcaaggcagggccggcccagcagctgacaaggaacatgctgaatatagaggacagaggagttaagaagacgcctgccggccaggcccttgcagtggtccgagccaggatctaggctcgggaggacttgtgggtcctctgctccaggcacatcctccctacctangccacatgagtggctcatcgt

SEQ ID NO: 129845 - DNA, 954 bp, Homo Sapiens
ttttgactgtacctaggtgttctttaatgacagttcaaggggccaattaaacagcaaacagcttggcaaggccctggggtgtggtgtgggcacgagtgccttgtgccagtctggccccagcacagcccctttctccagtgactcctggtatggtcaacagcttctggcccaggcctgggccccgagaaggctggagtcctctgctgggtgtacagctgccctgcaggctctgtgaagcgtctatgagcccagcccaggcctggctctaaaagaagtccgaagctttgcgccgggcagggagctgcagcaggttgtccgtgatggaggccgggtcctgtgtgagaggggtgcgtgtggcagagccaggcgccggtgtgcttgtgggggtctgcagcccactggccggggtcttgaggtgggtggagcgtgctggggatggtgtgtagctggcccgcagggcccggtctgtgtacttgctggccgtcctgctcacaaggcgctgtagggctggcgacatggctgggctcaggcctttgggggtgaggctggccagattctccgtcactctccgcaaggcttcctgcttcttggcccggttcttggcagcggcctcgttggccatcttcagacccagccgctccctgcggcctggctccaggatcttaaaagctgggccgggtgtcctgtccacgtagggcgtttccgacccttcaactctcaagggtgtgttctcaccctccccccaggtcatcatcggggactcgttcacaccagggggcaggggaaaggaatggcaaacaaaatccaaatcccacccactcgaaggggacttcctgggggggattcagctcctttggccatcggggggccacccttggccctgtttggggctggggcaatttgaagggcggccttggcttgcctgggagcttggcaccctggcttccggggctt

SEQ ID NO: 129846 - DNA, 326 bp, Homo Sapiens
  misc_feature (19)..(19): n is a, c, g, or t
tatctcatgctgtaattcntggaaagtatgctgtagctcaagtgcagaattctcatcagttttatctttatatctctcctaaacactttacctgatgaagagcctggcatacacataaatatatattgaatgaatcagtgatggattgaaaagagaaatgatggatctcctaaattttaacttttataaaatattttgatacattcatgaccttactttagcaagcaatgaacgtgatgtaaactattgttgatatagtttttatattggaagtgtaagtagtttgtggcatgggattgtgacatatcctaggtttcctcatcttc

SEQ ID NO: 129847 - DNA, 706 bp, Homo Sapiens
ttttataacaacatctcttactatttttacttgaaaaaatgttttgcgtagcagactgtcatagccttgaacgccggctccctttcttcctccctccaagtggctctggggctgttgatttccgcagagcttgggttggggtaggggctcagcctcaccagctttcagcagctggtctaggccagcagtgcctccccacctccccaaggggaggggtggtggcaagacctcagcacagtctgtggtatcacagggctcactggtagagcaggtagcgcttcatggcagggggcaagggcagggcagacacctggccgagccgggtatcccccaggttgtggcgcacacacaggcggctcaggtgcagaagggagtgtggctccgctctcctttcgcccaggtagcggatgcggacctggcactggccccagacagcgcttactgccggatagagggtcctgcccttcagtccgcggaatgctggccccaggtaggtgcccccaatagcgtagcccagagttccctcctccatgtccagaaccaccagcagtctctctggcacctccagctgctcaccctgagttcccgctggatactggggggctccgggccccttgctctgatggtacagcttcccccgcccgatgtcccagccccacgactcgctgttgctgcccagcagcgccgcgtagtggtcaatctgcag

SEQ ID NO: 129848 - DNA, 652 bp, Homo Sapiens
aggatcccataaaaatgaacatttactgctaataattaagaagcataaaaagggacattctaaacagaaccttatttgggaattttagtattaacagatggcagcttcacaggtcaaagtcttctatgtgatgggaaaatgcagaggggaagtgatattcaaatgcagcccaggcaccctgtgaacttaagagcttgctcttttgtgcagagattttgtttcatatttctgattaccgatagctgtgatggtcaagctcataagtaggcatccaaccttgttcccacttccttccttgaatccactgggaactccaagggctcagaatttgcatctctgtggaaaatgctggtgagctctttggtgaaagatccattccccattgggcaagatgtggacagggaggtttatggatcaattccactgatactgtgtcgtgcttaataggcctccaggccacaaagtctctgaagtctgcccagacaggaagatcaagaaaagaagaagagcaataccctgtttcactggtgggatgtgctgctcacataaggttccccagtctgttttctagacacaagcatggacacaaaagtccttctgcttgagcacgtgtggacacaactcacactcagtgtgatacccacagacatgt

SEQ ID NO: 129849 - DNA, 1202 bp, Homo Sapiens
caaatttgagaattattttattaagaaatatatagtgtcaattacaaaggaacatgtacattttcaaaagtgttcacaaaataaattaaagtagattctataatttatatgtatatttatagtagctgtaacaaaggtacttctcaggatctacttgtatataccactcttgtctgttagataatatttaaaacttggcttagaatactttcacaatactttgcttgaaaattatttcaaattgcttcactatatttacaactatttgtgaaaccccatttgctttcactttcttctcttgtaaatttttagtttaacacaagaagtgtcattacatgtagaaggaatgtctgtcttttaaatgtaagtttaggtgctatcattgagttcaatatttttcctttttcagggaaaagagttctcctgctgcacttttggattttcctcttgagcaatgcttatgcaactacagccgagaattactgccatgaagccagtcatcaatgttatggaagcttccctcaacattttgaggagtagtacttcccctgcattataaacttacaccataaagacttacacaaagtaagttaagaaactcttctgtaattaaaagataactatttgtggtcttctttgtcacagttagagttaatgtttcatctacttaataaagatgatttattttgatgctgtgaaatatgaccataataaagatggtttactgttgtttcagtaaaggtcgattgaagcgacgccacaatccttgtaattgtgacacttgttccagacatttattggttgtgactttccggtgggttcgcctcttcttcattgcctgagtagcatttatctgagtttccgaatagcctgggcaccagatagctaaggcagccttagttttcatggcgaacatttctttggcgacgacgcgcagccgcggtgggattgaaggttaggctctggatttcagtaaggcaatgtggctgctcataggcggcaaagtttacgagaaaaggagaaaacaccagagagagaaagagttggtgagaattgagtgaaaggggaggggaggaaggtcagggaggagcggggaacacaagtcgagagtcagagagaagaggtcacggttgagtagagcaaggaagaacccccggccgtaatggccgaattcccgggcatatgtccggtaccgtcgactg

SEQ ID NO: 129850 - DNA, 557 bp, Homo Sapiens
aaagtttaaaagtcagttggaatttcttttaattaaaagaccaaggggacaagaagctcctttgttacagtacattacatatggctcttatgtagaataaaatagacatcagagtcaaatgtttctaccagcaccaaactcttacttgtagcaggtgaacagtgaagcaagatttcttttactggctttgagattgtaatacatcttttacatgcagtgtgttctttggtagacttaatcgttgagtgaaattacagaatttgcaaaggaaaaaaatgtaaaatttgagcacagtacttctcactataagctatttatacagaattcagaaaaaatgtcaatcctagtaagatttttaaatacttcttaaaaacttgctaattagcttctgtgtgttcagacacacaagacaagtgaaatacactgtagtaaataattagtttttaaaatatctttcatgatgtttctggtaattgggctaatctgaagggcatggaattctttgaactcctgtatggctactttctccccttcattttcccccaagcacatctata

SEQ ID NO: 129851 - DNA, 1293 bp, Homo Sapiens
  misc_feature (1040)..(1040): n is a, c, g, or t
  misc_feature (1207)..(1231): n is a, c, g, or t
gtgcagacccaatactaaggtagaagtacaatgttgacaatagatgttggtaaataaagtttacatggaacacagaaagatatccagagaaataattagtttatgtatgtgagtgtacttgtaatgtgtgagtgattctgttgatttctgcattagaggcaaaaagaaaagaaacccgattgaacaaacagttgcccacagcaccagctgccagaggaaatactaccatgagggttttggtttccaccttctagttatggaagttctgttagaaagttagtaatggaagttgtgtcggaaagtttaaaagtgttcatcccatatagtttcctattacaaagaggaataacctttaagtaactacacacacacattcatatattcaagtctttaaagaacacctctgccactgggtatggggtaaacatgattcatggacaaaaggaggacgcttcttttaaaaagtgtagaataacactgctacaaatcatctagagggccagacaggggcaaggcccacagttacataatagcacaatttctgcaactgttgaacatcagcattatttattagaattgaagatggtgatgggggagggagagtgtggggggagtaagacacagaaaggaaaacagaacacaacttttttttaaattaaagtattaatgccgataatccttttattaacaagtatatttgaacttttagaaatggaagtgttttaatcaattttgatatgtaatcataaatagactgtaggctcaaacccaggtaaataaagatttaaatttagtaagcgtaaggcactaaagcagcctttctattttctcttggagacctagttatcatatcaggaagaacaaatttgttcttaagctggtttcagcccatcaggtacaagatcaccattgtaccaaatgcctatttttgaatgcatgtgcatatatgtgcattttagtgcataagtgtgcctctcaccagggcctaaagatggaaaattggaaaagccaaagccgctgtcctttgcatgatgcctctngtgagggtgtgaaggcctttcctttcgcacctgtgaaggtgtgaaggcctatcttgggccattaatgattctatatttttcaaatcacagggcttttagaattgttcataatgttatcactaagtttctgaaaatgttaaaatctagattaattgtttcatttttannnnnnnnnnnnnnnnnnnnnnnnngtacataacacacatttaaaaaaatcccaccaccaagccttttctctgtaaactaatctctt

SEQ ID NO: 129852 - DNA, 789 bp, Homo Sapiens
ttttttacagtgagaacagacctttttattaatatattgagataaactacagagactgaaagacaaaaattcatatttcattcagaacattcattaaaaatcaaatgcatttgagttctcacagaaaattttatgtaagtctgatataacattaaatattttacaaatcagacatttcattttgaaatctaatttttaatcctgaatgcattatagacaaagtaagctctcctttaccaatttcatttaacttatacaaggcttccattataattccatcaaaccttaaaaattacctgcagcttttaaaaacacataaagtaaatggaaagaaagtcttatgtagcaatccaaaaactaaaactagaaattggcaagaagcatttcttaatacagataaactgcaaaatatcatttatgtgtgtttcttctcattggtttaatcatcctattaaaaataattttttgaaagtaataattacaatactccaatgtcactgaaaatctctatgattttaatggtgtccttaaatggcaaagtagaatatcagactgaaatgtacagagtgttgtgctgaagtgaatgagacttgccatgccaggtgtcatctgctatgcagttacaagacatcttggcaactagtcatcccagtttttactaacttactaaacaaggacatttcaagaaatacttcttacccctatgtatttccagatggctggatatagaaagatataattatgtttgaagcatgggcctttatataggaatctctccatttaaatatg

SEQ ID NO: 129853 - DNA, 1136 bp, Homo Sapiens
ggaaccttcaagtggcttttattggtagagcctagaaaaagtgtcatagccatttctgagcaaaaatctgtatcccagtaaggtattcagtgttatgtttaacacactactgaaccagaaagtttaagttcctgacacagacgcaaccaggtcactaagaggctccaaaatcaacaagttaagccctgctgctctgttaagatctgaaaggcaagacacagtcctggatgtgtgcccttgttacggggtgactaaaaaggcaggcaacagtatcaaggatgctgttagtaggtggactcctgtgcactcccacattgcaaggatgtgcttcagcagcaacactcaagtctcctcttcattctgtatctgcctaagcaatctgcttaggacacgtgtggtcggtcataaaacatgatcatcaggatggtagagttcactcatcaggcggtagatgtaggaaggtgcattcccaccaatgttggagattacagcagggtaatgagctctggggggaacgtagtcaaacacagggacaactgcagcgctgaccttgctcgcagaatgctaccccttactgatggaactggcaggactttctatcaggagcaacaaagctttcatgaaaaagaggtataactgacatatgggggaactgtggagaaagttttgaaacattaggtgatacacgaacggaatgtacgtgggggtggaaaatggtgtattgctgcccgcgcccaagaggtgtgatatacctgtcaaatgtcttcaagggcccacattgagcctggatggtctaagtaccaagtcaagcagctggtgaggttcagaacataggggaaattggacaggcatcgtcctgacagtgtttcatagcggtgtgagaacactcgtagcaattcataacctggagaaggacacacatgttatcaagaaaatcgattacgttttgcgagcggatttgagagaagcaaaggtaagagagagcaagtgaaaagctaagagtaaattgtcgaagacagcagcagatacatgtacgaaccgacgaataatacgcacaatgagaggggtggtagagggcagtctcggcgaggacatcaaaggtgagagtagtgatatcgacagcataaacgaagaag

SEQ ID NO: 129854 - DNA, 836 bp, Homo Sapiens
tttaccactgcaagttcatattttatttccaataggtttggagctttgttgatttttgcatttttgtaaaaaaggaaaaagttttcacttaattcattgaaagccctttcgtgctgagcccaagggggagcctgggccaggaccagaccctctcagccctcttgttcctaccgcagacacccggtgctgggggtgcggctgctcccctccgcccactctgccctcccgcccctgctgcatctctctctgtacagaacaatttttaaaatggaagctaagacacaatatacactggacaggcacacacacacgcacacaggcgtccgcccagaacagggcgggacaccagctgcactcagagagcaccaaggaatgcaaacggagcccctccgggtaggagggcagggcctgggcccccttggtcctcagtcctcagtccgcactcctccccgccaattgccctgctagctgccagagaggggaggggggcagggagagctgggggcagctggttgggaggcggtggtcataagaatgagtaccacgcctggtaagagcaggccctagaggccacggatggctactattgtcgggggagtccagaaggacgggtgcaggtcgtcgggggaaagagacatgaagggctggagcctctccagggacacactgaaggggcctgacaactctcagggtcctttgcccattcgaaggagcattctgacgggacccaggatgtcaggagctggggcatgaccctgcagtacttgaccctgagcgcttgcgcgcatctcgaagaataaattaccattggaaattaaaaaataagcattttatac

SEQ ID NO: 129855 - DNA, 765 bp, Homo Sapiens
  misc_feature (353)..(361): n is a, c, g, or t
  misc_feature (594)..(594): n is a, c, g, or t
  misc_feature (603)..(603): n is a, c, g, or t
  misc_feature (624)..(624): n is a, c, g, or t
  misc_feature (632)..(632): n is a, c, g, or t
  misc_feature (655)..(655): n is a, c, g, or t
  misc_feature (710)..(710): n is a, c, g, or t
  misc_feature (721)..(721): n is a, c, g, or t
  misc_feature (741)..(741): n is a, c, g, or t
ttagactgggatcataaacatgatgcctttgaggcgtctgtcaatcttttacgttttcattttccaactgcttgctgctagtctacatgtacggaagtttcttcacacagatcttgcaagggttgatctttctcaactctctaataatttatcttctaggtaaaccgtatcttctgtcaattcacttttttctaacttttacacctttcgttttactttcctcctaactgtgccatccaatgctggatggaagtgttgaccactggcttcctcatgctgtcccctggctcagaggcaaagcttacaaagtctccctttgtgatttttgtgtaataccctgtgtcaaattaggnnnnnnnnncttttatttatactttgttaagaattttatggcatgatggatgctaaattttgccagacatttcttctgaatatatgaggttaaatttttatcaaatatggtactttattctgagtttaagataattacattgttttcaaatttcaatccacatatcatggattttcctaatggtttttaaccatggaaagcagccctccattcccaagacctatggaattttccatcatccnggtatggantggccctggatggtattgccngaattcangtttacctaatgggtttgggttnaaaaaattgggccatggatatcccataaatcccttggatcctacaatggggcaancttcccaatcntctgggcccggaatttaggncaaggggcattaaggcaacccggc

SEQ ID NO: 129856 - DNA, 1068 bp, Homo Sapiens
  misc_feature (116)..(116): n is a, c, g, or t
  misc_feature (767)..(804): n is a, c, g, or t
gacggtctgtacccttttctttttagatggaaattccttcttccagcattataaatcagtacatggctggtcaagggccattaccacacactggtacagattttgggcagatgacntgggaacaaggctcctctatggttgtaatgttgaccacacaagtggaacgtggcagagttaaatgtcaccaatatgggccagaacccacaggcagttcatcttatgcgatgctaccaagttacctgccactctgaagaaggaaacactgcctatatcttcaggaagatgaccctatttaaccaagagaaaaatgaaagtcgtccactcactcagatccagtacatagcctggcctgagcatggagtccctgatgattcgagtgactttctagattttgtttgtcatgtacgaaacaagagggctggcaaggaagaacccgttgttgtccattgcagtgctggaatcggaagaactggggttcttattactatggaaacagccatgtgtctcattgaatgcaatcagccagtttatccactagatattgtaagaacaatgagagatcagcgagccatgatgatccaaacacctagtcaatacagatttgtatgtgaagctattttgaaagtttatgaagaaggctttgttaaacccttaacaacatcaacaaataaataagaaagcaaaaagatctgggatatgtgttggaaaactgctttcccttatgttcactgtgccataatgctgctcgcaggaaatggcattttacnnnnnnnnnnnnnnnnnnnnnnnnnnnnnnnnnnnnnntcagcactgttgcactttatgttttaaaaaatgtcactctttcaaaatctataactcatgtatttgaagactgtttcatgctttgctccgaacaaatagtaaataactgagtatgttcagggtaatttatgaaattttgtggtggtgccatgcaatccccttttggtagaattgccacaaacaaggctcaaaattctcatcatctctgttatacacctgtatcatgaaagcaaaaagaagtaaacatcaggagtcagctctggt

SEQ ID NO: 129857 - DNA, 672 bp, Homo Sapiens
  misc_feature (82)..(140): n is a, c, g, or t
  misc_feature (155)..(165): n is a, c, g, or t
aaattttaaactcccttttattgaaatataagtttgtttagtatatttacaccacactttatgcacatatatacagagaagnnnnnnnnnnnnnnnnnnnnnnnnnnnnnnnnnnnnnnnnnnnnnnnnnnnnnnnnnnngtgcataaaactgannnnnnnnnnnccttctggtgaacatcatcgttgtcaaaattttggtcggttgcgagagggaggaagaaattcattatttgacttagtgcatacagctgaccctgaatttgtagccttcaggccaaaatgacaagaggtcaggaatgagtcaggcaaattgtcaaggtctgcagggctccccagagtctggaggtcctgctctctttgtcctatcgcgagccgtccccctgcttggaacagtgatctcaccatcgcggcgctggaacaaagggagaacacaggaagggggctccaccagccaatgtcacagccctgctccggggccaccagcgctctgtttggtagaaaattgcagaattagctcaacggctcaaacgcaagttttcctttttcggaaagggaatgagggggggcccaagaatggggtgcatctcccacagggacggccactcgggggccaaaccccagtagccagtttcttcggatccaatccccgtgctggcacagtaaagaatcc

SEQ ID NO: 129858 - DNA, 998 bp, Homo Sapiens
  misc_feature (439)..(450): n is a, c, g, or t
agatatatatatatttttttactgcaaatgttcgcatttccagtgtaagtcattacaaaaggatcccccaaaacttagtttatctaatgtgaaagaatggtataacttacaaaaaataaatatatgcgttttcgcctaaaagaaagatgctctctgggtttgaagtcggcggcgtaattcttagcaagtctgagtcttggggcagcctcagctctggctgccttccggattccactttgggctctaacgagacaccttaaagaacaggctttaaaagatgctgcttccctgttttcttccaggaacacagagaccaacacggtttcaaacacagggcgagcttctcactatttcctgggaatgttacttctcagcccaacacttctcttcccaagaagttcaagttttgagactgtttttctccccggaacagtacttnnnnnnnnnnnntcattgatattcaaagatgggttcttttcgtgtcctggaagagcatcagtaactaaatatcaagttctccacaatgctgccccccctggggggctaaccggatgccaagggagagaattaacatctaaaaacaaggaaaagactcaaggggacatttttttggtacccactggtaatacttgggaggtatttcgtgttctttactttgaaagcttcataaccatgagcaggtaccatgagagggaaagaaaagaggtggtaagaaaaagaacaaaatcaatcaacactgttagcaaccaacactgctttgggccaggcccctaacacatttttctgctaggactggcatagtaccttccagctggttgctcactctcagtctctatttctagtcaaggtcaaattcccatgaggcatctcctaatattacccaatcatcatggtggaacatatacagcatgattgtctacatgttaccaagaaaagaaactgatgggtggtgggaagaaaaacccaggggagtggctgaaaacccgggccaagtcagg

SEQ ID NO: 129859 - DNA, 1154 bp, Homo Sapiens
  misc_feature (243)..(293): n is a, c, g, or t
gaagttctgagtgctgactttatttttcaggacctagaaattaatgtttatgtgaaacaagtacataataataatgaattacattgtggaactggaacacatattctcaaatttaatagtttatatgtggaaaacgtgacactagtaaaaacaaaatttcttcttgtgtaagtgaataactcaattattctttgcatattgcctaagcattctgattaagactatttttattctcttcatagnnnnnnnnnnnnnnnnnnnnnnnnnnnnnnnnnnnnnnnnnnnnnnnnnnncccctacattgaaattgttatactttaaagatccattcttacttattggcaatataaataatcttgtgcttttcaattatgccaatgtcgtgttctagttgtttcatttcttcttccagcctctgccttgcggatcttcttttggtatagaatctataaagaccgagaagggactggaattctttatgcacctcttcccagttctttttcagcccctgcaaaaactgcctccctttcttcatcggagagccttttcatagctgctttcttaaggttttcctggatataacgatcatagtcttcttgggctttcttttagtttcctcgtttcgcttacatatgtattcaggtgtgacaccataatcctttttattgatgtactttggaactagtcctgaaggctcaagatcatgcttgtctccagttcttttatcaacataaattggtttaggctttttagccactcccatgatgatatcagctgcatttgtatttataaaattttttccactctgtattcccatgacaggatgatcagtcttcaatggcacagcaggctttttgggcacgttccgatcaaagtttttttctaggaggctggggaggctccttcaagtcactgggtatgaggttataaatgcactcagaagagcacgttagactccatggccaccaaatgactccttaaaagctactctccacaacttttttctccctgtcccagtatctccgtccctttcttcactgcttcccctttctttcttcttcgccttctgaaggaccacaggttctctccttcacatcgtccccctttaaccccctccttagcagtcctctctcgggaagaaaacaccctatttc

SEQ ID NO: 129860 - DNA, 643 bp, Homo Sapiens
gacttgcttattttttttattaaatgatacattgaaagtataaaaagttgccgcagtacaaacaaattacagaataatgcatataaaagcgctatggactacacgtgacaattctgcttaacttccatcttgatgattttatatcagtatccaaaattatatactccagcattttttccgaatatagtcttacatgattgcaattcctgaggtaaactaagtgtccactgccaacatccttggacgaaaaccaagtcccccgggagaattcagatatttatattcacacatacaatacaacggaattcatcaatgtaatcagatattgcagatttaaaaatggaaaatggactcttgcaatacttctgcatccatatataattttaccagcagggcctcccaaaatgttgtgtaagtatagtttaaatggatttcattaataagtttctgcatttagataaaaattcttggctaatctgtaagaagtgaacactgactagcattgccaaacagaaaatcaaaagtttcaacaatttgcaaagcagcacagaattgacaccctaaagaggatgccaattttgctaactacagctcttaccactcttctccatggaaaacctttaagctaaatgttgtcagtgtt

SEQ ID NO: 129861 - DNA, 1123 bp, Homo Sapiens
  misc_feature (123)..(157): n is a, c, g, or t
  misc_feature (164)..(267): n is a, c, g, or t
  misc_feature (463)..(490): n is a, c, g, or t
  misc_feature (509)..(958): n is a, c, g, or t
ggcaagcacctgtttttcttccagctggtgggattctggcttcttgcaatccttaaccccactccggattaaaaaaaataagggattaccagcccgggcgtggtggctcacaccaagtgatcnnnnnnnnnnnnnnnnnnnnnnnnnnnnnnnnnnnagatcgnnnnnnnnnnnnnnnnnnnnnnnnnnnnnnnnnnnnnnnnnnnnnnnnnnnnnnnnnnnnnnnnnnnnnnnnnnnnnnnnnnnnnnnnnnnnnnnnnnnnnnnnaaaatactcaatttacaagagcaaagtgagctggtgagtccaacacaaagtctgctaaatggaagacactctcaattctctttttttccaaccaaaatgtgtaaatatttcagtccaaatgtttggcatactgtctttttgctttcattgagaatactgcaagccctcaaataaactagttttgttcactgttaannnnnnnnnnnnnnnnnnnnnnnnnnnnccctcgtgccgaattcttnnnnnnnnnnnnnnnnnnnnnnnnnnnnnnnnnnnnnnnnnnnnnnnnnnnnnnnnnnnnnnnnnnnnnnnnnnnnnnnnnnnnnnnnnnnnnnnnnnnnnnnnnnnnnnnnnnnnnnnnnnnnnnnnnnnnnnnnnnnnnnnnnnnnnnnnnnnnnnnnnnnnnnnnnnnnnnnnnnnnnnnnnnnnnnnnnnnnnnnnnnnnnnnnnnnnnnnnnnnnnnnnnnnnnnnnnnnnnnnnnnnnnnnnnnnnnnnnnnnnnnnnnnnnnnnnnnnnnnnnnnnnnnnnnnnnnnnnnnnnnnnnnnnnnnnnnnnnnnnnnnnnnnnnnnnnnnnnnnnnnnnnnnnnnnnnnnnnnnnnnnnnnnnnnnnnnnnnnnnnnnnnnnnnnnnnnnnnnnnnnnnnnnnnnnnnnnnnnnnnnnnnnnnnnnnnnnnnnnnnnnnnnnnnnngtttttccaaaggctcggccccctgtgagcatcaaaaatcgagcccagtcagaggtgggagcccgacagactataggaaccagggttcccctgagctcctcggggtccccggtcgacctgcggtacgggaactgtcggcttctccttcggaagtggggcttccaa

SEQ ID NO: 129862 - DNA, 943 bp, Homo Sapiens
atcttttgagtgaaatattttattgaaaatagttaatttaaaatatatacatcatttttcaaaagccatgtgactgataaaaatatcaaactttccatacaagcatcatctcagcttcatcccctcggcaaagtgtctcccgaatctttccagatggacatttcgtttgagtctctagcgccctctggtgaaacaccatgaaattgcccaaaaacgtaattcaggctctgctcaggacggaaggtgaaatagcagaatgagcgcctatttcaatgtgacaggttgtgatgtgctgccttctccccgagctcaggagaaaggcagcctctgtgagtgcttctctctctttagggaaagtattcttcccatggacactcagccaagcttattgcaaaataccttcttcctaagttttcatcatcactgccttctgaaaaaacaaaaaccggtcaatacagacaggataaataatgaaagcctccaagtcattcaggaccaggcccctactcctcgcaaatgttaaaaggacagcaaaaatgataaagcaagctgagtatgcaagaaaagctttcctagtggtccccgattcttcaagctgtctttacaataatgaataccaccactctagtcaactcaggtttacattttctggcagcagatgaccttgtcctcaggtttcaagaagcacacctcttctaaatgggggccatttccaaaagtagacattaacagagtctaagttcattctccagaccaaacactttcgacttaagattcttcagttctccttgtatcttatgtgcccgtctattgctgtcacggacctcacacagaagggcaagatcctggtttgcccgggcattaactgttgccttatacaacatttgctccaagtctttcagtttctgtcggagaactttaatatctgtcttaaagccttctc

SEQ ID NO: 129863 - DNA, 1299 bp, Homo Sapiens
  misc_feature (948)..(971): n is a, c, g, or t
  misc_feature (1192)..(1227): n is a, c, g, or t
ttttacaattataaaaactttatttcattcttactttaattaaatctttataagcaccatgtcatgagctggcaatctagaaagaggacactggaatgctttagtcaattacaaactgcaagctgatgatgtgaagttacagctacgtggagcatgtgaacaagaccacatttagaaaggttcacttaagaatcccatgacaatgcgcaaaacaggaatctggcattgatttgttcacactttttatagtcagaacgcaaagcttgtgcatgtaaacatcaagagaaacattttatcaccctgacagtttacagtttgctcaaatttgaccctgaaagcatatatgttgccatcttgttttcttgaccagtgctgggccacaggctgaaaaactccattcctttaaaatttaaatgatgcttaaaggctatgttcaacattgtgcaagttgtcagcaaggccttttaatgtgtacatttctcatgtatgatcaccaaaccattatttacctaatgaaattgtgaaaaactatacatattcagcaaaatgttttaatttggtcctatattaaaagacccaattgccaagggattttacacaaatttaattcacaagcatgtacacaagagaatcactataaagaacattgcttcctggtttatgaataaaaagtttatcttctacttacactaaaacatacaaaaaataatctacaaaaatcgtttacaattgattttagctaaagaaaaagctttcttcaggaaaaaaaagatgattgtgtggtggtagtattttagccatcaaaaaaggaatgtaagtaaccaataaatataatgtgctttctccatatagacatatttacacttgagtctttggcttatgttattttctaaaaagaactttaaatgatccagccatcattgcacattaaaagaaaataagccagtnnnnnnnnnnnnnnnnnnnnnnnngagatctgctacactggaaacatataaaaaacgaactttactatgaatttgcacagcttttcttttcttcttccttttaagattcatcagctttcattttagaaagggagacaaatgccacgtagaaagtatgaactcatgcaacatgtggtagctgctctactgcaacccccggccgtaatggccgaattcccgggcatatgtccggtaccgtcgactgnnnnnnnnnnnnnnnnnnnnnnnnnnnnnnnnnnnnccgccttcctcgctcactacttcctgcgctcgtcgttcggctcgagagcctagcccctatagtgatcatcca

SEQ ID NO: 129864 - DNA, 915 bp, Homo Sapiens
  misc_feature (179)..(180): n is a, c, g, or t
  misc_feature (688)..(824): n is a, c, g, or t
agcacgatttttggagagcgggattactcaaagaaacccaccccggacaagtgcgccaggacgtgaaggccccgctggaggtggcacaggagcactgagccagggaatactgagagcactaactatgcactaacctagattttcattcccaccccccacccaacaccactaaagtcctnnccttcttttgtgttctgtggagagcactaatgatcacgtgtgttgatggaaaccatctgtgcttagtctctgacataggaagcttgcttcaggcaagtggctttggattgagtttgagaaattcaaacatttctgcagaacagataccaaatcaatagctaggaatcatgttcaatattgaattctgcccaggagcatgaactgatccatgaatgccttttccaggttaaaatttggtcactgatgcctataatcgtggaagtcagagggattcccctttttcatctcattttaataggaaaattccttatggttaacatctccctacaaactcctactacgtcgtctaaattgctgctctggaataaggtgatttctgcccccagattcttccctagccggtagatacgtgaagatattcccaactgtggaatggcagtgtaggtagcttcaggaaatggctcaggttaattctcaaaacacaaattgttgctggccaggcatggtnnnnnnnnnnnnnnnnnnnnnnnnnnnnnnnnnnnnnnnnnnnnnnnnnnnnnnnnnnnnnnnnnnnnnnnnnnnnnnnnnnnnnnnnnnnnnnnnnnnnnnnnnnnnnnnnnnnnnnnnnnnnnnnnnnnnnnnnnatggtggctgaggtggaagaatggaagaatcacttgagccgaggagtttgaggctgcagtgagctatgattgcaccactgtactcctgcct

SEQ ID NO: 129865 - DNA, 192 bp, Homo Sapiens
  misc_feature (129)..(142): n is a, c, g, or t
gtctctaccaaaaaaaattttaaaattaactgggcatggtggctgaggtggaagaatggaagaatcacttgagccccggagtttgaggctgcagtgagctatgattgcaccactgtactcctgcctttnnnnnnnnnnnnnntccctatagtccatgaaggctttgatctcttgggaagttcttcatagatg

SEQ ID NO: 129866 - DNA, 1643 bp, Homo Sapiens
  misc_feature (147)..(179): n is a, c, g, or t
  misc_feature (1535)..(1569): n is a, c, g, or t
aaagggactagtatttcagtttaatcatgagaaaggtctctgctttaagaagcactctacatgcgtttcccaagccaaactgctggggctcaactgtgggttctgctccttcctggctgcccaaactcaggcaagtgactttatttnnnnnnnnnnnnnnnnnnnnnnnnnnnnnnnnntgggtggcattaaaccgtctatggaaagtcctcagcatggcgcctggcacaaagcaacggctccctcgcctctgttctcactcctgttccacagaattacacccactcttctctgctgatactcttaatctcagatccccaattctgtctttcaaatgtgttgtgtcaacatttatttgcaaacatgtctatttgatttcaaatgaaaacgcttttgagtggatttaaaaacaaaacacatgcggggggagaaaagagaggctgacagacatgttagtaaacagcgaaatatttttgaaagctggatgcagatagctcagatgctagagggttgaaatggacagactttggctaggaagagatatgtgaatgttagcagagggacctttcttggggattaaggaatcaggaacacaaatttctcttctttccttcccaccagggctccatgccccccttactggaggaccaagaccttgttgccttcaatttacgggatcccagtgggatcctgatattttccatagtttcttaacaacatttcaagttaaatattaaaattattcgtagggtgtggagtgagccaagtgcaacacattgctgtcaggggtgttggctactccgccagctgttgaaaaaaggagaaagaaagagagcaaactgagatccacacaccccacacagtatgaccaaggcgccttctgacttcaggaaagccaggcagacggggatccctggatgctcacagcttggcagccgatattcactggagccagaacagtctgctctgaggcttgtctgcatccagaagttgcaggaaagttccacaacgtgtgaagacttcttttgtcctctctgtgggagagctggggaaataggattccttatagacttatcctccccacctctcccaatgagcaaaggctgctaaaaacttctgaagcctgaatcccaaagctggaggctttctctctcctcccagtgatcggagcttctcagggtggggattgtctcatggttctggggccaaaggcagttccaggaaggagtgagggtccgactctggagagaggcatttcagctctttggctcaggggttccatccttcagcggggcatccttgcagtctgctgcctgggtgccggtctccagacctggctctcttccctcgcgctcttcttcaagcttctgggactcagctgccaccgtggtgctcttgctggaggtggcaccccatctcagagggacacagaggatccagtgcccttggatgttccaggaggaggaaggtctgtgcctgcctcccccggccgtaatggccgaattcccgggcatatgtccggtaccgtcgactgnnnnnnnnnnnnnnnnnnnnnnnnnnnnnnnnnnncggccgcttcctcgctcactacttcgctgcgctcgtcgttcggctacaagagctagcccctatagtgatcgcat

SEQ ID NO: 129867 - DNA, 1154 bp, Homo Sapiens
  misc_feature (586)..(586): n is a, c, g, or t
  misc_feature (727)..(727): n is a, c, g, or t
  misc_feature (738)..(738): n is a, c, g, or t
  misc_feature (778)..(778): n is a, c, g, or t
  misc_feature (987)..(995): n is a, c, g, or t
acaacagcacaaagtgtctttcatttttctgttggttctcttttaagatcttttttaccctgaagtcggtgaatacttttctagtttatttgatactctttctgtgtatatattaagcttttgctgtagattgcctagtaaaattactaaggataggttgtttttacatatggtctatttaagtctgatgtttacgggggaaagtgtagttactaaaaatgtttaacataatttggaagaagagtatgaacaaccaataccaatacctattgcgtttggattcttaagaccccagtttgttattccactaaactagttatcttaaccatatcatctggttttgtgggccattatttaccttcccttatgtcttatagaataatggttaatatttttaggtcaaaattacttttggaaagtaactttcccacaattaactgtttttgagcacctgacaaaatttagtgtttaccttgcgtgccattttgtgtcatccttcattaaaaaagcaattggaggtttgccagttatctcacttccctttttaaatcaatgttgttttaatgcactaatctgaattctgtanagaggattatcttagtttatactttgtattttataatgttcttgtatagcagctcggtactgaaggcggtgtttaacttggcaagctctgagacttcaaatgggaacaaatagtaagtagctaagtaaaccacatctttgncaccaaaatanagatgagttaaaaggtatctggttaggcctatttcatgangactatgctctggtgggaccacaggtcacctgatacttagtgctgtgctgcctgaaactcagcatggagacatcaccacatgcactgtggccatttcacatctttctggagcatcaggtcacttcagttttttattttaaggtgtcatcgatttttaccaactttgtcaaactgggaaaaagtgctttgcatatccaaaaaacttcccnnnnnnnnnccccaaaagggattacacaaaaactctttttgggaagggagggaatggaaactttaaagactcctggtggccaaaaatcaaactgcgctctaaaacagaatggggccaagggcccgggaggggaaatttcccaccaaacaggccccttggtttcctgaa

SEQ ID NO: 129868 - DNA, 534 bp, Homo Sapiens
gctaataatcatttattgtttgtttatatacaatagaaacctcttttataatgggtgtgggataaggatgatgatggcctatggggctccctgtcttacagcccttgtcctcgggccatgatttgacctcagaatgacggtgactctagcaaggcactggggagccagactctgctgcatttgtgtgcaaatcccctacgagtttcaaatggctccacgcatcaacaaaacctcttagttcttaagaaaaggagacagaagagatttggacactgaagagaaacacagccatgcctgagctccctgctggtaggaaaatgtgtgcctaaggttgcttttctctcaggtttccatatttttgtttcctcttgcggagctgccgctggagctggagcttgttggtgaagaacagctgtctccagcctgtgtcctccgccagggccctcacgtcaggagtgatggtgtcgcaggtcgactggactatctgttcccacagtttatcagacatgcacagctttgcaaatctgtgtgatg

SEQ ID NO: 129869 - DNA, 450 bp, Homo Sapiens
tttataaaaagggttggtttattgtagttcaaatacataaactgaacattcaaacatcttaaaattaaactttagcaacaaagtttaacattcaaacaggagtatagtttacaagaaacacccagaaaggtaatttgttgtctaatccagaatattgataaagatcacttaatggtgaataaaatatgtttaaccagtggttctattctggccaacatgttagttatgaccgtggttccatacctgagaagaaattactacataaatcttctcttaggctaaacaacaagactcggtctataattcagaggggataatcaaagcacgtaagtgaacaaataaaactaatctgatctttagagacaaaggtaaaagtattgtccattataataattgtagcctctggaagataagaattcaattttcagtgttttctcttttacccgcttt

SEQ ID NO: 129870 - DNA, 991 bp, Homo Sapiens
tttttttttcggggcaaggagcggtttatttcacaactgagtgaaggatgaggcccacagcctcggtagcagcagtagcagctcctccccgcccagccctctcttcttggtatggtagccaaaggccaggtcaggagccagagagacagccagggcacagccctcccgccatgggagccgggtggccacagagcagcagcgggcagcagtagcagcagcaggctggggtggaggagggggagtgttagtttggccggctgactcccaaccccccatgggtagtgtttggtgaaggttgagggacctggactgctaggtggggggcatctggagtggttcagtcagctgtgaaaatgcggctggaaatgtcatccaggagccagtcgatgcccggcagcaggttctccccggtgacggcgctgcagccctggatgcaccagtggtggctgcggatggagtccagctccagggcctcgcggatggcgttagaggacagtgctccaggcaggtcctgcttattagcaaagatgaggagggttgctccggccaggcgctcctccaccagcaggctctggagctcccgctggcagtcctgcatgcgctggcggtctgcgctgtccactacccagatgaggccatcggtgctctcaaagtagttccgccagtaggaccgcagggacttctggccacccacatcccagatgttcagcttgaatcctcggtgctccagggtcttgatgttgaagcccagcgttggggagatggtgtcgatgtcctccccattgaacttcttcaggatggttgtctttccagcattgtccaggccaagcatgagcagtcgcagctcccgctctttctgcttcatcttcttcagaatggtcaggagccccatggtccccggagccccctcccggccgccgtttcttcccagtcccgggacccccggccgtaatggccgaattcccgggcatatgtccggtaccgtcgactg

SEQ ID NO: 129871 - DNA, 932 bp, Homo Sapiens
gtatgaagtcacggcgcgccgaattcggcacgaggagaggacagggagaccagaagagggccagctgggacgagggggcggacgcccaggaggcaacttctgagacgcagctcctgagaggggcagggaccaggcgcgggaggccagagggggcacagagaacaaaccccctcagaagtgaagaggagagcggaaggaaccgagaggggacggacaggagctgaggaggaaagaggaggggagaggggtcaggccaggcagccaaggagaagacgtgtggccgggggctatcagaaggaaactgggacggacgggccgggctcgggctgtcctgtggagcagcagcatctccggggccggcagaggcgccagtggctgggcgggatgagtctctgagggccactgtggagcgccccgccatggccccccgcaccctctggagctgctacctctgctgcctgctgacggcagctgcaggggccgccagctaccctcctcgaggtttcagcctctacacaggttccagtggggccctcagccccggggggccccaggcccagattgccccccggccagccagccgccacaggaactggtgtgcctacgtggtgacccggacagtgagctgtgtccttgaggatggagtggagacatatgtcaagtaccagccttgtgcctggggccagccccagtgtccccaaagcatcatgtaccgccgcttcctccgccctcgctaccgtgtggcctacaagacagtgaccgacatggagtggaggtgctgtcagggttatgggggcgatgactgtgctgagagtcccgctccagcgctggggcctgcgtcttccacaccacggcccctggcccggcctgcccgccccaacctctctggctccagtgcaggcagccccctcagtggactggggggagacggt

SEQ ID NO: 129872 - DNA, 754 bp, Homo Sapiens
  misc_feature (595)..(595): n is a, c, g, or t
  misc_feature (680)..(680): n is a, c, g, or t
aaacagctatttttaaaaacacaacaaatacacaacacaaaacttggtaaaaataactcactatatggtacatatacgcagatggtgtaatatatttatataataaaagatgaaaatagtcactttccataataaaaataagttctattttttgtttattttacaatatacttaatattctcttcttctttaccttcctctccagcttcatttccttcatgctgaatcaccagggggtcccacatggctgtcccaactccatcaagctggagtccgagaggtggcaggcaggcgggcaggggcttaggaacacgcgaggcagccgcactctaagtgtctctccacctcttctacaaacgaggagccgtccgtgcactggaagacgtatttccgccgcttgctgcgggtgggctggcagcactggggcccacagcccccacgacattccatgatgggcaccttggaggctgtggcacatgatgcataacctttctggcggcggatcacctctcggactacttgtcccaggcacggattctcttgttggcagtgctcgccgctaaagccgggctggcacaggcagtagggctccccnttggtctgagatgtggcactgcccatggtgacacttgaaggctgagcaggcattggcagagtcattcttgttgtcacacaagtcncctccatagccctcgggacacttgcacatgtatgaggtcccagtttgcacacattttccatggtggcatctgtg

SEQ ID NO: 129873 - DNA, 1001 bp, Homo Sapiens
  misc_feature (135)..(446): n is a, c, g, or t
  misc_feature (471)..(488): n is a, c, g, or t
ctatgaaaacacagcaacaggcagttacagatcatgccaattgatgccttttggtccatgtttttacctggatatcccctgatctgtggatcaccgtatcacgcctatgagtgaggtggtacgatcaccgcaacnnnnnnnnnnnnnnnnnnnnnnnnnnnnnnnnnnnnnnnnnnnnnnnnnnnnnnnnnnnnnnnnnnnnnnnnnnnnnnnnnnnnnnnnnnnnnnnnnnnnnnnnnnnnnnnnnnnnnnnnnnnnnnnnnnnnnnnnnnnnnnnnnnnnnnnnnnnnnnnnnnnnnnnnnnnnnnnnnnnnnnnnnnnnnnnnnnnnnnnnnnnnnnnnnnnnnnnnnnnnnnnnnnnnnnnnnnnnnnnnnnnnnnnnnnnnnnnnnnnnnnnnnnnnnnnnnnnnnnnnnnnnnnnnnnnnnnnnnnnnnnnnnnnnnnnnaagaattcggcacgaggtgtaggcnnnnnnnnnnnnnnnnnnatgagacggagaactgcttgagcccaggagttcagaatcagcctgggcaacatagcaatactccgtctcataaaaattaataaataaaaagtctcaggtgaccaaaggctcctgaagctagaaccaggtttggataaagattgaagagccacaggccactcttccctctgagccattgggcctagtggtgtcatgtattgtaattgctcgcggggagagcagtctttttggtgtaatagtgggatgtctgcttagttggcaggggttcagtccaaatggaagaatattgggaagtaaacctccactatcctttatagccagggacttttttcttatttattcataaaataaattatagttaattatacccataacacctttatttaaatccagtgttctccgcagccttttgtctatttatatgtgtaccaagtgttaaacataattattattgggcatttgaactttgtttttctttaaagaaatgctgctattaaacatatttgtaaatgg

SEQ ID NO: 129874 - DNA, 1061 bp, Homo Sapiens
  misc_feature (447)..(542): n is a, c, g, or t
aaccatttacaaatatgtttaatagcagcatttctttaaagaaaaacaaagttcaaatgcccaataataattatgtttaacacttggtacacatataaatagacaaaaggctgcggagaacactggatttaaataaaggtgttatgggtataattaactataatttattttatgaataaataagaaaaaagtccctggctataaaggatagtggaggtttatttcccaatattcttccatttggactgaacccctgccaactaagcagacatcccactattacaccaaaaagactgctctccccgcgagcaattacaatacatgacaccactaggcccaatggctcagagggaagagtggcctgtggctcttcaatctttatccaaacctggttctagcttcaggagcctttggtcacctgagactttttatttattaatttttatnnnnnnnnnnnnnnnnnnnnnnnnnnnnnnnnnnnnnnnnnnnnnnnnnnnnnnnnnnnnnnnnnnnnnnnnnnnnnnnnnnnnnnnnnnnnnnnnatgagccaccacacgcagccacctgagactttttaaacagcaccagcacttctggctggtttgaaccttaaatgccaccacccaccagagaggaggctctcactagattctaaatctgttatttaattacttttcaattgaaaaacaaaacagacagaagaaacttattagaataaggccacctaggaatgttcttaacttttccattcagcttttggctgatatatgaaaatacaaataaatacatcctttccccaggtgcaaggctaaaccagcagctccaagggcttggtctacagtgctcagaaagacacactgccttaaaagtcaggctagtgccctagctccggtggcctctgcaaatgaggccttgacagtcgtcagtggacagacacatagtatccagcaccaggtcttgggccttcctgcttcccagagtttcacaggtaggacgcatgtgaggggagcagtccgtacttctgttggaggatggctgtagtactttccagggcacagcct

SEQ ID NO: 129875 - DNA, 1643 bp, Homo Sapiens
aatgaaggcagttcttcccaccaatgttccctgccctttgggaagtccatttttgtggccctaagggatttcccagtccactcattccaattcatgccaccagaagggggccccatcttagggatgtcaggagcaatggcaattaataaacggaaaggtgcctgagaagcaagaatgggccctgggccaggaaaaaagagtcattcagccctacagaaactcaaactctaaagtctcataaatggaggcagctatgcattaatgtgaaaagaaaagtgggaaaccggcaacatgaattctgtattgacatttggttcttaataataacatccaaaatgcgttctgttcttatagcactgcatctggtcgaggatatatgttgctgaaggttgccggagtctcccttgggaagtggagaggagctggtggtgaaaggggaggagctgatggtgaaagagacacactgatttctctttgggagctatctgcagctaggtggagagctgcagcaggtgtcttggctctgataaggggtggggaggctatcccagccggtctgcaaacacatgagcagaatcccttgcccccagcctgcaagaacatggttgctgatggggacagcggtggcagctccaggagaatggagggaagcctgggatgttacattcttgaggccttcacaggtacatgtcatcgtagcccggcggggggagatggtctgggttaggtccgggtgggctggtcccaatgggtccaaaggggtcaaagcgagctcctgggggcacagcgcctggaggaagtcggttcgggaggcctgaggaagggtcaataagtgctcttgggaagccagatctcaggggatccacaatcatgccacctctccgaggcccaaaagggtctaagtcttctcccccgacaacaaacgggcccaggggatcacaccagggaggctgccgactggtgtgtgggtggtgtggaggaatccggagtgggtccacctctctggcggtagcaggggggaactcccggtggggactgcttacattagccttttcccactgctcatggataggtgtgatgattccagacacaatacgagaccgaagctcctcactgttcttgtaggtcctgtggaagtcacccaggtgttctgcatcgatataatcatccaagttcagggtcaagtctgccacttgctgtgagccatattccagcacattgaggatcatgctgctctccacggtgatggctttcacaaggagctttctggacccatccttatactcataccggaggacatacaggtctttattgttgttccacccagctggcagcagttctgacttcttatcattgggacccggctggtcaccgacacccaagccgcagtaaccgtgtgtcaccacttcccaatgcaagaagcagacgagcgcgtcctgcctgcaggtgatggccggcgctgccgatgcgaacagtacctccaggcccgccatgagcgcccgcgacttcggcgtctggaggaaagaagggggcgggggtagtgcagtgagccggctccgcggccggggtagctataactccgcttccctcttgcgctggttcttgccgagtccacacctgagaccaaaatggagacgcccccc

SEQ ID NO: 129876 - DNA, 826 bp, Homo Sapiens
tttttcaaagaaacactagcaatttattgattttctctatttccaaaaaaagcaaatacattagtgtatcacacaaggaaactgggcctggccggcacaaggttcctctacaaacatgaagcaaggggaaggtgggctacagggaagctccaagatccctcacagcagcccccggcttcccttccctgcccaccccagccgcagtcttggtcctcccagccagttcagccagattccaaggtggacacgcagacagcaacactgcctcttgggtccccaggaggagtgtggagtcagggctgctagtgtggtccccactgcagaggtggctggtggccaatgactggatttgtcattggccgctagcacaggagatcccagggcagagtctgtgtccttcctcatttggccccaaattggaactccttattttgggcattggccctggtagtgtgaggccaatgtggacttaaaatcctgagacgtgtgtcggctacatgaagcctggcaagctccttgttctctttctctaggaaaagcccctctcagttttgcccctctcaaagtgacaggcctgggtcagaggcccgggtgacctgagctggcctgagagggaatgggcagtgtcaccaaagtcagccctgccctaatagtctgcctcagcccctgaggtctggaaggctgcctggttcccaggccaggggctgggcccatggggctcttcattctttgaaggtgggaggaacatgaggcgaggggatgcaggagccagtctagtgctaaggggaaaggcaccgcaaaaaagctcctgctagatcacccactt

SEQ ID NO: 129877 - DNA, 1673 bp, Homo Sapiens
tcgaagtgatagtcagccctttagctattatttattgctttattagagcagagggaagtgacactcattgccttcacagagctctgcagaaatatatgcacagagtggtcaatgaccaacatctgagtaagtcttccaaattatcacattaaaataacctttcaaatttgagtgcctctcctttgcaaacaactgcaacctcataatgaataattttatatattatcaaaaagaaccagaagcccaggtgcttttttccccaaaatccacttactaaggacttgagtgaaaatccactctaagcagatcactgttactatttccctttcaaaacagttggaaatcctaaggtacgggtactaagaagatagcaatatccttcttaagctggtaagaatctagccccacagggacaatttggcaatcctgtttctggaagccaggactccagagatttgtcttagtgatggacagatactcctctaaccttaaggcatgagggctgtcaaaacaaggctctgaatagtgccttcctgctcatcaatgtcatcacaatgaaggagagaacaggttttcgtattcctgaagagtggtcagtaggagtgcagtggtttggcatagatcggctccagaacataatggattaaaaccaagaagaggcctccaaggaagatggcactaaggaaagccagcaggacatagcggccaatgaaaaagtcatccacaatcttaacttccacttctggggctgggaattcaccagctcgcgggaaaagcaacagaactgatgtgatgatcacagcaccgaagaataaaaaaatgacagagaacctcgccgccccggaggctctggacagcagcacacacagcagcagcactgccacccagagcagggctaagatgaacacgcccgcaccgactccgagcacagtgccagccatcccgcggggaggcagcggcggccccccgccctgcgcgccgcacgatcgagtgtcctctgtgctccagtgcgacacactcccgtgaaagcattcagacaaatacagaaagcccagacaaatacagaaagcctaaactcattacaggttattttttgatgatcagtgtgttaggaggattactcagtacaggtcattaattttcagaaatgtccagtcccagagtcccttaatggaaactggaaatttagaacccaaagcctttctctttggtggggactgagagggtgttttccgctctgcgctcagaagttttttctgagtgtttcctttcaaatttggtacctgagttctactttgacctcttcccccagcccacgggagaaagctgaaccctctctgaatataaaaccctacctaagaactggtagaagacaccagggcatgggaactccagggccaaagcagaagttgaagctctcaggttaaatccatggtgtgagctgtgactcaccaggcaatggatcacaagacagaaagttcccactctgttgtcgagttcttattcaagaggatgaaaactcccagtctatctaagacaaatgtggattcctcagagggtaatgtggcctaagtgctgctgctggagggagatatctcacccatcccccgattttcacactgactcaagccacctcagattccggcgcgttccatcccgggaattccggaccc

SEQ ID NO: 129878 - DNA, 1295 bp, Homo Sapiens
  misc_feature (457)..(550): n is a, c, g, or t
ggatgagagtatggggggtatatattcattgtgccgcgttaaaaatatttctgcgaagaaaaaaatatgcgccgagaagcaaatgtttttgtcgaccgaaacactatgaggcgccgtcgcttgtttaaccctgcagaatacaacttacacaaaagtataataatttttatgctcccgcacagtggggttataatttattcgctggagaggatgagtgttcccccatttttgtgctccccgccggctcaagtagggtgtgttctttccaaagaatcccagtcgcgatagttttttctcctctccactcagcagtgttttttatattagcggccgcattctcgttcttctttttttaatagacgctcctccttttggggggccctcctttttttacataatagtgggcgttagttggctatcttattggggccccccctcagggatagtatttttgggnnnnnnnnnnnnnnnnnnnnnnnnnnnnnnnnnnnnnnnnnnnnnnnnnnnnnnnnnnnnnnnnnnnnnnnnnnnnnnnnnnnnnnnnnnnnnngcaagtctccactggtgttattacgttatcaggcacaaaccccctccagacacctgagcctcccccacaggctcccagtgaggagccatcacatgcccaggccagccgaggggccctcaggcatggggatctgggcaatggcagcaagctgggcggggggtgcagccaggatgacagcagatctgcagggcggggtcctcgccccgggccacctggctggggccgaaggtcacagctgcgtctaactgggccttgagcagctgaagctgtttcagggcttgcagcacctctggggtggccccggccacaccccccagcaggttgtagttctcaccagggtccttggacaggtcatagagcagcgggggctcatgagcagtcagagagctggaggcgtggcaggcagggtctgcagtggtatcactgtgggcagagccctgggtgaagaagtgagccttgtactttccagtccgcacagcaaaaaccccacggacctcgtctgggtaggacgggtagaagaagagagactgccgagggctcttgcctgtgcccagcagcagggggctgaggtcaaagccatccaaggtgacattgggcagtggggccccagccagggctgccagggtaggcagcaggtccagggagctggccagctcgtgggtcacgccgggagcgatatgacctggccagaaggccaaggcaggctctcggacaccgccctcgtaggtcgttcctttccacacgc

SEQ ID NO: 129879 - DNA, 1065 bp, Homo Sapiens
  misc_feature (49)..(67): n is a, c, g, or t
  misc_feature (374)..(374): n is a, c, g, or t
  misc_feature (753)..(976): n is a, c, g, or t
  misc_feature (1036)..(1036): n is a, c, g, or t
gcggccgctccgttaccattctgatgttggagcggccgcctgctcaggnnnnnnnnnnnnnnnnnnnctgaatgaaagctaattccattcttttatttcctcataccacaaacatttcaatttatctgcctttttacaacctgatttacacaagcaaattgcaaacgaaaaccaggcattctttaatcatccaaaatgcatgtataaaatatagaacaaaccctagtatttaaacataaacagggttagctgaagcagctttattgcaatctcttcaagttagcatattacagtttaaatatttatgcctgtaaagatctgcataatctacaatacagagttatttcagaagcagttgacttaactagttgagnaaaaaaaacaacaaacttcaacgcaaagctataataattatctgaaacttatttacaattaaacatttagggtcctgatttacaaaactcagtgcctttcatgatttattgatgagttttatagagaaagtaagcagtatgtagaatattccccaggtaaaatctggagtgaatggcttttagaggaaagtctatcagtatgcttaactaaaaactaaagagtgacaaaactgtatacagcagcaatcagaataacaggccacaagagaagaacgccatttttgacaatatcctttgtatgtataggaagaaaaatgattgccaccccccacccctgccgccaacttttttagttaaacctcgttccgaattcttgggnnnnnnnnnnnnnnnnnnnnnnnnnnnnnnnnnnnnnnnnnnnnnnnnnnnnnnnnnnnnnnnnnnnnnnnnnnnnnnnnnnnnnnnnnnnnnnnnnnnnnnnnnnnnnnnnnnnnnnnnnnnnnnnnnnnnnnnnnnnnnnnnnnnnnnnnnnnnnnnnnnnnnnnnnnnnnnnnnnnnnnnnnnnnnnnnnnnnnnnnnnnnnnnnnnnnnnnnnnnnnnnngcacgcggggggagaggcgtttgcgtaatggcgctctcccgctctcgctcatgatcgctngctcgtcgtcggtgcgggacggtacagta

SEQ ID NO: 129880 - DNA, 1769 bp, Homo Sapiens
  misc_feature (348)..(357): n is a, c, g, or t
caacaaacttcaacgcaaagctataataattatctgaaacttatttacaattaaacatttagggtcctgatttacaaaactcagtgcctttcatgatttattgatgagttttatagagaaagtaagcagtatgtagaatattccccaggtaaaatctggagtgaatggcttttagaggaaagtctatcagtatgcttaactaaaaactaaagagtgacaaaactgtatacagcagcaatcagaataacaggccacaagagaagaacgccatttttgacaaaatcctttgtatgtataggaagaaaaatgattgccaccccccacccctgccgccaacttttttagttnnnnnnnnnnttgtccttaataatcactacatgtgaattctgggtaataatctcctttctttctatagagttgtgtttaaacttaattcctgcatcagcaaatttaaacaaagaaaagttcctttgataacagccatcagagttcaatgggtatttattcagaggggaaagcttggggcaaggtgaccaagtgattattccaattgcaaaagaaacatcatagataaggtgctagaaacccaagattacccttgaagcactttcaatggattcaagtgatttaatgtagacaacaaaggaaatgacaaaggaaaattaacgagagaaaatgtttttaaagagaaaaatttcaataaatcaggtcccaggtagtctttaaaagaacaaaaatttacagtaaacattttaactctggaatgcaagtattgtacaattaccagtacatttacaaaactgcttagacagtaggttgctccagagtaagaatttaaaaatgtacaagccagttcatgatgactttagatatgttattaaaatacattgttaatcaaaaatactttactatgtacatgtacactgtataaactctagatttacctaccaaagaaagccttaatcaatttctggctcactggcccagaaaacagtacagttctatcatttggtcttcatattatacacacgggctgagaggcatggtactgtagccagttcgtcaataatgcatttttctttctgtagaatgtctagttggatgagtcagttttacttccactatattttactttcctaaatgctgatccaagtaactctgggcattcacataattcatttgcaatttggttacacttcaaaataaggctataattcatttcatcagttatgacactgtcttgcttgtagtcaggatggtttgcgataaactccctcatccatctggcaactgtcattagttctccagatgctctcttcttaattagctttaggtagttcagaatactacatctggtgtccacatccacttccatgttttcaaggtaagagttcagaattgggatcagtccaggaaacacaccttccttcccattgatgatggtgtctatgctcatgagggtgtactcctctgcagcgagctccgtgctgttctgggccttgccacaaccatccaccactgcattgccacctttgcaaatatctttcctgaaataacacattccctgcaagacagcatctcttttctgtgactaccttcatgttctcatcaacctttgacagtggaatgagaaaatccaatttgtaggaaaggatcactctggtgagcagtaccacaaacaccacataggcagagttctcaaagtctgttaattgcacccccggccgtaatggccgaattcccgggcatatgtccggtaccgtcgactg

SEQ ID NO: 129881 - DNA, 537 bp, Homo Sapiens
  misc_feature (202)..(232): n is a, c, g, or t
tttttcctttcatatttataccactttggaaaattcagtaaacccaattctggcacatcataatggtttcagttagtgaagatgtttattttaataactttaaaatatgactatcctatacataagttatataagagggcataacaatagatgagtagaaatttataaaatttcttggatattttgaatgagaaaaaaacannnnnnnnnnnnnnnnnnnnnnnnnnnnnnnggccaaaccggtacaagttagaaagtgtgctaaggactgaatacttgcctcgtgctttttgccactggatgatgtaagttaagaatggaattgttaatcctaagtatatattttcttgactttcatcagtttctaaagaaatctaatttaagtgttttgcggttttgtttgatctgtatttattgagttctggtcatagaccagcagcttgcacgtcatgctcatgaacagccagaacatagttattggggaacttcatggctcaaaaccttctgaatcatttaacttattttgtatgttgcaaa

SEQ ID NO: 129882 - DNA, 723 bp, Homo Sapiens
  misc_feature (679)..(679): n is a, c, g, or t
gtgcttgaacaaatattttatttattcatgggtagaccataaggtttgataatacagttcttcctctgttagagatgaaggagtcaaggcatgatcagctgcaatgtcagcaacaaaaccaggaggagatagggctctctcctccttcaggacacggcacagcacagcacggcagtgttaagggtgtgtctccctttggggtttccaagttgctctgtatcttctcgtgctggggctgaatgttcttcagctgtacctccactaggagaacatcagctgtgaagacagagcctcaacagtgtgaccacaggacagatctttgttctctttgtcctcaggagatgaattttcttaagctctcatggagctctttggggactcccttttgttaggctgccttcaagcaaatgagagaatgtgggaaagcaagcaacctgcacaccataaagcaccacaagcaagaggactcacccttcctgtggctcagcccacacacatttcaggtggctcattcatccagatgttgctcttgaccttatgaattatgacagcacttcctaagactcctccgcacaagttgcaatggcacctgccacgtcagaactgacagaactgcctgctctaagcatccctcccctcctcagagggctatggggatgactgctgtcctgctctgcanatgggcccatcccaccctcattttcggaaacactggtagctggc

SEQ ID NO: 129883 - DNA, 709 bp, Homo Sapiens
cttatggattctttattgaatcacaaacaactcagggcatcaggccccagcagctgcattagaacccatctgggattgtgaggggactggagagggaggggggagaagacccgctctccctagcttttcactatatagagtaaaaacatcagaaatcaccccaagagaaaggacataccaaatgcccaccagaagggccagggactgcaagccaccctgagcgcaggagggtgtggtgaagggtggtatggccccgaaatttgtgtgtgtcccccactccccctgcaaattcacattggaattctcacccccaaggtgacagtattaggaggtggggcctttggagctgattgggtcatgggggcggagccctcatgaacagggttggagtccttataaaagaggcaggaaggagcttgcttgtttgtgcttctaccattgaggatacagcgagaaggcaccatctatggatcgggaaacagccctcagcggagtccgaatctgctggcctcttgatcttggacgtcccagccccccaggactgtgagcaatacgtttctgttgtttgtaagccacccggcctacggcattttgatataggagctcgctggactaacagtggggccaagcaggctctgtcagccacaacctcagggaagaatgtaaaggttggtgtcttaccatcacaaggcaagcggctcagaaccag

SEQ ID NO: 129884 - DNA, 1373 bp, Homo Sapiens
  misc_feature (323)..(358): n is a, c, g, or t
ggtgtggcgtacgtggggggcaggtggtcgatcacttcttgtggtagcgcgtctcggatgattcgtttagttggttcgttgtttgcgttgattgaaagtcacgacgtattggacatcggctggtgtgcgcgactggttcgatgacgctgtttgtctaggaatggtgcgctccgagtgcgccggtcagctgtgattgtagcggccatcctcgtccattatattggggcgctccttgtgttggtatagttatgcatggggtacgtctttaatagtgttggcgcccttgtcttgataagatctctttatagtcataggtgtccacnnnnnnnnnnnnnnnnnnnnnnnnnnnnnnnnnnnnctggtcaaggcagagtttactgaactgttagtttcctcctgcacacaccgggcatgacaccttcaagtctgtccagcagtgggtccagaaagtaccctgtgtgccttggacgcagaggctacagttctcactgtgtggcatgggagccttcacagtgccctcgggagctgcccctggtctttgtctgcaaaggtgactgggaggatagaaaaagcagcgggctggcattgtttcgggggtggggtggtgggcagtgtgcctgggcagtcgcagggaggctgacttggttctgggctgcaagatctgtgcataggaggcccctgggtttcttccaggctcttcactgaaatgcaaagagtctgaagaggaggcagtgggcatagtgcccctgaatctggttaggtggagtttactgcatttaaaggcccatggtgagtggtgagttctgggatttgggagattcccagaggcctgacaggcctgtcccaccctcctggacttcactacagggagctgaagtcagggcccaggcaggggagcaggccacccatgtagggaacaaattcctgccactatgctagggcaagaaatgcgcagaaaggcaggggctgtcaggggccttagttaggctctgggcactgggggcatgtgtaggggaggacgcgcaggctgtgtagggagatgccaaggggtgcacagaggtgggggcctctctctggggcggtgtggaggagacgcaggcgtggaaggagacgcagcgtgtgcaaaggagaggcacggagtggaggacgcgggctctcccacggaggccatcacttgtcggtgcgtgcttgccgcagcagggtcccatgcctctgcaaggtagaccacgtacccatcagtccttcaactaacaggatgtggctcgcactgggcctgtgccccatcaccccactgttgctcattccaaagggcgaagttgatctacctcctctgagactgcaagaatgtgccccccaacgcaccaatgcaatca

SEQ ID NO: 129885 - DNA, 776 bp, Homo Sapiens
gattgttacaagtccctttttcgggcgttgtcccagaggagacaaacatcttcttaccctccggggaccaggctccttcctgcacaaagtggtcatcctcttgatgacatccgggtcctcccagcccagacgccgggccctcgggggtcctcctgagtacctgggacaaagacacaggttggaggacgaggaggacgaggaagaggctgaaggtggggggctggccagccttcgccaattcttggagagtggggttctggggtcaggtgggggacccccacggggtcctggcttcttccgggaggagatcaccaccttcatcgatgagacacctctgccttctccgactgcctcaccagggcactctcctcgtcggccccggccactgggcctctcaccccgccgactctcccttgggtcccctgagagcagagccgttggacttcctttgggactaagcgcagggagacgctgctccctgacggggggtgaagaaagtgcaagggcttggggaggatcctggggcccaggcaaccccatctttccccagctgaccctgtgagcccaagcaggcctgctgaactcagaggagaaagcctgagtgagtaacacctcattctggccgagagtagggcagctgcctccagactctggggagacgggcgctagatttggggctcagaaggccctgctctctcccatccaagtgaccagatgccctactcaggttccatcacccctagcaatatgtattaaagtctgaagtgttgccatgg

SEQ ID NO: 129886 - DNA, 624 bp, Homo Sapiens
ccatggcaacacttcagactttaatacatattgctaggggtgatggaagctgagtagggcatctggtcacttggatgggagagagcagggccttctgagccccaaatctagcgcccgtctccccagagtctggaggcagctgccctactctcggccagaatgaggtgttactcactcaggctttctcctctgagttcagcaggcctgcttgggctcacagggtcagctggggaaagatggggttgcctgggccccaggatcctccccaagcccttgcactttcttcaccccccgtcagggagcagcgtctccctgcgcttagtcccaaaggaagtccaacggctctgctctcaggggacccaagggagagtcggcggggtgagaggcccattggccggggccgacgaggagagtgcccttcagcctcttcctcgtcctcctcgtcctccaacctgtgtctttgtcccaggtactcaggaggacccccgagggcccggctctgggctgggaggacccggatgtcatcagaggatgaccacttgtgcaggaaggagcctggttcccgaggggtagagaagatgtttgtctcatcatgggacagacgccgggatagggggacctgta

SEQ ID NO: 129887 - DNA, 1126 bp, Homo Sapiens
aaaggttcaagttactcaacaattttatttacccattctacacacacgcacacaaaaacacatttcaaatacagttatgcacactttaaatggatctgagtggcatactttgttatcagtgtcacccgattaaatcagaatgttgctaaagacttatgttcctatttcaacagagcagtgcctaggaaatctacagtagaactctcttcctaggcttcccaatctgacccattcccattcaacccagaggtgctcagccccacaccatcccccttcccaaagggcaccatgtatgatcagccctttgattttgccatagcaaaaccatcaccataccagcataagttgatcttcttgttaggtcaatataataaaaaacgtacataagcaattcagatacaaaaacattgcgtaggtaaacattggtcacagatatccagtgaaaggcttactggaaaaaatacttttgccaacccttaaaatcaatttttaaatgccaaattttcttctcatttttacttactagattaagtgtaaaatccaaatgcatggctgactaaaaatagcagccctgtccaatggaatacaacatttcagaacagggtaagctggggacacagaagcttcagaaatgaacagtggaactgaagtcctgccctaaagcaggggactggatgaggtgacttcaagtaaaggtaacaactccaggctctgaacaggcattcccttagctgagttcacaaaataccataaaagtgatgcataacctttatcttgtacaaaataatgagaatttggccactactatataagaaatatctatttaaaatcatagtgtacagaactcccctataaagaaaacatgtggagtgcttaattccttcctttgttagacacatttaatagacagagaattaccataatgtacatacacttcaatggatacaatcagaaagcaggcagactgtcagcttacagaccctagaccgttagtcaggcaacacccaaattttactatagtctatctatcagtcagcacacagacactactacagtctgtcagtgacaaacagatcctactagagtcaatcagcacacagatcctcctggggaagaaagtccatta

SEQ ID NO: 129888 - DNA, 623 bp, Homo Sapiens
tttgattatgaaaatacttattattattacaagtccaagggtctgcacctgaggaagtgtcctgaggagtgggctgacaaactggttgagagcatagtgccccaagtctgtgtagggtgtggacggctacagatggagccgggatgggggtgaggggatagggcagggctgagtggcatgggggatatgcccacttagggtaaccaagggctcttctgtgtgtgaagccatggggacatccagggctagtacctaggatgagggcgatgaacacctgcccgagggactgcatctgtccattcacagccgccttgccatcccagagctctcgcctctgccagtgggctgctgggcctccctgctgctgtaacccagccagcccagggtctcctgcagtgtcccaccagggcttctcttctgccttcctggcctgagacattggttttgatcatccttaaggagcctcttctggtagaagtggttgagctggctgccctgggctggcttcccggagcagatggagtcctcagacagagtcttatcctctcaagacctgaggctgcccaccgggccaggccgacactgggctgtcatcctattgcttgcctgtcctctgctgccgc

SEQ ID NO: 129889 - DNA, 1799 bp, Homo Sapiens
ttttttttatgtgaggtatttattttgcagccattcagttcagctgtccagtatcaggttaccaaagacaaattttcaagctcccggttaatccccaccaaagtttctactgttcggctacttcaggatggctaacatttggagagaagaggatcccccaggtagtctgtacataattcagagagaggacatcagaattttccatggttctatttcaggtattaaggtaccacagtgaagcatgtcatttgactgtggtggcaaagggacggcactgagcatgcctaacctattccccggcatttcagtccaatcagcgcatgctcgcaatgatcatccatgggtgaaaaggaagagctgaaagacacatgtgctgagcaacatttaatttctgcttgttaaacgggtgattaggcgccagtgtggcaccatccagacactgggaatttgtgccactccatcagttctgctggctctgctcattctgctttcctgcagtggatgccacttcccaaagaaccatgctccaaaaaacaaagagaatttcctcattagctggacttggctgcagcaactgtttggtttggagtagctgtagttgttgggagatggtccatctctggtgcatcaaaaaagtatgccaagcagcccacagaaagcagcatatggagcaacacaattgtcacaattgtggccaatgcaacgcgtcggttatcctcacgaacagctggccaaaatgtcattgccaagagagatcctgagatgcccagggcaatcatgactagaatccaacgaacagctttctgggggataatccacagtattgcggtggggatataaatgaagagggaatatccatagacacacacatctccagaaatgaataggagacgatgttcataactttgctgtttctccacatgaggaaaccccagagtgcaagaggaaccagccaggcataggcatagatgatggtagctgctatggacacttttcggaattcgggcacataatggtacgtcttctctcccagatggatcaagaagttggaaagattcccactaattgctatggcaaagaccaacgtggcacatatccaaaggggccatagagatctggattgctgcggatatataacctcacaaagtttttcccgggtattggcaaaagagatcctttaattctgtcaaagacctggtaggtgtccacatcaaagaatgtttggtagtattcaaatgtccagaagggggagcttttcttctgtccagcaagtaactcagttttgtcagagtcatcatttcccagtaactcatcatcttcttctcttcctgagcctcttggggatcctggctgatgttttggggtttcaccaggatcctcaatgtttactgtggtggcatctgggtttgctgtcagagaagtggctgcattgccaaattcttcaaattgcaagtcatctactgctgccattcggccagtgagtcttctcccaattatgaggaagaaaatttgcagggtttgtgtgaatgtttagagagcaggtgcagcctagagatgtaacgatgaggaaggagaggctgaggtttgaaagaggtgatggggacagtgaagaacaaaggcagttcagcctagccagtggttaaaggcacaggctctggggtcagacagagctgggtttgattcccgattctgctgcttctctgctgtgtgcgcgctcctcgcggcctcagtttcctcatctcgcggggttaggcgtcccccgggtcccgagaaggctcgggcctcagttgctccgcgcc

SEQ ID NO: 129890 - DNA, 407 bp, Homo Sapiens
agcatgcctaacctattccccggcatttcagtccaatcagcgcatgctcgcaatgatcatccatgggtgaaaaggaagagctgaaagacacatgtgctgagcaacatttaatttctgcttgttaaacgggtgattaggcgccagtgtggcaccatccagacactgggaatttgtgccgctccatcagttctgctggctctgctcattctgctttcctgcagtggatgccacttcccaaagaaccatgctccaaaaaacaaaagagaactggagaagtcaagaaaaacttcagcaaggagagggtatctcaagtgagtctttcctcattagctggacttggctgcagcaactgtttggtttggagtagctgtagttgttgggagatggtccatctctggtgcatcaaa

SEQ ID NO: 129891 - DNA, 1560 bp, Homo Sapiens
cacagggagggcggtctttatttctggaagggccccggagcaggaggctgcctctcttccacccgtccttctatcctcacgacaggtgctatggggccgcagcagcatcaacagcctctctcagctgctgcagcagctctttgggctgtggtgagaacgcgctggtgtccactctctggaagtcggggtgcgcaaccaaggaggccagcacttctgtgatgcgccccaacattcaaaggctggcctgttcgaaaacccaacccagcaccgtcctcagcggctgcctccctcaggaccaggagcctcttttcagcgatgaccttgaggaagtggtaaaactcttcaaagttgatgcccgagcaggacctcatgatgacctggcagtggtggtgccagtcgggcatggagtccctccactcgctgacctcctcctgcacggcgcatagctcctgctgcaagaagcgccacatgttggccaggttgaagccattgacccagttgtggttgatggagatggtgtcatccaggttgtgcacctggtggtgccagccactgggcacaaacaccatctcgcccgcttcctgcgtgatctccaagggtgggccagcaagctggttccgtgggtgcaggtgtgtgtcgcagagtgctggggaggtcacgtcgtagggcaggttgccgtggcggtcccgcagggcctcttcctgccctggggggaagaggagccacttcttcctcccacagacattgacagaccagctgaaggagcggaagatgtcagcatggaacggggaccagctgcccgcaggccccgcgtagacaaagcggtagtcatccacatccagtgcatcccagaactcattcagccagtcggacgagaagtacacaggcagggtgaaaacgtcctccaccggaaagtccctgcacaagtgccagtctttgaggtagagacagcccctgggagaggagtagcccgcctgtatgtactctttccagtaggtgatgtagtctctgagagtcatgtgctctttggggttcgagttgtattcctggaccccacagtttgcaactggtacaaccacgtctccgtaggtccgtagcaggtggtcgaagtcgggcctccccgcgggcgtcacccagcgccgccggctgccccagccctgcgtgaaggcgctggaaaacacgcagggcaggttgggcagcaagaagccccgcacaaagtcggcgtaggagaaggcgcccggctccgagacgaaggctacccggcccggagcctggccgacgccggggacatcgacccccaggcctcggaagtggctgtcggcgagggcgcgcgtctcgcggtccatccagctcagcacgggtcgaaggaccctcctcctcacttccgccggagcggaaacggtgaggaccagcctcggaaccagaagacgcagggcgccgcgtttctgccccaccagcgcctggggctccgggcctgcacgcatgcgcgcggctcgccgcggtcttcactgcgcaggcgccgagcggccgaggcagcgcggtcggctctgggactcgtct

SEQ ID NO: 129892 - DNA, 513 bp, Homo Sapiens
ccatgcggaagacaatccagtttcttttaaactgattaaagtgcctcacggggaaaaatagctccgttgtgcacccaggggccactttcatcagaaaggcctctggggttcacgcagcgctagggaaggcagcgcctcggtgcgtcccaagccccattacctgcacaagtgccagtctttgaggtagagacagcccctgggagaggagtagcccgcctgtatgtactctttccagtaggtgatgtagtctctgagagtcatgtgctctttggggttcgagttgtattcctggaccccacagtttgcaactggtacaaccacgtctcctgaaatgaaaggcacggtccatgccatctccctgggccccgtcctcactccaaaccgtctgcagaggaactctccaggggccacgcgcctggcctccctcaccctccctggtgcccctctctaggcgggggcctcccgggcctgggtcccgccggcctttcctccccgcccggggtctgcggccgc

SEQ ID NO: 129893 - DNA, 515 bp, Homo Sapiens
ttttttttggcagtgggaggattttactgactgcacaacacacaacttccccaggcccccgaggatgccggcgtctccttcagccatcaggccccagcagtgccccttgctcctgtacccactctggactctcgccggtagggagggctgggctgacagtgccacgagtgggagaacaggggtcagggcaggacacagggttgggatcagggctgggcacaggatcagggtctgggctgggcacaggatcaaggtctgggctgggcacaaggtcgggaccagcgtcgtgcccagcctttgggtcagaagattccacaggagtagggctgggggtggatctggagccggggaggggtttggagctgggatccggcagagtgcccggcccagagccagggtcagggttgcggccagagctggtgccagggctgaggcccaagccagagccgagcacagaaacagcatcaggacccaggagggagacctgccccggcctcatcatggatgcagggctt

SEQ ID NO: 129894 - DNA, 255 bp, Homo Sapiens
gtcattagaaagtcttatttatttattacaaaagcaaagcttcattcacaatatgaactgcatactagatatagttatttctgcattaaactgctttccggaatccctaaacaatatagtgtattgtacaaccataatgcaagttatgttttgcatacaaaatatgttctttacatcaaagcacatgttaacaaaaacaagttctagaaagcatataccctctaagactaatgaaaacgtctttagcagggaatt

SEQ ID NO: 129895 - DNA, 692 bp, Homo Sapiens
  misc_feature (309)..(318): n is a, c, g, or t
ccctgaatttgaaaaaggcaaccttatttatttacttctcctgtttccaaattcttgttactccaagagtacagacagttatttacctaaaatgcaaaacctccaaagagttcacacggtggctggcactcaggcacacacatgtcagtgctctactgggacacctggtacatgatatccctattaaagagtacacagtacctttaaagaggtcattaaacagaacacggacaaatttgccacgctcacatcctgaacaatacattttgtgaaaaacattcgctaatttaggttcttccaaccagaagnnnnnnnnnngccaagtctcccacaaagtgcccccaaatccacagctgagtgaaggtcataaagagttaaatgaatgtaaaccaggccctatcattcgtctcctccagaaaaagatgaaaagacatttctgatggccccaggtgctctcccacgaggagacagtctttcatttgaggttctgaagcggcctcacctcgaacccatgcgggatcttccaagagtgcaattcccacagctccacttgctcaaggaagtctcggtgcacagaaggaagcctgcagcctcccagtaccaagaaaccggcagggcaagtggcagaagccagctctcgggtgagagtccttactccctgttgcattcgatcaccaaagttttcgaatttt

SEQ ID NO: 129896 - DNA, 743 bp, Homo Sapiens
cccaagaattcgccacgaggacaataggcactttattagtggttggaatgcagttacacgcaggggtgtgcagacgcaatgggggcagggctggtgcaggcacaggaaacgggagacccccccctctttcccctggggccaggggttctccctctccaggatcctgggacagtgctgatgagcagagacatgaagtctgagggggacttggaatatggcaaaggggcaactgggaagccagttcccctgagtttgacaagtttggcaaaaggatcaagtgaggtgtgtgggcagaggggcccggtttgcccaggacatctgccctccacctctccccctgaaatcatcccttgggtgggtttagtttctttcctctcttacaaagagagctgtgtcaataactggcagaggaagtcgggaaattcagcctaactccctccagcccagcaggtttccattaaacagctattagccatctcctctccagcctgctctccactgccaacccccgcaaaactctccctccctttccctccttcccagccaggagacacccccacctgggcacacacactcccacccgtcactcccagctaggagggagcaaaaggaaggcactccttggcggccccatctcagctgttgagacagacggaaagaaagctaatagaccctttaatgcatgtccaggttaaaaaataaataataataagaaatgcttctggtggcccttgagcaactgt

SEQ ID NO: 129897 - DNA, 764 bp, Homo Sapiens
  misc_feature (701)..(721): n is a, c, g, or t
  misc_feature (744)..(744): n is a, c, g, or t
gcagagtgggagaggctgccactgacaggatggctatgacctgggacatggaaacagtgacctccgcgttctggtcccgagatcctcgcatcagcgtcatcgtgtgcaccggcttggggggctggagttccggttttctttgttttttctctttattcgtcctttctcaaagatgggatactgatcagaattgctctgtatatgcttgggactggatggaaagactttggagcagctgtggggggtggggggacaccgacaaccaaacagacgtgctggctccagtcctgtttttactttcaaaaaccaacaagcccgacagtggagcctgtcccctcccgggagggtgctcatggccccactcacctcatcaccccacggaaacctttgtgtcttgccctggaagacacccgaattctttgtacattgacatgcccttctccttcctccctcccctgtagctggtctttgttttactccctccctttctgatccatgtatatcatattatgtgagatatcatctgcctgaaaaaagactttgtgcggattattgggaacattgtagctgtttctgtgttttttcttaccttgtagtctggttctgaattaagagaggaaaaaaaagtaattatgatacattgtagtttgtgtacgatatatgttgataacgttttattaaagggacatcttttttccgcnnnnnnnnnnnnnnnnnnnnngaccgggtatgcggccgcaagcnttattcccttgtagtgaggg

SEQ ID NO: 129898 - DNA, 1107 bp, Homo Sapiens
  misc_feature (676)..(676): n is a, c, g, or t
  misc_feature (742)..(742): n is a, c, g, or t
  misc_feature (755)..(967): n is a, c, g, or t
ttttttaccaacaactaagaatttattcaaaatgttaaaagttctaattagagtctgcacaaattattcttgaacatacttcaattttaatatgcaatttaagaatataaaatgcattctataaagaaaaagagaaaaattgactcaagaacaaaaacagagctgtgagaaatgaagactagtgttggagttatctaaactcagtcttcaacaggactgcgtgcaacgccaaggctcagagacatctcatcagcttcaggaggtatatgggtacttccatcgcaaaatggctccatcggcacttacactaacaatatattgatttcctggacttatgcggatgcgtgtgatgttgccactgtgtcccaccccaacgtgagtcacttcaccctcattataatcccaaactttgaccagatggtcatttccacctgtgacaaagtgcaccccttcctgtgtgatatccatgccatttatcgacccagacagggaaccttccaattctctgattactgtcccatcaaatacttcccagtaagcaatctttctgtctgttccgctggtgatgatctggaactcctcagggtgatagcacacacactggaataaggtgttggctagtatcatctgattcctcctgagacgcacaaggtctcaaatgatacaagtcccatcnggtgctggcggtgacacactcctcgttgttcctcttcaccctaatgcaggacactgatgcctcgtngcgaattcttggnnnnnnnnnnnnnnnnnnnnnnnnnnnnnnnnnnnnnnnnnnnnnnnnnnnnnnnnnnnnnnnnnnnnnnnnnnnnnnnnnnnnnnnnnnnnnnnnnnnnnnnnnnnnnnnnnnnnnnnnnnnnnnnnnnnnnnnnnnnnnnnnnnnnnnnnnnnnnnnnnnnnnnnnnnnnnnnnnnnnnnnnnnnnnnnnnnnnnnnnnnnnnnnnnnnnntgatcgggcacgcgcggggagaggcggttgcgtatgggcgtctcggctcctcgtcactgatcgctcgccggtcgttcgtgcggggacgtatactcactcaaggggtaaccgtatcaagatccgggaacgccggagaaata

SEQ ID NO: 129899 - DNA, 1014 bp, Homo Sapiens
  misc_feature (646)..(646): n is a, c, g, or t
tttatatccatatctttatttaaacaagtttccataatagctaggagaatacagcattaatgacacacatttactaagcacaacaatggacaactacaaatttagagcataaatgtaattctgatattgttttggtttttatcttagcactaggtgatatctagtgaaaacccatgtttcaaaggcttttgttgatatgagatgaattattaacttatttttaaaaattgcacgtgagatatgctagaatgggttctagagtctagagttagttgataatgcctttcatgtctcagtatttctgcttcctttttaatgggtaaatgtttcacctaagaactttcaaaaaattgtatcaaaattttctatgcagatcaaagtagaattccttttccagacccaacaaggaaaaatatttgaaaactgcaatgttcaattccattttagttaaaaggatgtccatttcatagtaaattaatacagttaataattaaaatacaatatgttaaatggcatgaactcatttttgcgcaacactgttagcgcaatttaaatctcccaaagacacaaaaaagtcaattttactgcaggatcccacaaaaatacataaccaggaatcataaattacaacatatatatccacatntaaagaaaaaattcaccatttgttgggaaaaaataatggctcaaatgatttacggagcctgaaatgtgggctaaaattttataacatgataacaataagatttgaaactgctgactctgaaaaatgcataaaaatatactaacctgccaagcactgaattatatataccagtttcaactaaaaaacaacattttttctttcaaatatttcaagcattacaatactgaggaaacgttagtcatatgaatccaataacgcccattaagttaagctaacgaacattttagatagaccaaattacaaataaaaaaagtataaaaagcattttggaagatattttacatagtatttttcagctcctcatctcc

SEQ ID NO: 129900 - DNA, 723 bp, Homo Sapiens
ttatggcatccgtcccacattggtcaatgaaggctgaacgtgttcccggtgcgcggcccacgcttggactgcggagtgctgcctgtgcaacctgcgaggaggtgcgctgcagatgaccaccgataggaggtggatccacgtgatctgtgccatcgcagtccccgaggcgcgcttcctgaacgtgattgagcgccaccctgtggacatcagcgccatccccgagcagcggtggaagctgaaatgcgtgtactgccggaagcggatgaagaaggtgtcaggtgcctgtatccagtgctcctacgcgccctgctccacgtccttccacgtgacctgcgcccacgccgcaggcgtgctcatggagccggacgactggccctatgtggtctccatcacctgcctcaagcacaagtcggggggtcacgctgtccaactcctgagggccgtgtccctaggccaggtggtcatcaccaagaaccgcaacgggctgtactaccgctgtcgcgtcatcggtgccgcctcgcagacctgctacgaagtgaacttcgacgatggctcctacagcgacaacctgtaccccactcaactactcagaattttaaaccatgtaagctctcttcttctcgaaaaggtgctactgcaatgccctactgagcaacctttgagattgtcacttctgtacataaaccacctttgtgaggctctttctataaatacatattgttt

SEQ ID NO: 129901 - DNA, 557 bp, Homo Sapiens
aggcactgttcctcactgcctgagaagacaccgttatgtttattagggtttttgagttttatccacagcttttggttatctgcaaccatgtctcccaccattaacatagttcacactgagatgaggattccctatttaacacttggtcccaacttcttcacagtccatctggttttgtagagggaacataactggacattctggtcaggttaggtgaggtcaggccttcaggacgctattttcactgagttgctttataaggcacattatgcaaaattccatcagctcttctgttcactacattcactgttgaaattctaagagtgagactgctgtctcacaccaaagccagtgggtactatcttcagtaggcacgcagcatcatgtttgtatttgatccagctagatgacatgtaagagaaaactttattgtggactctgtaaagtgtgacattcgtttgtgactcaatttgctcatgtatttgttcctgggagttcattacatagctaacttccagctgctttcaatttacatcataaaagaaatgcatcatatt

SEQ ID NO: 129902 - DNA, 1027 bp, Homo Sapiens
  misc_feature (463)..(493): n is a, c, g, or t
  misc_feature (532)..(762): n is a, c, g, or t
  misc_feature (765)..(823): n is a, c, g, or t
cctgatttttctctttcctatctttgatggaaggaggaagtagaaagtggtaaagaattgaggctttccttcttggagagctgtaaatgacaagcattaggaaaggtaccctcctagattcattattctttcattctggtttcacttttaaaataaatggcaacttggcacacctaggctgttaacaaatctcaaagaggtttataaaaacgtatagaatacttggaagcaaagtatggatgactcggtatctgctttgttattcctcagaaatactgcactgagtatatgccctcattactggacttcattttgatacttgtctatccttcatagtgccctctacttttaaagggtttatatgttgaaaaactgctgtggccttttatgacctgtatataatgtagaataaaaataataaaatacttgatagctttttctaagtgaccaatgtactaactgnnnnnnnnnnnnnnnnnnnnnnnnnnnnnnngcctacagccgcggccgctcccctcgtgccgaattcttnnnnnnnnnnnnnnnnnnnnnnnnnnnnnnnnnnnnnnnnnnnnnnnnnnnnnnnnnnnnnnnnnnnnnnnnnnnnnnnnnnnnnnnnnnnnnnnnnnnnnnnnnnnnnnnnnnnnnnnnnnnnnnnnnnnnnnnnnnnnnnnnnnnnnnnnnnnnnnnnnnnnnnnnnnnnnnnnnnnnnnnnnnnnnnnnnnnnnnnnnnnnnnnnnnnnnnnnnnnnnnnnnnnnnnngcnnnnnnnnnnnnnnnnnnnnnnnnnnnnnnnnnnnnnnnnnnnnnnnnnnnnnnnnnnnctcggtcgtcggtgcgggagcgtacagtcatcaaagcggtatacgtatcaagatcagggatacgcagaaacatgtagcaaagcagcaaggcagacgtaaaggcgcgtgtgggttttcatagttcgccccgacacacaaaaatcagtcatcaaggggaaccgaagacaaaaaacagggtccctggagtctctggctccgtcgacg

SEQ ID NO: 129903 - DNA, 793 bp, Homo Sapiens
  misc_feature (243)..(422): n is a, c, g, or t
gggtaggttgtgtgtccggggctatgggaacctgtcccccatgatggatcttggtagagacacttccctctgtcatcgtgcccaggaggatgctgcaggtgactacctgcagccctgttctcattcatttggatgccctccagaaatctggggagccatacacctttagagccttttttgctccttatcaagttggcaaggcttggccaattcctgttcaaggctgcattaaaggcatgttcnnnnnnnnnnnnnnnnnnnnnnnnnnnnnnnnnnnnnnnnnnnnnnnnnnnnnnnnnnnnnnnnnnnnnnnnnnnnnnnnnnnnnnnnnnnnnnnnnnnnnnnnnnnnnnnnnnnnnnnnnnnnnnnnnnnnnnnnnnnnnnnnnnnnnnnnnnnnnnnnnnnnnnnnnnnnnnnnnnnntcaagaaatagaaaacaataaacaaatagaaaaaagggcgccgtacattcttcaaaggtgtttggggggtgccccggggtgccgtcaggagaccttgagtgtggggctttggtgaagaactgggggccacgtggggtcaagctttgggaacgaagaagatgttgaaggggacacatttgaacggtgggaataacgtggtttgggatcgaattggcgccaaattctcgaggggacgcccacatctttggtgccatgaagtggaggcacttggaagtatatgtcctttaacaggtgtccccgaaaaaaatttctcttttctctccacttaagtgtccgtacccgtggggcctcgcgcagtctttgattttccc

SEQ ID NO: 129904 - DNA, 1368 bp, Homo Sapiens
  misc_feature (29)..(29): n is a, c, g, or t
  misc_feature (41)..(41): n is a, c, g, or t
  misc_feature (62)..(62): n is a, c, g, or t
  misc_feature (207)..(207): n is a, c, g, or t
  misc_feature (246)..(246): n is a, c, g, or t
  misc_feature (268)..(268): n is a, c, g, or t
atttttggggcccccccaaaataaggctnttctggaagctnttcccccgtgccgcctcctgnttctgaacctgtttctgagagccagcctgtgtatacccgcactgcctccttccaggccagcccttcatctggtcatgctgcacaactttgggggaaaccatggtctttttggagcccttagaggctgtgaacggaggcccagaanttgcccggcctcttccccaactccaccatggtaggcacnggcattggcccccgagggcatnagccagaacgaagtggtctattccctcatggctgagcttgggctggcgaaaggacccagtgccagatttggcagcctgggtgaccagcttttgcgcccggcgggtatggggtctcccacccggacgcaggggcagcgtggaggctactgctccggagtgtgtacaactgctccggggaggcctgcaggggccacaatcgtagcccgctggtcaggcggccgtccctacagatgaataccagcatctggtacaaccgatctgatgtgtttgaggcctggcggctgctgctcacatctgctccctccctggccaccagccccgccttccgctacgacctgctggacctcactcggcaggcagtgcaggagctggtcagcttgtactatgaggaggcaagaagcgcctacctgagcaaggagctggcctccctgttgagggctggaggcgtcctggcctatgagctgctgccggcactggacgaggtgctggctagtgacagccgcttcttgctgggcagctggctagagcaggcccgagcagcggcagtcagtgaggccgaggccgatttctacgagcagaacagccgctaccagctgaccttgtgggggccagaaggcaacatcctggactatgccaacaagcagctggcggggttggtggccaactactacacccctcgctggcggcttttcctggaggcgctggttgacagtgtggcccagggcatccctttccaacagcaccagtttgacaaaaatgtcttccaactggagcaggccttcgttctcagcaagcagaggtaccccagccagccgcgaggagacactgtggacctggccaagaagatcttcctcaaatattaccccggctgggtggccggctcttggtgatagattcgccaccactgggccttgttttccgctaattccagggcagattccagggcccagagctggacagacatcacaggataacccaggcctgggaggaggccccacggcctgctggtggggtctgacctggggggattggagggaaatgacctgccctccaccaccacccaaagtgtgggattaaagtactggttttcctttccactt

SEQ ID NO: 129905 - DNA, 880 bp, Homo Sapiens
  misc_feature (761)..(795): n is a, c, g, or t
  misc_feature (798)..(839): n is a, c, g, or t
tggaaaccctttctagtccggcctttcccgcctatctcgctgaacctggatctttggcggtggctttttttaacttagagcaggtatgcttttgatggtagggaagggatggaaaaaaggaaaagcaatagaaactgtccaattcacatcagttatccgtctgctttttcttgagagcttgtggaaggtgttaacgtggctgggaacatcaacaccttggcatgcatgaatgttaagtcaggaaggccagcgatcaccttgatagcttcttcacttaggtgctcttctcttttcggtttcctggtagatgtgcttgtcttctctactgtagacatgagtcttgcaaatgcatcagtcactttgaggcttgaggtggagatttccagcttagaagttgttaactcatacaactccggatccacaccatctaaagggttagtaaggccactgctactccagtcaaactggacgggtggtagagactcctggaactgatcagatgtacatgtgttcatatctggtgacatggtggctgtctgaccgatggaagctattttttctgcagcagaaagtggtttcagtggttccttggtgggctctaacatacccaatcctgctgcatacatgggcactataacaggctgcttcttattgcccgtgaagagaatgtttcgggtgtctattcccaaggaggacaaagcttcttgttgcccggccgtaatggccgaattcccgggcatatgtccggtaccgtcgactgnnnnnnnnnnnnnnnnnnnnnnnnnnnnnnnnnnncgnnnnnnnnnnnnnnnnnnnnnnnnnnnnnnnnnnnnnnnnnnaataacggcagctacgccctatagtgatctatcgatccttg

SEQ ID NO: 129906 - DNA, 679 bp, Homo Sapiens
  misc_feature (635)..(635): n is a, c, g, or t
ttagactgggcacaccttttatttggctgcatgcagtagggcgaagtcaggagaacactgctatctttccagcaggacaagaggcaagttccaagggtggttggctgggagacagaggtcttgggaatggcagttctaggggtggggtgggggcttggaatgctctccaagccagagggggccgggcctggatttgggaggtggacaggggattcttcaaaccccctaccatactcatccagggctcatgtgtccagctgtcagagcaggtcccaatcctgctccccatctaccctgggacatcctgtacaggattccctcagtcctctgggaacctaaccccacctggtacccatctagcttctggggctccactgacagtgaggacagtccacacccgacctggaccccaccccaccctgggtctgtccatctcagtcccggcctgagcctctgggccaaagccacctcttctgagcaggcaggcagagcgagagactgggagcagcagacaggggcagagcacggcccatgagcccaccctccacttcccagattggtcagagttacatggtcacctccctgcacctgcaccatcagggcagctgcaagcttgccagttgtcttgcctgtcnctgctccgagggtcaaagacacaggtagaatggtcccaggaggg

SEQ ID NO: 129907 - DNA, 1298 bp, Homo Sapiens
  misc_feature (63)..(63): n is a, c, g, or t
  misc_feature (161)..(161): n is a, c, g, or t
  misc_feature (170)..(574): n is a, c, g, or t
  misc_feature (616)..(649): n is a, c, g, or t
gagccgacgtaccgtagcgcagtcgaacagaggccccgggagctccagggaacgctgttcttntgtcctgtcggttcccaccctgactgacgtgatttttgtgctgtcagggggccggcctatgaaaaagccagcacgccgccttttacgatctgcgcctntgatggcannnnnnnnnnnnnnnnnnnnnnnnnnnnnnnnnnnnnnnnnnnnnnnnnnnnnnnnnnnnnnnnnnnnnnnnnnnnnnnnnnnnnnnnnnnnnnnnnnnnnnnnnnnnnnnnnnnnnnnnnnnnnnnnnnnnnnnnnnnnnnnnnnnnnnnnnnnnnnnnnnnnnnnnnnnnnnnnnnnnnnnnnnnnnnnnnnnnnnnnnnnnnnnnnnnnnnnnnnnnnnnnnnnnnnnnnnnnnnnnnnnnnnnnnnnnnnnnnnnnnnnnnnnnnnnnnnnnnnnnnnnnnnnnnnnnnnnnnnnnnnnnnnnnnnnnnnnnnnnnnnnnnnnnnnnnnnnnnnnnnnnnnnnnnnnnnnnnnnnnnnnnnnnnnnnnnnnnnnnnnnnnnnnnnnnnnnnnnnnnnnnnnaagaattcggcacgagggttggagcggccgcggctgtaggcnnnnnnnnnnnnnnnnnnnnnnnnnnnnnnnnnncactgtccataattttattgctcaggggaattgattgttttagttcccgagtctccaggactagggaatgctgtgaccagcattggcagggccatttaaggctgtgtaacccaggggccgtggctgagaagcaaaatgattctgattcaaagccagtcgtggaagtttgctgagctctgaccctggtctcacactgagccttgtcttccgcttccttctcattctggatcatcttgattattgcattcctgctcatcctgctctcctgcccctgctccactgccccccatgaccatcatcagttctgcagtatggggagctggggctctgggcatggtgacatcagttctggctggccagccctgggagggctgtctgagactggaggctgagggccccggtggacgtggaaggccacactgtaggccaggctcccacagtgtcgggctgtggggtccgtgctagcccggagcagagccaggttgccacagtagcggtacaggtcctcgtgatcctgagcctttgggttcatgcggggttggtctggcctcgggtagatggggaagatggcctcacccacccgctgggctgcccgtcccaagggttcgtccagcctcagtgcctccacatgcagctgagcatcatgctg

SEQ ID NO: 129908 - DNA, 923 bp, Homo Sapiens
ggcactctggatcattggatggggctttacgaagcagaatggagggaagatgtctgacatactgctgcaggcgtcagtccaggtcattgacagcacacggtgcaatgcagacgatgcgtaccagggggaagtcaccgagaagatgatgtgtgcaggcatcccggaagggggtgtggacacctgccagggtgacagtggtgggcccctgatgtaccaatctgaccagtggcatgtggtgggcatcgttagctggggctatggctgcgggggcccgagcaccccaggagtatacaccaaggtctcagcctatctcaactggatctacaatgtctggaaggctgagctgtaatgctgctgcccctttgcagtgctgggagccgcttccttcctgccctgcccacctggggatcccccaaagtcagacacagagcaagagtccccttgggtacacccctctgcccacagcctcagcatttcttggagcagcaaagggcctcaattcctgtaagagaccctcgcagcccagaggcgcccagaggaagtcagcagccctagctcggccacacttggtgctcccagcatcccagggagagacacagcccactgaacaaggtctcaggggtattgctaagccaagaaggaactttcccacactactgaatggaagcaggctgtcttgtaaaagcccagatcactgtgggctggagaggagaaggaaagggtctgcgccagccctgtccgtcttcacccatccccaagcctactagagcaagaaaccagttgtaatataaaatgcactgccctactgttggtatgactaccgttacctactgttgtcattgttattacagctatggccactattattaaagagctgtgtaacatctctggcataggctagctggaatgcttgataagaactg

SEQ ID NO: 129909 - DNA, 653 bp, Homo Sapiens
tttcatatcttaacactttatttgggggttcaatcccagggaaatgggcataagggggacaggggctgtaaggcagggaatgagagaaagcaaacacaggtggtcaggcgatgtgtgtgccgagctgaccgtagctccatcagcggtacagctggttgctgaatcacaagacctgtccctggggagttacagcttctctgaatagttctatccttccagacattgtagatccagttgagataggctgagaccttggtgtatactcctggggtgctcgggcccccgcagccatagccccagctaacgatgcccaccacatgccactggtcagattggtacatcaggggcccaccactgtcaccctggcaggtgtccacacccccttccgggatgcctgcacacatcatcttctcggtgacttccccctggtacgcatcgtctgcattgcaccgtgtgctgtcaatgacctggactgacgcctgcagcagtatgtcagacatcttccctccattctgcttcgtaaagccccatccaatgatccagagtggggtggcttgagtgagctcctcatcaaagaagggcagacagatgggcctgactgtgcctgagaaagtgagtgggaactgcagcttcatgagggcgatgtcattgtc

SEQ ID NO: 129910 - DNA, 654 bp, Homo Sapiens
agatttggctttttcaaaaacaaaaccagaaagtgtatttattttcaactgaaagctcacattccaataagtatttatgaactgcatcttatatttaggacaacttggaaatctaaggtaataaaaacagtcccaaccttccgtctaaatgttggtcctcagttgaaatctttttctatgggtaagtggttttcagaagaaaaaggatgctaatcagtctcctatgtgttgttctttttatacagaataaagcctcatgtttgtgtgccagggcctaacaccaagtctgacatatagcatccataagctcaactcctagaggtttgacttctcctcatcccataaggagtaatcaattctgggcagtcactagtgggaccaatggccccagcttgcccaggactgagggcttgagagagtccttggcaaaccagggcagctggtcaccaaagcagacacctctgctctcattaccaagttcttctttcagacatgaggatacttacattacatacagtgaaacctgatcatcaatcacattgtaaattcaaagacttcactgtgatatgattattccacatactccacaccaatgggtaatatttaccatttttgctagtttgcaagatgtacatttttcttggtctcgtacct

SEQ ID NO: 129911 - DNA, 854 bp, Homo Sapiens
gaagaatgaacaactgtgtcttattttacaaatgagaaaactgaggctcagagttgagacatggatttcccaaggccacacaaccaggaaatggcaagactggttccaatccccagatcgttcactgctccaatagaaatttgccaaataaaaccatacttcactggcagttggtgctggttgaggcatgggcacccttgggaggagtcctttctctacctgtccctgtgcccgccccacgaggtctctgctctgcactcactgtccacctgcaggaggttggactgcaggtccgggtgtaggcggccgcgggccaggctgtcactcaggttccggttcaaggtcaggacattcagcagaacctgtgtcaggccgctgaggccccgcgcagctccattggcccccagagcgaggtaggttccacagagcccctccgcgggtcggaccactgtgggcagcaggaaagagagtggccgcttccctggctgcactgaattctccaggctgggtgcagagtggttagctgtccggttgggccaggagaagtccagcatctggctgttgagcaggatccccgagggggtgataaggccgctgccaaagggctggttcagggagctaaccatggccacaatgaagtcatcaggtcccatgatcagcacctgggcagccgtgggagctccgtctagttcatagacaggcaggagtggggcaggggctgcctgggagtcattgatatggccccggaggtaggcggcctccaccttgctgagcatgtcatccatgctctcagtgatggtataatcatagacgggatctcccaatctgctggcgagggctaatgcaatcttcag

SEQ ID NO: 129912 - DNA, 486 bp, Homo Sapiens
tgcggccgcgggccaggctgtcactcaggttccggttcaaggtcaggacattcagcagaacctgtggtagccaaggtacagaaaaatcagggctgtcccaggggtgatggtccaggattcctcagctctcacccttggtccaggctccttagtcttgagaattcttacaccgggtgtcatctgagcctcctaacagccctggaagacaggcaggcctgtgatgactgtttccatttcacagagagggaaagtgaagtccagcaaggaaaatgacttactccagagtttagaggaagccagggaagatacaccactagaaccaagtctctttaatctagcccggggctcccttcttttctctctggatagggcaaggttaatagctaggagtggtctagggcacaatgtgggtgcttttaacttagtggttaggagtgtgcgtaggctctggaaccaaactgcctccctgctctttctagctgaagg

SEQ ID NO: 129913 - DNA, 748 bp, Homo Sapiens
tttgagaatttttatatgatttatttaataataaaccaattaaagatacaaaaatgtttagaggattccaaaatttaaatttttgtttaaatacaaattcactctgtaatatgaaaacatagcattagacctctaaacataatgatttttttcatctacaaaaatttctgttatactagaaaatttgcagaagacatttttttcttgtgacattaaatgtacattatttacagttgaaaaagtaatctaaaaacatttcatttcagaaagttggatatatatgttatctttgtatgcaaccccccccaagtccgcccccagtaaaaaatgatccaaaatataaagcaattatgcttttataactgactactcagccagattagcccaaggctcaagttgctttcttggcccttaagaaagagtcttgactctctcaaaatagcagtattctgtttagcacttagcaacacaagtttactaatggaccgcaaagcacagtggcctaaagagttagtaaacaaattatttaggaagaatttatggcagatcttacccataatagatgaataaattttgttgggtcacttatttctctgcaacattttagctattcttacattaggaaataacctgataatgatttaattgacataacttgaaaatataggtattagaattaaaaaaatttagaactagaagagaaagtgtgatcatctagtctaattcaatacatcttttccttttatga

SEQ ID NO: 129914 - DNA, 1057 bp, Homo Sapiens
  misc_feature (722)..(722): n is a, c, g, or t
  misc_feature (785)..(785): n is a, c, g, or t
  misc_feature (810)..(810): n is a, c, g, or t
  misc_feature (872)..(872): n is a, c, g, or t
  misc_feature (953)..(953): n is a, c, g, or t
  misc_feature (1011)..(1011): n is a, c, g, or t
gcatttcctctacatttattgcaacggctaaatgattaacaacattcacaacttcttagatcttaaaaaacagaaacaaaagaaaacttccattttgtaacatcacaaatgtcttctaggctttatcaaggaccaaaaacactacaattctctaagtgatttccagtgatggaaacaagccagagacagtaaagcacccagagtggcgagagagcacttccagatgcctgttgtcctctcgggggtgaccctggaacaaaccgtacttgggcactggctccaggccgatccagggcagggatgatgttttaagggcaattgctgcttcaaggcttatctttcacatcagtggttttgatctatttgttggcccgcttgtgtctgtacatctgcatcatcctctgtcggaacacatcgaaggtgtcttctttgtgctcctgcccgtcagcacccaacccttccccttccgagggggttcccctagggagtgaaaaagagagtcagttgtgcacctgagcccagggcctggcatgccaggaactgggcatgggcacaaacagtccatgagatgcaggtgtttgggacacacactgagacatcaaagaaagggaaaatcaagacgcgactcacagtagaaacaaggagtactcaccctcggaagagctggcttttgagggggggtgccagagggccctggttacctcggaatgcttacccagcanggactagctcacgtattaatgaaatgctgctggaggtatgatcgggggttaataactttgggngctgtggtcgggacctggctggccnggctatgggtcccgggaatggggaagcagttcagacgggactcacagaatacaactagtttnatgatggtccacatgtggcaaatgacacggcgccagctggttaaaatctcacaagacagaggagcctgtacactgccatgnaatatcactcccacgaagagctctgtttaaacacatcactgcacttacactgtgtgangaccacgagtgcgtgaggagggcaccacccccccagtggtgtgtag

SEQ ID NO: 129915 - DNA, 447 bp, Homo Sapiens
  misc_feature (68)..(68): n is a, c, g, or t
caaagaatgtggccgggatctggaattttctcactctaattctcgggaccaggtcattggccaccggnaattggggcatttccgttctcaggactggaaatttgcgctccgtggttcttgggaacaagactttggccatccagtttctcaagagtcctcttggtcacaggagtatagttttggtccctctgcagttttgggggactttggatcttccaggctgattgagaaagagtgtttggagaaggagagtcgggattatgacgtggaccatcctggggaggctgactctgtgcttaggggcagcagtcaagtccaggccagaggtcgagctctaaacatcgttgaccaggaaggttccctcctaggaaagggggagactcagggcctgctcacagctaaggggggtgttgggaaacttgtcacattgagaaatgtgagcacaaa

SEQ ID NO: 129916 - DNA, 1125 bp, Homo Sapiens
  misc_feature (935)..(935): n is a, c, g, or t
  misc_feature (1036)..(1036): n is a, c, g, or t
tgcatttcctctacatttattgcaacggctaaatgattaacaacattcacaacttcttagatcttaaaaaacagaaacaaaagaaaacttccattttgtaacatcacaaatgttttctaggctttatcaaggaccaaaaaaactacaattctctaagtgatttccagtgatggaaacaagccagagacagtaaagcacccagagtggcgagagagcacttccagatgcctgttgtcctctcgggggtgacccctggaactatttgttggcccgctttgtgtctgtacatctgcatcatcctctgtcggaacacatcgaatgtgtcttctttgtgctcctgcccgtcagcacccaacccttccccttccgagggggttcccacgctgaccggctccctgatgccctttccgagggagcccaggccatggccctccttccagcccatcttctgcagcatctggaagcccaggttcttatcggtcagcttctgctgggcgaagtccaagtccttgggtttcttctttttggacatgggacgaccccgaggcctgtcataggcaattcgaactggttcatggacttttggctcctggatgagacacactctcttgggagctggaatcatgccaaccttcaatgacttgctgctgatcctcttccgagggaagcaggtacctgaggaggcctgtgacaaggcaggtgctccagccaggtcgtcctcggcagcctcgccgggaaggccagtcggcaggggtgctgccctcagacttgcccgcccctccaggagcgggggcctcctctcccccatcctcatcgtcctcgtcctcctcctcaggcatcacctctgggctctccagctcagcctcccgcggagggggctcgtcttcaaactctgcttccccttccatgaggtccacggggctctcctgagaacnccgtggtgtcaccacacaccagtgtgaaggttgtgcggagatgacgtgaaaccaattgatggacatagttcaaacactttctttcgatagaatttgaaagnagaactattttggtcatgtagaaaccacaggtcagggttatcggtgctgttttctatgctgaattgttcgatctctggtcccacctgag

SEQ ID NO: 129917 - DNA, 1157 bp, Homo Sapiens
  misc_feature (1084)..(1084): n is a, c, g, or t
tttttttcacattgtatttcctctacatttattgcaacggctaaatgattaacaacattcacaacttcttagatcttaaaaaacagaaacaaaagaaaacttccattttgtaacatcacaaatgtcttctaggctttatcaaggaccaaaaacactacaattctctaagtgatttccagtgatggaaacaagccagagacagtaaagcacccagagtggcgagagagcacttccagatgcctgttgtcctctcgggggtgaccctggaactagaacgacagaaaagacactgtgactttgacacggctgtgccaccacacatcacgcgcgacacgaggatcctgcagagcggcctctgcagagagcaaggacagcctcggttaagagggaggggctgggggcacggagggccagtggcatctcctctatcccggctggccggcagctggcagcacgcaccatgctctgctggctcccgacaccttcactgccccagcgctgaatccacaggagaggtgtcctctgagagtgtagggggctttctaggttcaaggagatgtgccctttgacccctgccaaggactcacagaaccatctcagctcaaacttggaggagcggcaggaggtggggggcggtcagtggccacacgccacagattcctaaagcatttaactttttaataaaatgaagtggagaaagtcaagaatgaacatgctaggacaaagcacatggaatggtcagggcgatgctggagagagtgcgcttgatccacgctgcaggtgtgtgcgcctcgctcgggtcaatgggctgagccccgcttggagctccatccattcacctgacccatggccaacatggaagctgtcggaggggtcaggaaaggagaaggagaaaggagatgatgaaccccccgcacctgtgactccccaaaaccagctccactccaggcccccacaggctggttcgttcgagggttgggttataaacccaaactccatcctccatgctggcacctctactgccataaagatctgccagttgccaaagctacagaagccactggaagcaagcagagcccctggnggtggtggcactgcaaggtgacagggaccaggcagacaaggagctgtgaccacagcctaggaagtctgtggct

SEQ ID NO: 129918 - DNA, 994 bp, Homo Sapiens
  misc_feature (841)..(849): n is a, c, g, or t
gggactcttgaagttactctgggttttttcatcctgctgtttggaaccattatggatcacaagataagagatgctttgaggatgaggatgtcttcactgaaggggaaatcgagggcagctgagaatgcatcactaggcccaaccaatggatctaaattaatgaatcgtcaaggatgaaatgctgccccatttctcatggatgtcctgagaccaagaggggagatccaggagaaagaggccatggaaagcaggctggagtgaggaggaatggtcatgcttccttggaagactttctcttcttgtcaggagtgactcccaagctcttggtcggccgaagaaaaactgaggataacatttgctgactgggctttaaggagcatgatttatggaccccttaacctacccgtgccctgcaagaggctggcttcttggtcaatcttgactagattaagagtcaatctgcaagccattttatggtcctccctggccagctgggggctgtagggccctgctgggcttggtcgtctttcactcctgaggcctgctctgtggctccctagctcagtcctccatcactctgcgtggatcctgggtactttggacagtgagggttcgatcccattttaggggtatggttgggggtgggagtgggagtgtgggttggcaggaggaagaatgagtctactttggagacaattaagtcatggtacgtttcctaaagatagggaacggaagaaaagcaagagaactgtttaatatgctgattattttagtctattttagaccttgagtaaactaatttagcttctaggatccaagtttccttatttgtgaaacaggnnnnnnnnnttcttgtaggtattactgtttgtgtgtttgagtttactgcacatgtttgtgtttgtgtatatgtgtcttttaaaaatactatatataaagaagattctggttgttattttagacataaacgaatatatgtacctttcacaacttg

SEQ ID NO: 129919 - DNA, 1037 bp, Homo Sapiens
gggcacaaagtgcctgatgtcaaaatgaagatagtaaaacaagggaggaagcagtggatggaccaggattaattcctttcatttcttagtaaattaaaacctgcagctggtggattgtgaacacacattcccgaagtaataagtgaggacgaatgcactgctctggaacataacccagtgctaactgggggtttcatttattcagtcaagcacatcttactcacatccagatttattttcctacagtgcaaacacaccagatgaaactttaaaatgttactttttgtaagcttatcataaatgagttgcagtaatttgtttgcttgtttgtttaaccacaaccactattttaatgatatactaaagataacactatttagttttttcagaaacatctgcattatatgtgtgttggttgtggattttgtttctaaaattggcttagtccaataaataaagaaaagcattaaggacttaaagcaacaataaccaaataaaaacttgataggatctttgaagtctatttaaatattcattccattacatctagactcaccaagaactacatgttatgatgttaagttgaagttgaaacatgatgttttgcattaaatttaagatatgcaaatttatgtagagaaaataaatgttatataccctataatctttcacctaattagtatttaattatatggatttgttttatattataaaagatgttttgattttgtcttttgatattgacaaaattgtttggatatccttatgttctcaagtctgtatctgcctcccctgccttatttcttatgttttgccacagttaacccattgtgcttctttgtaatcaaacagtttgtgggagaatgggcttattgaatgtctaaaaaataagtttaaagtgtttgttaccctaagttttttacatttttaaactctaattacatatgtgaatgttattactctcagtgaattgttattgtttgcaaaaatgcactgggcagtaacattttgtgataaatcctataagatataagtca

SEQ ID NO: 129920 - DNA, 1589 bp, Homo Sapiens
aggagatcaggtggagaggaagaaaaatagaaacgcgtatgtgaaatggtaatgatatacaacatggagaaaaaaataaacatcgtggaacctgctagcaatttccaccaatttccaccaaagcagtgaaccccttaactgacagaaattcagtacaatatacacattaattaacaactccaccattactagggctgctgttgaaagccaaaaaattaactacaatattgaaaaacagaatgcttacaatatctgagaaaaatagagtgaaaaggcaatgttagctaagctcttagctacatccactcttaatggcccccagtatttaaactatcatggattaaagccatgaaaataaaaatttcaatttgaaattttattagcctgttgctaaaatggtcaataaaaacatcaacacgataggctttgttgacatagttggaaaactgctctctcatttttaaaactttatttccacttccccagctttgaagatttctatgttaggaaaagccaaactaaatatactggctatggtgttgtaacaatgctggtttctggaatggtgccatgtcctccccctccctctcctccaactcctttaaaaatatgactatttttgaaatgcagcccgaggagggagcaatcaagggttcagaacaataagcgcccttcacacattcaagttcccagacaccaggtgaacgagcgagctccttgtcgggggcggggccggctgtcctcaccgaattcgcagcgccatcttcctctcgggaccgggccggcttcctttctgccagcgagggagactcgcaggcaaaaggcgggtgggggtggcgttcgcttcccacggtggaaagaaccggaggcaaacactgtctggcttagcccgcagcctggaacacaatgtcaggagacctggggctggagagctggaaaagtcccgggcagcctcaggataacccggaatcccgaagtgctgtcttggggaattattcccaagtgcacaagggacaggctcgatttcttggaaatcctgcgatctggggacgcatccacagaggagctgaactgtgccctgtagagaccagttctcgcctccgaccggtctgtgtgcgcacgctcggggcggtgatggtcccttttgagaagagggttgttttcgagtcgggccacagtcactggccatggactcgcggggaaggccatgtcctttctcccctcagccccttccccgttcccggtttacatctcaaggggaaagcgcacgcggggtctcccagcaccgtcaccaccgctgtggctgtcagccaggcgctcgcagcggcgccctttcggccctggggcagttcctgagacttcctgccgctggcttggggatgcgggggtgcagcccgggcccgggccaccggcggcggacgcgcgtggcggggcggggcagaggttgagaaccgctgactgcgaagtccgggtgcggggaagggaagggagcgaggtgcgggggaggcagaggggccggcagcccctaggcggctactccttgtcgtccacgaggtcggcgagctcctggagcactcgcaggcggccgc

SEQ ID NO: 129921 - DNA, 522 bp, Homo Sapiens
cttggagctggatgcctgtgccgcggaacagaggcaacggtggcaggcaggtggaggctgcgcacagcttctcccggtcatggcacacacctgtgcccagacgccaatgcctcctaagccaggagctgggttatgcaccgccatggcccacattaacgctccaccacaagcccagcctagtcagagccctcattgccccatccctgagtgggcaggagcctggcctggggagggcttgggcctgtgaggattctccccgaaggtgccctcggaggcagcaggtttgaggccctggggggcccgttccccagaagctgccagtgctttcagatgcattgactcttcccgcctcccctccctcagaaaggtagtgcccacactatttttaaaatgttattttatgcaatacactgttcctagtgagcagggctctggccctgaggagtctttgcaatgtattgaaggaattgctgccgtgtgagttttgaatgattttgcagtaaagacctgatctttctcatc

SEQ ID NO: 129922 - DNA, 421 bp, Homo Sapiens
gtgcctaaagattttggtagtggtgatagggtgttgatttctgaacctgacgaacaatacaaacaaggaaaggtaagaagttaatgagtacacactgaatccacgccacagttttttccaggatgatccttcctgcaggggttactttttccttttcctcacttcctctaatccctgtctttcctcccaaaagtaaaccggagagttatcagcattcactgctaaactttgaaatttcttctattaaatctccaagattatcactatcatcacccccatatctatcatgatcctctttcctgaaatttgtcacagttaccagtaagatggtgactgtaactagtagtcacaatgcttgtattttccacatatacaaattctcctctacccagcagccacagtcactagaacacaaaaatta

SEQ ID NO: 129923 - DNA, 370 bp, Homo Sapiens
ttccagtcattacttttttattggaaagcgtcagattatacacagaaattccaggcagactaaaatgttttccaaaataatagaaaatttgaagagaaccaagtttcaaattcttaatagctgttagaagaaacaattttaaaagaaatatatacgtattttttgtgacaaggtctctctctgttgtccaggctagatagtatgatcacagcacactagtcttgaactcccaatcaatcctcccaccttagcctcccacgtatctgggactacaggcgcaagccacaacacccagctaattttttttctgcagagacgggttttcgccatgctggtctcaaagtcctgggctcaagcgatccacccactt

SEQ ID NO: 129924 - DNA, 1018 bp, Homo Sapiens
  misc_feature (111)..(125): n is a, c, g, or t
gacattttgtttatttatttaaaacaaacatctgtgcgctatgtacaggcccggctcccagggaggtgggcgggcagggggccaagctgggtgggagagcgatggcagctnnnnnnnnnnnnnnntctggccccttgcctggccagcagggtcagcttctccattcctgccacctgccagctggcccaagctgatggcttcccgcgggacagccacctccctgcaggagagcagggccagaggagcctcttctcaaagcaaaataaatacgggactgacccagctccgcccacagcccgctctcggcatcagccttcatcgtaagagagaaaagctggttccgaggccgggcaggagaaaggccagcagtgcctggtccagccggcgtcgccttgggcggtgagcagtgccaggcaggggcgaggggccgggcagaccccgaggctttaaggcaaagcagggcaagggtgtacgcagcccgggccgggtcagcctttggcacaattaggggcggcaaccgcagtgaccgcagggcatggccgagtacaggggctggaggaccagaagccccttggtcctgaacctccactccaggccctggcaggcactgggggacttctgtccccattgttgagtccctggcccagctctgggtggtcagtggagcgtgtcctccctggcccagctctgggtggtcagcagagcgtgtccgtgttgaaggacagctgggcccgctcctcctcgaagctgatgaggccctcgtcctccgtgtccaggtcctcgggctcgtctgccacaagtgcccggagctccgtgggggcagaccggggccggagcaggctgagcaagcagccgagaggggactgcagtgcggatggcggctccgtctcctgctgctccaggttgtcactctgcttcttggcaaagttcacgaacacattgtccagtgtggtctggctgaccgagtagtcctcgatgcccagcacgccagacacctgctccatcttgctgaacacct

SEQ ID NO: 129925 - DNA, 572 bp, Homo Sapiens
aagggttttctccatggtcatattttattcattattctactttctgcacactgtatatgcttgagataaaacaataaccaagatgataaatacataaagactgttagttgtagtctgggagcctaaatcagaggagtattcttgcttaatgtcccatggttctagcttttctccacagagcaggatttatacgttttcattactacactaagaagtcatcatttgtcctaagatagacaaatgggaatttaaaagttatacaaaagacatctttttcttgggttatagatgtctaatacatcatttctacaggattaatttttttaatcatattagcaacctgacccattgcattatatggattagaaaactctctaagaagcaagaatatcaaatcactctgtggttggtttttgtgaaattgtctgtcgtaaattgagtactcactagtattcatgttggcatttgcaaaattaccactatgttaaaactcgctcccagttgtacctgtgactgtgtttatctgacttcagttttactgtccacgatttggaacgtgaatggaatctggg

SEQ ID NO: 129926 - DNA, 1045 bp, Homo Sapiens
  misc_feature (715)..(715): n is a, c, g, or t
  misc_feature (753)..(753): n is a, c, g, or t
  misc_feature (772)..(773): n is a, c, g, or t
  misc_feature (782)..(783): n is a, c, g, or t
  misc_feature (831)..(831): n is a, c, g, or t
  misc_feature (849)..(850): n is a, c, g, or t
  misc_feature (914)..(914): n is a, c, g, or t
  misc_feature (989)..(989): n is a, c, g, or t
  misc_feature (991)..(991): n is a, c, g, or t
gcaaattatctagtcatctttattagctataatttggaatttgcaagtgacagaaaaggagaaaggcttcagacgcaaaggacttttaataagttaccttttgaagatgagacaagacaggttctaagctaatcagacgtgtccaccaggtggacctgcgctcttttcacaggtagcggttcctgatgtactctcggtacatggaggagtcctcttttcctaggggctgcatgataccttggctggcctggatgtgggcttggaagatctctgtagattttctgtctactcttgggggctgaacttcatagatgttatcttgcgagaaagccgagatgggtgttagttttataactccatctgagcacctagaacagggctgctggctattcttgtcttgtttatgttgactctgccccagctgaacaaatcttgaataaatggagaaatcttcttctgagaggccatctgagaggttaattccatatagctccttcatgggttggaccacattctcggtcactttggcactgtctcctgcatcagtcatcttcacgggagtggagcgctgagacacagagccctcttcttcccgatcagtcccagagtcatcctcagagctgctggacacagcctcctcgctggggggcggcggggcgctggctgccgttttccgctgtaatacagcttcttctctattgcttttgtttcccantactgattttccagtttcatctggtttacgcacagtanatggacttggatcaatccnnacggtctanngcataatcacgtgctgagcttgtcatagccaagcaaaggtatcatcanagctgctcaactcatatnnggcgaagaactcatgtggatacatctctcctcatattgtggatttctcactacactctttagtncacagacaatactcatcaaggcatgtaatgcttacactctgtgtcactcgtgcgatcttgctcgaggcaatccanangagcgataatcgtacagtcaacgtctggtgatgtatcgcaatccaacatgagcg

SEQ ID NO: 129927 - DNA, 527 bp, Homo Sapiens
cttgtccacttgatttgcatgcaacacccacaaaaaggaaacacaccccctcctgctctggccaccccagcaggctccggggggcacctggcctgggtccccggtgcactcacccggtccttcccagtcctggacctcaacgtggactgggccaggtgtgggtgagtggagggacggccaggggcacgatgggagtgaccacctcgcacccccaccctcagcccggcccccacccctgctggagcttgtcacacgtcctcaaacccccacatccactccctctgccctccatccctgactccctccggacccctcccttggccccgctccgtcaccgattccctccggtcacctgctctgcaccatgccccaagaccaccttccctgaaggccatcctgtgcggccagggccccgcagacccctccacatcccctgaggtcttcaactcaccccaagctgtggcccccggagaccccagagcagcagccccagcccagctccccagtgcccgagggcggttggggcc

SEQ ID NO: 129928 - DNA, 766 bp, Homo Sapiens
  misc_feature (406)..(418): n is a, c, g, or t
  misc_feature (682)..(698): n is a, c, g, or t
tccaacaccaaaggcgcagaagccggctggccgtggtgggggcagcgtaggcgtagcatccctctcctctcacttagcctgttgactcttgttattatcatgatattcacaaaacgccgcatgtttaaaaagtcatagatgtcatcttctctctgcccccagggagggaagccaccttcttcttgccaccttggccccctttttccggggccagggggtttgccgggtgggggtgccaacaggcctggccctttcctcccctgcatccaagccctgggggcctctgcgattgccggaaggttgcatggctggtcccacgggcccagcacaggcccgaggccgggctgcctggttttatttttaatttaactttattttctgttttatgagtgtgtgtccgcccaannnnnnnnnnnnntcagtgttaagtggggagcctgggggagtctctcctgcctcccagcctcttcccagacctcccccctcgtcaccagccatccctctggacccggccgagggcggaccgggtgggcacggggcctgagggtggctcgggccagccccccagacccatggacccctcctcaggccgccagtgtcgccctgcccctttttaaaaccaaatagccctcgtttgctaacccttagacgcttgagaattaaccccttcctttttttcccnnnnnnnnnnnnnnnnnctcgagactagttctctccctcgtgccgaattcagccacccaggcctcgtacctagccctatggtcgt

SEQ ID NO: 129929 - DNA, 462 bp, Homo Sapiens
  misc_feature (292)..(325): n is a, c, g, or t
ttggaatattaggaaggggtttattctcaagcgtctaagggtttacaaacgagggcattttgttttaaaaaggggcagggcgacactggcggcctgaggaggggtccattggctggtgggctggcccgagccaccctcaggcccctgcccacccggtccgccctctgcctggtccagagggatggctggtgacgaggggggaggtcttgggagaggctgggaggcaggagagactcccccagggctccccacttaacactgaagggggtgggggtgggcggacacacactcnnnnnnnnnnnnnnnnnnnnnnnnnnnnnnnnnnccaggcagcccggcctcgggcctgtgctggccctgggaccagccatgcaaccttccggcaatcgcagaggcccccatggctggatgcatgggaggaaagggccaggcctgttgcacccccacccggcagacccctgg

SEQ ID NO: 129930 - DNA, 371 bp, Homo Sapiens
gaacttgggactgtagaaggaaagcattttattgcaaataactaatagttacaaaagcactttttaaatgttattattagatgttaagccgaaaatctagaaactaacatttacccaggttacaaaataagagcttcatatttttcaaagtctctaagggtaaggtacatccccagataaaatgagtataggccagtctcctttggctttgtggattctttccaaaaattttccagactatttagctttccttgtgtagttacagctcaaattagaaactgaagaaacagcaagtggccaggcagggtagaaagcaaataaactgagctacctgtgcctttttccaaatcagtatatgtgcttggctcctg

SEQ ID NO: 129931 - DNA, 1088 bp, Homo Sapiens
  misc_feature (994)..(1028): n is a, c, g, or t
gcccttgaagtaaaatgaggttacctgctttatttggataccaagttcccttcagacagcattaaaataaagacaagtaagactacacagataaaatccagtataattcaaatccaacaatgaaaaatttcccccatattgttgcaaaattctttctactgaaatgctttgctacaataataaaaagcatacattacatataaaagataccagtgtactaaaaagtgacagaagtggactagcaaatccttcaaagcacattatataaatgactagcatttaaaaacattttttcctataaaatgtaggtcatatacatttataaattggcggttttatttctaaagcagtgatgtgtgtgttcaaatagctgtcctgtacagtataatatctactcacttgaaactataataggtttgtctttctttgtattgaagttgaataaattcatctgatcagctgagaaaccaagcttgaaaaataagtatctaaaaatcaatgtagaaagtttagaattattgaaatgtagttatgaaatatgaagagaactatctatttcacaatggagctgaagtcacctcaaaacttacgggcttgaatctaaaacagaaacaaatattaaaatccaaagcaaatcacaaagttaggtagcagtacagaagcaggaaaaaaaaccacatcccttccttcagtgtgatgggcactaagttttgcggtcttcctccatcttgcagaagagtggtaaggccattcaatgcttagtgaaagtgagtacagatgaagtcagatttagcctgtctcccctgcaacttcaattatgctgtgtaaacagtgttacgttccaataggaggaacaatggaatttgcttataaaaactgattaaagataatcattattaaatgaaataaggataattaataactctgaaatgtttttagaactcccggccgtaatggccgaattcccgggcatatgtccggtaccgtcgactgnnnnnnnnnnnnnnnnnnnnnnnnnnnnnnnnnnncggccgcttcctcgctcactacttcgctgcgctcgtcgttcggctgtacgcgagcgccaa

SEQ ID NO: 129932 - DNA, 1128 bp, Homo Sapiens
  misc_feature (48)..(110): n is a, c, g, or t
aatgtttcatgaaatctttaatgaaattggggagaggggcacaaacannnnnnnnnnnnnnnnnnnnnnnnnnnnnnnnnnnnnnnnnnnnnnnnnnnnnnnnnnnnnnnagggggctctcctcttccctgcagcaaccctcccccagtcatcccactgacgggggagggaggtggggaggttggagccataaatacgtccagagtttcaaagaggtgaggggcgaagagctggccagggctctcagagagggggcaggggcaggcccgggccacccttgtctgggggccctggctccttgggcggccgtgggggccctggggggtcccctggcttgcgaccgtgcttgcggaagtagcggtagcgctggacgtaggcccgcaccaggttgctcaccttcactgggttgatttccccacttttgctgtggcagatcttgtggacggccttcctcaggatgtccttgtactcctccttggtgatgtccttcttctgatagtatggcttgatggccagcttcacctcctccaccgcccgctcctgcgtgtgcagcttcttcagatacttatctgtgtccccacggccctcagagctgctgctgccctctctcttgtcagacgtggcagccagcccggtggggttggggggggtcgaaccgcagccccccagagggaggctgccaggaagcaggtagctggaggggccagggggcagacccaaagaggtgggcacaggagctggggtcatccccagacttgagggtggctttctgtggctgaggatctggttggtggcctggatcagctcctgggccttcgctcggctcgccaggttggcattcttccatcttgaagagaagtgcagtcaaggccaggacgccgctggtggtgcagtccacaccagctggcagattccagggcatgggcgggggcagcgtgggcagctgggagacacgggaagctggcccgtcctccgcccccgagtcaccggctgtggaccccgcgctgggggcagtgcttggggcggctgcagcagtgctggtggccgtggtggtagcaggctgctgccctcgtgccgaattcgccacccaggcctcgctaccttaggaccgttagtagttactgccgg

SEQ ID NO: 129933 - DNA, 2056 bp, Homo Sapiens
  misc_feature (59)..(83): n is a, c, g, or t
  misc_feature (242)..(292): n is a, c, g, or t
  misc_feature (781)..(789): n is a, c, g, or t
  misc_feature (1042)..(1054): n is a, c, g, or t
  misc_feature (1321)..(1323): n is a, c, g, or t
  misc_feature (1345)..(1384): n is a, c, g, or t
  misc_feature (1717)..(1717): n is a, c, g, or t
  misc_feature (1792)..(1792): n is a, c, g, or t
ccggaagcttccctttcgtggaatttgtttccaggaaccggtcgcggttttccgccccnnnnnnnnnnnnnnnnnnnnnnnnnagattcccaagccccttgtttcaggaccccggggttttcctttggggaaccaggttttggccccgggttccctttacctttctggggggccgggggcccaaagggaaatggttttgaaaaagtttttttgaggggccgaagcgggcccgcaaaggggtnnnnnnnnnnnnnnnnnnnnnnnnnnnnnnnnnnnnnnnnnnnnnnnnnnntaattttaaagaattttaatacaaacttaatataaactatttcagtccctcttaacatgtaagacactgactcaaaatacttttataccgtttttttcaagtattgcacaatataggtacaaaattaatatttacgattacatttttcttccataatatatagcaaaaatctttaaacttttaacagaaaatacatttttttgaaaaagcaagtattcgtacattttaattccaccactaaaggaatatcctgtacacaatttttagaatagttgatgtctttaagatggatattttacaatttcagtaaaaaaaatacaacatgaagctgctgctgtcacagatcactgtagtaaaaagatataaatgcaataccatgtcgtagaaacaatatatatatatcctctgatattttacaaactttgtactaaattaaattatacaattagaaaagaccaataaacccacttattagtgccaatttttatnnnnnnnnntcagccatgtccttgctatatcttaaatactgtaagaggccatatctgagagtatacctttgaaatatcaccgtccagtattaaatgactttgtgcttggttggccaatgaaaaatgatgcatgttttagttattattgtttttaacccagcttgaatgtatccttactataagcttataaaaagaaaattctcaaggaggtgaaaagaaaaaatcccccttgggcccgtgcattttaacttgtacgatacannnnnnnnnnnnnagttagccataacaggctggaattgctggttagaatactgcatgttatttaagctaaaattcaagccatctacaaaagatttctcattgaggcctccataggctgcaaacacatcaaaggcattactgtactggagaggactgaggttaagggggctgtcacctgggaacattccattggtactactaccttgaccctgcatattaggaaaaataaattccttggcattaggagaaagagcagaggttttctgctgttgttgctgcnnntgtggtgtggtgtgccggtgcnnnnnnnnnnnnnnnnnnnnnnnnnnnnnnnnnnnnnnnntacccaagccaagcccatacagagagtgcattgaggaagagatggctttctgcttcaagaggtcattcacattcaagccgaggttgatgggagaagtacgtgcaaccttgttgctacggccactattcttcattttggtagagccgaacttggtggcagcaaaagtggcagtggtaaaggttaaaggctgagtggaccggggcatgaaggtagggcttacagcagcagagtgaccacaaggaggcgatggagagctggacactgatgaggctgggtcacttatgggcataaaaacctgggcctctgggttaaagctgtttttgatctccttanccaactcacatccattttcattatcatcatccacgttaagcaccttcactgggtctcttttcactactttggtangaatcctcaattgggtcgatgtaataccaagattctgtgggagattgcacgaatatcatcatgtcctaccactctctttggatgcttttcaatcctgggtccacttccctcctagtgtaacatttaacccgatccttgtatgcctttcggatatatgccttcaatttcttctagagtcttcagttctcacacatgtccacgtcctgggacgtatgtccatacaatataactatgtactggataactgcatcgtttcacaattag

SEQ ID NO: 129934 - DNA, 827 bp, Homo Sapiens
  misc_feature (249)..(257): n is a, c, g, or t
  misc_feature (439)..(472): n is a, c, g, or t
  misc_feature (511)..(523): n is a, c, g, or t
  misc_feature (766)..(766): n is a, c, g, or t
gaaattccgggacacaaattgtagaataggtaaggtcttaaagatggatatttaccaaagtttcagttataaattcgacatgaagctgctgctgtcacagatcactgtagtaaagatattaatgccataccatgtcgtagaaccatatatatatatcctctgatattttaccaaactttgtgactaaattgaaattataccattaggaaaggcccgattaacccccttattagggcccaaatgtttatnnnnnnnnntcagccaagtgccttgctataatctgtaaatactgtaagaggccataatctgagagtatactgttagaaatataccagtccagtataaaataactttgtgcttggttggcaaatggaaaatgatgcatgttttattattatttttttaaccaagcttgaatgtatccttactataagctttnnnnnnnnnnnnnnnnnnnnnnnnnnnnnnnnnntcccccttgggcccgtgcattttaacttgtacgatacannnnnnnnnnnnnagttagccataacaggctggaattgctggttagaatactgcatgttatttaagctaaaattcaagccatctacaaaagacttctcattgaggcctccataggctgcaaacacatcaaaggcattactgtactggagaggactgaggttaagggggctgtcacctgggaacattccattgggactactaccttggccctgcatattaggaaaaatagatgcctgggcattaggagaaagagcangagtggagtggtgggggaggtggtgggtcaagccgaaatctggagactagggggcgggagg

SEQ ID NO: 129935 - DNA, 1408 bp, Homo Sapiens
  misc_feature (386)..(408): n is a, c, g, or t
  misc_feature (1158)..(1227): n is a, c, g, or t
  misc_feature (1288)..(1288): n is a, c, g, or t
gggagaaggagcaaagctctggcccggcgtgtagcgggcgcactacggggacgctgggccgggcaccgggctgtgtggagaagtgagcgcgctcgtctgacccccgtgcccgccaccccgagccactaacggcgatctcccaaggcctgcccgaggcctctgtcctctgtcctcagccccgcagcggcaacgtcttgcactcggcgagctcgccgctcccgaccctcccgcgcccccgccctgccgcgctgctccccgcccagccgcgggtctgtggtccaagccgccccgaagcagcccgaacaagatcactcaaggtgaaggataatctactaataccagcactttgaatgaaaatttgtttctctgccacaaactgaacatcnnnnnnnnnnnnnnnnnnnnnnnctctcggggggggagttgaaacctaattttgtggcgtagcagctatgcagcttgaaatccaagtagcactaaattttattatttcgtatttgtacaataagcttcccaggagacgtgtcaacatttttggtgaagaacttgaaagacttcttaagaagaaatatgaagggcactggtatcctgaaaagccatacaaaggatcggggtttagatgtatacacataggggagaaagtggacccagtgattgaacaagcatccaaagagagtggtttggacattgatgatgttcgtggcaatctgccacaggatcttagtgtttggatcgacccatttgaggtttcttaccaaattggtgaaaagggaccagtgaaggtgctttacgtggatgataataatgaaaatggatgtgagttggataaggagatcaaaaacagctttaacccagaggcccaggtttttatgcccataagtgacccagcctcatcagtgtccagctctccatcgcctccttttggtcactctgctgctgtaagccctaccttcatgccccggtccactcagcctttaacctttaccactgccacttttgctgccaccaagttcggctctaccaaaatgaagaatagtggccgtagcaacaaggttgcacgtacttctcccatcaacctcggcttgaatgtgaatgacctcttgaagcagaaagccatctcttcctcaatgcactctctgtatgggcttggcttgggtnnnnnnnnnnnnnnnnnnnnnnnnnnnnnnnnnnnnnnnnnnnnnnnnnnnnnnnnnnnnnnnnnnnnnnaacaacagcagaaaacctctgctctttctcctaatgccaaggaatttatttttcctaatantgcaggtcaaggtagtagtaccaatggaatgttcccagggtgacagccccccttaacctcagtcctctccagtacagtaatgcccttttgatgtgttttgcagcctatgggaggccctcc

SEQ ID NO: 129936 - DNA, 774 bp, Homo Sapiens
  misc_feature (325)..(335): n is a, c, g, or t
  misc_feature (551)..(621): n is a, c, g, or t
tttccatttaagatgcatgtttttatttaagttttaaaaaattttgtaaccagacaggataaagtagacaagaatgttattatctaactatataatattttctcaatcttgtggatcactaaaatataacaaaggattgttttctatgctaattttcaggttgtccagttaaaccattatttggtatcctttgagcaggttagcctttcaactatttagagtttcttctcagaaacattcatatattatacaggaaacattcatagtttatttgggaaacattcatattttatacaagatgtacaaatttaagactagacaattnnnnnnnnnnncacaaaattatagccgcaacactatcctagctgcattgtgggtgattatattgttccgttagctgtccattatatacaactggattttaatcgtgctattcacagaggggctgtcacctgggaacattccattggtactactaccttgaccctgcatattaggaaaaataaattccttggcattaggagaaagagcagaggttttctgctgttgtnnnnnnnnnnnnnnnnnnnnnnnnnnnnnnnnnnnnnnnnnnnnnnnnnnnnnnnnnnnnnnnnnnnnnnnacccaagccaagcccatacagagagtgcattgaggaagagatggctttctgcttcaagaggtcattcacattcaagccgaggttgatgggagaagtacgtgcaaccttgttgctacggccactattcttcattttggtagagccgaacttgcc

SEQ ID NO: 129937 - DNA, 2150 bp, Homo Sapiens
atttgcataacattttctttaacatttaatagaaactatatacaataaatttttactatattttacataagatagcaaccacagaaatttacataggttaaaagcaagacggataaggaggacccagtcctgtgggctgttttctcagaggataaaaagccagagttcaccagggaaaggggttaaagactgcccaattaagtagaggtgaagaaaagctaaactgcaggtcttcagatagagataaccgatattagggccatcagtatctcaaagaccactcacaaagacagctcccacctagctacttaagtggatttctatccatgacttgggaaatcccattacaaagatgtcactttccttttaggtatagtcccaaataatcccagaagctttgatagggattatctctctttctcttccttgccctgagtgggaagaaacccacggtccacgtcctcaaaatttggctttacgtttgactataatactcaatccagaagaaaaacaaggtagtctgggttgcctgtgttttgtgagagatgatcagaaatacttctttgaagaacgagaaatttaaatccaccaaagtaaaatggttccccaaactatcaactaatagaagtgggttctggcttcccatttgcagtagccaatccactctgagacaatggtgcagaggctttctcagaatttcgagatccctgggatctgcacccatctccagccatctgcatctggcccaaaatatccactgtgtcttcagcaatttctttgactaaatgatcttcaagggttagtgaaggatcaaaaagcaaaggtgaaggaggacactgcataccatcacccacaacatccaagtcatcactgaactccagaggtaaactctcagtgggctgaagctcagcagcactcaagtacagatccatggggccggcttccagatcgtctggcacagacagtacctgctcgggcttatacatctgaggaggcaactggaaatgcagtgggcagcagggatcctcagagaggcttacaggaacaggtttgttgcagggtacctcttcagatccctggcagcacttgaagagaacctgattcgtatcctgacaaatatgggtaaggcagtgtctggtcattggaagagactgattggaacaacgaacatcatccacaaaggccaagcacctctgactggaacgagtggtatgggcctgttgggcagcaccatctgtggccagcattctccgttccttcaactgcctatgcagtaaggcttccactccatagcgctggcggtatcgtcgcagacattttaatcgctttaagttctctcgttctttggccaaaagtccctctgggccagtcaggagactactgcctagagcttcatgttccactttgcgattatgtaagtatcggcgcttcttctccttgagcagatgctgaagtcgtttaaactgatcaatatacaacgactgcaaacgaattagcttttcacgcataatcagggccacttcttctgctgtgtagacaccagcatgttttaggggatcttcttgatcactgtctatgctatcagcttcactgtcagggtcacctctccatgtctgatccacagtaatgggttcctgctccccatcactccagctgtcttcatctagtattcggctggcttcactgcgactactttctggagtctgagaccccagctctgtcttagcatatgagctcagctggcacaggagtgtttcacccacaggccctgggttggtcttcttcatttgagcatgaagtgccagggcattcctacggacatgttcagcacagaaggacaccccatctttcttctctggctttggggcagcattgggacatctttttccattcttcgtcgatatataactacactgcttgaagggtgcattcttgtcttcaaggatatgcttaatgcaaaactcctgcccctccagacgagggtgagagcatggacgatgagtgaatgcacaagacagaggttcctgagacctgggcactggagtgatcctcccccgattggttggcaagacgtgaatccgaatcctgttcataaccaaaacctcaggagctgcgctgcgccgcactctgccgcgccgctcgcccttccc

SEQ ID NO: 129938 - DNA, 552 bp, Homo Sapiens
ggatttaatactttttaatgaaaaagaacatatgtaatgtacataaacacaaagagcagaaaactgaaatagagggcaaaatgaccagttttaccaggtaaccatcccaccctcattttagccctcgtattcactggctattgatctaattacctcccaacacctgcagtttttcactgtttggttaccctacagggatactaccccaaaattcccacagacacttgaagactcaaaagaaacacccagaagggttgtgaagaagggcactcacaacttatttcaggatcaaaaatgagcaggctaaaacatcctgagctgacagagcaggaacagacaagaaggaaaaaacacctgttacggttacatgccaagccagtgtacgctagcaacctcagggtcccaaagcagtaacacagagtttaatatattcttttctggtaattagcggttagacacatcactggtctttcctgccagatttaatgcccaaaggatcaaatcttggttgaacacctaatttatcatagctttaagtaaaggtctgattca

SEQ ID NO: 129939 - DNA, 513 bp, Homo Sapiens
gcactaaataattgtgattttattgtttttttccacaaaatacaaagctttgcaccacattgtggtagtgttctagcacaagaaaatcccaaggttttcatggaggggagggggagaagggtaatttacagggtgttcattttatcattcttgaaatgttaactaaaaatttcaggacaaaatatgtcaaccttgtataacatgcagattattgcttagaacttgcatatactttaaaatggcacacataaagtatacaaacatttcaaaattttaatggaaataacttagacatttattatccctccaaataaaacaaccaggaaacaaaataaagaatgccaagttgctattttaagtactgataagtcctagtaacactgattcatacattatctagtcttacattttgtaaataaaagttctttcagccttatggaaataaattagaaggtatgttctcaaaatggtattaagtatattttgaaagacttccaaaaatctttgacaatt

SEQ ID NO: 129940 - DNA, 479 bp, Homo Sapiens
tttctcaggaacaagtttattgcagggaacacactaacctctttcataatagccaaaggcataaaaactacaaaaatatctggctctcgagtgtgggcagctcagtgtgggacctggtctgagtcatgacttgggctgccctgcaggccagaggcccgggagctttccggccactccccagagaggtccgtggcgctgagggggtgaggaagtgccttggctgcttccacagcgtgaaggccaaggctgaggtggagctgggctggagtggttccagagaaggcttcatcgaggcccttcaaggctgatggcagagccagggtagggagacgcctggatgtggctgccctggctcaactggctcctggaccaaggccctaacccaccagtttttttctccagaacccctgctggctctcccatagccaagtgggtggagcagagccctcctgaggctcccagtgcagacagacctgcac

SEQ ID NO: 129941 - DNA, 1120 bp, Homo Sapiens
  misc_feature (1081)..(1081): n is a, c, g, or t
  misc_feature (1094)..(1094): n is a, c, g, or t
caggatgccctaccatgatggagacccaagcctctctcatgatgactattcccaagggcactgcagaggggaggagctgtctcctcctccgtgtggcccacgcagagctggtgcaggtctgagtgagctcaccaagacaggccaatcccagccccagactccaaagcgtccccaagaggtcagggagaggctctgtgcccctgaccccaaggatatgcacaggtcatagggcagagcccccgctagacagcaggagcaccctgctctgtcagcctgcttccccaggacggaggccctggtggtaaggcaggcaggtcttgagcccccacaagacagcaggatacaacataaccctttttaatctgaagtgtagacttcatcctcacgttagaaaactccatcttttttttaatccctaagttctttatcaaacctttatgttaaaaatataaataagtctcatacaaagttcatgtgaatacctctctgagacgcattttcaacattcatcaccgttcacacggccccgctcctggggccaggtgccagtgcgtgccggcccctggcgtgacccgtcggctcgctgtcctgatgggctacatgtgtgcacaggaaaagcaagtcactaccactagtgacagtatttcagctgttctctggacccctcctctttgctggcccaggtggcacaagggtcccatctccctggcaggtcttagccggcacaatccaacgctgcaaccggctggctctaggccagcatctcttcttctgagtctctgcctcctcctccaagcagatgcaggctgtcatcttcagatgcttctgcctcctcctcacttcccagcgggtctagggagcgttttgtgccccgctgcttggaaactgctagtgcgtactgcatgttatagtggttccagctacagagtttcgacaggtcgtccaggtgccgctggatgctcttctggaggaactgaatgacaggcagcagcgtcccggctctggacttcagcttctgtccgtgcaacatgagcagtttgtgagtccagaggaggtagattccaggtggcgagaacttcanaggaggaagctanaactccagcatttctccacatacagt

SEQ ID NO: 129942 - DNA, 2421 bp, Homo Sapiens
gccagggcacctgtgacttcttagtacaagattgtctgtccttcaggattccaaggctcccaaagactccctaaaccatgcagctcattgtcacaccaattcctgctttaattaatggatctgagcaaatcttcctctagcttcaggagggtggggagggagtgattgctgtcatggggccagacttccaggctgatttgccaaatgccaaaatgaaacctagcaaagaacttacggcaacaaacgaggacattaaaagagcgagcacctcagtgtctctggggacatggttaaggagcttccactcagcccaccatagtgagtgggccgccataagccatcactggaactccaaccccagaggtccaggagtgatctctgagtgactcaacaaagacaggacacatggggtacaaagacaaagcttgactgcttcaaagcttccctggacctgaagccagacagggcagaggcgtccgctgacaaatcactcccatgatgagaccctggaggactccaaatcctcgctgtgaacaggactggacggttgcgcacaaacaaacgctgccaccctccacttcccaacccagaacttggaaagacattagcacaacttacgcattggggaattgtgtgtattttctagcacttgtgtattggaaaacctgtatggcagtgatttattcatatattcctgtccaaagccacactgaaaacagaggcagagacatgtactctggtgtgatctcttgtcctcagtgtctcttctgggctcctgtccctcttgctttatagctagctgcccggggaccaaggtacaggtgaaagcaaggtagcagcttgcgggaggaggcctgtctggcttaccagtctatacactgtggcctcaacctcccagacagggcagagaactgtgggcagctcgtttgctttctaggctggctggagaggtgggagctcattgatagactcatgatggaaactatttttgaaacaggcttcctccttcaggagagatcatgcggactaaactgtagcaattccagtgcacctggcagtgatccttttctttgcaaagtactgtctctttggttccagtaagttggaccaccacatgacatcattttccctggaacctggtcactgactaacacagacaattgggactccagagcctcaagagccaggagagggcacagtacatacagagggagtcaaatgggatctcattttgagtcctgccttccgcacactcagaacggcagccccaaggcccggagtgtccaggggcttctggcctgaggtgaatctgccaggcccaagaaggcacaaaggtaggagcacagagagccccattcccacaggcgggcggcccagcagcaccagtggaagctcagctgtcctccagctgctctcggcagacagttcagtgcacagtttatgccctagctgaaaaagatctcccggacgtatttcagcacatcctcttcctcctcctcctcagggctcctgctacaggcagagctggaaccccccggcctctgggaagggctgaggcctggagccagtgcctgtttcccactgtcctcttcctcactgctgctcccagaacttgtgtgaggcgacacggagcagggaggggagtgctctgggttatcagcccccgccagggccggctgctcgcaggccttttcctgtttgcggctctcaatcaggattcccagagcaacatcaactatctcagcctcattcatgcagtacacagtccttgtcgcagggagtcagattcgcaggagtcttctgaccagagctgtcgcaccttgctgctgccactggcactgctgccattctcatcctcttgggggccttcattggtgccacattctttgtagccacctgggctgtcagccatgagggaaggaccctcgttttagtctcggattgtaaggtttccatctctgtaccttctcacaaagaagagtcagggcccaagcttaatgacctgttttttaattcaggaaggtaaatctcgttctctcgtcacacccggaattacaggtccatttgtcctcagtgggagttgatctttgattcctgtgggaggcccagagggcgggtgagtgcggagcggaaggcgcgggcgaagcaccgcaggggcctcgctgaccccgccacacgccgggcagggctgcaacggctccttccgactggagcggccgcgcgctcctccggccggctactggcttccctgctctcaggttcccgtctccggctctcgtgccccttcttagcttccagagcggagccgggaggcaaattccaagcggtttgtgggacccacgcctcacccggaactttaagcctcgtgccgaattcgccacccaggcctcgctaccttagaaccgtagagtactgccgtcc

SEQ ID NO: 129943 - DNA, 1170 bp, Homo Sapiens
aaaatcccctcgttcctttgggggtgccaaggcccattacaaatcctataaaaaaccttccttagggccttctccctccatttgggccaacctcgatttcctttactctttccaaggggggctccaggtaaaatggaaactgagggcaattttatttccccaaataaagttttcatgggccaaacaggccgccctaaagctaaagatacttccgattgggtcaaacttgaagcagcaatagggggcccggaggcattaccggtgccagtctgtagattctgaaggcccacgccagcctctgatctaggttggcctctcttttccctatccccaattgttctgcctccactcagcagtcctggagctcagtcctcacccagagagatggagttgtgactcagagggcctaggtctctaccttccacttaggaatcaagccagaagctcctgaagcggaggtttgcccaaaaaaaagagtagtcagcgatagtcctctctgaatcataatttgataatgtattgctcatccagatggctgtttacaatttaagaaaaaatattaccaggccctcctcctaacctgcccggccatggggcacacctttgccaatgcaccttcatttctgtcaaaactcagtgatattagtgactcctaccccctaaggcgcctcccaagcgcaatgctgcagtctgtgcggacaaatttagttcaccctggggtgcctattaagtacatttcgcaaacgaggaactgagacttagttaacttgcagaagatcacagaaaagtttgaaatcagctggttggattcgcagccaggtcctgcagactccagaccccgcgcctccccgccctacttctgggccccaagagcaggccgcggcaacttccagaagccgggtctctggggcaccgcgctcgcggaccgacctcagtcccatcccagccgctccctgcctgggcagaatgggggccccgcgggaacgcgatgtgctgccagttcacagcccgccctccctctgcgggccggtacccgccgctggcggcgccgacctgtgggaggcccagagggcgggtgagtgcggagcggaaggcgcgggcgaagcaccgcaggggcctcgctgaccccgccacacgccgggcagggctgcaacggctccttccgactgg

SEQ ID NO: 129944 - DNA, 1294 bp, Homo Sapiens
gccgctcccgctccatgcgctcccgctccagccgctggcgctggcactcgagctgcaggcgttcccgctgtagccgggccttctccttccgctcatggaaggcctcgaggcgttgctcccgctcccgctgctcgcgctcccgccgcctctccgtttcgcggatctcccgttcccgctgcctctggcgctctctctccctttgttctttgattttatcaaacgacaagatgtctctcttttctttgctttctgacttgcgatcctgactcttggagcttctctctttggacctgcttgtggttttcacgctaatgacgggctctcctttcgatttatccatcacgaccgtccgctccattcctctgcttcctgatttggtgactctagaccgatttgtaggtccgggtttcagctcatcctggtctttttcttccttcttaatgtcttcaggctttttttcctccttcttctcaatcttctcttccttcttaattacagttttttcaattttgatctccacagaatgatgtctgtcgacactcgataatttttccttcttcacttcgcactcttttctgtcggaaagctttttcccagcaggctcatttttggccttctctacggagatcattcgtccatgcagctcagttctgtggagatggctgatgcacttggtcgcctcgtcagatgtcgacatggtgacgaatccatagcatcgagcccccgggctgcgggcgttcgttaccactttggccccgacaaccttcccatacttgctgaaaaggttcttgagatccgtagcgcgtgttgtggaggacagcccgctgacccacaggttccgaccagaaccgctgccgacccgacctttttcatctttaatgattggctttatatctttttcttccttaaaagagctcattttctgatcagcgccctcactggttgaggactctttaggagccggagggacttcattacaagcgtcaaaatcaaacttcctcccgtcttctttgctatctctggcttctgggcttggggcttccgtgggtgcttctgcgagctcctcgctagaggcctccgcgagctcggaggccgcactactctgctcaactgccggctctagccctacaggctcacagtccgtcctctcgccatcgcctggctgctccgcgggctcccttttcactaccgctaacaggctgtctgccttgctcgactgagcgtgtgctgttgactcgctggccaaatctaaatcaccctcttccggatgggcgctgtcaaataggtcctcttc

SEQ ID NO: 129945 - DNA, 899 bp, Homo Sapiens
  misc_feature (689)..(689): n is a, c, g, or t
gcaggcggcgccattttgtgctaggagcctgataaaaccggcccggttctgtggaaagtgggcggcggagccagggtccctggaatggcggagactctgtcaggcctaggtgattctggagcggcgggcgcggcggctctgagctccgcctcgtcagagaccgggacgcggcgcctcagcgacctgcgagtgatcgatctgcgggcggagctgaggaaacggaatgtggactcgagcggcaacaagagcgttttgatggagcggctgaagaaggcaattgaagatgaaggtggtaatcctgacgaaattgaaattacctccgagggaaacaagaaaacatcaaagaggtctagcaaagggcgcaaaccagaagaagagggtgtggaagataacgggctggaggaaaactctggggatggacaggaggatgttgagaccagtctggagaacttgcaggacatcgacatcatggatatcagtgtgttggatgaagcagaaattgataatggaagcgttgcagattgtgtcgaagacgatgatgctgataacctccaggagtccctgtcggatagtagagagctagtcgagggggaaatgaaagagcttccggagcagcttcaggaacatgctatagaggacaaagaaactatgaacaatttagatacttcatcatctgacttcactatatntacaggaaattgaagagccatccctggagtcagacaaatgagaaaatactcgacattttggggaaacttgtaaatctgagccagtaaaagaagaaagttccgagctggaggaggcatttgcacaggacaccaagtagccggtggggcccggacagaaagttgcgggagggaaagaggacctatttggaaaggggcccatccggaaaaggg

SEQ ID NO: 129946 - DNA, 2064 bp, Homo Sapiens
tgcggccgcggtccctgtggtcaaagtcgtggaagcggtcctggcggttaaagtcagaatggtagcgctcatccagggcggcccgcttggcttccggccaataggcatcatctcgccggtccaggtcgtagggccgccgcaccgcgggccgccgctcctgctcatagcgcagttcctgctggcgcctcagctcctcgcgctcacggtggatgcgctcctgctcgcgcctgcgctcgtgctccacgtgcatgcgttcgcgctccagccgttcccgctccatgcgctcccgctccagccgctggcgctggaaggccagcctctctcgggcaatctccagccgctcacgctcctcgcgctcccactgcgcctgcatgcgttgttcgcgttcactgcgttcacgcaccctgctatgggactctgagtctcttgacttccgaggctccttgaccttatcaaaggacacgacggaccgcttctctctgctggctgatttgcgatcctggcttttggaagctctctctttggacccggacgtttttacactaatcacaggcacccctttggatttatccattactacagtccgttcggtccctcgacttcctgactttgtggctcagatcgctctgaggggccaggtttctgatcatcttggtccttactctgtttctccacttccgtcgtcacccttcttagcatcatcttttctgtcacatttatcatccctcttaaggtttgtagatctgtcactgttgctcgacttctcctttttcccgtcactgtctccttttgtcagaggttttctttcccacaggttcatttttggctttctccacggagatcatctttccgtggagctccgtcttgtgcagggtggttaatgcattttgtggcctcttctgctgtggacatcgtgacaaacccgtaacagcgagctccaggactccgggcatttgtcacaaccttggcgcccaccaccttcccatatttgctgaaaagattcttcaaatctgtagctctggttgtagaagagagtccactaacccagaaatttctaccacaactgctgcgacccttttcctctttggaaagcctttttgtatccgagtcatcttcgggagaactcattttctgatcagcgccctcactggttgaggactctttaggagccggagggacttcattacaagcgtcaaaatcaaacttcctcccgtcttctttgctatctctggcttctgggcttggggcttccgtgggtgcttctgcgagctcctcgctagaggcctccgcgagctcggaggccgcactactctgctcaactgccggctctagccctacaggctcacagtccgtcctctcgccatcgcctggctgctccgcgggctcccttttcactaccgctaacaggctgtctgccttgctcgactgagcgtgtgctgttgactcgctggccaaatctaaatcaccctcttccggatgggcgctgtcaaataggtcctcttcctccgcaagctttctgtctggccccacgctacttgtgtcctgtgcaaatggctgctccagctcggaactttcttcttttactggctcagatttacaagtttcccccacaatgtcgagtattttctcattttctggctccagggatggctcttcaatttcctgtaatatagtgaagtcagatgatgaagtatctaaattgtttatagtttctttgtcctctatctttgctagacctctttgatgttttcttgtttccctcggaggtaatttcaatttcgtctaggattaccaccttcatcttcaattgccttcttcaaccgctccatcaaaacgctcttgttgccgctcgagtccacattccgtttcctcagctccgcccgcagatcgatcactcgcaggtcgctgaggcgccgcgtcccggtctctgatgaggcggagctcagagccgccgcgcccaccgctccagaatcacctaggcctgacagagtctccgccattccagggaccctggctccgccgcccactttccacatcccgggaataccgacgcggacgcggaca

SEQ ID NO: 129947 - DNA, 650 bp, Homo Sapiens
gcaaaacagacttttgaagaaatgatgaattacattccagcatttctcagagtttgcattatgccttgtgcattgtgaatctccaaaaatgggatacatgatactgcatttgtcaacttgaccatagaaacctcttatccaggagcctcttatagaaacactggtttggggagtattgatttgcagtttttgcctagtatctgggaaacagggtggtgattttgctttatgatccagttaatggtgagtcactttataatataaaattatttcacatttggcctttttgtttagatctgttagtcaagtgtattggtgaagaaaccaagtatgaaagcatcagacttctgtttgatggcttacagcaaccagtactcaacaagcagctgacttatgttttattggacattgtgatacaggaactgtttccagagctcaataaggtacaaaaggaagttacctctgtgacatcttggatgtaaacacttggatttggtatagaataacccattgaaattttttctttgcgagggtggtagaaatttacttttttgggtatattcttatatatattatgtacatcgctgtctgaaattttagttattttttgtttttaataaagactaacaccaacttaatggtttaaagtg

SEQ ID NO: 129948 - DNA, 1435 bp, Homo Sapiens
cacttttaatcattaagtttgtgttagtctttattaaaaacaaaaaataactaaaatttcagacagcgatgtacataatatatataagaatatacccaaaaaagtaaatttctaccaccctcgcacagcagaaatttcaatgggttattctataccaaatccaagtgtttacatccaagatgtcacagaggtaacttccttttgtaccttattgagctctggaaacagttcctgtatcacaatgtccaataaaacataagtcagctgcttgttgagtactggttgctgtaagccatcaaacagaagtctgatgctttcatacttggtttcttcaccaatacacttgactaacagatctggaatgtaattcatcatttcttcaaaagtctgttttgctcctttttgcttatcttggagagagcgaggttcagtgttttcacagaatatagcatctctgagaagtgttatgagtgagaccaaacggtgctcctgaaatagctgttctagtttacactgaagatagtaatcagtatacatttccagggtgtttttaaagaggattcgagttcccattaagagatgatgaagccagtcaggaacctggaaaactacccgtcctacatacatcaggtaatcatagactccttctacagtcatcacctccataaaataattctgattttgctttctctctgtattttcagcacggtttgcattatttttaaacagatcattgaaaagcttcttgttgttttctgaagtagggctgagaatggtcagttctggtctacttggtttaggctttggagactcacaagaattaatgaaattcatgataaaaggttccaaatgctgacctttctctttcattagttttccaggaacagattttataattttcccaagatttacatctggtagtatcttatcaagaaattgtgtttccccaccattaggggaaagaaagtctgccagaagttgactattactcagttctggatgctgcagaagtttctgtagatattcttggaactcttccctctttgactttaagaattcataatttttggggccaatgatcctcttagaaggaagctgggcatcaggaaatgcaccatgaaattctgttagttttgattcaagtacatagaattcaagatatcttctatagacagaccaatgttcaggctcgtgtccaactgctcttctatcatttctttcaacatcaatacaaaacacaggaattctttcttttttctccttcctttcagaggagggatcctcaaaaaagtctacatatggaatgctaattttccatgcagcaaggtttcggggagtattaggtgtgctcaccggacgcgtggtcgacgatatcccgggaattccggaccgtaccagcctgctttttttaccacgtgttctatatttcctatcc

SEQ ID NO: 129949 - DNA, 1156 bp, Homo Sapiens
ttttttttgtggaaaactcaacctttattattacctgcctagtgcaggggattaaaattgcctcaagctaggtccatatattagtgtaaaaatctgtgtctctccccccaaaaatgtacaaaccccaagtgattatagaaaaatcaatgtggcagctacactagagatgtccaaccccaaggctatgggccgttgctccctctttccccccaatcccaatatttactccacagaaacgtataggcttagagaagttctagctacaagactgcaagtgggaagtgggggtgactgagggctggggcggggctacccccaggtccagtgtttcaggtgatggaggaggaagaagcccaagctgaggacaagtacaggagcaggcacaaggaaacattttcctctccttcttgtcctcctcacccccagattctcagccagtggggtccagtgtgtgacagggagagagaagctgggggcgcagccacctctccaggaatcagtgttgtccagtggggcccaggtgctccaatgggccatgtccagtgtctatcctatatttctccccacccttccccaagggatggctagaggagggtggagaggatcccatccacaggaccagctgggtgggcgacaggggcttctaggaaggaagaacaggaaggggacatgagagtgtgtccaggaaggggagaaggggcatcagctccctgggtgggcccagcccacctgcagtctcactgcctctattagaggtgatgggctgtcgggaggggaagggcagaggtgccattgtgtcctcttgttttagtgtcactggcttcccctggatcgctccctgagggaggggcagctggatgtgtgattcacaccgtgttgagtgcatcctctgccaggaaccgatgcagctgggaaaagggtggtcgctgctcagactcccggctccagcaccgaagcatcagctcatataggccctgcgggcaggcaggcggccgggacaggtacacctgccggccctggtcccggaagaactcccccgcgttctcgatgacctgctcgtcggtgagctgcccaaagggctgggccctacagagcatcagcacctcccacagggtcacaccaaaggcccacacgtcactcgcagtcgtgaacttcc

SEQ ID NO: 129950 - DNA, 1375 bp, Homo Sapiens
aagggggatgggctaagaaggaaggggtgggagaaggattccccctcccaccagggacccaggtggggtgggcgacagggggctttctaggaaggaaagaaccagaaagggggacatgagagtgtgtccaggaaggggagaaaggggcatcagctccctggggtgggcccagccccccctggcagttctcactgcctctattagaggtgatgggctgtcgggaggggaagggcagaggtgccattgtgtcctcttgttttagtgtcactggcttcccctggatcgctccctgagggaggggcagctggatgtgtgattcacaccgtgttgagtgcatcctctgccaggaaccgatgcagctgggaaaagggtggtcgctgctcagactcccggctccagcaccgaagcatcagctcatataggccctgcgggcaggcaggcggccgggacaggtacacctgccggccctggtcccggaagaactcccccgcgttctcgatgacctgctcgtcggtgagctgcccaaagggctgggccctacagagcatcagcacctcccacagggtcacaccaaaggcccacacgtcactcgcagtcgtgaacttccccatgaggatgcactcccaggccatccagcggatgggcagcactgcccggccctgcacacggtaatagtccccagcatagaggttccggctcatgccaaagtctgcgattttgatggtgaaattttccccaactaggcagttccgcgtggccaggtcccgatgtacaaagttgagtgtggccagatagcgcatgccggaggcgatctgggctgccacatgcagcagcattgggtagctgatggtgggcccctgcgcagcctgcccgtccccaggggccccctcggctgccttgtcctccagctggtgggcactgaggaactggttgaggtcgccgttctccatgtagtcagtaatcatgcagagggggtcgtcctgcacacacacgcccagcagccgaatgatgtttgggtcccttgagcctcgacatgatcttcacctctttcaggaaatcattcctggcattcttggtggcatctggccgtaagatcttgacagctaccagcaaagggtgtcccttacgcacattaagggggaaatcaagactgaccagatcttgagggctgtcgacctcacacaggtgcacctccccaaactggccctcgccaagcttctccttgaagcggagtcgagatcgagggaaatccactctggggggcccatccccgactgcccctgggggcagtgcaggcacagcataggtgtgcccccggtgacgccctgcagggtaacaatgtcagcctcggcataatgggggacgctgttctggg

SEQ ID NO: 129951 - DNA, 849 bp, Homo Sapiens
tgatcttgccccagggaaccacatggaggccccggtacacccgcatcagctgcttgcgtctcgatcctggtctgccttgttcagcaccacgcggatcttgtcctcatggttcttcagagccttgatcacttccgagaactcatcggagatgtccagcttgttgggcgtcgaagagcaggatgatgcggtccacacgctccgcgaaccactccaggacggctgcaaagtcatagcctctgctgatccgctgcttctctccagacaggatcccgggggtgtcgatgatgctgatgctgtccaggacggggttgggcagctgggcacacatgaacctgttgaggaaagcgttgccatacgcgttgagcttgcggaaggggcgccgcgggtccaccaacgagcgcgttgcccggcaccacgccctcagtggggccgtgcatgacggcgatgaaggagtcggtggtgggctcgggcccgatgcgcatccccgggaagtcctgctcgatcaggtgtcggatgaaggtggtcttgcccgtgctgtactgccccacgaggagcaccataggcttgttgtcgaagtcagcgtcctccagcgcgggcgagtggaactcgtggaagcggtagtgctcctccaggggtagcagcttctgcgcgtacagctgccgcagcccctcggccaccgtctggaagagctccggctccttcttgcggcgggcatccttgctgacccagctgaacatactgccggacacggggctggctgcagttcctggctgttccatggggctcacatcccccgccatcctccccggccacacacagacccctttggctgtccaggctggtgagaat

SEQ ID NO: 129952 - DNA, 2672 bp, Homo Sapiens
tggtggcccgctttggacgccacctgaccgcgcggagggggttactcgcgggcgccccccttgctgaagtcgattcctttcgagacgcgccgcctcgcgtgttttattctgctgctgcgtgtgttgcgtctctgttgtttctatttcgtcttgtcttgtctgtcttatgttattgtttttgtattttttgtacagaacagaaactagcttatgtatttttctggaagacattctcctactcccctgaactcccaaaaaaagaccaaggtggctgggccctgcttctgtgactgctgagcggggttgcgcgtcggagccggtggggcgcgggaggaaagggcagggcccgcgcacggggagcctgggcccgggaggggaaggcacaagaacccacttcgcccgagagcacgggggaggcagagccaggtgaggaaggaagccacggtcccgtgaagcaacctcagctcagaagcacacggagggtgcctggtgttcctgtccatgcagcctcagcctagcagctgccaaaagggcgacctggctcccccacggtcgcagtcactgcactgtccagctccagccacagcaaaggccggggggcagaggccgtgcacacagggctggcacacaggggaggcggcgacaaagaacgcagcctctaacgttatatattaaaatagccacagttcttgtgcacacaattccatcctctcacccctgcctcccccgccaggcccaggaacagccttaaaagaaagatggtggttttccttttcgagaggcgaggaaacatccgctcagtctttatggaccttgagaaatggtgaggcttcccctccccccgtctctgcctcccggccgggcgtgcaaatggcaggtgcggggccgggcgccatcactcatgtctgcgcttggagggcggcaccaggtgcgggggcaggtcggcgggcagctcgtggccctccagcttgaccttgatgaggtggttggccagcgcgaactcctcgtcgtccagcagcccgtccttgtccacgtcggccagcttccagatcttccctagcacggtgttggggagcttggacttcaccatctccttcttggcgttggcgcccgtgatcttgccgttgacaggggacagcgtgtagaagatctcgtcgtaggtgggcttgtccttgcccaccacccactccacgtcgtcgatgccctcgccggccccctcgccgtagccgtgcccgaacggcccgttcatggtgccgtcaaaggcgccgcccttgaccacctgggaaggcatcagggactcctcctgccgcaccatcaccatcagccgcgcgatgtcgttggccagcatgtcatccaccgtgtccagcagcttgggcttcagcgcctggaacttgctgaagtcctgggtctgcaggagttcctgcatcttgcggaggctcgggaagtccccaggggagatctggtgctcgcgctcaatcttctggtagatctctcccaggttgttcaccagctctttctttttgctctctttaccaaagacattgggcatctctttcttgagggagctgatgatgtaggcgtgaaccttggccagccgtgcccgcttgatcaggtcattgagcttcctgagggcggcgtttcggggcagtgactggatgtccttgaagaggtcctgctcctcggcctcaaagagcttgcggttgtcggggatgaggagcgggtgggaccagaaggagccgatgtagaccctgaccacctcgggggtgttgatgatcttgcccagggaccacatgagggccccgtacacccgcatcagctgctgcgtctcgatctggtctgccttgttcagcaccacgcggatcttgtcctcatggttcttcagagccttgatcacttccgagaactcatcggagatgtccagcttgtgggcgtcgaagagcaggatgatgcggtccacacgctccgcgaaccactccaggacggctgcaaagtcatagcctctgctgatccgctgcttctctccagacaggatcccgggggtgtcgatgatgctgatgctgtccaggacggggttgggcagctgggcacacatgaacctgttgaggaaagcgttgccaaacgcgttgagcttgcggaaggggcgccgcgggtccaccacgagcgcgttgcccggcaccacgccctcagtggggccgtgcatgacggcgatgaaggagtcggtggtgggctcgggcccgatgcgcatccccgggaagtcctgctcgatcaggtgtcggatgaaggtggtcttgcccgtgctgtactgccccacgaggagcaccataggcttgttgtcgaagtcagcgtcctccagcgcgggcgagtggaactcgtggaagcggtagtgctcctccaggggtagcagcttctgcgcgtacagctgccgcagcccctcggccaccgtctggaagagctccggctccttcttgcggcgggcatccttgctgacccagctgaacatactgccggacacggggctggctgctgcggggcagagcggcggctgagagcggggcgagggtgcggagccgaggcggggccggccggggcagggaatcgggagcgacccacactgcgcaggcgcacagcccagcccgtcgaagcgcatcccgggaattccggaccggtccagc

SEQ ID NO: 129953 - DNA, 648 bp, Homo Sapiens
ttttttcattctaagagcagtttttatttagaaatgtgcttccacaacttggtggccacctgggggcaggtagccccggcttgcttgttctctctttcctagcccaggaatcgggtccttgggtctaaagcacagggccaagttctcaaggatcaacatcccagacagctcccatggtctggggcttggagctggtatgaagggtgaaccaggttccatcctggactgtttatggttggagggcctgggcccctggcaccaggacctcagctccctctcctagtaagagctgggatcacccacaggccagctgtggccaggtcctggtggatatgacattgggaagaacaaggggctaagagaggctaattttctggtgctggatccagtttatcttcctgaggggtggaagccggggcaggagcctcatccccaccattgagggacttctgctgctcattgctgttgggcgagggggtcctgttgccctgggattcccagcggttcaggcgctttagggaggagtcacggtgggcaagcagagggggctggaactcgtgagaaggagctgctggtgtccggacgcttatctccaggctcaattggaatgcatcagccggttcatctggacattccagtgtttcacga

SEQ ID NO: 129954 - DNA, 1820 bp, Homo Sapiens
ggctttcgccttacacttcttgtgacaacagcaacaccaagagcattttgtcccctccagagcttgcttccatcatcagaagtcagccttgtatgtgggaacagtgtcacagccagtatactgacaggcagctgagaaccacttgctccactgaagcacagcttgctgccagtgtatgccccaggtgggccaggaggaatggagtagacctagatctccttgaccaggactaccagcgaggctgggaaaggacagatcataggtgggtgaggctaggcacttgacttattcaagtaccatacctgaagggttaagtcaatcatacgcccagcttgatttctcaaccagaagcctatccagctggtaaacccccaggtcagtgtagagaacctgggattagagggagatggtagctaggcccaagcaggaggaaaagctccacaggacagccccagggatcaggaacaagtacccaggcagttgggggacacacacaacatcccctaaccactacatgtggccatcacatttagcacccaggacttcctgggctgccagaatggagtcagtcactctgcagaaactgtgggagatgtaaggctctcaccaggaatacgcaactatccaaggtaaagcctttagtcagttccagtgcagccacactgggaggtgactttgcccccggccagccctcttcttggatctcgctgtctgtatggtgggaagatcctcaaagcagcagcccggattctcaataacctccggaggaggaggtctccgtcccaggaagagccctccgccttctccaagtgaaaaacaactcacctcaaacatatttcctctataaaatatctggtttctctgaaagtaataaatatttaccatgttctataaccaaggagcagcaacggggggacaagaggaagagaactttgctgtgactccaagtgacaaaatcctagagattcagggtgccatttttatttcccatggagctgaggacctgagcacaggcagccaccagggctgctcagaccctcccgaccttcaggggtgggagtggttttggagttctgatcttgggtaggcaggcctgtcatattgccagaaatacaggcatagaggcaagaaaaagaagaagaggagaaaaagatagcaggaagtaaaggggacaatgaagagagctaagggactccttccttcttcctcctggcactgtctccttcctctttctgcctccacaccaatctcttggccaccagctggaatgtcaaacagtggatggtgacagcaggcagggaaggggccagctgcaaggcaggcccaggcaggaggccggcagcaggaggaacaggatgacacccttgggaagcagttggtgatgggcagggcacacagatggccctgctgagggctttttcgtacgaaggttcttcccatctccaaggccagcacgtgagtcttctccaactgggcactgggcttgactgccgccacggagtatccaggaggtccaagagtagggacttctgggtccccatgggagaagccagcctcccttccacctggctcagagcaggatgaggggtgggagcagctgatgcatgggaggctgcttatgtctctggggccacaaaaagggggtgctgctagggactcaaggatacttttactgcagggtttccacaaaggcatcaaactcgcggacattcttctcatgcacagccagcttctctggtaatgagtcctgggatggtggggaggtggaaaaagaggtggtacacacttcttgagagtcttctacagacgggcctcgtgcc

SEQ ID NO: 129955 - DNA, 1298 bp, Homo Sapiens
  misc_feature (109)..(133): n is a, c, g, or t
ggaaaccaagctaagggcccatgttccacttaccttactgggggccccgcgcgcccaaagaattggttctagaaaagcctcttggagggcccgaggccggccgacaggnnnnnnnnnnnnnnnnnnnnnnnnnttttgcgtctaacattccctttattgcttacgtcacatattccaatgaatacaataaactcctttttaaaaaagtaaggcacatgaaaagccttttgtgtaagttccatgttattttaaaattcctattggctaataaaagcatttgcactatagaaccagagacatctagaaaagcacatgatagatttttttgcaagcagaatgcctgaaacattacatttacctcatggcacaatgagacagtcaccaaatccaatgtctgcattagaacgatacagctactattacagttgcaaaaccattaatcagcttatccacatatgtacagctgggtccccacgtgacaaaatctaaaggaagaacagcatctaactgcacctgtgctccattccctcacagataggaactgtgacattttggctctttccatgttgtgctgctcttcacgagaggccagggtcatacgatactgaagaccatggacaggtactgttcgtacgacacctgaatccagccgtcctgatccgtgtcgtaacgtctgaatatatccgtcaacctctgcaggacgatgcagccctggatgaagtcgtcgaaggcaatctgcccccgtccctgcctgtcaaactttcgaatgaggatgtcgtggaactggtcagagagccggtagccgaaacctgagagggcctgcttcagctcgttcttatcgatcatcccggagttgtcccggtcgtacgtgcggaagacgttctgccagtccgtgatgtacttccacacacccgtgaactcgctgaagttcacgccggccttgttctcacggtcaaacatggatatgatcgacctgacagtcactggattaaagggagtccacgtgccgttggagagagcttgctgaagctcggtgtctgatatcactccactcctgtctttatcgaccctctggaaaacgttccacaggaagctctggtccggcagcgccgcgcctgcagcaggcccagggccggccccagggccggggcggtaagagtaggcggccatgggccaaggcacgcggctgggctgaggcgcctgcagcgacgagagacctctcaggccgactccgcttccgcctctgccgggggccggacgcgtgggtcgacgatatcccgggaattccggaccggtcc

SEQ ID NO: 129956 - DNA, 787 bp, Homo Sapiens
  misc_feature (132)..(301): n is a, c, g, or t
ttcacacagctcacaatctagtagcgagaggaattacgaaaacatgagcccccacgatgaggaaaaggcgcatatcagagaaaagaaaatgctgcgatgatccaatggcaggagcagcacgcatcccacttnnnnnnnnnnnnnnnnnnnnnnnnnnnnnnnnnnnnnnnnnnnnnnnnnnnnnnnnnnnnnnnnnnnnnnnnnnnnnnnnnnnnnnnnnnnnnnnnnnnnnnnnnnnnnnnnnnnnnnnnnnnnnnnnnnnnnnnnnnnnnnnnnnnnnnnnnnnnnnnnnnnnnnnnnngaaacagggtctcacgatgttgccaaggctggcatcctgaagggcgggtggggcttcatcctggctcggtgaggcactccaagcagtaacagcggtagccacaaaataaaccagaagcatctccaccatgaagcagtattaacaatttgtcctaatgattcctttgtccttggaaaaacaacttcagaaagttatccactgtgaacagggcaggctcacggcttcttggtccggagacccagttcccactggcccactcaccgttggagagagcttgctgaagctcggtgtctgatatcactccactcctgtctttatcgaccctctggaagacgttccacaggaagctctggtcgggcagcgccgcgcccgcagcaggcccagggccgcccggggctggggcggtaggagtaggcagccaagggccaaggcccgccgctgggctgaagcgcctgcggcgactggcgacccctcagagcgacaccg

SEQ ID NO: 129957 - DNA, 1518 bp, Homo Sapiens
tttttaccataatgtaaaaaaaatttattttatagagtggttgatttttgtaatacatcaaaaactgtgatgttatacacttccctattctcattgcttatctcatatcagtggttgaagtttctcccaaataatttagtttacatttaaagtggcaatacagattttacttaatggacttaagttataattagaaaccagttttatatacagaaaatccataaatatagaacttttattcctattttatctttaggctatgcaaaaaatggactaaaaatttttcatttgggtctttgtaataaacatgtaaatacatatttacaatggagatgcttcctgatagaaagtaaacagaagtaattttggtcttcactagaatccatcatatctatttttgaagatgatgtaatacatcatgtttactcaaaatttgattccttttatacacataatttaaataattactccacttttaccattaatgtttcattctgtatttaaatttccttcaagaaagattccttgatccagtagtagggaactctgtttctgtacagttaatgtgtaatttttatccttctggcaatattacaaatactgagtcatttaatcttcattgtttattctccaggggtaattcttgagttatctcacatgatgtaagtaccatctttgcagtatttcatggattccatttgttttgtcatagccagaacatcatgaaatccagtacttaggccagacatatgttgaaagtatgcctccttttccacttgaattgttaaattgtttactccagcatctttaagtattcctgtaacctgctgtactattctttgttctagcacatcagatgtcacctgtatatgaattgttcctgccacaatactagcagaatgacgccaaaaatgagggtctcggtatgatattaatccttcaattttctgtatcttttctaaagcaatatgtagttctttttcatattctggtggcaatctcaggagtagaacctggcaggcatctttaatcagtggaacaacactgagaaatattaatatagcaataaaaagagaacagagtgggtcagcgatgaaccatccaaactgctctataagaactgtggatacgatcacaccaatgctgccaagagtatctgccaaaacatgtagaaatacacccctcatgttagcattcatgcctccacccgcagatccgtggctgtgaccatgcccatggtcactgtgtccatgcatatgatgtgaatggctgtgatcagatgagtgacagcttccttgagaagctccatgggcatggctatgggcatggctaaaggcacagataccaataaggtttactatcagccctccaactgagactggtgttaacatgtgagtgtctaattctggaggatcaatcaatctagccactgactccataaacacaaaaaacgctattactattagaaaaagtccattaataaatccagacagaatttctattcggccgtacccatag

SEQ ID NO: 129958 - DNA, 336 bp, Homo Sapiens
  misc_feature (129)..(180): n is a, c, g, or t
  misc_feature (203)..(223): n is a, c, g, or t
gactaagatgaagtgagccgagaggagatcgtatcataagaatgcttctgtcgttagctgggtgcagtgctgtgtgtatctagttccagctacttgagaggctgaggcaggaggattgcttgagtccannnnnnnnnnnnnnnnnnnnnnnnnnnnnnnnnnnnnnnnnnnnnnnnnnnntggcagaacgagaccctgtctcnnnnnnnnnnnnnnnnnnnnntgcttctgtcagttaacaatctttattagagggtttttagtctttctttctcatctgtatgttaagttggttgacaaatgccaataaacgtctttattatcctttctttctga

SEQ ID NO: 129959 - DNA, 498 bp, Homo Sapiens
  misc_feature (332)..(383): n is a, c, g, or t
  misc_feature (406)..(426): n is a, c, g, or t
agaaaggtgcaggagaacccggggaggaggcccaggctctgctggagggcttcgagggtgagatggacatgaggcctggagatgaagatgcagacgtcctccgggaagagagccgggagtatgaccaggaggagttccgctatgacatggatgagggaaacattaattctgaagaagaagaaactagacagtcagacctccaggactaagatgaagtgagccgagaggagatcgtatcataagaatgcttctgtcgttagccgggtgcagtgctgtgtgtatctagttccagctacttgagaggctgaggcaggaggattgcttgagtccannnnnnnnnnnnnnnnnnnnnnnnnnnnnnnnnnnnnnnnnnnnnnnnnnnntggcagagcgagaccctgtctcnnnnnnnnnnnnnnnnnnnnntgcttctgtcagttaacaatctttattagagggtttttagtctttctttctcagctgtatgttaagttggtt

SEQ ID NO: 129960 - DNA, 770 bp, Homo Sapiens
  misc_feature (71)..(71): n is a, c, g, or t
gaacacccactccagcagtatgtccattagacactaaaactctccaaattatttgtcagggagcctggcanttctgccaagaaggcaggttgttttgcccttagagcctatacagttctcttggagaaattgtctttcaggcaccactgttaatcactgagactgattctaatgcaaagcaggggaagacagaggcagaaaccaggagagtggtagatcagtgcagcccagatatcggaatggaggagcaaagtttcattcacggatgtttgttggaatgctgctgcccaactcttcctttgtcacctctaggctattccactaagttacttataaactggtggctttaactgagggctgtgtacaggtactatttggcatgtgaagtcaggataaatttatcgaatgtccgttttccacatgcaactgtgttacagaagtagtaaaattggaagaatcatgtttatggtgttaccactgatggaaacacacaaacaccaagctaataataaatatataacttaaaaagctaattatatgcactgaaatggtgggaattttagtgatgcagtaattgaggagtctggagttttgtatttggaccaagaattatgagatgaggatctttttctgagtgttctaaagggcttcttgagggggagtggtttaaagcacttcatgaatgatgtgaagaaggtaccttgggctgagacagcattctaggtacagatggcactctgttcaaccaactgtggatggaaaatattctg

SEQ ID NO: 129961 - DNA, 2164 bp, Homo Sapiens
tttttgggcctataagtctcactcaattttattgaaaagtttaagactttaaaagttacaaagtagtattcgccctgcctatattaaccattaacaagcattgtactgttagtgcagctaaagtaattatatcagaaaaacatatcaattgtcattttgtccaccggacagtattgtaaggaaatgatgctgcaagaaaagcagacaaatatggacttcccaacatagggacgtgaagcaggtgtattaaaaataaggatgcatataaaactaagacacaaaatgaatccctgagctgagtttgcatccgaaaacatcacgttcacacttcatttgggtgaaaatgaacaaggacacttctcatgggcaaccacggggctttggcttcacacagatgtgatcaataacgacagtagcgggctccaagagtacattaatctcagaaaaaatagtggtatagtctccacagggatttgcttctcagataagtagaactatggcctgccatgaaattgagagctcatgaatatagatggttgagtgtatcagtcttcaaagcatttaaaacatacttttgtttttgttttatcagtgcaatttgtttttgaagacgccggaaaactatttcatttaacctgagcaattaaaacgtgtcaaatcacagctgtcacagttaggtttgataaaattaattgttagcatccttattactggcacagctgtgatatttctggatttgactatgcacctgctgcaggaaaacatgataaaatgtcatttagatctctaactacaagaccgttagactagagagctctttaaggcaaggacatgaaaactgcgtacttttatacctcgcttaagtcagtgacagatttaccaatgacaacacaattttaaaattccaccacatatattactttgtcctatgaagggcaaaaagtcaatatattttaaattttaaaaacagaatggatataatgacctttttacacatcagtgatatttaaaagacttaaagagacaatactatggttgagacactggcttcctattccagccctaattaaagaaaaaatagctagtatgtttctaattgaaactagagtgaactgggcatcttcaaagttatcattttcttggatataaaaaaacaaaagacctgggaaagaaaaacaagtgttttacagaaatgaagcaaacacattttcacatgacataatcattgacttggtggtacacagctcaagtccagctttcactgatatttcctcattagattaataattttattataaagcctccaaggggcatccaggccccaaatgaagtcaagatgctcccattccggaatgctctcatggaacaccaagttggtgatctgagtcagtaagatattgacgtcgtagacatctgcaagccagtcgtgacccccgctccagactgcagtcggcacaagcatgtccttcacattgtatgtgggaggataactctggttgtaatgaaaataattcttggcactgcttccccagtcaaaggcttgaaacttttggaatttaacagcctggctccagtgtaacatgttttgcacagaagttccagcaggagaatgtgttgtatatacatccactctagacatatttaaatttctctcattaaatccacacagaagaaaacagagatttccacagagctccttcagtatgacatgagtgcaaacgtgggtacccagccacttcaaaaacgcactctggggaagaaattctttgtctccaaataagtccttaatgagatgatctggtaatcgtcctaatttggccatagggctagtacagaaggcgacggaagccacaggacccagggcaaaaaacattttaatccttttagccagctcagggatctgtgaaaatgctataaaacctatagtggtgccttgagaatgacccacataatacacttgttcttggccagttttattcagaatgaagttaatggaagctggtaggtcatattttgccatctcatcataactgaaagcccagaattcatcctgagaaactgagagtgtcttatgtttccgagaccaggtatttcctctgctgttgcccatccacacgtcaaaaccagcatcagcaagaatgaagcccaggctgctgttggcaag

SEQ ID NO: 129962 - DNA, 1422 bp, Homo Sapiens
  misc_feature (164)..(660): n is a, c, g, or t
  misc_feature (678)..(710): n is a, c, g, or t
  misc_feature (967)..(983): n is a, c, g, or t
ttcaacacccattgacgacgcctccccatggatcctacgcttatttggaagcccccttccgaggagaagccgccagttccgtaagcgcagtcgaaccagagaccccgagggactcccagggaaacgctgtatcttatagtccttcgggttccccacctctgacnnnnnnnnnnnnnnnnnnnnnnnnnnnnnnnnnnnnnnnnnnnnnnnnnnnnnnnnnnnnnnnnnnnnnnnnnnnnnnnnnnnnnnnnnnnnnnnnnnnnnnnnnnnnnnnnnnnnnnnnnnnnnnnnnnnnnnnnnnnnnnnnnnnnnnnnnnnnnnnnnnnnnnnnnnnnnnnnnnnnnnnnnnnnnnnnnnnnnnnnnnnnnnnnnnnnnnnnnnnnnnnnnnnnnnnnnnnnnnnnnnnnnnnnnnnnnnnnnnnnnnnnnnnnnnnnnnnnnnnnnnnnnnnnnnnnnnnnnnnnnnnnnnnnnnnnnnnnnnnnnnnnnnnnnnnnnnnnnnnnnnnnnnnnnnnnnnnnnnnnnnnnnnnnnnnnnnnnnnnnnnnnnnnnnnnnnnnnnnnnnnnnnnnnnnnnnnnnnnnnnnnnnnnnnnnnnnnnnnnnnnnnnnnnnnnnnnnnnnnnnnnnnnnnnnnnnnnnnnnnnnnnnnnnnnnnnnnnnaagaattcggcacgaggnnnnnnnnnnnnnnnnnnnnnnnnnnnnnnnnnaaccatagacacatatgttttattttagtaaaaatttcaaattatgactttagtagtctttaaaaggttacaaccatatcacagaccttggcaaagctgcagtgtattaatttttatccccagtttccattctttaaccttcaaggaacgaaaatgaaatcaaaattttaaaacacatgattataagcctttgtatcaactgagaattaagaatttaagtcatgaatctttttcttaataagctacttgacgtaacnnnnnnnnnnnnnnnnngaaatcttactaacctctgtactcttagagtttgaaaaatattgattacagctcttcctacagaatcacggtcaccttcaaaatgctatccacaatataaagaaaattatgaaagtcagaaagcagcttgattgtcagtagtatcagtttccatcttctttaacccatgtgaatgttcaagacatgtggtagaagaaaaggaataatgctatttctaatgttcatgataacaaacactctaggaaaacatttaaagaaactccatgatttcacagttaaaattagagctctattaataaccaacaagctaaggtgttttctatatctcattgctctgtatatttctagcaatttatagagaagtttagcagatctacaagggttttcatcagttaattttcaacattaactaggtcacatgccagaagctgttatacca

SEQ ID NO: 129963 - DNA, 356 bp, Homo Sapiens
aactgaatagtcctagtttatttttatttctcaatacaattattaatagtgcagactctccccctacaaaaacatgttccactttgaataatgaattacacattaccttacctgattggctattatctcctttatggaacattagctaagctttggctgtaaagtggacaaaattagaattattgctgcgattttcctgtaagagtacaggaaaggtggtcaaactggttaaatcaccctgccttttcctttacagaaaaatcacaaacctggcaatataaacaaaatgaggatggcttttaacaatggaagaaccatccctgttcccctgtcttcgttagaatttgctatttgta

SEQ ID NO: 129964 - DNA, 1187 bp, Homo Sapiens
  misc_feature (811)..(829): n is a, c, g, or t
tttgctgatcaagttttaataacgtggttaacaagaaatgtacaccatttagcaagcacacaaagactatgggtaggaactactgatccctggagtgtctggctcccaagcccattttctgcctacctttggcatagcttcatagttactacattcagagaatccaagaggactgcatggacagatgaacctttatttaaaaaaatagcacttcaaataaattaaaagggacaaccgtcaagtgttcaaattgtgaagaaatagttgaaaacctagagagactccaagctgcagtcttctaacctcattctttgtccaatggcaaaaacccacacatctcagtactcccactcaattttttccctactgagatgagggaagcaattgcaaacaggagaccagacggaggagaaagctgcatctgattggaatgaacattgccacgtacttgctaatacgggtttcactttatgaccaaatgtattctttcagaaataaaaaagggggagagggaagctgcatgtttttaaaaattgagattatttagggataaaacactaactctagtgcctttaacgggcaatagcaacttttttcctccgaagtcaaacaccatccccagctgagcctttgtgctacaagcttttcaggagatgttacctaaactttattaaaagaaaagaacaagtttaaatatagacactggactagcccagtctgtattttcaagtccacattcttcatctgaagcactgcatcagggacccccctgagtctgcaagttttcaagttcacagtacatggaaccagnnnnnnnnnnnnnnnnnnncctcactcagagcagccacacacagtggccgttgacgctggaacctcgggcggggccttttcctacaaggcctggccggagctgcccaaggtttctcctcaatgagaatcgatgctgtcatgctctatggatgggaaaaaagcaagaaaataaaagcacctggtacaggtttcatcgagatccattcggattcgctatgttccaaacccgctgctgaacgccatttgtccactttgtgtgtgttgaacagtttgtggccttggagtcagtctcaattagaagaactgttattggacgccccagaggttgatgcaatagcagctccagcagggctacttgtagagactgactttcggac

SEQ ID NO: 129965 - DNA, 828 bp, Homo Sapiens
agaaccacatgaaggtgcacgccagcaagctgggcccactgcgtgccccggggcctgcctccgggcctgcccgcgccccccagcctcctgacctcggcctgctggcctatgagccgttgggcccagcgctcctcttggccccggctcccaccccggccgagcgccgtgagcccccgagcctcttgggctacctgagcctgcgagctggcgagggccggcccaacggcgagggtgctgagcccggtcccggccgcagcttcggaggcttccgcccgctgtcctctgctctcccggcccgggctcgccggcaccgtgcggaggagcctgaggaagaagaggaggtggtggaggccgaggaggaaacctgggcccggggcaggtcgctgggctctctggcttccctgcacccgcgcccgggtgagggaccggggcactctgcctctgctgctggggcccaggcaagatcgaccgccacgcaggaagagaatgggctgttggttggagggacccggcctgaagggggccggggcgccaccggcaaggattgtcctttctgcggaaaatctttccgctcagcacatcacctcaaagtgcatctgcgagtgcacacaggcgagctgccctacaagtgtccgcactgcgactacgcgggcacccagtccggctcgctcaagtattacctacagcgccgctcccgaggagcccccagcgcctccggagttccgctgccaagtgtgcggccagagctttacacagtcttggtttctcaagggccacatgcgtaagcacaaggcctccttcgatcatgcgtgtccggtgtgcggccgc

SEQ ID NO: 129966 - DNA, 1207 bp, Homo Sapiens
gttatcctccctcaaccaccccttaactagaacacagaaaataaaaccaagactggaaggtcccctctacccctcccaggcccagagctagctgactgtgtatgagcctgggagaatgtgtctcctccacagtggctcccagaggttccacacactctctgaagctccttctcccacactgcacctactccttgaggctgaactggtcacagacaaactgggatccagcacagtccagcagttctcaaaatgaggtcctcaggccacagtgcgtgagaacttgcttggctgtttgttaaatgctaattcttgggccccatcagagctactgcatcgaaacctgggggtaaaacccaatattctgcatttcttatcaaactctttgggtgataactaagtgtctgaagaggtgactatttcctgacagaaggacccaaagagggaagcaggacataggtaggcagacagacacagggccctgtgcctcaagacacctgtttattggggacacgactctgcaatagggatgacaggaatcgtaccaaaaatagcgacgtctacagggcccctgatggggctagaagggtacagtgccccccaccctcaccccttgtacaaaaataaactctcacgcctatggaccagcaaagactggcagagtggctcctcaacagggacacaaaccttctctgccagcccagggaccccgttctttgaccctcacctctgccacttctaaggcactgtgactcccttgggctgggtgggtacacgccagcccaccctcctacgcccgccgcgccttccacctctggtccgcctggggctgggatatgggtcccacgctgccccctgctggcttctctacccaactacctctagcgctcccccgctccggcggggtaagctcactaagctaatcgcccctgagggcccactaccgttcttgcccccccagccctgcctctccgggtctggacagcccggagccctcctccccttcctgcgaaggactgggaggggtctctcctgatggtactcgggcatagggcggggacgcgtcagcctggggtggccggcggcccctagcccggcggctgtggtgcacttgaaggtgcaaggccgaggtcaggaggctggggggcgcgggcaggcccggaggcaggccccggggcacgcagtgggcccagcttgctggcgtgcacct

SEQ ID NO: 129967 - DNA, 530 bp, Homo Sapiens
gactggggagagcccgaagctcagggggcatgcaggccacccctgccactgagggtctggcgcggccccaggctccttcatcgtccgccttccgttgcccctactgcaaaggcaagtttcgcacctcggcggagcgcgaacgccacctgcacatcctgcataggccctggaagtgcggcctgtgcagtttcggctccagccaggaggaggagctgctgcaccacagcctgacggcccacggggctcccgagcgtcccctggcggccacctccgctgcgcctccgcctcagcctcagcctcagcctccaccccagcccgaacccagatcagtcccccagccggagccggagccggagcccgaacgtgaggcaaccccgaccccagctcctgccgctcccgaggagcccccagcgcctccggagttccgctgccaagtgtgcggccagagctttacacagtcttggtttctcaagggccacatgcgtaagcacaaggcctccttcgatcatgcgtgtccggtgtgcggccgc

SEQ ID NO: 129968 - DNA, 615 bp, Homo Sapiens
ttttaatctcacctgggatcttagtactacaagtttatttttatgagttagaaatagtatcactcatgagaaacaatgccaaaattattacactaataaattatgttaaaggcctaatgaagaaatacttcaacaactatgaggtaacacgctagctgtaggcatgaggaacgtttatattggctcttctgggtgtatacattaaaagcaaaatcataaaggaatcatgcaaaaatccagttgcccatgcaagcaccccagagtctaatcctctcctctcagttctgttgtcaggccacagtagtgtggagacttgtaggctgctgtccttgttgtaatgaatgggaagaggttgacagtggcatggtcgaaaccttcacctcttcttcccctgctacagggatccctcccagacctgtgttgtgctgtggcgggagattcaagtccaagaaattactatttgaggtggggtttgctgtgtggttcaagtgcatgatgctattgcgtggaaaggccatccaaggatagcgggctgcctggcctggaaaactgaatgaattataaaccgctcggtgctgctgaaattgagggaacctctggggcaagactgaaaag

SEQ ID NO: 129969 - DNA, 830 bp, Homo Sapiens
acatccagtgactggcctacagcaccagaaccacagagcctcttcacatcagaaacaatcccagtatcatcctctacagactggcaagcagcttttggctttggttcttctaaacaaccagaggatgacttgggttttgatccctttcgatgtcactcgaaaagctttagcagacctggttgggaaggaactgtccgttcaagaccaaccttccctttcgcccacatctcttcagaactcctcttcacacactacaaccgccaaaggtccaggctctggattcctgcatcctgctgcagctacaaatgccaattctctcaatagtaccttttcagtcttgccccagaggttccctcaatttcagcagcaccgagcggtttataattcattcagttttccaggccaggcagcccgctatccttggatggcctttccacgcaatagcatcatgcacttgaaccacacagcaaaccccacctcaaatagtaatttcttggacttgaatctcccgccacagcacaacacaggtctgggagggatccctgtagcaggtaggttcatttaaaaccctttgagaatttttgaataactcatattttcaggttgttgggtggatagggaagtaactgttgaataacagagtactaatatcttggaaatgtctatgaaagattagtctttatcataatctaaaatatatttttcattagatggatgccttgtaatattgagctttataaggatggtggagtattatacttagttattgtttggaagcattttacttaataggataattaccaaactttcatatggtatacaaatgcaaa

SEQ ID NO: 129970 - DNA, 1201 bp, Homo Sapiens
atgctaggcaaggagggatgattatttattagcttctacagattagacaatggggtgggggtgggctcaaggtgagatgattttttgggtccaagtctactcaagacaggcatcccagtcttcggtctccaaatccacctcctgtctgtccccccacactgctcctcaggccttgtggatccattgactgtgatttctgtggttcagctcccacatcaggcaggaagggcagctactgggtctgagatcccacattgcctccaacccttgcttcctagctggcctcccagggcaccacgaggggctgggccaggctgctgtgctgcacgtggcaggagtagggggctgtgtcctgcgggggcactgccaccaccacccaggactggtaagtgccatttccattgtgaagaacatctccccgtaactcaggctcctgcacctcgccggcccgagtccagtgcacatcaattttccctgggtagaagtcgtaggccaggcacttcagtttcttcttttctcctggggcctggtggctggtgaccaccacagagggaggatcttgccggtccaggatatttttgctgtatttcaggtatttccgcagagtcgcagggcactcctcctccaggtaagccttggcccgctgcacgtagactggttctgcctcccacttctgcttggttatctgggctgctgggtcgaaggggacccaggctgggatttctttgttgaattcaatgtagtcctttccatcatagtaatatttccagaatgctccgctgcttctgttattctcgatctcacaaccaaaccttccctgcaatacgtgagacccgttactgtcgttgtaatactccacaatgtctttcagggtctccataaagatgtcctccctggccttctgaagttggctgtcctgcttccaatcctccattccttccacctgtctccagagtcccatgggctgagacttcctgtctttactgttgtatctaaagaactggaggtcattgagtgagccaagggcctgaaacgcggggacgtcttcaacatgcttggacagcccagtgtagatataggtcagagagtaacgaccatcttggttctcctgggggacagcaggacccagaagcagcagcagagacagcaggacaggcaccattcttaccattgatcccgggaattccggaccggtccagcc

SEQ ID NO: 129971 - DNA, 788 bp, Homo Sapiens
  misc_feature (73)..(118): n is a, c, g, or t
ccattttacttatactttaattcaaatgggccaagactgattttcatatcttcaggaaaggagagaggaactnnnnnnnnnnnnnnnnnnnnnnnnnnnnnnnnnnnnnnnnnnnnnnattacacttctatgctgaattttgagacctcaaagactttctcattaataaaatgtaagtgtaacagccagaaggagtaatgggaatgaaagcattttaagcaaattgtaaaagggatggggtcgctgaacttcactgacaactcttgtcctggttggcttcactgtccggttccactgggtcaggatggcatttctggccccatcccacttccctggtcccatcagtcgaaactggtatgggctgcaagggccaaagtacacctccagggccaggcggggatcacttgagtttttttcccattttctcatcagtgtcatccatcatttcattcgtggttggcagggtacatgagtttgcaaatactttagcagcccaccaggcttgcaggtctgctgtggggatggcagctccaagggactgaaccaagccaatcacagccaaggttggcttctccattagtggggggaagatgcctttaaacaaggtaacctcattgtttctgcttttcatgatggtctcatcaaggaaggggtaggtataatcatagcctgttgcaaagatgacagagtcgatagcctcaaacatggtcccatcctcaaacacagctgaggtttccgtgaactccttcacactgggcttgatggacagagtgccacacagtagcgaa

SEQ ID NO: 129972 - DNA, 950 bp, Homo Sapiens
  misc_feature (55)..(55): n is a, c, g, or t
  misc_feature (104)..(104): n is a, c, g, or t
  misc_feature (141)..(199): n is a, c, g, or t
  misc_feature (206)..(622): n is a, c, g, or t
  misc_feature (640)..(655): n is a, c, g, or t
ccactggtctacgctgagttgagagccacgctccgaggagaaagcgacagttcgntagcgcagtcgaacagagacccgaggagctccaggggaacgcttgtatntatagtctgtcggttcgccactctgactgagctcgannnnnnnnnnnnnnnnnnnnnnnnnnnnnnnnnnnnnnnnnnnnnnnnnnnnnnnnnnnatctgcnnnnnnnnnnnnnnnnnnnnnnnnnnnnnnnnnnnnnnnnnnnnnnnnnnnnnnnnnnnnnnnnnnnnnnnnnnnnnnnnnnnnnnnnnnnnnnnnnnnnnnnnnnnnnnnnnnnnnnnnnnnnnnnnnnnnnnnnnnnnnnnnnnnnnnnnnnnnnnnnnnnnnnnnnnnnnnnnnnnnnnnnnnnnnnnnnnnnnnnnnnnnnnnnnnnnnnnnnnnnnnnnnnnnnnnnnnnnnnnnnnnnnnnnnnnnnnnnnnnnnnnnnnnnnnnnnnnnnnnnnnnnnnnnnnnnnnnnnnnnnnnnnnnnnnnnnnnnnnnnnnnnnnnnnnnnnnnnnnnnnnnnnnnnnnnnnnnnnnnnnnnnnnnnnnnnnnnnnnnnnnnnnnnnnnnnnnnnnnnnnnnnnnnnnnnnnnnnnaagaattcggcacgaggnnnnnnnnnnnnnnnnatcttccgcttactttatttacttgttttacaaaggcagtgaacaccaaaggatatcaccaacaactaaaaggagttcaaaatgcaggggaaggaaaactagctgaaacttgagtaaaggctcctgtgcggtgtgagcccttgggcccttttcctccacccatcattgagtatataaaggcgcttgtggtggagcgagatggggcgcgttttctttttttgagatggaatttcgcttttgttgcccaggagagcctggaccgtcactgcaacctggctcaaacctttctcttcta

SEQ ID NO: 129973 - DNA, 1911 bp, Homo Sapiens
  misc_feature (1290)..(1299): n is a, c, g, or t
  misc_feature (1515)..(1555): n is a, c, g, or t
tttgcaagacaaaatatactttattgtgacagcaaatgcacatagtgctgtaggtaaggcatgctactaggaatctgcatataatcaaaagccagtatggaaatgaatggaaatgaatgctgttgttctcagattgagtccatggtggagaaaggatagtttgtgtccacttatttcaaatgcagtatcatacctacttaatcagttacctatgcttctaaccaacagcccagtggcaaataggaggaacttaactgtactcagaagtcacttttaatatcaacgacagaaatatttcactaattcaactgaggcaaatttcctttctagacaaaggacctagaaattgagcatgcaaaacatccatccattcattcattcaaataattagccaattttaccgtcatttaattccaccagaagcaaatactagaatatctagaagtagtttgggtaaagaaacatttacattttaatattgtgtaatgtcataaatttggggctaaaataacaccaggtcaaatttgatccctttgtatgtgagggtacaaagtacagttttcgtttcaacagctgaacttctgagagaagagctgaaaaaaatgctaaataagagatctaggcctttgatggaaactattaggctctacagacttgtcaaaaaatcaatgcaaaactgagggggaaaggctgaaatgctttgtaaagcagtatttttagacaagttgcttcatttcccccttgttctaaaacagatgcagattaaatgtttttttgcatgaatgcacattgacattctgttcaactgttttctaaatgcaacactgcgggtttcaacagtatgctttcatttaaacaagaatattatatgcatggtcaatttagtttaagagatgaaaaaaaactttactactatgaaaattgcttatcaaatactctcctcttttataaggtgtttttaaaagcaacacaggacccaaagcatccaactattactttatttatattactatgcttaagttacatggaaaaagacaacccagcagttctgtcccatctcagaaaaagtttccaatcaacaccaattatgtggtgacaaataactaggaatggtgacatctttgggccaagactgacaaggaagaatgggctctggtgctacggttcatctccaacaagaatatggcacaccggccagcacaagccatgctaacactgagcctttagcgctgggcacagattcggatctcttctctgaagctagcaaatcaagtgaaataactgggtttnnnnnnnnnngtttaaaatgaagcccaagtttaaaaaccatactcctaacattttcctttcacaattgacataaaacacactttttcactctaacagcccagatttttttccttacatagctcaccacatagctgcagacagactctgctgcctcaagacgtaaacatagggtaaaaaattaacggcatctgcataatattctctctacacgctgctgttggatgnnnnnnnnnnnnnnnnnnnnnnnnnnnnnnnnnnnnnnnnngttccatcttagattctcacaacctcttgttccgcagttcattaatccgactctgatgctaaggtgacagtgtatgtaagtagatttttgttttcagtgaaggagacctgggaaaagatggatttctctctgtatcttcaagagttatcagatggtacatgctcctcaaagccctcactctctcgaactagagcacgttccaggatcacgcgggcttccttatatcgctggttgtcttcagtggcaaactcatagatccatcccagtttgctattgcagtttttgcagctcacatctcgaaccatgtggcggccagtgagcatgacccgatcttgaacttcactgtactgcaggtt

SEQ ID NO: 129974 - DNA, 758 bp, Homo Sapiens
  misc_feature (657)..(697): n is a, c, g, or t
ggcccaacgcaggagaggcggggccaaggccaggcctgactaaacctggagactcgggtggccgaggggcttcataccagctgaagagcgacaagccgctggcagccgcggatctcaccgccgctcagggtttttagaacttcagccataaaaatgggcagaattttccttgatcatatcggtggtacccgtctgttttcttgtgcaaactgtgatacgatcctgaccaaccgctcagaactcatctccactcgtttcacaggcgccactggcagagcatttctttttaacaaggtagttaacctgcagtacagtgaagttcaagatcgggtcatgctcactggccgccacatggttcgagatgtgagctgcaaaaactgcaatagcaaactgggatggatctatgagtttgccactgaagacagccagcgatataaggaaggccgcgtgatcctggaacgtgctctagttcgagagagtgagggctttgaggagcatgtaccatctgataactcttgaagatacagagagaaatccatcttttcccaggtctccttcactgaaaacaaaaatctacttacatacactgtcaccttagcatcagagtcggattaatgaactgcggaacaagaggttgtgagaatctaagatggaacnnnnnnnnnnnnnnnnnnnnnnnnnnnnnnnnnnnnnnnnncatccaacagcagcgtgtagagagaatattatgcagatgccgttaattttttaccctatgg

SEQ ID NO: 129975 - DNA, 1044 bp, Homo Sapiens
  misc_feature (870)..(905): n is a, c, g, or t
gccggggaaggcagggtggaagggcggcttgagggacgccaggagaagactgaatgccaggctaggaaggaggcggctctcgatcacggggtgggtgcccccgacaccgggtctcctagcttgagttccctagaagcgaaatctgagagggggattctggggcaagtagtttcttgcgggtgagtgttctcagagaaacttaccagatcaagaaagggagctcaggctggatggaggaagccacgcaagtgtggcttcaagatccatcgccttggcctgatcgctgtgggggcaggggcctggagtacgaggggcaccctgggggctcccacccagaagcagaggggctgggctgttgcacctctactggcatcagtctttggttaccccacagccccagtaggaggagagcaggcagagcttgtcatccccagcctggtgtcccgcagtcccaggaagccgcttcttgccttcatggctgagtgctgggaagggctgagctcacccaggccagcaggttggggtatcatcttgctcggtggggccacccacaggtgacagcatggaccctcaggctggctgccctgttccttggtccataactggtgagctgtggagacccagtgcaacaaattatccccagtgatatggggggaggaggggctagaacaagggcccaggggactggaggcaggatggtggctttccctacctgacacagccatgggccagccccaaggccaggctgtctaccctatggccacagcaggaggtcagcccagggccaggagatacatggatggacgagcggtgttccatggagaccccgactttctctaacccagtggctgtgcggtgcaggccactgannnnnnnnnnnnnnnnnnnnnnnnnnnnnnnnnnnnaactgcatgacatgttaactgtgtgcccaggacagccgtggtggggaccgggtatgccaactggaatgattttagaaccaaaataaagttggggcaggaagagggggcttccagggagccctgctcggccctgaatcac

SEQ ID NO: 129976 - DNA, 902 bp, Homo Sapiens
  misc_feature (280)..(280): n is a, c, g, or t
  misc_feature (294)..(303): n is a, c, g, or t
gcagagcgagcaagagggggcgctaagggggcgtcggcggcgcacgagggaggatcgtattcgcggagaggaccggcgaaggggggcggccacgcgccctcgtatcttggggtgtgacaaatgtccggaacccgacgagagcggtcgcaccaggggtcgttccggggagaaagcaacgggggggcccgggtttcggcgtcggctagcgggggcccgcggcgccgaaccgggatggtcttggaaaggttcttgaagggcccgaggcgggccgacgaggganagactcggcccgcnnnnnnnnnnggccaatgtaaaacaagtaaactttatttgggagatggggtgaatccatcactggttactggaaccctgagtctgcattttctcctcaggaaggcggtctgaaatggagtgggctgtgtttggcaagggttgtagtggtttggaatctgcttggctcccgagctgggcctcaggcctgtctccccagagtaaatgcccgggatcattgaggaagcgttggctgcgctggcatgttaggcaggtctgtacggtccagcgctgtcccctgcagcgtctctggcgctgggtgcaggtgaggcccgggacgaggagggaagagcagcctcgacagagagtcctcttcaccgagggatcccgccgcaagacgagccgcttcgcaatggtcctctcagtgtagcagtaaaacctcgccagcgcctggttctcggggtcctgggcaaggacacaatgggcggcctgcgggaggggagcagtcactctgggacgccgagcaccgtccccgtggggcccttgtcgcagactcacctggtacaggaagttgagcctctggaaggcctcgcggtccttcaccggccccgccatcaccgccgcgctccccc

SEQ ID NO: 129977 - DNA, 781 bp, Homo Sapiens
  misc_feature (681)..(681): n is a, c, g, or t
  misc_feature (738)..(738): n is a, c, g, or t
tttaagaaacagaataatttttattgctaggttaatttattacaaagataataatagtctgttgaacttagttacagttaaacacactgtaccgattcaaaatcattatactagtttgatagggaggagggatgggggagtgggctggggttccaggaattggaagtatcagggtggaaataggaactttataccaagccccatgaccagctgtgcttcaagtgagttttaaaattaattggtcccttccctgaagagggtctggctcagaagaaacaggaactggtagagctgcaccctgtccacagtgatccactactaaaaatactcatacctaggaggaccttaaacttctgaatgctggttcagtaaggctccactgtaaaatcaaacatcttttgtggtattcatttttttattgcttgatgtctggaacagttaccgaaactagacctgtatcgcgcatctctactagtgcttgggcctcaaagcagtgctcgtcacctaactgcacaaagaaatgctattaggtccaattatgagataagctgaattataaatacacaattttcagaacgacaggcacttaaagctcattaagtaaaatacaaaaatagattatattaataagaaatatttagtgttcatcaaattgtaaatctaggcttttgccattttttnaaaaggatactggaaactgaaaagagatgacattcatatgaacaatgcatttttcanacttttgttctgagcgctgaacatctaagaattttagcgcatc

SEQ ID NO: 129978 - DNA, 1658 bp, Homo Sapiens
  misc_feature (170)..(170): n is a, c, g, or t
  misc_feature (173)..(176): n is a, c, g, or t
  misc_feature (909)..(920): n is a, c, g, or t
gggcccgagtttccctgggacacaagttaaggccctggttccttttcctagggggccccccgcccccaaagaatggttttagaaaagttttttagggggccagggggggcccacaatttaatttttctacttagattaggtgttgtccccggccgtgtgtggtttgtttnagnnnntttttcccagatgggagcaatttttatttccaaacatgattcagaatagatagatgctttgctacctccacactggattttcactttataaaatatatttgctattaaaatcattcataaaatctaccttccccttcgtagtgggaaataagcaaagtcaaaggttaaaaggtcatgcataaaatagatccaccaagataattatataatagtcttaaattcttcacaaatcaataaaacattaatttatacttcactatacagcacttcaaggtttttctttatatattaatgtttatatttcacagacaattttacaaaaagattatcatttttttcataaaataggaaaagaaagccacagtactaaacaaaaaaaatcaatctgcagagtgtaaacattttttataagaatacaaactaaaagaacaatgaaactcaagtacattatcagaaacagtggttgacctcttttttcctttactcccttttcatctgagagagccttttagagatccggaatcatttgctgtctgcaattactataggctttggctcacaattctggggaaaatgccaattgaaggaaccctgcctatacattttattttctttttcttcgagacagacaacctcaaaataaggtccaaatattggttccttcaaatggtgtcaaaaagaatagtattatatgaggaggatagttatcacagaataagaactaaaatcccannnnnnnnnnnnaggaaaaaaagaccttcgatgatgcaggtgtctgtgtataaggaactatgacctaccagagaaaccaccacataaggagaggccaatataatttgccagtctgacaagacagttggtattataagtggaagagacctcaaggatcacataattcagctctttgattttagagggaggaaagacgaggcccagagatgggaagtggcttgcctaagtacattagcaagttagcttcaatggttatttttatacacacacaggcacacatacatactgttgcattgacttctgttttgtacataaaatgctactggctcatacaatacatcaataagtatgcaacttttcatttgttatttcgttgctggaagtgggaaataccccatcttcccaggagtgaaatggttctactttctctccgtggtgccctgtatcattactcagctctgctgctgctctccgcagcccctaaaagtagcatggatcggggaagaaggaaggacggcaggaaggcaggcagagatcctcaactcaaatcacaattggagtgtcttgttgtgtcaaagatgttcccactggcagtgaagactttacatgaagttaagcttgggctgttgaaacttccagacctggctggaaggaggagatgggggatctaggccaacaccaggtgccagtgtacgcccttcactccgacgcgtggtcgacgatatcccgggatatccggaccgtaccagc

SEQ ID NO: 129979 - DNA, 1104 bp, Homo Sapiens
ggagtcggacttcatctctgcttttcatgaggactccaggtttattgatcatctaatggtgatgtttggtgaaacaccctcttgggacctagagcaaaaatattgccctgataatttggaggtctactttgaggatgaggacagggcagaactataccgggtgcctgccaagagcaccttgctacaggttctacagcaccagaggtactttgtaaaagccctgacaccagcatttttggtctgtgtaggatcctctcctttttgcaagaattttctccgggggagaaaggtgtaccagatacgatgactaagccagggcccctggatctcctcccttaccctcctctgctgggaacctagcacacctgaatcagctggacatactgctggagtccagtgctttctttccgtcaccctggggatagtccttcctggcatcgtggtgggggaggagcctctggcttccctaaactgcagcctctctggctggtcttcactttcctcagttgatataaaactctgggtcttggccatgatgtccttggactccatcgctaaagggaccatctgctgcagttaccacagcacctgacctgagcggcaccctggtctggtggagatggactcaggatccagtgacatgattctgaacttttggtggagtttgaccccttaagagaagctacccctcaaactgcacatctacacacaaacaaacaatgcataggattccaaggctttaaagctgagagaccctggcctcaagttatttcatgcgcacagagggaagccatgtcgggttgctgaagatgccttgaggtgaaatgggggcaggaaagccacatcttgctctgcatttataaagaccgtacaaactgagatccttggtacccctaaaaagattgccaattttcttcatctttgccatatggaggactgtgacagactttggacagtggcctcttgagttcctctgcagttttgacatttaggattttgtgtcttttaaactggaaaatcttctagcatgttgggttgttacagagtatatttttgtctgcagctgtttgttgccccattcctaagaggagtttatccatcctg

SEQ ID NO: 129980 - DNA, 1485 bp, Homo Sapiens
ttctaaattgcattaaaagtgggtttgccttgctaatagcaaaagcatcactaaactcaattatgtattctcttctcagaaacatttgtatctaacataatcagccaaataaagtatttgtcttttgcttttcccctctgtagtttaagttatgcatataatactattacacagatacttaagaagtttttctgtaaccattctatagtgcttcttaaattctttaagtaattttcaaagggctatgggatcccctgtgaattcaaatattttaagatctttaatacaaagaatgtaaagtcatggtttagtatcaagctttgaaacccggtgagacagttagtgagagttttctcccaagtagcatatcatatctcctaaatagcttctttctttatattgatcttattacataagagcctctttgtggtgcctcataatatgctgatttttttctgatggtcttcggaatcccttcttgcagaattcacacctgtgtggatagtcttttgtatgtattgatatcacatgtcgtttaaagccagatgcatctgtagtgctgtattcacaatactcacattggtaaatcttccttccagtatgggtcttcatatgtttttttagctcattttgttgtctgaatcctctcttgcaccttttacatttcaatggctgatctttagtatgaactgaaaggatatggccactaagaataaatggatcggatgttttaaagtcacagtgcctgcactgatgaatcttcctacccttatggatatcactatgctttttgagctcagaaggacgatgaaaacctttatcacagacctcacatttgtgaggaaaatccttagtatggacagatatgatgtgccgcttaaggtcacttgaattggtgctcttatggtcacaatgaggacactggtgtgtcttatgtccttgaaacaaatccagatggcgttgaagctccctctcatcaccaaatgcttggggacaatgctcacatttatatggcaaattgttaccatgtttagacttaatgtgagttttcagatttgattgatctgcacacctgaaaatacaatactgacactgatatggcttctcaccagtatgggttctcatatgtttcttgagttcagaaggatgtcgaaaacccttcccacactcaacacaaacatgaggaaaattcttgctgtgaacggccaacaaatgcctgtttaacagtccttgttctgcagtttcatagtcacagtatttgcacttgtgcatcttcggctccttgtctcttaaaataagtttattggaactcagtggactagcctctctgtatcttcgtgtgtattctgtaaattcatgggttttgtcgactttgtttatgagcttatggctttctaagtggttatggaaactcactttcttgttagttgtaaagtcacaatctgtacactgatatttttttctcattaaatgatcaggatgatt

SEQ ID NO: 129981 - DNA, 707 bp, Homo Sapiens
  misc_feature (651)..(651): n is a, c, g, or t
gcattgggggtggcagtgcactttattaacaaacaaaacagtaccatacaggcaaaatcttacttcagtggcaaagcacacacataggtatactccaacgtgtagcactggggcaaacttcagacatggaacattaggcaccaagttcacaatcacactaaacatagttcacaatccttcaatccatactcttcagtggaggatgaggccttatttaacagttaactgggacagacagatgaagttttaaaatctaattcttggcctaactgtggagtggggctgactcagccttcagaactgtgaagtggatgccttaacagggccaagatctatcagcctcttaaactgactttcatttctctggttcagagaaaaagcttatggtatcttcacgttggatgaacttgcatatcgtgagagtcctcagctccaatttcgtgtctaggcacatctggactggcattcattttgatacccaatccatagattaatagggttaatctaattagaataaattaaatcgttttccaaaaagttgaaaagggtaaatcacatgagttcttcaacattcaagactttaaatatgttagcaaactgattactgttccaactgttgccagttaagaagtttaaatcagcatttcccanaaggtgtgtcaggactgagttaaatcagtaagctatagaaacaactgcaatagact

SEQ ID NO: 129982 - DNA, 1627 bp, Homo Sapiens
tttttttccatctccaaatggttttttattgaacacccactttggctaggcaatatcctccccctgccctctaatccaggctcaggtacccccagtggagtatcctcagaaggcaactcccaagaccaggagtaatgagagattgggcagagggtaagggacagcagggagacggaggaaaatgaagacaccagggaaagaggagaggcctgaactggacagctgatgctttgtcctgcccagcacccattcgtcccttcttcaggtaatatcatctgccaccacaaccaccagcaccaactctcagtctctgtgggtacatgccaggcctgtccatttggtgtattccatcttcctggccacaatgatgacttgaggctggataccttcctcgtctggaccaatgagaaccaaatccagcagttctgtcagcaaaggggagctctttttatcaataactggtgctgtggggccacactgtgaagcccaagaataaagccaactcaaatgaaagcagagctgagagccaaagagacagatccctgtttggagtcctgggatgcagcctgaagcccaatctagcccatccttttcagctacgtgagccattaaattccctctgccccaagtgaactggaaagagtcccaaccaaggtccttcccatctggttgttcttctgggagtattttgaggacaaggagattttcatctccagggttataaaagtaattgtgtggtgacaggctgttcctaggtccctggggtgagagccaccatggagacagagtccagctcgcctttcctaggatacacactcacgactgtcaacacatcttcgaatacatcagcacataattataaactcctattgtttgtagtagctattgtttttgtcttcccaccaccttgttttggatgaagaaaaggtcatgacccagactggattaatcatgtggccaaacatgcatggccacagtgactgatccaagaggacatggaactcacaacaaaccattgagaactttgggagtttccaaattcgaactggaagggaagaaacctttcattcagagcccccaagctaggaggatgcaggtctggagctatcagctgtcatggctccaaatgcacggcgaaggctcatgtgcagcaggaggaaaggaagccaacaaagaggcctggttgagtctgcttgttgtctcccaatggccattcttcccccactcctttttactagcagaatctccttcctcagagttttggctgcccaagtagaaactaaatttacagcctcctttgttgctaactgtggccacatggcaagacagtaggaacctgggtgcctgatgacatcatggaccagccccttgcctggcctggaccagctgactatcactgcactgttatgggagagagaaataaacttggcatcttgtcgaagctatgtattttggtggttttatgtataaacattttaaaaataacaactagaaaggagttctagatggaactagtggcatgattacatacagctgttttgttttgcaaaccccacaactggatatttagcaggagctatcctgaccctcgtgccaattccacaccaggcctcgctacctagcctat

SEQ ID NO: 129983 - DNA, 512 bp, Homo Sapiens
acacttggatcttactgatccagaaatagtccccatagttagagtagttacttatgaagtggttattaaagtgaacacagcacatatacattatctatactgctttttgttatgattaatactgggtatgttctggtaaatccatccttattgtatagaaaaaaaattacttttttaccaggttttccaaagacagaatagatcacaaagctcaaggaatttaatattcttgtaatggactagataattcaaactgattagcccattccagaagaaaaacagctgggaattaagttaatccacttgaaattgttttacaataatcagaacatccaaacctcaaggctcaggatcccatagaccagagcccacctttttgataaacttagtaaagtcttggagactagaagcaagatagtttgtgacacataagcttcccaaaaactagaatagatttttactgaatagtggtatatctgatggtatatgtttcttaaaggtccaaatgtaat

SEQ ID NO: 129984 - DNA, 1037 bp, Homo Sapiens
aaggaaaagagattttgcgttatattttttaaatgaagcaatacaatcattttttatgtatatatctagttgaggagaaaaaattacagattttttcccccttactccaagataatctaaacagattttactctggatggcttaattataacataatccatgaagttatagccagggggttaaataagaagttgatgacaaacttggtttctctaacaagcatgcaagaaaactcaagtgccacaatgaacacccataaactgctgtcaggaggcaaagtccctatgaggtaataataaacccacgaggttaaggcaaaaccctacggttgtttctgcaaacaaatgtccaggaaactcaagtttgtgatgaaagaacagtcttgaattcaacttcagcagaacctttccctccctgggctccaaagcactacgtcacctacctctccactcaaatgccccattaagtaccatcctgttggagcttcctaacgcccctgctccctggtttcatttggaaccaactgagagacacaagtccctcttcgttgatcagggtcagttgaaagatgtagctgtcggcctggtagccaggtgggcttgctaatcctgcacctctaccttaagcttacccagcgtgaggccaggttagaaagtcacaggccttggcagcaggcagagagcctttactgtcatagtgaagagcttgccaaggacaggactgattcttcctccagcctcacctatcggggcagtcattgttccgctgtcaggaggagaggggccagaagggtcacactgaagaaatgtgacatgagggtggaggttcctgtccagcattcttcactctctatttaaccgaggctgactcattgcagttggcactaattttccattgccacagccctctccagccaggagggcctggagtacctgaggtgctgtttgccgggttcccttggtcctcagactgctcccttcagagaaagccgacgcgtgggtcgacgatatcccgggaattccggaccggtaccagcc

SEQ ID NO: 129985 - DNA, 1227 bp, Homo Sapiens
  misc_feature (439)..(625): n is a, c, g, or t
cccctgggtgtgctatcggacgaggctgggtcatctaggagtcgccaacggattcgctgcacacggccatccaggacacaggcctgggccgtcggagtcacggctccttgtgttctcactcagctagttggccaaagctgcatccattaccagtacactcaaactgctcggggtcctggtttctccgtgtttgaatcaggtacagactctcaaaggatacgtgtaaagccaggatgacctctggtgcctggagaagggcgggtttttcagcctagcagccatgatgccctcggaacctggccctatggtatggatgtgaggactacgcactggctgccctgagcccggggctggaaatcatctttggctgccaaggatctggacctattttggagtggagagtcatggttaaaattcccagcccggcccaggtacgggnnnnnnnnnnnnnnnnnnnnnnnnnnnnnnnnnnnnnnnnnnnnnnnnnnnnnnnnnnnnnnnnnnnnnnnnnnnnnnnnnnnnnnnnnnnnnnnnnnnnnnnnnnnnnnnnnnnnnnnnnnnnnnnnnnnnnnnnnnnnnnnnnnnnnnnnnnnnnnnnnnnnnnnnnnnnnnnnnnnnnnnnnnnctcaccgtgtgtgttgctgggtgctggggctgtgacttatcccctctcctttagccttgccataagtgtagtatcctatgaggctgagattgggaaaggttacatgcaggtaagccagtggacgtggccgatgcttcaggctccttccagccaggtccagcagtgttaccatctgcttctcctgggaggacaaaccaggcacccccaccatgaaggggctgcaggcaccatgaactatgttaacaaccccagtctgtactacagaaagggctgcagccacatgagaattcagtccacacaagccccatggccgtgttccccacttcagccacagggctcagggagccccatctggcgctaaggggaactgctggggtgtgggtgacacctggcctttggcgttctgccttggggaggtttctggttttgttacggggtggaagaataggacctgggggtctcggatgcaacctgcagaccccgtggctcacccaaccccaggttctgcctcccagaccagaacgggcatggcctggtccttggcaccgaggtgcctgctctgtaaatatcaagggattacaactttaataataaagcagaac

SEQ ID NO: 129986 - DNA, 678 bp, Homo Sapiens
ttaatggtatgaatctcatttattgaaaacattatttctcacctttctcaaattgaagactgcaaaaaataaaagcagtgctttattgagttgtcatgagcctcgggcgggagcagcagcactgcctctccacgctccgggaaaccgcagctggcgtgtgccacatcggtcccacctcgctttacaaaacagtcctgaagcttaatcaaataaaactattgtacacaacatttacattagaaaaagagagctgggtgtaggaaagccgggcctggtgttccctttaagcgaaggtggctccacagttggggcatcgtcgcttcctcaaggcaaaacagcaaatgaacccaaaggggaagaggatgatggccaggaagatgcccaggaaggtgaagcagtcctccagcaccccaaccctgcagacaggacagcctcctacgaccacgatagagttggcaggatagcgggtgacggtccggctgtggatgttgtagaccctgggatggtgggtgggtatccctgtgacgaggtaggggtagggcggcggcgggggcgcggcggggatggcgccgtagccgtgcgggccgcacgcgtagtcgccctggccggcctccaggttgtaggcgggcggccgctcctgcagcagcggcttgtggtccatggcgggcccggccgggc

SEQ ID NO: 129987 - DNA, 668 bp, Homo Sapiens
aatggtatgaatctcatttattgaagacattatttctcacctttctcaaatttgaagactgcaaaaaataaaagcagtgctttattgagttgtcatgagcctcgggcgggagcagcagcactgcctctccacgctccgggaaaccgcagctggcgtgtgccacatcggtcccacctcgctttacaaaacagtcctgaagcttaatcaaataaaactattgtacacaacatttacattagaaaaagagagctgggtgtaggaaagccgggcctggtgttccctttaagcgaaggtggctccacagttggggcatcgtcgcttcctcaaggcaaaacagcaaatgaacccaaaggggaagaggatgatggccaggaagatgcccaggaaggtgaagcagtcctccagcaccccaaccctgcagacaggacagcctcctacgaccacgatagagttggcaggatagcgggtgacggtccggctgtggatgttgtagaccctgggatggtgggtgggtatccccaggtaccctctccgccaccccttctcctcgcctgcaggcggtgtccacaccgccctctccgctcctgcagaccgggtcctggagggcggccgggcggtccacgggccggtgtcgcgccgccagagagaacgcggcaactcgcttcagc

SEQ ID NO: 129988 - DNA, 378 bp, Homo Sapiens
  misc_feature (239)..(247): n is a, c, g, or t
aatggtatgaatctcatttattgaaaacattatttctcacctttctcaaattgaagactgcaaaaaataaaagcagtgctttattgagttgtcatgagcctcgggcgggagcagcagcactgcctctccacgctccgggaaaccgcagctggcgtgtgccacatcggtcccacctcgctttacaaaacagtcctgaagcttaatcaaataaaactattgtacacaacatttacattagnnnnnnnnngttggcgggtatccctgtgacgaggtaggggtagggcggcggcgggggcgcggcggggatggcgccgtagccgtgcgggccgcacgcgtagtcgccctggccggcctccaggttgtaggcgggcggccgca

SEQ ID NO: 129989 - DNA, 1244 bp, Homo Sapiens
  misc_feature (94)..(121): n is a, c, g, or t
  misc_feature (490)..(521): n is a, c, g, or t
tttttctgattgttttatttgaaaaccctaggatatgtcccctccctcaccacacccaaccccccgcccctgccccaggacatgacgatgcctnnnnnnnnnnnnnnnnnnnnnnnnnnnnaggccgtgagctgcacgcaggaacatgggctgcactcacgacaacattgaaaaaatatacattatatatgtacacccggggcccccacgtcccctcccgtccccgcagcctggccacaccaggtcacggaggaggggccggggctgcaggacctcaggactgcaagggcaggaagggaaacaggacaagaaaggaaggaagttggaaaggagggagaaatggggtccccagactgaaatggaaatgaggtggggcgatcataagagaagcagggacgatggtccagctgagggagccctgcagagggggaaaagcttcccatggacaggagagagaagggaaggggagaggagagggtttccttcaatnnnnnnnnnnnnnnnnnnnnnnnnnnnnnnnnttgcaatcgtcaccctctccccaacacagtgagtgctaagggggcagctgccattgggggtagaaaggcagctgaagtccagcccactttctaacccagccagccccagtgcaaggggcacaccaggagcatgacagcccagaagtgagggatggggggccgggggaggggcagggcggactccagagggcccgctggggttttgaaatgaaaggaggactggttctgaagcctctctccctcttggtctctgtgttcccagaaagtccttctcccatgtctggagtgtctgtttcaccagggcagaattccccctctgcgtggggagaggtgtaggccttagtagcggtgtgggggggtctcgatgatgcgtctctcgtcgctgctgggggaatcggccacctccgagtcactgctgtcctcatcctcctgctggcccccaacagcccccgtcacacaggactgccgattctggtaggactggaggggaggaacagagaggagaagggatgaatggcctgcacacatcccagcctctctttcagggaccacacttccctcggtccccttaacccctgtgtacccccttccctgcctgaacctctctccctccggctcactgcagctttgcgaacagcctccacccaggcctgcccctcctcaggagtcctcaccgtgtgtgctccacagtcttgaccctacagaaccccgcttcccccgcag

SEQ ID NO: 129990 - DNA, 775 bp, Homo Sapiens
  misc_feature (143)..(155): n is a, c, g, or t
  misc_feature (330)..(338): n is a, c, g, or t
aaaataaatatattttattctttgccaggagactccatggaaaaaggtaaacagtatatgaacatagaaagcattgttaaacaaacaatctcaatgtacaaacagagccagtgaaagtacatcacagacttgctaatatatcnnnnnnnnnnnnnttccactagtgcttaaatgagaactaagaaactgacacttgtatctgttaaccactctaccacagctttcactctgcttcatagtgattgaacaaggtcaaaggaggcagattctatgcctgtttctttgggagttgttaatattaattagccccttggcatcaagaaggctggnnnnnnnnntcccaatatcaggcatgaatcaggaaggacactagagttacatggtccaggtggtagaccagcctgctaattatcccatgaaatttccctaatggcttgtgaacaagtaaacaaaaacttaacactgaaaagtgtttctgccttggaggctatcattactgtaaaaaaattttttttaactgtgtagttatgtcattaaacaagtaataaaccacttttaatttaaagtgacattaacaattgaacaaatgacatttgattaactgaactggcagttacactgatacagaattctcttctgctagtgcagggaatttgtatacttttactgggcaccatgaaatacaagatgcagtttgagagcatcagaaagagcacagacaagcttccatactaactaaagtagaatatcttcagccttatcttgtcatactgta

SEQ ID NO: 129991 - DNA, 1487 bp, Homo Sapiens
  misc_feature (28)..(28): n is a, c, g, or t
  misc_feature (128)..(147): n is a, c, g, or t
  misc_feature (434)..(446): n is a, c, g, or t
  misc_feature (454)..(454): n is a, c, g, or t
  misc_feature (1251)..(1251): n is a, c, g, or t
  misc_feature (1273)..(1273): n is a, c, g, or t
  misc_feature (1318)..(1318): n is a, c, g, or t
  misc_feature (1347)..(1347): n is a, c, g, or t
taacaagggtggttaatagccgcggggncaatttaagaggttcattcagtgcctattggggggggagtttacgaggtggagagcgaatggcctttagaggagtttccgaccatgtttttccgattaannnnnnnnnnnnnnnnnnnntaaatttttaatattgaagctcgcgttggaacttccgggtttataggaggccagtgaaagggcctcaagagctgccattctgggatttgtttcggaaccgcttaggttggcggcccggggggtttttttgttgggtgaaggatcgcaagccactagttatggggcccggaatttcctttggaaaacaggttatggccaaggttcgatttacgtactggggcccggggcgccaaacggatggtgtagaaaaactttttgaggggccgagggcggcgggcatgggattnnnnnnnnnnnnnaaggtggnggggacataaatttattaatttatttttagttgtaggaaacatcagaaaaaaagtaaacttgcccagcacttcatagctgtattttgggtttttatcaaattcagctccatttgacataagcaatgattatcttctcaaatacaccacccaccaatttcatagcatcattctttttccccaaagcaagaaatcatatgctgttctcagtgcactccaagccattcattcatttcacctacactctaaaggtacaaagcttcccttctttaaacacacaaggtggcacctatgaagcaggacagagatgaggactgaccattattggttaaggatcaattgcaaccatctgcagaagccaaaagataagattaaaactgccatttgcagtaggggcagcggtgggaccacctttgaatcccgcactcccaaacaggccatgtttcagagtaagaaaagtaatctagaatgccagcctgtctgcacgtcctctgaaaaatggcacatgtcatcctgatcaaagacaccggagggggcacgatacatattcaaatatctttactgactagcgagtctattatttttatttaagagaattttttaaagcactctggggctgattaatttatgcaaagtatttccttaataagaataaaatgaatttaacactgattctgttttcaagtttggaaatgactagggaatggttcaaaattttaccttatttcccacccacttctcaatgggtcttggatttgtgggctttcttaactcgcgcttttttccccaagcatttccnggtagcatacgcacacatttanaggtgatgaaggcactgtcagacgacggcaagaggaaccatcacngtcaaggatgtactggtaccagtgaggtntgggctgcgggcgcagtgtgggcgccctgtgctcatcacaactcacccagacacggcaagtcagcggtccacgggcggtcttgtgaggctgacagggcagagtctcctgtactttgtcatgagacgcttaaagcattcaa

SEQ ID NO: 129992 - DNA, 1146 bp, Homo Sapiens
ctcattaaaaacatgtttattcaatgaaactacatagcactaaaatgagagcttcccaaaatgtaaccagcaattggatctaactaactagggagcttcagaattttaatttaaagataaaaagtgttcacttgtgaaaaatttactattaaaataatttttaaattaagaattttaaaactatacatcaatagtaaaagcgaatgagcaaacttactcacatgcttaaagataaaatttgacagtttcatttgtcttcctattagaacccttaaatcagcctccttcaagcaagtgcagccagcgtgagccaggggacagacactttcagtggaacatttatggctctgagaacagcaccactcttttggggacaagtccatcactggagctccccggcctcctggaattcaggtggcaatgtccaacatccaaactcacagagcctggcattccgatggggaaggacagaaaggctgggaccctctgctgagaagaggctccttttcccaagggaagctcgctgcttcgagtcacacacgtgttgctgttatagggtcctttgctttgacaattcgagagagtattagaaaacactagcggcgtgaggtgactactgacaatcacctcctctgttttctggctcatgattttcctaaagcaaagcctcaggctcccggcttctatttatatccacatgtaaagccccagatcactcgggcacctgcttccattcatggaattctggccagccagtggctgatgcctacacaagcttttcttcaaaaagccccaatttctgacagccatggcagctttccctccacccctattttgccaaacccccaaatcttgcagatttatatccagtgtgagcacggactatgcttcttcccagaaagtagccgcctgcttgcttctttgcattgacatttgcactgctaagaacagccaatccagaaagctataattggtaagcagggcacagagaaattcaaagccaattattagccaaaaaatgggacaaatgccaaacaagacaagagcttcttccacttctgctgtagcagagaaaccaccacgaattcaattgaagcggcgtaactgaaggtccctgggtccacctgtggcctggaggcggccgca

SEQ ID NO: 129993 - DNA, 734 bp, Homo Sapiens
  misc_feature (613)..(613): n is a, c, g, or t
ttttttatatgaatattttaatgcaaaatgcttaacacttaaaattagcaaagcgtcatttaaattaaaattccatttaactaaagatggttaaccccaagaaattgtacagtagttgatttctgctatataatgccagtcctatgccatacaataagaactgcaacattagctgtcacttcctccattgctcttctggaccctaagggatgagggaggggactcagacacaaaacacaacccaaataaactgtgcagtgattcctaatagttataaacccaatctaagttgtccaaacagctgaagaataactgcaggtattgttccagagctgatacgaggttttgcttttacagcctggtaaaagttctgcactaggtgagaagtcacagtttaaggatgcatgttctgtaaatagttactacatatacacatttactgtctgtaaacactagaaatatacattagacagagtaccctcacaagttgggtacagtttaaaaaagaagatgaggtaacatgaatctcaaagtccacaggaatcctgcctgaagagtttgaacagctgcctgtaattcatttccaatgtgcagggagattaaggtttgccanaactggattcactggctttcagcatagcaactgcatctttcactgcatggtagatacattcttcacctgttatttatcttcgtgattggtatgagtctgtgacagatatcggaattcctga

SEQ ID NO: 129994 - DNA, 1701 bp, Homo Sapiens
  misc_feature (102)..(102): n is a, c, g, or t
  misc_feature (1252)..(1252): n is a, c, g, or t
  misc_feature (1263)..(1263): n is a, c, g, or t
  misc_feature (1589)..(1589): n is a, c, g, or t
ctggcggagaaggagtcgctgacggaggacgaggccacccagttcctcaagcagatcctggacggcgttcactacctgccactctaagggcatcgcacactnttgacgtgaagccggaaaacatcatgctgctggacaagaacgtgcccaacccacgaatcaagctcatcgacttcggcatcgcgcacaagatcgaggcggggaacgagttcaagaacatcttcggcaccccggagtttgtggccccagagattgtgaactatgagccgctgggcctggaggcggacatgtggagcatcggtgtcatcacctatatcctcctgagcggtgcatccccgttcctgggcgagaccaagcaggagacgctcaccaacatctcagccgtgaactacgacttcgacgaggagtacttcagcaacaccagcgagctggccaaggacttcattcgccggctgctcgtcaaagatcccaagcggagaatgaccattgcccagagcctggaacattcctggattaaggcgatccggcggcggaacgtgcgtggtgaggacagcggccgcaagcccgagcggcggcgcctgaagaccacgcgtctgaaggagtacaccatcaagtcgcactccagcttgccgcccaacaacagctacgccgacttcgagcgcttctccaaggtgctggaggaggcggcggccgccgaggagggcctgcgcgagctgcagcgcagccggcggctctgccacgaggacgtggaggcgctggccgccatctacgaggagaaggaggcctggtaccgcgaggagagcgacagcctgggccaggacctgcggaggctacggcaggagctgctcaagaccgaggcgctcaagcggcaggcgcaggaggaggccaagggcgcgctgctggggaccagcggcctcaagcgccgcttcagccgcctggagaaccgctacgaggcgctggccaagcaagtagcctccgagatgcgcttcgtgcaggacctcgtgcgcgccctggagcaggagaagctgcagggcgtggagtgcgggctgcgctaggcgcagtgggttgggccaggccccaggacagccggagctcggcctgcggtgggggcgcttcctgtggacgctgcgcctcccatcgcccgggtgcctgtccttgcccagcgccaccaggctggaggcggagtgggaggagctggagccaggcccgtaagttcgcaggcaggggtgggtgtgggacggggctgcttctntacacagcctntacgctggccttcaccttcacccctgcatcgtcggtgaccctgggaccctccaggcagcgtggcctgtggcaccgtgagggttgggacccaccgaggcgcagaggcggcccgaatgcagccctggttcaggcccggaggagggtttgcgggtagttgcacggacaattcggcggggtgctgcctgttgctgccattagcccaggaggaggtcgtgggacggggagggtgggatggacggcggacaggcagtccccacgctgctgggtggcgccgggcttggtggggtcttccactgtgtgcccttctcgccgaggccggtcccccngggtgtggggtgccctgctgcggactcctccgcgagccccatcgtcgcgcctgtggacgcctaggcaagagcggccctctgcagccaagagaaataaaatactggcttccag

SEQ ID NO: 129995 - DNA, 663 bp, Homo Sapiens
ttttttatctggaagccagtattttatttctcttggctgcagagggccgctcttgcctaggcgtccacaggcgcgacgatggggctcgcggaggagtccgcagcagggcaccccacacccgggggaccggcctcggcgagaagggcacacagtggaagaccccaccaagcccggcgccacccagcagcgtggggactgcctgtccgccgtccatcccaccctccccgtcccacgacctcctcctgggctaatggcagcaacaggcagcaccccgccgaattgtgccgtgcaactacccgcaaaccctcctccgggcctgaaccagggctgcattcgggccgcctctgcgcctcggtgggtcccaaccctcacggtgccacaggccacgctgcctggagggtcccagggtcaccgacgatgcaggaatgttccaggctctgggcaatggtcattctccgcttgggatctttgacgagcagccggcgaatgaagtccttggccagctcgctggtgttgctgaagtactcctcgtcgaagtcgtagttcacggctgagatgttggtgagcgtctcctgcttggtctcgcccaggaacggggatgcaccgctcaggaggatataggtgatgacaccgatgctccacatgtccgcctccaggcccagc

SEQ ID NO: 129996 - DNA, 772 bp, Homo Sapiens
tattaatgtcttcatctgcaaatcctgtgggaatgagagagaaatactttcccatctttagccaaagattagatttggggatccagccattgtgtgcatgaatagcatggattttagcaagctgacgagctattagcctgaaaatgactgggttgcagacatgctttggatccagtgcttctccttgtataaattcatagcatagtccattattgaaggtacagtagagttgtggtgcacacccatgagcctgcaacactcgaaaactctttacttcctcatctcgatcgactaataactcagtcttattgccataaattctcaccaggactacatcctccatggtgtttcccacgtaacagccaataagtttatttgtgattccatctgtgaagagctgcagtgtcacctcctgggggtcccagtgaggccgcaggtgttgcaggaggctcagggccccctcccggcagcgatgctcctcctgatcctgaacggtgacgttcagcttgggcacctccggggagccgggagggacgtggatgtaattggccatggcccaggcgacggcggagactaccaccacgacgacggcgacggcgaccacgagaacggcgggcgccgacagactggtggatccttccgtcccggggcgccctcgcgggagggctgggggcgctgggacgggcgggcgagcggcaggagaacgtctggaggcggcactgttgccgatccgggtctggacagcagctgaactgagcccggcccgctctcg

SEQ ID NO: 129997 - DNA, 530 bp, Homo Sapiens
gcctttttcgggctctgcgttctgcacagatactttgagtctccaaggagacttctgcctgttcatttctgctgctgtcagtggcggggtgggggggtggattttgaatgcctcttgggtggtgtctgggatcgttgcaggaaggttctaagggctcaggagtgtgagtggcccaggcacctgcccgtcagcctgtcttctgtgctccgcctgtcgtgggcagccggagcggcggcgcggcggtggtgggagcccaggaccccactgagcccccacgcctgtctcgcagcctgagcggtgcatccccgttcctgggcgagaccaagcaggagacgctcaccaacatctcagccgtgaactacgacttcgacgaggagtacttcagcaacaccagcgagctggccaaggacttcattcgccggctgctcgtcaaagatcccaagcggagaatgaccattgcccagagcctggaacattcctggattaaggcgatccggcggcggaacgtgcgtggtgaggacagcggccgc

SEQ ID NO: 129998 - DNA, 1032 bp, Homo Sapiens
tttttttataaaataatacaaatagtataatccactttataagtttttaaacaaatatacttatgcatagagaaaatctggaaaaatatatgccagctataaagtggttcttgctcatgggataaattgtgggagactttttccctttttgcttctctgtgttgtgatttcctaaagacagggcagtggtgtccctagactgctctggaactgcaggacctaacagcctcactgtgtctgctcacccaagtctgacaggtggcagggcagtgtctgaggcccactgggatgcagacccaggaaagctggggtggggggcttctggtccccatctctgcagcctcatcctctccccagctacacagacccagatggtcactgtcctggaccagatgaaggcaggcacctacaagctcaccttcgacactgagggctactggaggaagagggggcaggaaagcttctacccacatgtggaggtgagagccccagtgggctggagggggctgaggctcatgactcactgggatctgcaggccaggtcctgctggccgggcatcatttaggcagtgggcagactggtcctgggcggtggcaggtaggtgagctcacttgctttgagctcccaaaagacaggtgtccaggcagcaatagactctacgaggacacacccgtcactcacctgcccagggtcatgctttgtgggggaggctgggcaagggtgttcatccctctttgttgacagaggtttcatctgagcaactccactctctgggctaactcactgctcacccaactggagcgccgcagagcgctgactactggctgtggttctgtggatgtcctctggtgggaggtcacccatccaacctcatctggctgtgatcctcaagttgttgggcaatagtggttgtgcatccctaaccctctggcctcactcagtgtttactctgcgatcttgcccagcaatctaagagcgatatcgacatcaacgtctggtgatgttcgcaatcacaaaaacgacaatgacgg

SEQ ID NO: 129999 - DNA, 1366 bp, Homo Sapiens
  misc_feature (1225)..(1284): n is a, c, g, or t
ttagaagagttgggtataaatactttattaaagaaatattgtcattttcgttaaaaaatacattagagaagagagttttgggttaccagtctttcctcacagaatcacagtgtaagatattcatttcttgacgtctctaggaaccttcaggccacggatcagcagaacatacacgaacaagggaaaaaaattcctcttaattttactgatggccccccgtctctcaggtggtctgagagtggcacttggtaaacagtgtgtgtttaatccagcctctgcctctgactacctttaagaccaggactcgaagcagagtgagaggcctccctccacccacctcggggcgagtgaagacacagcttacagaggcgttcaaagtagtgacgcagtgaggtctgaatgaacacggaggattttattactcaccattaatggtagtgaaatgcccttcggtggataccatcaggtgaggtagggaagacattccagaggaaatctgttaatggggcaacgtttttatttctgtacatttacatacaaattttccccaaaggtacaacagatgcgacaccatgcagacacgcagctgtgaacgacagttcagaactcagcgtaagcttgtgctatgaacgagcaccgtcagagaattcccacccacacgtacagaaacacagtttttatattacaacctcaaggacagagggagggaagtgttcgccgctagacatgacacaccatactgcttttccaaaacacacgggacatgaaagcgaggtggtgccttctagacgagaggacagctgtagtgtggacctcccccgcacatgcgatacctcgggccgggcggtgtgacgtcacaggcccacttacggcacttgcagtttgggattgctcatttggctctaggaagtggtggtgtctgagtgcgatacttcccttacgaggtttgtttttgttttctttctgttctgtagccaaaccaatttaccagcccgtcttccagatgcaggtgatcttactctcagtaaacaaaaacatgtaacctttttcctgtttctcttgggtggtaataattttagggcatttgataagagtttgacttcagaaaaagaacaaagtgaagaaatgttcagctccatctcaggtgttcacatttgtgcataacttttattgaaaggctgacagggtaggctagcggaacggaggggtgtgtggaggagagcannnnnnnnnnnnnnnnnnnnnnnnnnnnnnnnnnnnnnnnnnnnnnnnnnnnnnnnnnnntattctgaagatagcgacagtgactctgattctgaaacagactcccagtgatgaagataacaaaaggagagcaaagaaagcc

SEQ ID NO: 130000 - DNA, 807 bp, Homo Sapiens
  misc_feature (730)..(747): n is a, c, g, or t
tttggaaattgaagctgtagagtgctgcccgaaatctctaggaagttggtggcaagggacagcactcacactcttctggtcatgatctctgatctccacctcaaatgacaataaaaaactggtccaacgaagacactgctcagcacttcagccatcaggactaatccatcgatgactggaaaagaggctagctttgaggaaaacagcctgggctcttgggagcagagtccagtgggtgtgaggctgacttgccgacggtcggcaggtaatggctctcagccggcgaggcggtcccacagctctcctcccagggcagcctgaggaggaggaggccgggtgcctgtttggtggcagcttcagcctagggatacctgaagctgttgagcaacacctttatgaaatgttgccagagcagcaacacttgcctgtgggcacagccccgggaaatccggtaccaagtgagcaaggtggcaggacccacccaagcctgatacgcatctgggcccgccgggctcagcaggggaggctgctacggctgcccacttcccagcaccgtctgtcaggcttgaacccctctgtgctgttcccttcctggctaatagggagacccttcgcaggcacccactgtttcaacttgaccctcccaccccctgctactctcctccacacacccctccgttccgctagcctaccctgtcagcctttcaataaaagttatgcacaaatgtgnnnnnnnnnnnnnnnnnngcctacagccgcggccgcaagcttattccctttagttgagggttaattttagcttggcac

SEQ ID NO: 130001 - DNA, 698 bp, Homo Sapiens
  misc_feature (654)..(654): n is a, c, g, or t
  misc_feature (682)..(682): n is a, c, g, or t
tttggttttaaaaaggcaatttattctgcattctgaaatttaagccctttagataccacaaagttaccctcctggccttaagaaagatagctacgtttaagcactctaaactgggatatttatgtttagttacactggtaatttctaatgaatgggataatataactggctatctctttgcaatattttcaatatgtcctggtaaaaattatgcatctaggcatccctaagatgaatttgaaataaacctaaatactactatatatacaattatcccttgcaaatctgtttcctaaaacagatccataaacagatccaatatccttaaagtacatatatatcaagaaaaatgtaccctcactgaaatagaaaaaggcctttatttgtatcattttatgttaaatactggttagttactggtattgataagatctgggcagcagacaactaaccagatatgcattttcacagtatattcagatttcccataaaacttggcaatgtgtattaccagtgaaaatctaaagtttctacttgggaaggaatacccagtgatgggtaatccctcattctgagaacacagtcagaatatcttggagctaccaacattgtgcttggctcttaatgcgaagttttcagggttggggatgtgcntaaaaacttttaaccaatcaatctgcanacattcttacacgttt

SEQ ID NO: 130002 - DNA, 1134 bp, Homo Sapiens
  misc_feature (529)..(529): n is a, c, g, or t
ctgagcatgaaaataatttattgattagacatcttgcttattcaagcattaggcctactggagatagaattaacacagctcatggaaaaggaaaaaaattccattcagcacctgcttcctttcaaatttcctggggacatggtttatgcattttgtactatagactcaccctaaagcatccccatgtgcttgatgttgattaacttgaacaggatatgaaaaactttgtgtacactcaacttggcaaatatcattagcgatgcgacttttggaaacattcttaggcacaagaaatagcactgcctgcagtgaaagtccttgataatcaaagaaaagaatttccattaaatataattttacaaatatgaaagaaaatatatgcatttttgccaacagactgctctacatatcaggaaaaatgtcttaatgagattcctcctacgagattaaaaggttaccttgttaattgacaactttcaattgacactcaggtgattctgtggtattaaaaaaaatcagagaaaaatanaactgatttagcctaaataagatttaggaaaagaaatgcaagcctattaatatggaataatagctgcacttctttggctaagtcattaagaaaatgccaattaaacattttcagtcaaattttatttaaaaaaagcagcagataaacattacaattcaataatctaatctaaatatgcatttgacaatgaagcatatctgagtatggagtgaaaaaggttttccaaaaaaccatcaaatgtattatctccaaatacccaaataataaatcacttctgcaggccttttgttaagtggaatcataaacaaagaactgaagatttattgctgtgaaaacaaatctgtggtacagtagcatgaatcttgggtatttcgcataatcagttaggtcaagtgaagaagtcgaaaatgtgataagaaatttgtgtgtgtgtgcacatgtaaatctgtaagccagttgacccaagagcaactgaaacatctaatttgttcagctgagatcagacattgttaaatttccattttttagaaggcaattaaaaattacaattccaacagcccacaaaccaaacaaaaaaaactgtagagagaaattaaaactatatc

SEQ ID NO: 130003 - DNA, 425 bp, Homo Sapiens
caaacagattttttcaaagctctaattacttccggtggcccttggatgaattgctttagccattcttgtgcctcttctagagatttagtttcatctgaagactgcaagacctcttcaaccattcctatgtttagagcattttttgaatccagtttaagggccccactcaacactttgagagcttgtctacttccgattatttcaactagccgggtggtgccaccccagcttggtattatgcccatctctttgtggacgaatctgatcttactctctggagtcattaacctgtaaaagaaaaaagaaaagcttaattgtaactctctctgtatgctctaatcataaagtactatccattcatgatctgatgtgaattctccatagatctttataggtaggtatattaaaaacaatgtttgaaaaat

SEQ ID NO: 130004 - DNA, 2198 bp, Homo Sapiens
tttttttgttgtagaccacaaaatccacttttatttggtagtttttacatctatggccaaatagtattgggttgacacagtaatctagagtttacctctgaaaaaaagtaatgtgagtctgtctaaccatattttcctaactcaacagtaggatcatgatggtaaggcaaatacaagttatttttaccatgattctcaaatgtgaattgaatgttacagtagcaaatacttttgacctcttgtgatgagtcagaactagaacttaattctttgactttcacattttttaaaaagtgtattgctgggatcataaacattttatgttgtgcatttttattacatttacttttgaaagatagttgttagaaggttagttgtttttcaggaaaaaaaagaaatctgatgtaaaaatgcaaatttatgttgcaggatgcttcatgagtcccttcaagtggtttaaaactacatcaacagtagttgtttattactagttggaaattccagggcacacaaatgaatgtccaattgtagaatcagttgactttccatgtcatggctaccactgtttagtaggtaatttacaatagaaaactaattattgaaaagaacaaagttccaaatttgtagtgggtagtgaggtacatctttttttaaatgaagggccatttcccatgaattttactccagctgtttggagcagaagaaaatgattgatcataccctttcttgttttcttgttccctgatacctccccacttttgttctttagcagcaacactcagttatttggtaaattatttccaggttaaacacgaacaaaaattgtatgaaaagtaacgccaggaataggttttgtatagaagctctccttttaaacactgctctttggttataagctaagaattattattggaattgacagcaataatttttaagccaaaagtgtatattttagctaaatgttccagattacgcagtaaatacccaagtgagtaattggcaagaaatgaggtaaatgagttcagatattcaaatgattaaaagtaagtctgcatattaatagtagccttcaaagtaattctgatgttcatatttaatatcatttaacatttatacatattagtcactggagctttacttggagtacatccacacgaaaaaccaattatttattaaattttcctttcttagcaatagcctctaaatttgcaggcccaccccaaactgttcctaaaagatctctttcgttctgtaatgcttcctccaaatatagctctctgcctgaacaaacagattttttcaaagctctaattacttccggtggcccttggatgaattgctttagccattcttgtgcctcttctagagatttagtttcatctgaagactgcaagacctcttcaaccattcctatgtttagagcattttttgaatccagtttaagggccccactcaacactttgagagcttgtctacttccgattatttcaactagccgggtggtgccaccccagcttggtattatgcccatctctttgtggacgaatctgatcttactctctggagtcattaacctgaaatcacatgctgtagtaaattctgctcctccacccaatgcccaaccttgaaccagcgcaacacttattaaaggaagtctcataaatcttgttaaggtgttttgcatgaacatgcatacggccattccatcctctggagttcctagtgatttcacagcattcagatcagatcctgaagagaaagtattttttgccccacggacaatgaggcctttcccctctgtccaattttccaattcaattactttttccagaagttgtagcatcataacacctgaaaaggcattcattctacttggattgttcagagtaagaatgccaatgccattgtcttccttctgaaggtcaatggatccaccaggaaactgctgaagtgtttttttcacttcttcctcataaaatccatgggatgtactataaagtgacaatcctgtttgatgtagcaattttgtccttccagacagagaggctgtcttcaaaagacttttcgccatttcgtcgcaggccacggtggtgacttccttttccgctcccctacacacgcttttccgttttgcgtgcctttgtttcccccggccgtaatggccgaattcccgggcatatgtccggtaccgtcgactg

SEQ ID NO: 130005 - DNA, 816 bp, Homo Sapiens
  misc_feature (586)..(586): n is a, c, g, or t
  misc_feature (597)..(597): n is a, c, g, or t
  misc_feature (744)..(744): n is a, c, g, or t
  misc_feature (781)..(781): n is a, c, g, or t
gacgaaatggcgaaaagtcttttgaagacagcctctctgtctggaaggacaaaattgctacatcaaacaggattgtcactttatagtacatcccatggattttatgaggaagaagtgaaaaaaacacttcagcagtttcctggtggatccattgaccttcagaaggaagacaatggcattggcattcttactctgaacaatccaagtagaatgaatgccttttcaggtgttatgatgctacaacttctggaaaaagtaattgaattggaaaattggacagaggggaaaggcctcattgtccgtggggcaaaaaaatactttctcttcaggatctgatctgaatgctgtgaaatcactaggaactccagagacttcctttaataagtgttgcgttggttcaaggttgggcattgggtggaggagcagaatttactacagcatgtgatttcaggttcattcctccagagagtaagatcagattcgtccacaaagatatgggcataattccaagctggggtggcaccacccggctagttgcaataatcggaagtagacaagctctcaaagtgttgagtggggcccttanactggattcanaaaatgctctaaacataggaatggttgaagaggtcttgcagtcttcagatgaaactaaatctctagaagaggcacaagaatggctaaagcacttcatccaagggccaccggaagtaattagagcttttgaaaaatctgtttgttcangcagagagctatatttggaggaagcattacagacganagagatcttttaggaacagtttggggtgggcctgc

SEQ ID NO: 130006 - DNA, 497 bp, Homo Sapiens
  misc_feature (416)..(416): n is a, c, g, or t
  misc_feature (479)..(479): n is a, c, g, or t
gcagtaagcgctcaataatagcttttattatcatgttcggctcaaaggcagggaggagtggaacggcatgggagggctgcgggaggcacggcaggggggtcaggggcaagtggcaggagggcggatggggggcagcggtgggcaccggggcagggcgcgctgacctgtcctggggcccgggttgggggcagaaatgagcctgcccacgctgtcccgccacggcaggcgccacgcatcctcgacacagccgccatggcaggccttcgggctccgtctccgggacaggcggtgcagggcaaattggtatgcagcgtccgccccgtgggcccgggagagcctgccccgcagggaccagagcccaaggacgggctcaacactcagtcaaggtggggttgacgacggccagacaacagggngagggaggagggacaagggggtccccacttccagggacgcacaatagcagagccacttacacnctggggagggggcggtgc

SEQ ID NO: 130007 - DNA, 803 bp, Homo Sapiens
cttatctcagatataaaaacactggctagtcttgtttttagtgagtctctatttattaaaaaaatagatgaagtaagggtgaggtcttttttgtcttttagcagtttttcttttgggccaagtccatgataaaaaaccaccatgcaaacagcaaataattctttctaaactggccccatttctgaattaaaaggcttcattcctctttaacccaacagatcttgccattttctccaagctgtacagttccactggccaccagctgaagggctgcaggaaatattttatgttctgctaattttactctttcagaaagagttgcgacagtatcacccctcttcacgggaacagcttcttgcaaaataatctgtccagcatccacatcttcagctacaaagtgtacagtgcacccagtaactgtgactccggtttccagggcttgctcatgggcatttgaacccttaaaagaagggagcaaggatgggtggatattgagcatttttccattccacttttggacaaaggggccagaaagaattctcatgaatcctgcaagacagactatgtctatggagaactcttcaaggactaggtcaattgcactgtcaaattctacacgatttttatacagtttatgattaattactctagtgggaataccagctctttccgctttatctaacccagctactgcggctttgttggagataacaatatcaatttgtgcagagctatttggttcccgagtactgtctataagtgcttgcaggttcgatcctgttccagatattaagacagcactc

SEQ ID NO: 130008 - DNA, 1969 bp, Homo Sapiens
  misc_feature (746)..(746): n is a, c, g, or t
  misc_feature (1308)..(1370): n is a, c, g, or t
ttttaaaattacaaaaggaaatttatttcaaaagcataaggggacatttacatttaaacaagatgataaacaggtgtcttgcaaaagaaaaaaatccatggcattaagtttttcattcaaattcggaagcaaaaataacctaagttgtgcactattgccttaggaaagggaaggggaagggtgagggataagggaacagtcaactcagtatcaaacttgagaaagtaaagtcacttctgctcagttctgagtttacaaatatgcttataaagacaaaaagtggtaaaattatatttaatgttcaaatttatttagctgtagtctctataatttctgtacttgaaatggctttgggccactggctgatctatctctgaggtccagattagctggtcagttttcaaatggcaattttatattcctttgttcagattccaagggagtttaggttcagctcatggtcttttggaatgtttagagattattgccaccactccatagccaagctgaccaacttttgctcacttgtatcattctagcctttcagaactattttccccatacacatgtgcagtaattctaataaaggagttttgcttcttctgcagtgtagaggtaatggtaatgaagacacctgcattggaatcacaaactattcctcagaaaaatacatcagactactagaaatgtcattcaggcagttgatttgaatagcaaacttggggagggaagattaactgtgaaanccaaatatacgaaacattcaaatgcagaacaaagggtctatgctactaaaaatgcccatgacattaaacactccactaaccccccatctgttgttttaacctaaaaattctattggctaacttatacaataattttgattaataacctgagaagttaaaatcttgaaagtggcaaaagcaaaccgagagagcatcccttacttattggtaccatgttatcaagtcactttttctgggtagccctggttattaaatctccaaattgtaaattataccatctcttcctgtagaaacctgtatgtacatcagattcagtattttggttgttatttcaccaacagcaattccaatttatctttgaaaatgcagcctttattcttagttttaaataacaataatcatgtaagtgcaactaacttagaatcccttgctactgggagtaaaaacctaaataacaagttaataacggattcagcctcaaaaggataatcaccgtgtcagactacccgttcctggaatttaaaaagtgatttatgttgtgtagtcaagtttcacagcatgnnnnnnnnnnnnnnnnnnnnnnnnnnnnnnnnnnnnnnnnnnnnnnnnnnnnnnnnnnnnnnntacacatttctattcaaatagtaagattccatattcaaaagtttgtatcacaatatatggaaaagaattaagtaggcggtgcaaagcaacttactttctcctaaaaatgtaatgtcattcctatattttaagaaagctatgtaagtattttgcttttatgacactaggtaggaatgctgcaccactgcccagcagctttattaaacaattaaaacaaaatgttaagattgaccattactcttctccatatattgggtaaaaaactaagagggaagaggaaaatcagtaacctttcaaaactgatgatctttatcagcagaactagactgaatttcattacattttagaatgaacagctctcaacaacaaattatcaagatgtttaaaagattcacaatttgaagtctgaataatgatactgcaaaaacaagtcaagattgcagacaaagcatccaaaaatatcactgtggttttaccttggacacaaccatggtctgttacaaaagtaggtcatacatacaaaggtataaagaacattaagtttttagctgaaggcagcagtctgtttaaagggacatccccggcaatccaatgagtag

SEQ ID NO: 130009 - DNA, 2327 bp, Homo Sapiens
ttttttctagccaatcaacactttatttttcaagtcaacacctgcacagatgttagtgtccacttcctgaccctagtagggggtcccactacacttggatcacccagaggagcagtaaggaagctcctaatctcaagagagagcacatgctcaccaactccagtgctggcgccatgtactgcgggatccctgctctcctgcatcatgaaaggccgggctgaatggggcaaggatgcagtgaaggttacacagactacagtgacctaagagtgtaactactggcctgacccactgccccaggtttactctttacttcccagaccaggagcctccctaaagcttggccagtgcccacgggataggaggagctggcaaaggatggggttgagctgctaaggacaggacacagcagggaaataaagcagaaaggaacacaagacaagagaaaaattataaagtgcctcaactaaacaaccaagtgggacatgagggcagagcagcacaggtccctgaggataggaggaaaaagaaagggccagaccaccagggcttggggcatagtggaatgagaatagagatgaggcagggaggcaagcgcaggctgtgggaaggacttccctagccctgttcacatccactaacccaaatggaaaattatttacaaatttaaaaccaatcctaggcacaggtactgcaccatgcccaggacagcaggcaggcaggcaggcagagggtggaatagctaccatccgacagccagcttccccacacactgccccaccccagagtggtaggcaaaggaggaaacagcaacactcctagccaagaagccctactgtgcctgcagctccttcctcaacggctggctcatggctctgccacggcctgagcttcttggtctgactgtaccagagaatggatgtcgggccccaggggtggagcatcagggggttttggcggtgtctctggctccaagcccagctctgcattcagctgctccagctccccctgatccagcaactcaaagtcctcagtggtgagtgcctcttcttcctcaggggcaggcaggggctggggtgagtcctggggaacaggtgggagaatggaaggggagggggctgggtcacttccaacaaggcaaagtggaggtgacagggtgccgggcagagcagtgaggccaccactcactgtctcggggctcagtgtctccactggtcctccaggggagcatttcactccatcttggggggaccctgccccattgaagtgcgtgttcacaaagtggaggggggatgagagccgcaacaaggtttccttagctgccacatcctcttcctcttcctccgagtccagggcttgccttgacagagcttgaggacggcctagtaggtcttcgggaggggccagctctccctcctctccctcccctaggtcccggcttagggtctcctctggttcacttggcaggctctgctggtccaaatcctcggagacatcagtcagctgcggagttgtggcccgggatacggagaagccaccactctccaagatagaagcctcctcatctgacagctctgagtctgtaatggccaaggccaatgctgttttcttcacatccaccactggggagaagccagccagctctgcctcgctttcactctctgtctctgccagtggctcatcacctcctgggggtgcattcttcccctgacgcttcctcttgtcgtgtttgtgatgcagggcattggcttctgccttcatgctgtagtccagctgcatgagcaggggctccaggcgagtgtacatcctctggatcagctcatgataaaccaccaggggccacagcaggatactcaacaagacaatgtaggaaatcataatccctggaacatagtgtcccaacacagccaacacagcacagccagagcagactcgaacgcagaactgagctggattctgcctcttgtactgcagcagctcctgcaggtgaatctgtcagagtgtggctcctctggggatgatgctgaaacgtcagggagaaagcgaggctgccagagatccagcagaaaataggccaaaagtgagacgctgagtaggaagaagggccggagggacgaggaagacagcaaccttagggagagacaggcacctcagcagtgagtgggtgagacaggctcatgcatccatctcagaaggtggaaaggcgcctactgatggggtaatggcacctccaggcctaactcgcgactcacgactcagagatagcaaaaaatgggcaattcaagcggatgtcagcctgcaaaactggggatgggtcatgccccatc

SEQ ID NO: 130010 - DNA, 767 bp, Homo Sapiens
cagcgtatctcatctccctcccgcctcccccgacacaatacagtttcctgttttctttctttttaaaaacgttgcctgctacctctccatttgggaagcccagggcatgactgctggtgggtggtgacaggcacacagcgggcaaagcccatctttggccagagggaggtgggaggaccagtccctgccacatcctcaatccacagacacccaccagccagcctttactttggcctcccactagagggtagtggggcaagaacaggtggtcccaatggctgggcaatcagcacttctggcgttcccacctggactacctctatacccttctccaattaaaaggaaagtctcactttgggcgggaaaccactattacataagggatggacactacacatttagaatgtggacacttggttagggcagtggaactataaagatagcagccagttttcttccttgccttctcctgaaggtaatcctccctcttactgactgaagctctggttccagctctgctcatgggcaatgcctggctttacagttataaggctgtgctatggactagctgctgactcagctggcagctggcccttcctccggaggagaggacgtgttggggcatggcttactgggcctggcctaccattcccacagggaaccaacgagggagtgagcctgtgagactcagcttgccaccttggccaccacgtgctgccctcatcacaaaaaccacaccaaccactccgaaacgtatctgctggtca

SEQ ID NO: 130011 - DNA, 1023 bp, Homo Sapiens
  misc_feature (667)..(686): n is a, c, g, or t
ttttttttcaagtttaaaacatgtatttaaaatacaatttataaaatgcttaatctgccgactcaggagcccgcggtgcagggtggggtgggagtgggcagctgcccgctacaccagcagagtaagactgcaggggtgcagccctccctcccatgcccttctgttcagacacccaaggggcccatgtgcacccctgggatcacacgaccagaaaacaggaccccagaggtttcttgagtctctgcttaccagggaggctgggtacagccctgccagcccatccctgagcagggcacccccagatggggcagagcagggtatggctgggcagggcagggctgggcggggcagatgggctctggaaggggctgatggtagcagatagggtgttgcctcctgcctgcaggtggggagcaccctgattgagtgggctgagaaaggttggtcaccaggcctggaccccccagctcctttggttataggctgacatcagagtagtggctcatgggaagcggttagctggaaggtctgaggcctggcccatggggtcagggaggagctgggggaaggggacagtaccgtgaaggcagataaaggggcagcagcctcaggtttctgccccccatccccctggggttttccaagccaaagcctgcaacttactttnnnnnnnnnnnnnnnnnnnngcacttaggaaagttacagacaactacccccaaaaaataccctcccacacacaaatccaaccgtttcctcatctccctcccgcctcccccgacacaatacagtttcctgttttctttctttttaaaaacgttgcctgctacctctccatttgggaagcccagggcatgactgctggtgggtggtgacaggcacacagcgggcaaagcccatctttggccagagggaggtgggaggaccagtcctgccacatcctcaatccacagacacccaccagccagcctttactttggcgacgcgtggtcgacgatatcccggatatccggacgcgtaccagcc

SEQ ID NO: 130012 - DNA, 1400 bp, Homo Sapiens
  misc_feature (402)..(423): n is a, c, g, or t
  misc_feature (1138)..(1155): n is a, c, g, or t
tttttgtattgaaagtagcaattttatttgagttaaaattatttacaaaaacccaaagacatacttcatgaaactggtacaaactattttttcctgccgttggcttttgctccaaagatcacagctgagaaatactgtataaaataaaaataggattggattcagaaaagtactctactgttctaatttccaattggtagtatttacagaaatatttacaatggaaaaaaggttactttaaaacttttagttaagtcagcctcaagtaccctaaaatgcagagttctctgagggttaaaaacacacaaatgcactgcagttggtgaagtgattatctcccccaccacctccccccaccaaaatctgcatctctatcagtgctcgacaattagttattatttnnnnnnnnnnnnnnnnnnnnnntgttaaacactgaggtaaatcaattttcaaatgattaccagtgtaacagaaaaatgcagttcgccctgattgttctcatccaaatgttttataatattccttaccatctgccacaagtcaggttcaccaaaaatctgtccctttccctaaatccaatgattaataaatatcaatgtattttgcattttaaaataaaatataactaatttaattttatgggtatcattttagcaatatgtttttaaaagtattttgctaagctagctttaatactcagggcaaatacacatctcccatgggttcccacgttacactggcgtactatgttcttaaaaggtgatggttaggggtttggttgggttagaaggagagaaaaccgtttgcctggaatcagttacttccttacagatttccccaccatctgcattatccaaaataggaagaccatagaaggcagcccctgcatttaaaaacattacagctggccctgataccagagccccgatttgtcactttatacacaggaaataaccaagtctaaatgggtaaaaattagacttttagctattttcccccatacacccccaactaatatttttatggcttcaagttttaccaatcccatgaagaaacatgatgtaactacctgaaaggtatttaaaagtattaatgaaaaagatctctagaaagcctgtattcaggccccaatccaatnnnnnnnnnnnnnnnnnngtataaccagtggtgtgaacaataatacaagaaaaatttgcaatgttatgatattaaatctataaaatgttttgtgttccataactgtttttcaaataactgctctacgaacaaagaatctgaatgaaaaaagggtcttctctaaaccagcatttaaggctttgcgcttatgcaattgatcctgtcactctatagcccggccgtaatggccgaattcccgggcatatgtccggtaccgtcgactg

SEQ ID NO: 130013 - DNA, 861 bp, Homo Sapiens
  misc_feature (758)..(758): n is a, c, g, or t
  misc_feature (779)..(779): n is a, c, g, or t
ttttttacaactgaagagaaagttcctatttattctcaaatgccctgactaaactgctcaaaagcagtttatattttcaaaccaatgtcatgtcctcaacataaagttcaaattcatttactgtccatgacacttaagcatccagatcaataaattacaatacacatattctgtaagagtcttttataccaagaagcttgtttttggtcttcggcagtgacatttcctccccattcaccacacaaacgcagcccgctctcgtaacatgcggacaccaaagcgctgccactctcgctgataaatccacagttcctgtgttgtatccaaacaagccaacactgcccctcctttccatgcaatcagccgggggtccatgtccttaggccttgtgatcacatccacattttcaataattcgcctgaaggatggtggcattttgttgagaattctgtgctgcagaaattcttgagctttatgaaacatcaaaccacctcccaccactaggatggagctgtacatcttctttttggtgtcgtcagatgaacagcagtctatgctatggaggatggctttatccaggcccagggcttttccttcaaacagcgagatggcagtcttcctggacatcagtgcagtgagggcctcctcggaatcgttgccggccatcaggccttcttccctgtgcagaccccaaatctacctcctgggaatggagtctttctggaagatcagaggactggccacgaagatcccttcanatccaataggtttggatgcanactttcggtcagcagtagcttttgcagactgttcttgtttgctctgtgtggccaccacgtaatgttcatcgggaggatcctc

SEQ ID NO: 130014 - DNA, 1361 bp, Homo Sapiens
  misc_feature (484)..(492): n is a, c, g, or t
ttataattccttacccccatttttagaatattcataaattgggtatatctaacatttataataaatatttatggataattttattggcttttaaaaagatactgtaaaattggacatatctcaaaatggagttaatttatatttacaacaaaccttacacttacatcaattatggaattacagggtcacattttaattcctgaattttacagtttagcattaatatcaccacatgtatacaaatggtgtaaaacaagtacagtggtattttttaatacaaaataaacatctgttttatggaaaaaactatacttcatatctacacagacagctcatcttttccaaacaatagccaaaattaaaattaactacaaaatctccaaaacaggggaaactgctttagattaaacgattccaggaaaaatggacccgtaacacattacaagggtgatctaaagattgtggctggaattactgttaaagnnnnnnnnncccaatgcattaaattgtattttggggagatttttctcacttcggcatgatctcagatcatagatgagcaaactaacattaaaatatttacagttaacttgttgctctaaaaataaaacttaactgtttgcctcaatttatttttaaaattcacttacgtatatggaatgtgcttttactcttcttaaaaaagcagctttcatatcacacccttgtttacagaaaagctacatgtgctgcatgctgactttgacacttaagtagcttcttggatcaaaatggcttctagatactaaatgccacttaattcagcactattcttggttggtctgtataagtaacactttaaaacttgcagctctggaaagacagaactttactaacaaagtagaaagtgatttcaaagtatcttccacaaaagattgtactggtaggcggttgacaacattctgttcgatctactttcaaatttctagagaaaatcattttggaatactactgtactgattcttggccttcgttgtctctaaaagtgctgattttaacattatcttaaaactgtccagtttgaattgagcttgttttcatcaatatacatattgaaaattcctggtgtagaaaactcaacatgtgctgaatacggggtgtacttcccttcaactacctaaaaggctgaacttttgttaaatcttaaagaaatggtcccaacagcttaacttcatttttttaatgatagttgaatgtgttttccataaaaattcttttcaaaagaggcaactgattaaaacaacaacatggccagcaccattatacaagtaatgttattgagtttacaactgaagttctgtaaaattgtttcccacgcgtcc

SEQ ID NO: 130015 - DNA, 705 bp, Homo Sapiens
  misc_feature (625)..(625): n is a, c, g, or t
ctttctccaagaaatataatttacgtttacagccagttgttttttcttctctctaaagaaaacattaccatgtgggggccgctgccccaacagtgtccctgagtgtccttggccctggctccctcgtcccgttattgcttggatgaggaagatctggctctgggaattgcagagcaaggcccctctcctcaccccctcggggctgtccctggtgacggagtggaggtacagagtgccagtcccatgccagccaccctggctgtgcccatttaagggaaaggagagtgcaggccgtgggagaggcgctgagcagcctcccagagcagagagcccctctctgcggtgcaggaggccctggaggcacggtggcttcttttcaaacttgacagctggaaggctcaggctatggggtggggagtggagggggagctctctcttcccagcaaggttccaggcacatgctgggaggctgggagaagagaacagaatagggtgggggtgaccccctgccttctgtgccccataccaatctcagggggccgaggagggaggtatgtacgatcagccctgatggaggggtgagggcagcttcggtgttggggccccatctatttccacttctgtnccgggcacagccccactccaagccctgctcctgggccaggccctcctcgcaagggcagtccctgcccacacaggcacgca

SEQ ID NO: 130016 - DNA, 617 bp, Homo Sapiens
  misc_feature (472)..(481): n is a, c, g, or t
ttaaacttaaaaatcagtttatcttaaaatttttttgaattagaagaaattgatttcacatgaaaatataacattctgaaggtaagtattttaaacattacaactgttggctgaaatatttacaaagttataataagcttataactggatgaaagcatctataaaaataaataggcaccctagatgtaaaacttttacatgaaataaaatgattagtatatatgtatcaatctgtatctggagtgttgaatcaacataaaaataaatgggcattttctagtttgtgtagtagtacatgagtcaggaggtttcaactggacagtacttaaaagaggcaaaactggacatttctatttgatatctacaactcaactgagttgaaaagacaaatgtctgagactgctgttaaatacaaaaattagtttaaatgtttcaaataatacatttccaactcacatcttaaccaaatagnnnnnnnnnnctacacaaactgtgaaagctattaaaaaacttgaagcccatttttctagtatcttacaatgttataaaagaagaaaaactttggtattttaaatacaggtttacaaactttacattatttacaaaccctccacact

SEQ ID NO: 130017 - DNA, 1093 bp, Homo Sapiens
  misc_feature (735)..(735): n is a, c, g, or t
  misc_feature (738)..(738): n is a, c, g, or t
  misc_feature (781)..(781): n is a, c, g, or t
  misc_feature (829)..(829): n is a, c, g, or t
  misc_feature (846)..(846): n is a, c, g, or t
  misc_feature (901)..(901): n is a, c, g, or t
  misc_feature (963)..(963): n is a, c, g, or t
  misc_feature (972)..(972): n is a, c, g, or t
  misc_feature (991)..(991): n is a, c, g, or t
  misc_feature (999)..(999): n is a, c, g, or t
tttcaagtttcttcagagtttttaattattattattattttaataacaacctgaatcccagaacttccagatactgtccacactccctcccctgggcagaggagaggaggcacctcaagggaacaagatgggggtggggtgtctgccggggagcctccgactcccccaagccgtctactgctggggggtcccaggagggagggtgggggttggttccctcccagagggggctccctctgacgccccgtcctgaagccctccctcctccatcaaggctggggatgatgaggagatggggcaggggccgggggaccaggccattactgagccttgaactcccaccccggggacacggggacattaaagctgcataggaagagggggcaggcggctgacgcaaggccgggcagccccaaaggcacattgtaagggaagggaggctcagacggagggcccattgggcgcagggggcccaagccgtgggacccccgaggagggcagctgagccagctgctccgggctggccagggcgcgcagcagcccattctcctgctccagcgcagcgttccgctccgccagttcccggatctgctccttcagcacctccacctcctcccggaccgcaaacatgaggtgggacttcaccaagtccatggcttgctcgattttgttgtcaatgccaaccaggcttccggagccactatcatcgtcgctgtctaggtgaccactgatggncancatggagtgggccaggctgaacttctgagctgctactgctccngaggggtctggagattttgtgaacaggctggcatcgtgggtgaagtanagggctggggagctggngcgagagtcaagtgggggcactggcccatctcttctggagcaccaactccatccngcagcgcatgtctacagctttcctccgggacagtggaaggggtctgggccctgagccccccntcgtgcganttcttggctcgaggggcanattcctanaatgagtcgtattaattcgtatcatgtcatactgttcctgtgtgatttgtatcgctcaaattcaacacatagagccggagataagtgtaagctg

SEQ ID NO: 130018 - DNA, 1143 bp, Homo Sapiens
cacccccgggggaaccggggggccattagaccttcaattggaaggaggggggcaggcgggcttagaacaaggcctggccagctcccaaagggcacattgtaagggaaggggaggctcagacggagggcctcattgggcgcaggggggcccaagcccggggaccccccgaggagggcagctgagccagctgctccgggctggccagggcgcgcagcagcccattctcctgctccagcgcagcgttccgctccgccagttcccggatttgctccttcagcacctccacctcctcccggaccgcaaacatgaggtgggacttcaccaagtccatggcttgctcgattttgttgtcaatgccaaccaggcttccggagccactatcatcgtcgctgtctaggtgaccactgatggccaacatggagtgggccaggctgaacttctgagctgctactgctccgaaggggtctggagatttgtgaaccaggctggcatcgtgggtgaagtagagggccggggagctggggcgagagtcaagtgggggcacctgccccatctcttctggagcacccaactccatccgcagccgcatgtctacagctttcctccgggacagtggaggggtcctggcccctgagcccccagcctccgcttccaccctcagagagggcaggggcgtggcagcccgggatgtgcccgcactctcaccggtctcaggctctggggggctgctggtgtggggcgtcggccagtgggggtttctgtgccttgggtttgctgggcactacgaggtcgggctgtccgttccctggggcctcctggccatgggcagtggcgggggcacgcaggcggcgatcagaggctgtcccgtcctctccgggggccgcggctcatcctgccaggcatctccgaggaaagtttgctctccggaaaagaaggaacccgcgcctcctccgaggagcctaggagcggcctctgaagccccaagggtctggagactgatgtgggagggggcggccgagcccccctctgctcccggtggcagccagcgagtgggtgtcccgagtctcctcccgcgtgaccctgctgggtccgtgtctccgctcctcggctcccctgggtctctgcctctccgcggacgcgtgg

SEQ ID NO: 130019 - DNA, 979 bp, Homo Sapiens
ggccagaggaagaggaggcacctcaaggaacaagattgagggtggggtgtcggccggggagcctcgcgagctcgccccaagccgtttactgctggggggtcccaggagggaggtgcggattgggttccctcccagagggggctccctctgacgccccgtcctgaagccctccctcctccatcaaggctggggatgatgaggagatggggcaggggccgggggaccaggccattactgagccttgaactcccaccccggggacacggggacattaaagctgcataggaagagggggcaggcggctgacgcaaggccgggcagccccaaaggcacattgtaagggaagggaggctcagacggagggcccattgggcgcagggggcccaagccgtgggacccccgaggagggcagctgagccagctgctccgggctggccagggcgcgcagcagcccattctcctgctccagcgcagcgttccgctccgccaattcccggatctgctccttcagcacctccacctcctcccggaccgcaaacatgaggtgggacttcaccaagtccatggcttgctcgattttgttgtcaatgccaaccaggcttccggagccactgtgacagtagagaatgagggagaggagggttttgtccatcccctgcgggttgaaggccgctgcccagggcctcccaggccccggtggggcgggggcccagatgtccctcggatgggggatgcaccccggggagagcaaggggaagaggcacagcccctttttcggggcagccccggagccatccccaccactcgggtctcataagacgacaccagggacttgacagagacccctggctgggccatgcccaaggggaaagggtccttagacacccccccaatggagagggatgcagtgaagggaatgcctggggggctcagagccccccgggcagagcagggtctggctggtgccaggcaggcagag

SEQ ID NO: 130020 - DNA, 1038 bp, Homo Sapiens
  misc_feature (129)..(206): n is a, c, g, or t
  misc_feature (216)..(261): n is a, c, g, or t
  misc_feature (498)..(558): n is a, c, g, or t
gaaaggcgggggggcctcccaggtttcctttcaataaacccttcacccaccatgttccaaggggaccgcgggcgaataagggctcctccccaggcccgtggggccagcttccacccacccggaaaaccnnnnnnnnnnnnnnnnnnnnnnnnnnnnnnnnnnnnnnnnnnnnnnnnnnnnnnnnnnnnnnnnnnnnnnnnnnnnnnctccccattnnnnnnnnnnnnnnnnnnnnnnnnnnnnnnnnnnnnnnnnnnnnnnatccgaagccccctgggctcccagggccctcatagtccgtggtgacgctggtgatttggaaactactcttcttcttgcccccgctcatggtccctggggctcagggctgggccaaggttgggggtgggttggggctccttgaaggggctcaggcacccctggaacaagggggccacatggcggggacatccgagcccctggggacgtctgggtccgacatggcaggagggcctggcnnnnnnnnnnnnnnnnnnnnnnnnnnnnnnnnnnnnnnnnnnnnnnnnnnnnnnnnnnnnngagcaggggcaggtttttcctgctgctgttgctgctgaactccagagctgagtttgcaaactctggggcctcggccactgatctgagcctgagggtcccggcgcctaagaggtcgggctgtccgttccctggggcctcctggccatgggcagtggcggggcacgcaggcggcgatcagaggctgtcccgtcctctccgggggccgcggctcatcctgccaggcatctccgaggaaagtttgctctccggaaaagaagaaacccgcgcctcctccgaggagcctaggagcggcctctgaagccccaagggtctggagactgatgtgggagggggcggccgagcccccctctgctcccggtggcagccagcgagtgggtgtcccgagtctcctcccgcgtgaccctgctgggtccgtgtctccgctcctcggctcccctgggtctctgcctctccgtctttcatcccgggaattccggaccg

SEQ ID NO: 130021 - DNA, 1508 bp, Homo Sapiens
aatatgttaagcatatagatttattaaaaataatgctaatataatcctgggcacatggattccaagagagattttgcagcagatttcattatagttacttaacagctaaataataagggtgtatttaacttacttacagagtcactaaataatggaggggaaaggaaagagtagggctaatccagtagagactgaagctggtatcaaccttccctaagcatctgtctggtccgcagcctggggcaaagcttgtctctaaagggttaatgaggccccaaagtgatttttgcactgagctcctcctgcacctaccaaggtgccaaaggcatgagattcagaagagagcagaaccagtttattaaactgttcaaattggtaaaaatgattaaaagctaaagatttccataaacactattccaaaatgttaattttaaaaatgtgactagcaatgtatgcattccctttatgtcccctccctccctatctcttaaaataaatttgaacacccagtgtaaaaaacacttgagggagaaccagaagtcagccatttgagaagagagtggagagggagcagacggcggggagcagatgccggccccgctcgggctgctgacgcaggcttcagtggcactaaatcccccagtaaggcatcaggtgtcgggactcccttctcatagacgtcgggaactatgccataaggtgtctgtaccattttaactgtcgacttcccaaagagctggcgctcgtagtctatcagttgcctccagaagcctacgttgggcctgatgacaggtcgccgggctttcacccagttgtacgcctccagcaggcacacgttgtggaatttcatcaggtacgcgatacacagcgtggctgagcggctcacccctgcagcacagtgcaccaaggtggccccgtgcttcctgctcacactgtggatcttgtcagccacggtgtcaaagtacagtccaatgggggcatgcggcatgtcagccagaggcactttaacatactcaaattggggccagttgaaattagggatctcaatggtagcattaacaatgcaggtgatgccacgagcctggaggaggtgccgattggaggccacactgcctctgcccaggaatagagaggaggtgatttgagcaatgcctcctatgtctccctcggaaatcatccgaggggccatgagagtccttggtagcgtgctgtgacctctggagctcatgaagacgccagcagtcacacttgcatcgttggcggcaagaccagagtgttttattttcctccaccaaggaatccaaaattagagtctccttcttcctcaagagtccagtgtgcgctgcctgggtccggatccagaaagtcctaagtgagcagtgctggtgacagtggatacaaatcaaatcggcgcggcgcggcgcgggttgcggttagggctccgtcctcctgcgcggccaccgcctcgtgccgattcaacacccagcctcgtacctagccgtaagttc

SEQ ID NO: 130022 - DNA, 973 bp, Homo Sapiens
  misc_feature (111)..(127): n is a, c, g, or t
  misc_feature (137)..(258): n is a, c, g, or t
  misc_feature (633)..(660): n is a, c, g, or t
  misc_feature (950)..(950): n is a, c, g, or t
ggggggggttcaaacatccagtaatgccctgggtttttcgtgaagaattgttcccaactttcggtttcccccgggcgccccgccccaaagaaaattctagcaaaagttttnnnnnnnnnnnnnnnnnaaacagtttnnnnnnnnnnnnnnnnnnnnnnnnnnnnnnnnnnnnnnnnnnnnnnnnnnnnnnnnnnnnnnnnnnnnnnnnnnnnnnnnnnnnnnnnnnnnnnnnnnnnnnnnnnnnnnnnnnnnnnnnnngttgctgaccttcacttttatttaaatatagtgatcttttaagagaataaacaaaaaatactttacacagcaaatattttacataaatgtaaacatgcatgtctacttcataattaagcaaaaaaacttttaggcacaagattttaaaaataaagaatgagacaatgaaaccaagactggaataacagaagtaacaaaaactcacatttcctaactcttcaattggtcttgtcttccaacctattggttaaggcctgagtttcagaaatcctaccttccttgccaaatagaaacatccactttggctgtatataacattatccacataacacactaattctctttcaaaataatgtaataaatataccattcatnnnnnnnnnnnnnnnnnnnnnnnnnnnncctgctgaaccagcctctcaaataggaaaataaggattttggaattttcaagttttcctacaaccaaagcacatacacacacattaacaccttacatagaaaaaatgattctgctacagaaataaaatcgttagtgagtggcatgattacaaacctctagttcatttgtattaagtttcttcaatcacaactttactaaggcttactaagcgcctctgacacttcagatttaattaagtttttcatctcatctaaatgacccacagtacagtagacattgtacagcacanaaaaaaggcatttttaataattc

SEQ ID NO: 130023 - DNA, 416 bp, Homo Sapiens
  misc_feature (93)..(154): n is a, c, g, or t
cacaggaaagacaaagcaggagcgtgcacgctctctctttctctctttaattttggtttctctcaagcttccaaatggtgctcagtgctccannnnnnnnnnnnnnnnnnnnnnnnnnnnnnnnnnnnnnnnnnnnnnnnnnnnnnnnnnnnnnatctggaaaaaaagcagcctgacagtccagctgtttgcaaactcatagcacatcctccagttacatggcagaagagggagggagggagggccaaaaagaaaagggagaggaggaagaaaaataacttaaataaacacacacacaaagaaaagagaaggcaacatgacgtgagctggtgatccatgaaggcagggagggaggggaaccgttttacctgtgctgaaccaagggaagaatgcggagagggagggagggaaagggg

SEQ ID NO: 130024 - DNA, 950 bp, Homo Sapiens
  misc_feature (66)..(125): n is a, c, g, or t
  misc_feature (196)..(285): n is a, c, g, or t
  misc_feature (391)..(399): n is a, c, g, or t
  misc_feature (653)..(653): n is a, c, g, or t
  misc_feature (799)..(799): n is a, c, g, or t
cacgctctctctttctctctttaattttggtttctctcaagcttccaaatggtgctcagtgctccnnnnnnnnnnnnnnnnnnnnnnnnnnnnnnnnnnnnnnnnnnnnnnnnnnnnnnnnnnnnaacatctggaaaaaaagcagcctgacagtccagctgtttgcaaactcatagcacatcctccagttacatgnnnnnnnnnnnnnnnnnnnnnnnnnnnnnnnnnnnnnnnnnnnnnnnnnnnnnnnnnnnnnnnnnnnnnnnnnnnnnnnnnnnnnnnnnngcaacatgacgtgagctggtgatccatgaaggcagggagggaggggaaccgttttacctgtgctgaaccaagggaagaatgcggagagggagggagggaaaggggnnnnnnnnntcagaagaaacactgggggcagagggaggagtgaaaggcggacacagatgagcctgcagaccatgcccccaaccctccgctgcccatcccctcctccccaatcccatccctctgaggcaaaaaataaaaacgtagaaaaatctctgtacagactccccggtgggaaaacgggggcagggatggtggctcttcctggagcgcactccccacaaataaatttacaacccaagtccacggctcaaaacaaatccgcnaggcacgctgggggctgacccctgccccgccctctcgctgggtgtcagaggctgaactgcgcaggctgggcggcatcatgctgaactgcgcaggctgagcggatcatgtggagtgtcgggccgctcgtgcgaatctggctcgaggncaatcctaagtgatctataattctatcagtcaagtgttcctgtgtaatgtatcgctcaaatccaacaatagagcgggacataatgtaagctgggtgctatgatgactaccaattatgcgtggctatgccgctttcatcggaactgtctgca

SEQ ID NO: 130025 - DNA, 1245 bp, Homo Sapiens
  misc_feature (1106)..(1140): n is a, c, g, or t
  misc_feature (1215)..(1215): n is a, c, g, or t
agtggtataactatatttattgtgcctgagaggcaagggtgagggaaaaatctcaacagaagcaagtttggggaaaatctggagtccccagtaaaaagcaggaaggtctctgctgtactcatcacagaatgggagagagggctctcaatagatcattccctttgtttctcccctgggcttcttgagcttctcgaagttcttcaggatgatgtcatataacacagcataagcattgcggatctccatgaccatcagccggatgtcccggtactctgcctcatccagctcgtgcaccagctgccgataatcaccctaccacatggggctgcttggctgctttagtcactgcatcaccacgctcagagaaatacttagagatttgagtgtggaagccttctagcttggtgtggaggctggtcatcagctcaaacaccttctcctagggaaaaaaagcaagggggaaagtggaaggaagcatggactagaaaagagcagggaagtggggcagcgctctcacctggacagccactccaaaattgttaccatcctcaatccgaggtatctgcagctgcaaccaggtggtgaccaggttgagctgctcaatgacatccttgatctcaggcttcaagcgctgcagaaggaccacgatcttttcattgcagttcactgggccacagggaggacctttgtcttcatcctcccccttcttcttgttcatccttgtcttccttctcctgctgtttcttccgctcctctttctctttctccttgactggatcaggcactgggatgtccaatggggccttcagattgctcaagttggcttcattgagagctggctcctttaaaaatgcatccagctcagaaatcttcttggggaaatagctcccgagcaggttctctgtcttggtacagaggtcttcacgaaacacatccaccttggcttgggcctcgggctggaccctgagcatggccatgaccgggacggggggcctagcgccgcacaaggagtggagtgggcaccgcgaagggaaagcagaaagcaggtagggcccccggcacgtaatggccgaattcccgggcatatgtccggtaccgtcgactgnnnnnnnnnnnnnnnnnnnnnnnnnnnnnnnnnnncgccgcttcctcgctcacagactcgctgcgctcgtcggtttcagggctaaagaaaaaacagccgggggagggggncgcctattattgagtctatacagttctctt

SEQ ID NO: 130026 - DNA, 1029 bp, Homo Sapiens
  misc_feature (772)..(772): n is a, c, g, or t
  misc_feature (802)..(802): n is a, c, g, or t
  misc_feature (852)..(852): n is a, c, g, or t
  misc_feature (915)..(915): n is a, c, g, or t
  misc_feature (932)..(932): n is a, c, g, or t
  misc_feature (941)..(941): n is a, c, g, or t
  misc_feature (975)..(975): n is a, c, g, or t
ttttggcagtggtataactatatttattgtgcctgagaggcaaggtgagggaaaaatctcaacagaagcaagtttggggaaaatctggagtccccagtaaaaagcaggaaggtctctgctgtactcatcacagaatgggagagagggctctcaatagatcattccctttgtttctcccctgggcttcttgagcttctcgaagttcttcaggatgatgtcatataacacagcataagcattgcggatctccatgaccatcagccggatgtcccggtactctgcctcatccagctcgtgcaccagctgccgataatcacccacatggggctgcttggctgctttagtcactgcatcaccacgctcagagaaatacttagagatttgagtgtggaagccttctagcttggtgtggaggctggtcatcagctcaaacaccttctcctggacagccactccaaaattgttaccatcctcaatccgaggtatctgcagctgcaaccaggtggtgaccaggttgagctgctcaatgacatccttgatctcaggcttcaagcgctgcagaaggaccacgatcttttcattgcagttcactgggccacagggaggacctttgtcttcatcctcccccttcttcttttcatccttgtcttccttctcctgctgtttcttccgctcctctttctctttctccttgactggatcaggcactgggatgtccaatgggggcttcagattgctcaagttggcttcattgagagctggctccttttanaatgcatccagctcaagaatctttcttggngaaatagctcccgagcaagttctctgtcttggtacagaggtcttcacganaacatccactttggcttgggctcgggctggacctgagcatggcatgacgggacggggggctancgcgcacaagagtggantgggacccntcgttgcgatcttggctcgagggcaatcctatangagtcgtataattcgtatcatgcaagctgttctggtggaatgtttcgccaaatc

SEQ ID NO: 130027 - DNA, 995 bp, Homo Sapiens
  misc_feature (230)..(230): n is a, c, g, or t
  misc_feature (879)..(913): n is a, c, g, or t
agtttttcttccccctgggggctttcttggagctttctttcgaaagttcctttcagggattgatgttcatattaaccacagccataaggcatttgcggatctcccatgaaccatcaagcccggatgtccccggtacttctgcctcatccaggctcgtgcacccagctgcccgataatcaccccaccatgggggctgcttggctgctttagtcactgcatcaccacgctcnagagaaatacttagagatttgagtgtggaagccttctagcttggtgtggaggctggtcatcagctcaaacaccttctcctggacagccactccaaaattgttaccatcctcaatccgaggtatctgcagctgcaaccaggtggtgaccaggttgagctgctcaatgacatccttgatctcaggcttcaagcgctgcagaaggaccacgatcttttcattgcagttcactgggccacagggaggacctttgtcttcatcctcccccttcttcttttcatccttgtcttccttctcctgctgtttcttccgctcctctttctctttctccttgactggatcaggcactgggatgtccaatggggccttcagattgctcaagttggcttcattgagagctggctcctttaaaaatgcatccagctcagaaatcttcttggggaaatagctcccgagcaggttctctgtcttggtacagaggtcttcacgaaacacatccaccttggcttgggcctcgggctggaccctgagcatggccatgaccgggacggggggcctagcgccgcacaaggagtggagtgggcaccgcgaagggaaagcccccggccgtaatggccgaattcccgggcatatgtccggtaccgtcgactgnnnnnnnnnnnnnnnnnnnnnnnnnnnnnnnnnnncggccgcttcctcgctcactactcgctgcgctcgtcgttcgatacaggccgagctagggccctatagtgagttatactattt

SEQ ID NO: 130028 - DNA, 930 bp, Homo Sapiens
aggtaaaaaaagcccaggaaagggttctctggcctgtactcattcaccagaaatgggaggagaggggctctccaatagatccattcccttctgtttctccccggggcttctggagcttctcgaagttctccaggatgatgtcatataacacagcataagcattgcggatctccatgaccatcagccggatgtcccggtactctgcctcatccaggctcggtgcaccagctgccgataatcacccacatggggctgcttggctgctttagtcactgcatcaccacgctcagagaaatacttagagatttgagtgtggaagccttctagcttggtgtggaggctggtcatcagctcaaacaccttctcctggacagccactccaaaattgttaccatcctcaatccgaggtatctgcagctgcaaccaggtggtgaccaggttgagctgctcaatgacatccttgatctcaggcttcaagcgctgcagaaggaccacgatcttttcattgcagttcactgggccacagggaggacctttgtcttcatcctcccccttcttcttttcatccttgtcttccttctcctgctgtttcttccgctcctctttctctttctccttgactggatcaggcactgggatgtccaatggggccttcagattgctcaagttggcttcattgagagctggctcctttaaaaatgcatccagctcagaaatcttcttggggaaatagctcccgagcaggttctctgtcttggtacagaggtcttcacgaaacacatccaccttggcttgggcctcgggctggaccctgagcatggccatgaccgggacggggggcctagcgccgcacaaggagtggagtgggcaccgcgaaggccccggccgtaatggccgaattcccgggcatatgtccggtaccgtcgactg

SEQ ID NO: 130029 - DNA, 1156 bp, Homo Sapiens
  misc_feature (25)..(25): n is a, c, g, or t
  misc_feature (123)..(123): n is a, c, g, or t
  misc_feature (125)..(125): n is a, c, g, or t
  misc_feature (127)..(130): n is a, c, g, or t
ttttacccttaatgggggccgcggncgcccgcacaaacgcagaatggtgtttaaaaaaggcttttttggagggcgcgcgagggccggcccgaacaggggaatgggtggggacgcgccggggtntngnnnnaggcgggggtataactgatagttaattgtgcctggagaggccaaggtgaggggaaaaatctcaacagaagcaagttgggggaaaatctggagtccgcagtaaaaagcaggaaggtctttgctgtactcatcacagaatgggagagagggctctcaatagatcattcccttggtttctcccctgggcttcttgagcttctcgaagttcttcaggatgatgtcatataacacagcataagcattgcggatctccatgaccatcagccggatgtcccggtactctgcctcatccagctcgtgcaccagctgccgataatcacccacatggggctgcttggctgctttagtcactgcatcaccacgctcagagaaatacttagagatttgagtgtggaagccttctagcttggtgtggaggctggtcatcagctcaaacaccttctcctggacagccactccaaaattgttaccatcctcaatccgaggtatctgcagctgcaaccaggtggtgaccaggttgagctgctcaatgacatccttgatctcaggcttcaagcgctgcagaaggaccacgatcttttcattgcagttcactgggccacagggaggacctttgtcttcatcctcccccttcttcttttcatccttgtcttccttctcctgctgtttcttccgctcctctttctctttctccttgactggatcaggcactgggatgtccaatggggccttcagattgctcaagttggcttcattgagagctggctcctttaaaaatgcatccagctcagaaatcttcttggggaaatagctcccgagcaggttctctgtcttggtacagaggtcttcacgaaacacatccaccttggcttgggcctcgggctggaccctgagcatggccatgaccgggacggggggcctagcgccgcacaaggagtggagtgggcaccgcgaagggaaagcgaaagcggtagggcgctcgcacccagctccgcccggacgcgtggtcgacgatatcccgggaatt

SEQ ID NO: 130030 - DNA, 875 bp, Homo Sapiens
gctctcaatagatcattcccttgtgtctcccctggcttcttgagctttctcgaagttcttcaggatgagtgtcatataacacagcataagcattgcggatcctccatgaccatcagccggatgtcccggtactctgcctcatccagctcgtgcacccagctgccgataatcacccacatggggctgcttggctgctttagtccactgcatcaccacgctcagagaaatacttagagatttgagtgtggaagccttctagcttggtgtggaggctggtcatcagctcaaacaccttctcctggacagccactccaaaattgttaccatcctcaatccgaggtatctgcagctgcaaccaggtggtgaccaggttgagctgctcaatgacatccttgatctcaggcttcaagcgctgcagaaggaccacgatcttttcattgcagttcactgggccacagggaggacctttgtcttcatcctcccccttcttcttttcatccttgtcttccttctcctgctgtttcttccgctcctctttctctttctccttgactggatcaggcactgggatgtccaatggggccttcagattgctcaagttggcttcattgagagctggctcctttaaaaatgcatccagctcagaaatcttcttggggaaatagctcccgagcaggttctctgtcttggtacagaggtcttcacgaaacacatccaccttggcttgggcctcgggctggaccctgagcatggccatgaccgggacggggggcctagcgcccgacgcgtgggtcgacgatatcccgggaattccggaccgtaccagccctgcttttttgtaaccaacttgttctataggtttcaccaattagctt

SEQ ID NO: 130031 - DNA, 851 bp, Homo Sapiens
  misc_feature (534)..(595): n is a, c, g, or t
ttcgcttactccttcccaaaatggggagaagagggttctcaattagatcatttgccctttttttcttcccctgggctttatggaatttcttgaaagtttttccaggaggaggtcatataaccccagccataggcctttggggattttccatgccaataagccgggatttcccgggtattttgcctcatccaagttggtgcgccaggttgccgataatccacccacatggggctgcttagctggctttagttcctgcatcaccacgctcagatagaatacttagagatttgagtgtggaagccttttagcttggtgtggaggctggtcatcagctcaaacactttctgctggacagccactccaaaattgttaccatgctgtatgcgaggtatctgcagctgcaaccaggtggtgaccaggttgagctgctcaatgacatccttgatctcaggcttcaagcgctgcagaaggaccacgatcttttcattgcagttcactgggccacagggaggacctttgtcttcatcctccccnnnnnnnnnnnnnnnnnnnnnnnnnnnnnnnnnnnnnnnnnnnnnnnnnnnnnnnnnnnnnnccttgactggatcaggcactgggatgtccaatggggccttcagattgctcaagttggcttcattgagagctggctcctttaaaaatgcatccagctcagaaatcttcttggggaaatagctcccgagcaggttctctgtcttggtacagaggtcttcacgaaacacatccaccttggcttgggcctcgggctggaccctgagcatggccatgaccgggacggggggcctagcgccgcacaaggagtggagtggccc

SEQ ID NO: 130032 - DNA, 720 bp, Homo Sapiens
  misc_feature (560)..(560): n is a, c, g, or t
ttttttagtggtataactatatttattgtgcctgagaggcaaggtgagggaaaaatctcaacagaagcaagtttggggaaaatctggagtccccagtaaaaagcaggaaggtctctgctgtactcatcacagaatgggagagagggctctcaatagatcattccctttgtttctcccctgggcttcttgagcttctcgaagttcttcaggatgatgtcatataacacagcataagcattgcggatctccatgaccatcagccggatgtcccggtactctgcctcatccagctcgtgcaccagctgccgataatcacccacatggggctgcttggctgctttagtcactgcatcaccacgctcagagaaatacttagagatttgagtgtggaagccttctagcttggtgtggaggctggtcatcagctcaaacaccttctcctggacagccactccaaaattgttaccatcctcaatccgaggtatctgcagctgcacccaggtggtgaccaggttgagctgctcaatgacatccttgatctcaggcttcaagcgctgcanaaggaccacgatctttttcattgcagtcactgggccacaaggaggacccttgtcttcatcctgccccttcttctttcatgctagtctccttctactgctggttctgcggttctctttctcttctccttgactgatcaggcactgggagttcaatggggcc

SEQ ID NO: 130033 - DNA, 740 bp, Homo Sapiens
tttttcaaagacagacagacacagtttatttataaaccaaagaggccaggagcctactagccacccccatccccttccctcttcctgagcacagacatggctcccccacctcctcacaaggtttttggtacaaactgtggtttggcctagagcatccctaaggaccctggtggggcagggtaccctctgctcccaccacctgggatgtgctggggaacgtggagtggggcagcctgatattgatatcccgcggccccggccagggctctggagctgctcttccctgggctctgcagcttggggtcctgggccacctcagacgcaggcccgaggttgggctggggaggagggggtcacccgtccacatcccagctgaagaggtggtgcttcaccagcatgtcccggacgccctccttcaggggctgctgcgcctctctcttcgcagggagctcccagtcctgggagaggctgaaggcaaagcagcagaggactcggagctcacacttgatctggacccagcccgggctgcgcaggaaggaccagggctggtaccacttctccacggtgggcaggctggagcagagacctccagccacaggtgcagcacctgctcattgagcccacgcagatcagtgagcggagcttcaatccatttgtgcatgcactgcatcgtgggtcacgttcacagactgcacagcccggtagagcactcctccggggtcaggactttgcatcttcat

SEQ ID NO: 130034 - DNA, 1109 bp, Homo Sapiens
tccaaggtagcgaggcctgggtggcgaattcggcacgaggctcaaggccaagaacatcaagcagacggaactggtggctgacctccgggaagccatcctgcgcgtggcacgccacttccagtgcacagaccccaaaaactgcagcgtggagctgactccagactatagcatggagagccaccagcgggaccacgagaactacgtggcgtgctcacgcagccaccggcgccgagccaaggccctgctggactttgagcggcacgacgacgacgagctgggcttccgcaagaacgacatcatcacaatcgtgtctcagaaggacgagcactgctgggtgggggagctcaacggcctgcgaggctggtttccagccaagttcgtggaagtcctggatgagcgcagcaaagagtactccatcgcgggggatgactcggtgacggagggggtcacagacctcgtgcgagggaccctctgcccggcccttaaggccctgttcgaacatggactgaagaagccatccctgcttgggggcgcctgccacccctggctgtttatcgaggaggctgcaggccgggaggtcgagagagactttgcctccgtgtattcccgtctggtgctctgtaagaccttcaggttggatgaagatggcaaagtcctgaccccggaggagctgctctaccgggctgtgcagtctgtgaacgtgacccacgatgcagtgcatgcacaaatggatgtgaagctccgctcactgatctgcgtggggctcaatgagcaggtgctgcacctgtggctggaggtgctctgctccagcctgcccaccgtggagaagtggtaccagccctggtccttcctgcgcagcccgggctgggtccagatcaagtgtgagctccgagtcctctgctgctttgccttcagcctctcccaggactgggagctccctgcgaagagagagctagggctgcagagctgtattcaggtccaaggttttgcccttccttgagtggtttagaaggcactgcgtggcccctcagatgctgggacacaacagacccgggacccagctgtggtacccaccccttccatggattgaataagatgggctaacaggc

SEQ ID NO: 130035 - DNA, 749 bp, Homo Sapiens
ttttttttcacaggcagaggtactttatttggcaattttaacatgacacgtagagaaaagaaccctgccctccttcaccagcctccccagaaatcccaccttcctatttcaagacagagtaataacagcaccattttacacgaaagggaacagccacagccttggcaccatttctggttccactttccatggaagggcagagaagcattgctcaaaccccaccactgggtcagaaaccaggcaaacagcagcagtcacatctgaccttttgcacacacgagagcccgacactcatcctggctcccaagccttcccaaggtgaccctgtctcagccaccatcatgcagcttttttagtcccctcccggcccactctgaggagctgagcaatgatgagcagaatcttcatgtctctggcaggcggaggagggttcctgaagtggtagagatgcagtccactagctgggccccaatgaggtcgtgcacatggtaggtgaggccaagccgcaccacgacaggcgcccgccggcccaggagctctgataggagcagttcccggtactttgccttccggaccatgctaaggacagcctggcgccctttaacaaagtacttgatgaatctcccagctccaggcacagctagccaccagctcccagcatctcggacggtgaggactccagcattcaccaaatgcgtgatttctgagtccctgaagcccaaagtctgggtcatttggcctgctggaaa

SEQ ID NO: 130036 - DNA, 702 bp, Homo Sapiens
tttttttattgcataatatttttattcttcatgaatacagtgtatatgtaaactacttttgtttggtctcctagttttaaaaaagcacttttggctttcactcagtaacactccaagtacagctgtgaaagttcaagcatggaaaagacaaagcggaccttcgctaagacaggactcaggaatccttcttaccagcattctcttctctgctagctgccggcacacagtggccacatctttgacatgtgtggggaacctctgctgccagtgatccatgtttgctgacttgttgctgaactgcactttatcaaacataacagtcacagcactttcttcgagcttttcaacttccccatacagaataggaatcctcaaaacagcagctcctagattgttctccaggacagccttttctccatctaattttgttttgccatacaaatttaggggagctggtatgtcttcctctctgtaaggtggatttgttccatcaaatacataatctgagctaatgtagatgagaaatgctccaacagcagctgcttcctttgctaaattcccagaagcatccacattaagttgagaggcagcatctggctgattttctacaacatctggtcttctctctgctgcacaatgtactataacatggcgctgaaaatcatgaatgatgtgatgaactgcattagaatccaacagatt

SEQ ID NO: 130037 - DNA, 2086 bp, Homo Sapiens
  misc_feature (930)..(941): n is a, c, g, or t
ttaattttattgtgttttatttcaatacatattaaactatattcttttgtatgtatcacatgttacatcagaagaatgtaatttttaaaaattaaagcaacaaaagaacaattagtttagaagtttggtccttacatttaaaaaaagaagtaaatacaagaaaactaagcattacatgccagcagtacatatttattattattcatgaatggtgaaaagacttacaaggcccattattatgagtataaccacacatatgaaatatcacttagcggcaacatgggatgaaaaggacagttatatatttatattaaaaaaatacacgtttgcattcaatgtttgcctagaaaaaaaatacatgtacacacgctctttcaagtgctccccataaactgctataaaagcaggaggcatcaagctgtagaagttccaatatacataacatgttgaaatatctcaagcataaaaactgtacgtaacttgcaaaaataaagttcctttcttcaaacattttgatctgagctcaggcaaagcaaataatgaacaccaatgatttttatactatttcacacaatttaaaataatcaacatgaaaaggtcaacagcttcaaaaatcctgaaaatatggaggttacgagaatgaacaatttcatctgaaaagtctacagcagatctgcttcatcctgactctcaaatatttaaggatcataatttactatactcaaactccaagtttagccaggacaaacaaaatgataaaaagaaaaattactgcaaacagggcatgactgccctttagtttctttagacaatttcactagtgcaagagcatcatttacctgaaagatcctaagagtcacaattaaagtactcatacaaaactatttcctttgttctttaaaaagtgccacatactatacttttcatttnnnnnnnnnnnngaacccaacacaaataaactaatgaaagaccgtttgtctccatctcttgtcaatgaggaaaggccaaagtgattctttgattccaattcgaaatggtgttcgttggccaatgcccaaggtctccaatttggagcagtcaagctgagcatttctcggacgttgtgctcctaggacagggctgtcagtaataggtcttaagtgactgctggggaggttgaaggcatctgcaattgcacatgccatttcatacttagtcatctgttcattgccagaccagtgaaaggttcccttaattgatggatccagcattctcttctctgctagctgccggcacacagtggccacatctttgacatgtgtggggaacctctgctgccagtgatccatgtttgctgacttgttgctgaactgcactttatcaaacataacagtcacagcactttcttcgagcttttcaacttccccatacagaataggaatcctcaaaacagcagctcctagattgttctccaggacagccttttctccatctaattttgttttgccatacaaatttaggggagctggtatgtcttcctctctgtaaggtggatttgttccatcaaatacataatctgagctaatgtagatgagaaatgctccaacagcagctgcttcctttgctaaattcccagaagcatccacattaagttgagaggcagcatctggctgattttctacaacatctggtcttctctctgctgcacaatgtactataacatggggctgaaaatcatgaatgatgtgatgaactgcattagaatccaacagattaacctgttcaaattttggtcttgctcttctgaaaccacagccaactgcatgccaattattctgctgaaattctttgtgtacagctctgccaagaagcccagtggcaccagtaaccagaaccctcctattagggatgttaacttcctcctccaccagccgacagctcccgggaacaaagtgtatagagagctctttctcccgccccaccatgcccgccgtcttcacgccgcagcctcagcggccgccacctcctccaacccaggatcgacgcgggcctcagcccccggccgtaatggccgaattcccgggcatatgtccggtaccgtcgactg

SEQ ID NO: 130038 - DNA, 917 bp, Homo Sapiens
ctttctcggccgttggcctcttaagaacggtcctcccaattaatagttcttaatacttcttggggagttaaaggcatccgcaattgcacagcccatttcatacttagttcatctggttcatgccagaccagtgaaaggttcctttaattgatggaatccagcattctcttcttgctgctagctgccggcacaacagtggccaccatcttttgaacatgtgtggggaacctctgctgccagtgatccatgtttgctgacttgttgctgaactgcactttatcaaacataacagtcacagcactttcttcgagcttttcaacttccccatacagaataggaatcctcaaaacagcagctcctagattgttctccaggacagccttttctccatctaattttgttttgccatacaaatttaggggagctggtatgtcttcctctctgtaaggtggatttgttccatcaaatacataatctgagctaatgtagatgagaaatgctccaacagcagctgcttcctttgctaaattcccagaagcatccacattaagttgagaggcagcatctggctgattttctacaacatctggtcttctctctgctgcacaatgtactataacatggggctgaaaatcatgaatgatgtgatgaactgcattagaatccaacagattaacctgttcaaattttggtcttgctcttctgaaaccacagccaactgcatgccaattattctgctgaaattctttgtgtacagctctgccaagaagcccagtggcaccagtaaccagaaccctcctattagggatgttaacttcctcctgctccatgtcctctggcatttcaggcatgactccagaattatttcaggagagcagatacgggatgggtcttagcctctgccttctcttgctggg

SEQ ID NO: 130039 - DNA, 1166 bp, Homo Sapiens
  misc_feature (407)..(417): n is a, c, g, or t
ctttttaaaccaaagtcaaatgtaggttgttttattgtaaatgtcatcaaaatccagaacagcagaaacatattaatcagtttgaaattttagaaatcctttagcacttgaaaaagagtattacaaatgcatctatatcacatagaaagtcagcgaatacaaactagacaagcaggacatagttcttttctggcattccaggataataagaatatttatcaattaaaaggtcaatatctgtcttcctgaaataactccaaacctgagtcaacacacattcttttcggattggttctgactggcgtaagaagagaaatacagcattttgttttttattttgtttatctaatcacagggaaggataaacaaagggcaaaagtgagagaaaaagttagatgtccttgaannnnnnnnnnnagtggttgctactgcatttcatgtttcatttttgttagatcatatacattagaaaagaatgatacattttagagaagaaatatgtacatacatagtatcagaaataattttcttgtattgattcatttaatatggttgtgcttatattcaatcagaaggtcaactcctttgctctaaggttcttacactgctaacaagaaatggcttttttcctgttgcaggtcatgagcagcacacagtgtcctttctaggcacataggatcatcgatcactgtgtggacgcaggctaatcagaattgcacctgaaatcacttgtgcaattagtgatgcaagagtgatcacaggaatcaagactgggagccaagagaaagaacaagaggtgcacaaagaagcagttcggatgggagaccaggaaagctgaggggaaaactgggaaacagattctggaaaactcacagtttgtttgatacccagggttaagagatgggactttgataggagtggtgcttatgaattaagggaggaagaaagaggtgagatcctaatgttggtaaaggtacagagacaaagggagccaaccaagtggtaagaaaatagaaatggaaagtaaaaatgagacttaattctttagtcagggaagccaagccaccaggaaaacttggtaagagtaagagaaagagggagaaaatatgagataatcccggccgtaatggccgaattcccgggcatatgtccggtaccgtcgactg

SEQ ID NO: 130040 - DNA, 555 bp, Homo Sapiens
  misc_feature (282)..(290): n is a, c, g, or t
tttccatcgtcacacttttattaaggaaacttccccataataagtgaagaggtagttcatagtatgtctaacatacaacagatttagaacagctattcatgagctgaaataaaatcttctgggttgtttaggacagtattttagaagcagtgacattggtcaccttccatttatagatctgctaataaagaaacttaaattaaaatcatatctgatttacctcagagccacttcagtttggagtttagtattaaataataaataaataactgacagagtaannnnnnnnnaaaccaaactatggtagagagtcatctcctttttagttctcctggggatccataaaatacaaatgctgaatgataaaggttttaaaaatcttcctcctctacagaaatatgactagttttgaaagtcatcttcctctgtaaaatactggatatcagtaacttgacttctttgcaatataatctaacaaacacgtataagcaaagaaggaggaaagtgaagtttcacaaaaattagaaaaatgtctcacagaaacagaacacctct

SEQ ID NO: 130041 - DNA, 1138 bp, Homo Sapiens
  misc_feature (1005)..(1060): n is a, c, g, or t
cggtccggaattcccgggataatttaaggaaaaagatcctcccgggttttatttctctctttcttgagtggactgtttccctataattaaaagaggtggtgagtcctggggcagcttccgcgcctccctgtccacgtgctaacagatcaggacgcccccagcacccctgcctgcttttgctggtggcagtgacgggaccccgactcctcactctcgggccgcagacaatgctgtgagcaagtgtggccatgggcacagaatgtccctttggacgccgctgctgggggctgccaggggccctctggggtcgtgctttgaggcctgtccggttcacgagggggtccgggcagcactgactgcttccgacctgcaggaggcgtaggagcggccctgcgggccctttcacggcagctgctgctgtatagatttgtctccactcagtgacgtgggatttttttgtcttccttttggctttatttttaaactgctttagatattactgctcagtgtttgtgaactttcctagttctctatgttgttagtgcagccagcacccagtggggacctactagaaaaaggaactggcatgcacacgtgcccagcaggaaaagcttcgtcttcacgtcggctgctgccatccagaagaggccctggagcctcacgccgtcgaggctgctctcaggcgttctgttccgggcgaggcttgtgctgcaaggaagggcaccagcatgcaggctgccactggagggtccgggtgctgcgggcagagttcagcgcttgtccaccctcccttagctctgactcagtgcatcctactgtggggacatctcgtgaggggacacgaaatgactgatctcaccctttcccagtattcagagctgtgaacccctgtggcgcaggactggcctgtgtctgttattttggttgtaaatcattctcctgtggaattggcaaaagctacatttttactgtccttaccagcaacagtttgcgtcgtcacatgcnnnnnnnnnnnnnnnnnnnnnnnnnnnnnnnnnnnnnnnnnnnnnnnnnnnnnnnncacgcagcaggagtgtcattcatgctgctgtccccctggtgaagtgacaagtacaattaaaggtggctctgaattggc

SEQ ID NO: 130042 - DNA, 814 bp, Homo Sapiens
aaggaacttataacttttatgggatccagtcctaaagtagattagaccgatgtagaattctgtctggagacgttctccccttcaattcaatgggaaggctcttttctggcatgaactctccgatgtctaatgagctctgagcaccatccataagctttcccacattctttacatataaaaggtttctctccactgtgaattctccgatgctgacttagatatgagctttgactaaaggccttcccacactcattacactcatagggcttctctcctgagtgaatcctctgatgctgaacaagatgagcaccccatctgaaggccttcccacattcattacattcgaagggtttctctcctgtatgaattctctgatgctgaccgaggtttgagctctgtttgaaagttttcccacagtcactacacttatagggtttctctccagaatgaactctctggtggacaacaagatgtgagttataaatgaaggttttaccacattcactacattcatggtctttcttccctgtgggaatttccttatggatgacaaccatctgcctgaaactttcctcctgggcaggggaccacctcagtctctccgctttgggatttctctgctgcagttctaaggtaccctcagaggtagcttcaaatgtagaggtgtcagtagcaagtttttctgagaacacctgtgattccacttcagtaatgggtggttgtggcaatgatcctttgtccttgggctctgggccatcttctgtaacaacactctttgggaaaggctgggtctccttaggcttggagcggccgc

SEQ ID NO: 130043 - DNA, 908 bp, Homo Sapiens
  misc_feature (854)..(854): n is a, c, g, or t
gaagatccaatataactttatattactttacagttaacaaacctttacacatagcacagaccctgttcagaaacgttcctatatatttacaaacacactgttgtacatatatacatgttaacaaaatacagggcaatctaaaaattagattcatctcagtacatgtttttaaacgttatttaaccaatacctttaaaaattatttcccataatctaaaataactccctgcctcacaaattaatacgatttccatttgtacttttcctcatgaggatttactttccctcattccttgacaacttccccaaacccgactccggttctgcctccatcgtcagctgagagctgggcctctttcctcctggtgggtctgcgctgtgtcgggagcgcccatctcagcagcggggcttcaggagtccagctccagctgctctcggttttcgctgagtcttaacataagctgctgttcatagtagaggctctttgcgtagtttatttcttgtgacaacttgccagcaaggacctcagatttcacatggaccatgggcttctggtgggaggggccggggatggacactccactgctcgtgctcacggctttcttggtcacctgcacatacaccttcccatggtctttggagacaaggcagtggtagaggtcatcgtatttgacttctaggaaaatggcttctcgatccacgtagtctccacttttcaggaagtaaacagctttggaggagatgagcacgcagtagctgtcaatgttctccacagcgatgaagaattcgtcctgtatgttgtctgtgagtttgaagagctgctcctgtccttccgcctggctctcagaatatcngggaagcagcccctggtgtctcgtgcaggacacgcgcctccgaaccctctgtgc

SEQ ID NO: 130044 - DNA, 701 bp, Homo Sapiens
  misc_feature (150)..(150): n is a, c, g, or t
gggaaagagcgccgcggccgcgctgtcacctgcgcaagcagaataagcgcgcgtcgttcagcgcagtgtcatcgcagaggcctctaggtccatggatcttggtctgcaggcagcacgcgccattggggcaatggtcactccagtctccanagtctccccagctcagcacaggcccctgcagttcctcgccgtctgaacagcggaagcgcacgttgttcgctgctgtgttgtcaccgagggtcgtgggtgcctccacgcgaagcgagaaagccactaggtaggcgccgccgcgacaccacagcggctcactccattcgccccagcacgtgcgtattgcgtaggacgttcccgcgcgcgcagtgcagcctgatcccattcagtgcagtgtcgtcgccaggaatgccttggggaggctccaccttgagcgagaacccgctggcgaagaatccatcgggacacatctcaggccaggcccagtcgccccagggacccccgctggtcacttcgatgaccgccgtgtagccgttccggccatctgcctgtgcacatgtgaaaccagtcgcccgcagaagcagcagcagcggcagcagcttggctcctgcgccccgctccatcctgtagcgtctgtgaatcaggcctcctaagcagatttatatcagtttggcctctgtgagggctccgattgcggaagggcggccgca

SEQ ID NO: 130045 - DNA, 655 bp, Homo Sapiens
tttttcacactcagagaagctttaatagcaagaggtgggactagcctcctggcccgggagagagcggcggcggcggcgccgttcaactgcggcagcagaataagcgcgcgtcgttcagcgcagtgtcatcgccgaggcctctaggtccctggatcttggtctgcaggccgcacgcgcccttggggcaatggtcactccagtctccaaagtctccccagctcagcccaggcccctgcagttcctcgccgtctgaacagcggaagcgcacgttgttcgctgctgtgttgtcaccgagggtcgtgggtgcctccacgcgaagcgagaaagccactaggtaggcgccgccgcgacaccacagcggctcactccattcgccccagcttccagactgggactctaccacgtgcgtattgcctaggacgttcccgcgcgcgcagtgcagcctgatcccattcagtgcagtgtcgtcgccaggaatgccttggggaggcttcaccttgagcgagatccctctggcgaagaatccatcgggacacatttcatgccgtgcccagtcaccccaaggaccgacgttggtcactttgatgaccggcgggaaccggtcctgccctctgtctgtgcacctgtgaatatagttcccataaagcagcaatag

SEQ ID NO: 130046 - DNA, 453 bp, Homo Sapiens
aagtcaacttagagaagctttaatagcaagaggtgggactagcctcctggcccgggagagagcggcggcggcggcgccgttcaactgcggcagcagaataagcgcgcgtcgttcagcgcagtgtcatcgccgaggcctctaggtccctggatcttggtctgcaggccgcacgcgcccttggggcaatggtcactccagtctccaaagtctccccagctcagcccaggcccctgcagttcctcgccgtctgaacagcggaagcgcacgttgttcgctgctgtgttgtcaccgagggtcgtgggtgcctccacgcgaagcgagaaagccactaggtaggcgccgccgcgacaccacagcggctcactccattcgccccagctgcaaggcaaagggagatgcgttgcctctgcgggccccccattcaccaagcccttgagactttccaagccaagt

SEQ ID NO: 130047 - DNA, 668 bp, Homo Sapiens
  misc_feature (141)..(157): n is a, c, g, or t
ttaccaacgggagatgcagtttatttacaccagcagccatgggggcagagggaatacacagcgtttacaaagttagctacctgtacagaatggattacatatgcaaaaataaaaatctcaagaccacaggacagcgtgagnnnnnnnnnnnnnnnnnaatgaccccagcatgcggtaatgccaggcgggtggcccctgggcatgcgggggggagtgatgcatggaaggaaaagccaccggccatggaaattagtacagaacccccccacacacactcagacacaggatacagggtggacgacacctagccggggtgggaaggatgggaattgaaacccacacagcctgcttgtagagggaggggagtggggagctcctagcccctgttcaactacatggtaggggggggcactctctccccagaaggaaaagggtttgttccctcagggtccctgctggaccaagcccatctcttacccagcctgggcagggggctctgccctgagggcgggccaaggaacaatggggaagtttatgtggacaaaccagttcccaagctacttcccacttctccctcctccaaccagaaggggggaaaagggagaggccacagggcaaagagtgtattagggcctgagctgcagctgcctctcagaagggagagtggc

SEQ ID NO: 130048 - DNA, 707 bp, Homo Sapiens
atattcttaataacatcttttattaattttgcaagaggaaaaaaatagaaatttattttagagttaaagcttgtacagcctttttttcccctcctaaattgcacagtacatacgattattataaacatcagctgcggttctgggagtgagcttgtgtcgtgttagtgccatctccctgacaaatctgacctgtacccacatctcagctgggaaggagtagctgggcctccctttaatgcagcggcactggtttgggtcacaagagctggtttgatcaacccctgactccccctggcgggaggtgctcgtcacatctgggagctgagcagaggtgccgggggcttggaagctggagaaatgatggatctttctccaggagaaacaattcttatcttcacatcagccccgtgctccaaatgaaaagcgcgtttgcatagctgctcgagcccaggctgctaagctcatgaagtatttgccggggctctcggttgcataggaacgtacctcgagtacagtactgcggcgggccgggctgggcgccagaaaaacaacggattaatatttgcaacgagaaattacccactactgggaaaccaattaggttcctgatccgagcttgttacatcgatgcatatagatgcgttctgggcttcactcggctgggggtgcaggcacatttcaactcgctgggaagtggctgaaggggg

SEQ ID NO: 130049 - DNA, 1128 bp, Homo Sapiens
  misc_feature (150)..(166): n is a, c, g, or t
  misc_feature (208)..(208): n is a, c, g, or t
  misc_feature (210)..(211): n is a, c, g, or t
  misc_feature (215)..(215): n is a, c, g, or t
  misc_feature (219)..(273): n is a, c, g, or t
aaagatataaggggttctcttcccccaaaaattcccccaaatttatacccgtttttccccagttcctcgagggctgtgtaaaaagagggggccaaaggccctaaggctttaaaaaaggaggttccccaattggggacccccttttttacnnnnnnnnnnnnnnnnnccgcgtaaaactttagccccctccagggaaaacctttaaaancnncccncccnnnnnnnnnnnnnnnnnnnnnnnnnnnnnnnnnnnnnnnnnnnnnnnnnnnnnnnaaagtttaaaatattttattttaggaaaggtactcttagatttgtgttaatgttgttttctgtattaacaaattagtcacaatcaacttcgatatagccattgattcttctttctaaatctgtataaaaaggatattttcttgaaaaaccacaagaaaaatacaactgctttttcattgcccaggtcagttactcgctacagtcagactgcatttaaattagactggcatctaatacttttgagtatttacaaatataattaaaactatactcctagaccaccagctttcaaaaaagttggatctgcttgacttgcaataaatatgtaccaaacatgaataatttctaagccgcttatgaggaggttttaaaaattactaacatttattaagcagtttgtgtgtcaggcatattgtgagtgctttgctttatacaaattcacttacttttttcagaattcctttgaggtagggtaggtacttttagaaatgccattttacatgtgaaaagtgaggttggaagagcctcagtaacctgcccagggccacacagctagaaggtgagccagcacttgagccacatttctctttccagccagattctcagcactcagctgtgctgctggtggtcacagctggctgactggaccaggaagaaccttttagtgtcaggcgtgtgaatcacagcacttgggacaggttaccaagaaccatgatcacttaatttttatatttatacatgtacatttgtatatacatagagaaagtgcaggcaaaaccattatacagttactctaatagccatttgctactgccagcagtctcaggaatcccgggaattccggaccggtccagc

SEQ ID NO: 130050 - DNA, 632 bp, Homo Sapiens
ttttattatactcataagtgaggatgaaatttatttttcaacaaccaatatgccaatatccaacttctaggttttattcaattctaatgtcatgggtttctcctaccccagtcaaaactcctgccaaatgtccacaaaattgacaccaaaatcaacaaacacaaagaaagagagggacagggagagggaaagagaaatagagagtgaggaaggaaggaacgtgacaagagctaccatgcaaaatgaccagaagaactggagttcagtggcacagatcagcaggagcagaggaatgctgcaaaagatgatgctgcatagagtctaacttggagatgcctgtatgatgctggatgaccaagtactaaggtcacaagtgtgttcatggacccataagaaccaggatcttgacccaaacttataagatcttctaaaaagaaaatacttcatctaaattgaagcaattcctaagtcaaacaccagaagagttccttatttgatgtaagttgtgcctaaaactttggctgatacaaagaaacccgtccactaaggcaccctgaggcaatctgacaatgtgttggagagaactttgttgtcagtaccacatcattatgagagtacagagaacggatcac

SEQ ID NO: 130051 - DNA, 965 bp, Homo Sapiens
ttatgttaagacacatctatttatttataatcaatccactgtgtataaaggaatactatcagaaggcaagtataagtcttaagtgctaccaacacttatgttggtacactttgtatatcacactttgatacaacactttgtatcggaatacagagaaagaagaacacatcccacagtgcataaataaccatatttaacacctctcaaagactttgtatagatcaggcaggttagcaagctgcaggatatttccatcttctgtgaaatgtttaggaggcagaatgtgtgagcgcaaggctttatagacaatgtgttccacagtccacttccaggagtttggaatggagccaggcacttcactctgctggcctgagagggtcgactcctcagatatgtactgcttccggatggaatagaacatagcgcattctttactgaggctttcaaaacattccttttcttcgtcccaattcacctcagtggctagtcgaagaatgaagataggcagtccctccaaagggggcacatagttgtcaatcagaaggggtaatccaatcaggttcccttcctcatcaatttccaaagagaaatagtctgcaagcatctcagccttcttcttcagaaactcaacaatgtattcagcaagtccttctttgggaccatcttcctctgtccagccactctctggactatctaaggcaagcatggcaaggtcaaagagcggtgctggctccgataacctgagaacaccaaaattggcaaaatcataaatgagtatctggtagaacagttcttcactaagcttggtggtgttgagaaggtataacttggtttgatgctgtgccaaggcccactgaggattcaccggacgcgagggcggacgcgtgggtcgacgattccgaaggaattccggaccggtaccagcttattttgtgaaggatgggtatgcggggcaggcggcacat

SEQ ID NO: 130052 - DNA, 649 bp, Homo Sapiens
  misc_feature (523)..(563): n is a, c, g, or t
  misc_feature (616)..(616): n is a, c, g, or t
tttttcaatttgtatttttctcaatataatgttgcaagatgtcattatattctcattacccataacttcccatccaaatcttaatggcacatttggtattttttcaaatggctttgagatataattcacataccacacaattcatgtatctaaagtatacagttctgtagttctgtggttgttggttacatccaccagactgagggctccctgagggttggtgcctcagctttcccttcacttactcattcaccaaacattcagcgcctactgagtactggggttatgatggccaacaggagagacagtctctgcctactgtttggtgggggtggagtacttagtaaccgtcgtcattattgagtgcttacctgtgctgggcacagtgctgctactgggtgactgtgtccccagggctgtcccaggctgggggcctggaggagtagttatcagttgaactgagttaatccacagtggaaggtaacccactccctgccctagggccaatgctaagcagatccannnnnnnnnnnnnnnnnnnnnnnnnnnnnnnnnnnnnnnnnagacaaggtctccgtcacccaggcttgataactaatgggaccttggggctganagaccagggagggcgcggggtccagtgctcggc

SEQ ID NO: 130053 - DNA, 764 bp, Homo Sapiens
aggctctctgaaaatgagactttattatacaaaactattctgtgtgcccccagctctggccaccaggctgcccctcaggccgatgggcagcggctgacttcgggaaggcagcccttcattatcagagactgtgcagcctgtggagccttcactgggggaagctctggggtgggctgggccccaacacaccctgtgtatcagaaggcccagtgtcatagcccagtttcctcatgtccttggtcaccacgttgaagaggagggtgacaaagccctgagaacggacacgggtcacttcccggccttcaccctgagccaccaccttggggtctgtgtactcgggccgccgccccatgaaccagcttgtaaacttctgcagtttagacgtagattctgggacaaacatggggatggtccttttgtgccggccaggtgagaagggcacgtgcacggccccatagcctcgaaccacatcgttcccgaacacatctggtccatacacgctgagcacgatctgtggccagccgtaggggttggtgcttttaaaggtgacatcaatggggaagttccacaccagtgcttgccgcacatcttggctcttggatgtgatctgtgagatcccctcctccagacccgctgtgggggcccagtcctggccgtacacaaagcagtacttgcagtagaggtcatcatactctggaaactgggcgctctccacctgcccgttgaccatgagtagaaagacgctaggactcgcggtcgccatg

SEQ ID NO: 130054 - DNA, 650 bp, Homo Sapiens
gtgtgcgctcccacacccggccagcagcttattcttaattatgacatgacaaattaagttattgctctacacaggtacatatggtagtgtgtagtagcaaatacaggcatttgtttgagctgcaatgagtagaaaatctatgtaactggaaaacaaatgagtattactaaaagttttgtgtgtatgtgttttaatttctttactttaataagttaatgatctcccttggaatcttaacacaatttgttgaacaaatgttttttgggttggtgtaagtcatgtctttctttgctaagtcacaattctaagtgaataaggggcacaacagtgtgaacttcggtcatcgtatttctttctgatagcttctcaaatagacttctgtcactttcgatgaaatacttcaggtatccatatacttttaacaacttagagtatatccttctagaatcatataaccaactttacagccaaaacttagaattaagagccattgtcatttggtgagcagtgaataagataaagtattcttggaaatggtgaaatctggtataccttttcgaaagcatctttatggggatggaacattttcttttaactacgtgagctcttctgatagggattttatactccaaaactagtctataagttcc

SEQ ID NO: 130055 - DNA, 741 bp, Homo Sapiens
tttcatgttcattatttattttatttcctgattctttcccctgccaagtgaccctctgggaaagcgggagtttttgttttgctttctaccagggctgcaagagcctagaactgggtctggcatacagcaaaggctcatttattgctgaatgaatgcatagtttggggaaggggaggacaagctgaggccacatttgggacgggtgctggggtggggtggagaagggagctgctgcccagagggactcagtaagattcagggtgggggccaagaccagcagctggcagcaggttctgagaggggctgggcctgcctgaacagggaaggggtccagcagccgtggtcaccttgctgggactggtgtgtggggccacaggcctgtgaggctgggcctctctgccacctgaggcccgcatggtggggtgtctgccttgtcctaaggggagaagactctgagggtcactagtggagttggggtagggcattgaggacagacagttgggagcccagccaactgcctgggaggcaggcctgaggccaccatcttgtccccagatatccagatcttgggggactttggcatggaaaggggccagagcctgcctttcacaggcacatggcccaggccagcttgcttgaaggaacagaccgaaggcgggcgtgcattcaggggctgcacaaggacctgggcctgttacagtctcctgtccccctgccaggacacctgcccatgtgctgctg

SEQ ID NO: 130056 - DNA, 678 bp, Homo Sapiens
gttgttttcaatttaatttattctatgcagtttaaagtgaaagttaaaacatcatacaaaccacagaagcttcatagtactgaccagttttaaaacaaaaacagtgaatgatcatttacacacattcctcatctttaattttacatcttgttatatatacaaaggtactattaaaacacgtaattctaattatttataaacctattgtcaagcagcaagatggcaatgcatcatagcagaccacagaatatttccttcaaggaatcacagcagcagtatttggtgaatggttatgcatagaaccaacttggaggatcgtgttaaacattccccataaaacaggtagcacatgtacaccaacaaatgaaaaatgtaactttaattgacataagataaaatgttactctttacactttaagttaaaaactataggacactttagaagcagacaatacaaggtgctttagttctagacttcacaacagaacactattccattagtcgcttgagagtccataacctctgaggactgctcaatggctttttaaagtcaacctcaaatataaaaagcactttaagtttaccagtcaaaatctagttatatcagttacatcttacgttacaacatactacttgagaaaactgacttttaaaaaagactgcattgttgactaattt

SEQ ID NO: 130057 - DNA, 1067 bp, Homo Sapiens
ttgtggcccaatacaatataattattctgactagatctccaaattccccataatccatcctgtactaaaattggttgactcttcctccttctgggaagacagtcattacagacaccaagaatccattcaggcttgtctttcacttctacttcccagtactgcctgccacaactatatcccttagaacccagaacagctgggaggagataaaatcttcttgggttatgaggtacattttgtgttgtatttccatagcgcacagtttttctatcttctgagactataagtttacgatgtgctgtttcaggatctagaattacatctacttgaaatcgcttgataattttgtctaggccagaatattgtggaggcagatggtaaccatatttttttaatttgaataaaaacagctcagggaattttaaattcttatatctgtgatagatatccttaacatttgccagtaattccagttctgacttcacatatatgctctctatctcctttagtagatattttaatgaggaggtataatctgaaaattttgttaggctttcatttagttgtgctaaaatatccatctcttcatcttgtaattgcctaagaacagtctcttgctcattttggagaaataacctaagttgctcaaattcagacttgacttcttctgccctatgttttacctttttcttcagttccagtgatttcctggtttgcatagttatgactttttcaattagttccactctctccttccacggtgcattgtattcctccagttttttcctatgataggaggcagccaactttatgggccaaacacagtgatgctggtgatcagtggacaaactgcaccttggacataaaagctctaggtctttctgacagaagaaagtcaaaacctgattatgcttcttacacacatgcttctcttcctgcctcttcctcttcttgcttcttatctggagttgcttagcaatttcagtcaaactacccagctggggattggttataaattttctttctggacagcaaaagtggcaaaaggggcaggggaaactatcatg

SEQ ID NO: 130058 - DNA, 686 bp, Homo Sapiens
ccggagatctgctgctaccgcgaaaggacgtatcttagctgtctcttctgtgataatcaatttctggattgttcccatcaggcattacccgtttatacactggagcctgggatcctatctgttgaagacctgaagtcctcgaagccaatccgttccagagcacaggagagtcagtagtctattgcggcagaggacggtcaatgtttgtacaagttacaacatcagaggctcctgctgcctgtgtacgttagccttgttctggtacttagctagttccttgctcagatgtcttgtttctgccagttccagtgatttgtctggtttgtatagttatgacgtttttcaatgtagttcgcactctctccttccacggtgcattgtattgcatccagttttttccgtgataggaggcagccttgctttagtgggccaaacatcagcgatgctggtgatcagtggacgaactgcaccttggacataaaagctctaggtctttaatttcatcaagctccagaccgaaacttcaaatacatagttcatcaagaattcttgcgtcagtgtaggtgcggcccagggcttggaagagcagatcacgcttcacgctgacagtcggcatggtgtgtcgaactcactgcccccggccgtaatggccgaattcccgggcatatgtccggtaccgtcgactg

SEQ ID NO: 130059 - DNA, 1386 bp, Homo Sapiens
  misc_feature (1267)..(1301): n is a, c, g, or t
agcctaatggtgtaaagtttttcgggaagagtccatctgaaatggttttatatccccataagcccaatagcctgcatctttctaccaatatccccaggccatgggataaagtccaacctctggtttggagggattttcaatctcaattgtgattcccctccacctaggatttctgattttaaatccatccctggtcagaaagtttgccaagattttctgggagtttctctgattcccaacttttttgttaattaggtcagctctcaccatctcctttcggtaagctaattctggaaaggtatgtgattttccattaggaaaacccacttcagcagcttcgaccgtaaattgattctcacaatattcactgaacatggtgacaataatatcaagaactatttttgccttagtaaagtcagttcccgtgcattcaataaaaatatttctagtatttactgttattctggaatgatccccattgatgatgggaggcattgaaagggacgaccaccattggctatcatagataactggatacaggggtttgttttcaatgatatgtaaataatgtttcaggtgattgtcagtcttgtatatgttcatcagttcacagggctgtatactccttggttcttatttagaggcttgaatttgatatctgaaggacgctttgcagtataagtaaatgggcccgacaaagtgtccaaatcatgggtaccaatggcaaccagtgctcttttcctgcaaatattctgatgtaatttctcctgaagttcaatgaagctgtcatatcgatctttagtaaactttatattacggagaactgctgctaccgcaaaaggacgtatcttagctgtctcttctgtgataatcaatttctggatttttccatcaggcattacccgtttatacactggagcctttatcctttctttgaagacctgaagtcctcgaaccaatccttccagacacaggagatcatatctattggcagggacgtcaattttgtaaagaacaacatcagaggctcctgctgcctttacattaccttgttctttacttattatttccttctcagatgtaatttcatcaagctccagaccaaattcaaaacatagttcatcaaattcttcgtcagtgtaggtgcggcccagggcttggaagagcagatcacgcttcacgctgacagtcggcatggtgtgtcgaactcactgcccccggccgtaatggccgaattcccgggcatatgtccggtaccgtcgactgnnnnnnnnnnnnnnnnnnnnnnnnnnnnnnnnnnncggccgcttcctcgctctactgactcgctgcgctcggtcgttcgaaataacgccctagcgcccatagtagtgatcagttgttccc

SEQ ID NO: 130060 - DNA, 1253 bp, Homo Sapiens
ttttgacagtgctttctactttattaaacatcaaagcccaaatagatgttccctgtggaggaggacttaaggacactaggggaggagaaagggacacctgggaagagaatcacaccacagagaccaatcttcacaaaaagggtccaatattgatttctagggaggagcagggcatggtcagctcaaatttggtgataacgtcaggatgaaggaccccaagcttcccgacgctttgacccctggcaaagatctctgcacatcgcccggggaagaaagcaggcccttctgatgctttgatcacatatccccccttgtcttcaccaggaggcacatcgagcaactgcataattctgtccagcagcccatgaatgatctcaaacccaggattcttgttgtaataaacagcacagagatgtctgtagttttttgcacctacatctgtattagaatcttttattacaatgtcagagatttcaaacagtttcagtggaaggggcatcttacgatttgctgctatggtcttcaggaggccaggaagaagggtagtgcgtgccacctgaaattcagctgttttaggattacttatgtggactgcctttgttgcagagatatccacacctagtttatcagcaatatcttcttgggagcacagggcaaaggtaagtgcttcagtgaagccagcggctgccatgtcatgtcggagaagttcagtgagcttattaagaggaaattgattagctatggtgtaagttttcgggagagtcatctgaatgttgttatatccataagcaatagctgcatcttctacaatatcacatgcatggataatgtcagctctggttggagggatttcaatctcaatctgattcccatcacctatgacttctgattttaaatacatcctggtcagaagtttggcaagattttctggagtttctctgattccaacttttttgttaattaggtcagctctcaccatctcctttcggtaagctaattctggaaaggtatgtgattttccattaggaaaaaccacttcagcagcttcgaccgtaaattgattctcacaatattcactgaacatggtgacaataatatcaagaactatttttgccttagtaaagtcagttcccgtgcattcaataaaaatatttctagtatttactgttattctggaatgatccccattgatgatgggaggcattgaaaggacgcctcgtgccgaattcgccacccaggcctcgcttcctatg

SEQ ID NO: 130061 - DNA, 394 bp, Homo Sapiens
aatttggtctggagcttgatgaaattacatctgagaaggaaataataagtaaagaacaaggtaatgtaaaggcagcaggagcctctgatgttgttctttacaaaattgacgtccctgccaatagatatgatctcctgtgtctggaaggattggttcgaggacttcaggtcttcaaagaaagacagctaagatacgtccttttgcggtagcagcagttctccgtaatataaagtttactaaagatcgatatgacagcttcattgaacttcaggagaaattacatcagaatatttgcaggaaaagagcactggttgccattggtacccatgatttggacactttgtcgggcccatttacttatactgcaaagcgtccttcagatatcaaattcaag

SEQ ID NO: 130062 - DNA, 767 bp, Homo Sapiens
  misc_feature (122)..(122): n is a, c, g, or t
  misc_feature (672)..(699): n is a, c, g, or t
gagcttggtgacctcagctggggtcacagccccatactgaccctggacagagaagccctggttggcagagagaagaacagtacctagggagaggctcggatggtaggggatagtggctcctntgggtgggactccaggataacagctcgctctgtggagttggggagcaggtcccctgccacctgtacctgggcacccgtagtctctcggatctccttgatcttggtgccagccttcccaatcagtgagccacactgactggcagggatgacaaggcgcagggtcactggaggcctggagacatttccaccatttgcaggagcagcacaaaggtcctcatccagtttgaaagcaatcatggagactgcatggaagacagctgctgtagacccggtgatggtggtgatgcgttcagggcaggagccctcggagatggtgatccgggcactgctctgctcccggattcgctttacagtctcgcccttcttcccgatgatgctgcccacttccttcccgtgcatcagcatccgcagcgtgagggtgatgctgagctctggctcctcctccagtcccccgtccgagccgctcattctgtcaggcgaggctggggccacagcgacctgcgagtgtgtccgcgctgcaacctggccggctctcgctggggctgtcctnnnnnnnnnnnnnnnnnnnnnnnnnnnntgggccgctcagtcccacattgtccccgggagaggcggccgctcacaactgcgagtgaccctcgtgcc

SEQ ID NO: 130063 - DNA, 2329 bp, Homo Sapiens
gttgacggtccgcgatatagatgtagcgtgtgtaagacgcgtactgtgaggtctgatgagggggcgcccggagaggtagacgattgtcgtgcgtcggcggggtggacatcagccgctcgtgtctgttggcatacatttggtatgtggctgatacagtacgatcactccgtgagcgcacgacgtcaccggtggtatgataagaaggtggtgtaaagaactgcgtagcgacagtattaaagtatttgttgttcaaccactttagattaccctttggaggaaattttcacttgtttgccccggaaggcgcgtttgaaattctttggggagcggatggtggggccaaactattgttccccgcaccaaaaaagtaaggggttccttggacaagatgattcccaaggtttaccaggttttccccagtccccgggcgttgtaaaagcgacgggccagtgccctagtttataatacgagccccctatagggccccctttgtccaagaaagctgggtacgcgtaagctggggccccctcgagggatactctagagcgggccgccctagaaggtaaccttctcgattggcatccaggtcctcgtgttggtcgctgagaatatttattcaaaaacagggattgaaaaaactgtacagagtgtctgctgctgagaactgggcccctgccccatgccactcccccagctacctggcagtgccccctctttggggtgccccctgacaagcccagccagttcattccagtcaaaagggtatcagtggaagcagcaagaaatctgcaggtggtggggagagaagcctggccccagctacccaacgggccctcctccctgactcccacaaggatgcagtaggccaggaagccctaagggatggggagtgcgtgagtgacacccgccatggtgggggcactagggagtctcctggctgctccctgtatccaagcacagagctgaggaggtagggccccctgccctggggctgccgcagctcagacccctgggccagaaactgcccccactctgagagaaagaactcccatagatggaggcagggtagggggtgcatccatgcgtctgggcgttagcggcgtttgggaccccagggtggagtctccttgggcgggtagggtgcagaggcagccccctgctggtggtcctgcctgcccctgcctgtacctcagctggcctcagtagggggagaatttctgccgctcagccttcttgctcccattagctgctgccatcttggcagtgtaggccgccaagcccggcggcggcccaggcagtgatgaggtactgggccagggcgatggagaccggagagccagtgatggtgacatgccgctccccagcgccctctgcttggttcccgatcttgatatgtgcccctgacatctgccggatctcgctgatcttgctgccctggcgcccgatcacacagccaatcaaatcgttgggaacaagaactcctgtgagctggtctgtgtgccgggatccagtcctggcaccacgctgggtgtggcaaaggggaccgcatggcttgagagctgctggagcttggtgacctcagctggggtcacagccccatactgaccctggacagagaagccctggttggcagagagaagaacagtacctagggagaggctcggatgctaggggatagtggctcctttgggtggggactccaggataacagcgcagatctggcgcacacacaggatgatggcatcaggcaccccagataccgtaacagctcgctctgtggagttggggagcaggtcccctgccacctgtacctgggcacccgtagtctctcggatctccttgatcttggtgccagccttcccaatcagtgagccacactgactggcagggatgacaaggcgcagggtcactggaggcctggagacatttccaccatttgcaggagcagcacaaaggtcctcatccagtttgaaagcaatcatggagactgcatggaagacagctgctgtagacccggtgatggtggtgatgcgttcagggcaggagccctcggagatggtgatccgggcactgctctgctcccggattcgctttacagtctcgcccttcttcccgatgatgctgcccacttccttcccgtgcatcagcatccgcagcgtgagggtgatgctgagctctggctcctcctccagtcccccgtccgagccgctcattctgtcaggcgaggctggggccacagcgacctgcgagtgtgtccgcgctgcaacctggccggctctcgctggggctgtcctgcgcggcggcgcggcggcacggcggctggccgctc

SEQ ID NO: 130064 - DNA, 1158 bp, Homo Sapiens
ccggggcgaaaggtccggggttgtttttcgggtgccaagccctggttaattccccagggcccctgggcgttcggggcccgggttcccgcagccaagtgggggtcagccacagcttgtggttagagcccggtagatgtcgtaccagtgctgggagccccgaggcggttgtagaccaggccctgcccagtgctcgcagcccccgtgatcctctgggcctcactcagcagccgattacagcccaccttgacggggttggcagggaggggacccaggaagtcagtggggtaggggtagtccatcatggccagcacggtgaaggcattccgggcgaacatgaagagctgggtcaggtccttctcgtctgacagcggctggcaggtgccgaactcccagcggaccgtgtcgtaggctccctgtaggaacaagtccttgatctgtcggaacgcttcccgcacaccctgggtgcatttgggactctggccctcaaagtccgccgtgacgtcccggaagaactggttggagtcgccgaggcctgccacagctagaacgggcgcgctggccgccagcgcccccgccaccaggtggggatacttcatcctcaggtaggcactgagcatccccccataacttccaccgaaggcgatggcgggggcatcctgggccccgaggtcgcgtcgtagcgcgcggagcagctctgcgaagtcggccagggcctgctccaccgtcagcagctccgtgtgcccgcgctgcgtggactgcgcaccgaacggcagcgacttcccgtagtagcggtgctccgcgaagaccagtagagccccccgctcggccgccagctccgcgacgaaggccgagttgttggcgaaggcccacacgtcgccctcgttcccagtgtagaagaagatgggcccctcgccccggacccagaacctgtccgacaccaggaagcgctgagggaaggtcttgttgccgaagcgctcgaagttgaagtggtccagacgctgctggaagaagcgctcctggaagccggggtccggggccctgcgggcccccgcctggaggccgcgcagcccgagcgccagcagcaggaccggggcccagggagcggagcccatgtcgccttccgcgggcgcccgtcaatcgcagggaattcctggaccc

SEQ ID NO: 130065 - DNA, 1157 bp, Homo Sapiens
  misc_feature (57)..(76): n is a, c, g, or t
taggctaaaattaaccctcactacaagggaataagcttgcggccgcatacgcggtcnnnnnnnnnnnnnnnnnnnnacctggccaggcctccaggcgtttattcagccccttccctctgccgccagctgcttgagtgaagcccccactccatgaggagccttgagacccctccagtcctgtgctcagaggctgagtctgggccccccacgcagagctggctgctgctcacgcctggctgcctttacccactcgccgatgatggtggcctccagcttccgcgcctcaaccacggaagcaggatcttctgggtgggaggctctgaggtcgaggtggtgcgctcccccctggatggtgacggcgatgactgaggcactcaggttcctccgaatcccgccccctgcccaggggtccaggttcccgttggagaagatgatgttgctggcggctctgagatcacccccccagaagctggtcagcagccagtcgggccggggccacacgccccaggtgtccaggcagtaccgctggcggagctcgtcagtgaagggcaggtcggggaacatatcggtcacattgttgctggcgaaggtcaggttgatctcggtgcaggcctggtagtcccaggccctggcgtcggggccggtgccgcagccagtggggtcagcacagctgtggtagagccggtagatgtcgtagcagtgctcggagcccgaggcgttgtagaccagccctgccagtgctcgcagccccgtgatcctctgggcctcactcagcagccgatcacagcccaccttgacggggttggcagggaggggacccaggaagtcagtggggtaggggtagtccatcatggccagcacggtgaaggcattccgggcgaacatgaagagctgggtcaggtccttctcgtctgacagcggctggcaggtgccgaactcccagcggaccgtgtcgtaggctccctgtaggaacaagtccttgatctgtcggaacgcttcccgcacaccctgggtgcatttgggactctggccctcaaagtccgccgtgacgtcccggaagaactggttggagtcgccgaggcctgccacagctagaacgggcgcgctggccgccagcgcccccgcaaccaagtgggagccggatcctctgatgaccg

SEQ ID NO: 130066 - DNA, 584 bp, Homo Sapiens
tttttgctgaaagtggttactttattggttgggaaagggagaagctgtggtcagcccaagagggaatacagagtcccgaaaaaggggagggcaggtgggctggaaccagatgcagggccaggcagaaactttctctcctcactgctcagcctggtggtggctggagctcagaaattgggagtgacacaggacaccttcccacagccattgcggcagcatttcatctggccaggacactggctgtccacctggcactggtcccgacagaggccgagctggggaaagttaatgttcacctgggggcaggaaccctccttatcattgggcagagagcagaaggtggcacagcccgcgctgcagcacttgaggttgtcggcgcattcgctgtccgagacgcactcttgcgtgcagttctggtcagcctggagctcggggcacacgccagtcttctctgctcctgtgcctgagactagggtgaagccgaacagcagcaggctgaggaggagggcggcggctagcgggcctaggcgacaagcaggcatggtgctatgccctgtcgggctagtcgggggggtaccgagctc

SEQ ID NO: 130067 - DNA, 1581 bp, Homo Sapiens
  misc_feature (122)..(200): n is a, c, g, or t
  misc_feature (204)..(312): n is a, c, g, or t
  misc_feature (358)..(367): n is a, c, g, or t
  misc_feature (371)..(527): n is a, c, g, or t
  misc_feature (535)..(664): n is a, c, g, or t
ccccttcccaccaggagaaaggtttgtgagatttttttattaaaaacaagaaaaaaacctctcccacaaaaaggggtggtggggggttatatttaacacaaacacaacccttttgggaatannnnnnnnnnnnnnnnnnnnnnnnnnnnnnnnnnnnnnnnnnnnnnnnnnnnnnnnnnnnnnnnnnnnnnnnnnnnnnngggnnnnnnnnnnnnnnnnnnnnnnnnnnnnnnnnnnnnnnnnnnnnnnnnnnnnnnnnnnnnnnnnnnnnnnnnnnnnnnnnnnnnnnnnnnnnnnnnnnnnnnnnnnnnnccttgaggggtaaaaattcttgtggggggatgtgccccaaaatttnnnnnnnnnnaagnnnnnnnnnnnnnnnnnnnnnnnnnnnnnnnnnnnnnnnnnnnnnnnnnnnnnnnnnnnnnnnnnnnnnnnnnnnnnnnnnnnnnnnnnnnnnnnnnnnnnnnnnnnnnnnnnnnnnnnnnnnnnnnnnnnnnnnnnnnnnnnnnnnnnnnnnnnnnttaagggnnnnnnnnnnnnnnnnnnnnnnnnnnnnnnnnnnnnnnnnnnnnnnnnnnnnnnnnnnnnnnnnnnnnnnnnnnnnnnnnnnnnnnnnnnnnnnnnnnnnnnnnnnnnnnnnnnnnnnnnnnnnnnnnnngctgaaagtggttactttattggttgggaaagggagaagctgtggtcagcccaagagggaatacagagtcccgaaaaaggggagggcaggtgggctggaaccagatgcagggccaggcagaaactttctctcctcactgctcagcctggtggtggctggagctcagaaattgggagtgacacaggacaccttcccacagccattgcggcagcatttcatctggccaggacactggctgtccacctggcactggtcccgacagaggccgagctggggaaagttaatgttcacctgggggcaggaaccctccttatctgggtagaaaaaggagtaagggtaagtgggcagaggcgatacagggagattaacttgtacctgcagcatggcccccccactgcccctcactgggcttcacatacagcagagctgcctgcctgagtccatcttgggcacctgagctgctctcaggaggcccaggaagatcacctgcaaatccctcctcctgctcccaaatggaatcacaggacctcagcttgagtcccaagtgggccttcgtggcctagggccagaaatctcccagagcctccgtgtctttaggtgccagtggaacagtgctaattacaacatagggttgttgtgaaagcagtgggaaacacacatatattatttctccctgaaatatcaaactactctgtagttatgagaaattatacagtgaacacttattagctctattacatgcaggtatcaagccctacatatatactctctattctcacatatcctaaagagggaggatctgtatattcctgtgtacagtgaggaatgggcatgagaactgtgcgattctggctcaggcaatcctaatgatcgataatcgatcagcaacgttctggtgatgtacgccaatcaaacag

SEQ ID NO: 130068 - DNA, 804 bp, Homo Sapiens
  misc_feature (123)..(132): n is a, c, g, or t
  misc_feature (791)..(791): n is a, c, g, or t
gcatatttttcttttatttatgtatttataaaaagatttacaccaatcaagcctgtaacatgtacaaagtaaatctttttgcaaagttaaatatatgaaaatccaaaagcagactgaattatnnnnnnnnnnctttttatttttgtcactaaatacaattagtttccctgattataacccataatcaatgtcacctaacatacagatggtctgtacagaggtgaacaaccccaccatctttctctacatatatattaggaccactaaactcagataaagcagagctgagcttgttaaattattgtctgttttagaaactcttaccatttaaaggaaattggaagatttaggtagaatacttgtacaataacttaaaaagttaaaagcttgtagtgataaaataatcttgtgcactgttctcagaaattttaggcaattggccttcttgcagatcccaagtctagaaaaagacaaccaatcactgcaacaactgggcttggttcatttgccatatggttggtcgtggtgcatttctggtgtgtaagtcaacagaacaatcatgacccagaggtgaagcaaagccatatatataattacaaaaactcgcgctatggggtatcttcggagaaaaattcccaggcgaatactaaactgatcaattgaactagcagctttgcgaacttttccgtacattcctgccagattagtttctgtgtcattaaaaaggacaggaacatttcgcagacgagtgcccttaccattgtcaattccagacatattaatcgaagacncattactactact

SEQ ID NO: 130069 - DNA, 769 bp, Homo Sapiens
ttttacaaggtggaaaattatgtatttatttacacaaatatgcacagaacacttgtatctttcaaaagtcacacttaagacatagtaaaagcatgttgtatgaaccatgtattcttaaggattgagcaaactgcaggctgcttgctgccttttaggtttgctagtccctgatctacttgaaacagatgttgcttgccccaacactagtttaattataagggcagcctgtgagaaagtttcaatagacatttttctcacctatattgcacgtttttctgaagcccttgtgcaagtgtgtgtgccatgtgtagttctatttacatataaacgctactttaaaagtttatcaaaatcatgagtttttacaaaagtttttaatgctcttctgcattatatgcagcattgcaaatctgcaaagtagtaaaactataaagcacctttaggtttgcaccagttattacagaaatggggatttgtgaaaaggatgtaatttgatgtagaagggcaaagtcctttaatgactggcattcaagaggattacttaaaacaatttgtaagttcatgctaacctcttccctatatttatactactgggacctggggaaggatccatgacatggaagtatcttgagtgtgccttttaaatttgagcattactgctaagaatgttctgtaaaggtgcatagttaagcagctatcccttaactcttggagaaatagccatagggaaaccaatcatttaggtaggagaacatggggacaaaatcag

SEQ ID NO: 130070 - DNA, 739 bp, Homo Sapiens
  misc_feature (554)..(554): n is a, c, g, or t
aacttttgaaattcatttatattctatgccttctttgttttgaacaggttatttggcaggttggggaggggatgtggatagagttcacaaacattctcgattacctgtggctcctgggactaagaacagagtgaaaacatgaaatccccagggtgatgctcctcactggtttcaaccaatgcaacctttccaagcattctcccttgtaagcaaataaattgacaggagctggccactttcatgtgccttttcccaccctctgataatggtgctggaaggtggagagttggtcactccctgcaggacacacagcaagagacctggactgtgagctcatcgcagtttgccttgtggcacgggggacatgtttgagcctggaagtttccatacttcttttgttcttaacatcaaaatcaatctctgttttcagcattgtggggtttgattgcaaccattggagatttagcaaataacaacttcggaattataaagcgaacatatagtgtaaatatgaggcctatgttactctataaattatctggagtgctttttanaacaattaaaaagtaattctgaaacattagtcatagtcacccaatgatttcttctcatactaccagaaagttcctgctataaagtcggagacaccactaattaattatataagaatattacaaagttgattatggtcctaaaaataaaagtaatatacagatctcatttttgctctttttttctt

SEQ ID NO: 130071 - DNA, 694 bp, Homo Sapiens
tttttctcagtcggtatggttttattggccatatcaaaagtgagcacaaatcaaataactgcttgatccctctgctaccacccactgagaggagaaaagtcatttagttccaagataaccttggttccaggctagatacagaggggcccttgggacagctgtgtcaccaactctggagcagtctctggaggcaagtccagagcattaacataaaagtgtcccagtcccacagtgccccaggtcccagcacccctgctccaaccctaaccttggatacttttggccctttaacaaatcgccacctctgcttgcaggacttgatcccatgtgtgggctccaaggccttgtctggcccacaccttctttagtgtctctcacttccgtgtcctggcttcctcctggctccagatgagaatgtggtaacccattgcagaggccagcgtgtcccccatgggattgaattcattaagcgaactgatgccagaagattctgggtcatagagctgacacatcatcttccctgagtttccatcgaacacgtcgatcgtcctcaattcataaggggtacaacttttgaaattaggatctgggtatcggcccacaacaatgaggttgtagcgaggatgccaggctgccttgatgggtgtgaggtgcttgaagtgaccggcaagagtggcggaatcagggccagggg

SEQ ID NO: 130072 - DNA, 2421 bp, Homo Sapiens
  misc_feature (223)..(627): n is a, c, g, or t
cccacaagtataccacgataatttaaaacccccctccgagggaaagcgccaattccgtaccgcggccgaacaggagccccgagggagttccaggggacgcttggatcttatatctcgccggttcacaactatgacttaaggtcgatttttgatgatctcagggggccgagcctatgaaaacaccagcaacgcgccttttaacgatcctgccctctgctgccgnnnnnnnnnnnnnnnnnnnnnnnnnnnnnnnnnnnnnnnnnnnnnnnnnnnnnnnnnnnnnnnnnnnnnnnnnnnnnnnnnnnnnnnnnnnnnnnnnnnnnnnnnnnnnnnnnnnnnnnnnnnnnnnnnnnnnnnnnnnnnnnnnnnnnnnnnnnnnnnnnnnnnnnnnnnnnnnnnnnnnnnnnnnnnnnnnnnnnnnnnnnnnnnnnnnnnnnnnnnnnnnnnnnnnnnnnnnnnnnnnnnnnnnnnnnnnnnnnnnnnnnnnnnnnnnnnnnnnnnnnnnnnnnnnnnnnnnnnnnnnnnnnnnnnnnnnnnnnnnnnnnnnnnnnnnnnnnnnnnnnnnnnnnnnnnnnnnnnnnnnnnnnnnnnnnnnnnnnnnnnnnnnnnnnnnnnnnnnnnnnnnnnaagaattcggcacgaggagaggaggcagacaaaagcaaaaggacatcctgtcagtaggaaacggccgaattacaattcagatgtgcaatgtttgcataagtaaactgacacgggactattatatgcagaaatccacgtgcaaaaattttcagacacacctttgtacctcttcctaatcctgccctggtaaaatggcggttatcagtgcaagtttgaggatacatacagctggaaaatggacatcaccaaactggactccagaaagttctgtctaggattttattagactgctttttttctcaatatacctgtattggaagattgagacaaaaaggcacaaactcacattaaataaacaaggtaatctaatcaattctacaaagtgtagtttgtaaaacaagtagcactaggaaccaaccaaagtaagtcagggagtcccagcagggactgtaaaagaacttgggaagctatacacatgcccacgatactgaccctgtcccggacctctctgcatgagaaggccagagcccagcacccctcctacagaggcactgctgcttctgttggggctgtgaccctggaattctgatggaagcagctggtctgaaggggcatggcacacactcaggtactacccctggagctgaacctttatcataagtccctctgagtgctagtcagtttggaggtgggtgaggaggaaagggggtacttaaaagaagccaacactgttgcccagcagcaacaccatccgtggggatggaacagaccagggacatcctcctttatgtttatgtgggctgcaattccagatccaggctgacctcagctcataatggatgcttttcaactggggcaacaggtggaggtgggaggagcccttgttagggctaaagtgatatgtgtgggtctcaagagccaaaggaaggagactaacagctgctgaccctcagaccacatagacaactgtctgcctagaatgtcagtttgtttctttcaagataacccgcatctggacttcccctagttgatgaatgaaggaacatctttaagcacaaatataatgaatagctaacacagagcttataggaaaacactgacatttttctccagtaggaatgcctcttctccaactttccaagtcagataaatgctaccagcagttgagatgctacccagatgcattactaaagacccctcaaggtgaggagacttacacagaggaaggtgtctgtaacaagacatctggttccaaagggacctcaatgaaggtcagcgctaaccatgctgggggtctgagtctgtccacccttgccccaggagggccacagggaagcatccatcaggatgtcacaggtgcaatcctgtgagacactcccttattgcacttagaaatgagtaaggcaaacaaactgacaaaaacaggatacattctcccacccacttcttgcttcccggacaaagatttggtctcccattagcagatgcacccaggctagtgtgggctgggatcacggcacacttaggccaacgtgcttcacaaggtttggggaatgtcaggtgacactacagctctctctcattctcccactaagaggcaaactcaggctctgtcaagttgcaggaagctatgaacactgggcagcgtctgttcccctggagcctggacttcctcaccagcctactttggtcgggttctgtactatgatcactacttgctttgggttttccagggcagaactcaacatgggggtaggacgagctaagcctcgtgccgaattcgccacccaggcc

SEQ ID NO: 130073 - DNA, 1010 bp, Homo Sapiens
  misc_feature (722)..(722): n is a, c, g, or t
  misc_feature (794)..(795): n is a, c, g, or t
  misc_feature (802)..(802): n is a, c, g, or t
  misc_feature (812)..(812): n is a, c, g, or t
  misc_feature (844)..(844): n is a, c, g, or t
  misc_feature (903)..(903): n is a, c, g, or t
  misc_feature (947)..(947): n is a, c, g, or t
  misc_feature (982)..(982): n is a, c, g, or t
tttaggtaaaaagatgtatttcaaagtgggatcagtgaatcttcaactaaataaataaatgtacagccccccaagatgcagaatttcccatccctagtttaacagtcacggttcactttgttttacgtgcgtttcgcagatgagtggtgctctcatcagcagacacaagacttctttggcctctgcttttttttcctttcttctaataaggagactacactctagataaacaaaacagacaggcgaatgtaatccagggttttggtggtttttctgagtctagaaggactaaaaattagccttgataggcagaaagagcatcccaacctgtctgtcaaaaactctggccatttctaggacacctttgccgaactgaaacaggaaacaacaaaaattttacatgcttataaatgttttctccccctccgaggaaaatctttacataaagatggactcatttacctcattttttacacttgcatctgcccctttgtcaagaagtaactgaactaactcttcatgattatttaacacagccaccataaggggcgtctttccatttctgtccttcacattcacattggccccagcatcaattagaagagaggcaccctctgatttcccgacaccgcagagactctcatgagtggggtccatcctgaaccagtgtccacgacgtctacatttgggaagaaggtggtgattggctctcaagtccttcncatgggcttcagaagcatcaggtgagccactgcccagatatggaaagactcatgttgacatcatccatccgnncacaggncagtcatgtnggaatctcacagccatcctttatcatcactcnatacactgcagtgggctcatctgcagccagtgcagagctgtacagctcccaagtctctnagctggcaagaagcgcatgtcttcggagatattcacacatctangtgtccgcatacacgcagcatagactgtcttgcanttccctcgtgcgatctggctcgagggca

SEQ ID NO: 130074 - DNA, 788 bp, Homo Sapiens
  misc_feature (668)..(668): n is a, c, g, or t
tctgtgcaaactacttttatttataaggaaagtttctctattttgtttataaacattaaaccagtgctgtgtgaaggcacttaattggggagaggtggggcagggatcctggtagagaccaatgtttcccacccagaccccaagactgctgggagagatggtgtcagcagtgactcccaggaatatccagtggtgtggtggcccatcccaggcccggctgggcaggtggctggcttgctgggggatgtgatgatggtggtaggcatgggaggcactttggacgggatctgatttggcaaaaggaagtggtttcctgtccccagtgatttccagcccttcccagacctcccaaggctaaggcagattactaaatttaaggctggggccctccttcttccctggacttccaggagaacagagaaccggtggcaaggaccaccaccagcagggtgaggggtgcagataaaggcagcaaaaaacagagggagaggtctggagggaaggcaggaatgcttgtttctgtcagcctcagaaacctccttctatcctgctagactttactcctttgaggcttcaccctgggggacagcccggagtagttccgcggcacgtaagccctcctggccgtgcagcgcgggccaccaccagtcggtcttctccggcccgtncctccgcagcacggtgaccgactcgccctcgcggaaagacagctcgtccccgaactcggcgctgtattcccagagagcgtaccttgcccggctgtcatcagccccatacttttgctcgac

SEQ ID NO: 130075 - DNA, 625 bp, Homo Sapiens
  misc_feature (111)..(128): n is a, c, g, or t
  misc_feature (288)..(303): n is a, c, g, or t
  misc_feature (316)..(316): n is a, c, g, or t
tttgcacgcgcacgcaagactgcgaatggtaaactttattaatggaaaatggaatgcctcgttaacagaaaccttgatttaaaaatggcagaacaagaacacatttatttnnnnnnnnnnnnnnnnnngtgagttcacattgtattgagctacaacatggtggcaggatttactttgcttttaaaaagatcccccaagttcgagggaaccctggctaccagattcaacagtgcgtctgcccacccgaaaactcacagcgagtgggacttagtagcggcgggtgaagtnnnnnnnnnnnnnnnnatgagggtgtggngtgagggactctgctgccccggtcctggctggccactccgccaccttccagtccgccacctggcaccacgtggccctgggaatgtccaccttgtgcaaagccgcctcgcctaggaacaaagtcagacaatttttttccccttgaagtgctcagcgttttcatcgtaacatgggttcagtaacggtcccgcagcctttagagcgcttgggttttttttccaggtgagaaaaatcatcattgcacattgtattccaggtaactcaagagcgttatttgcataaatttgcaagagctgctttttgctttgtt

SEQ ID NO: 130076 - DNA, 691 bp, Homo Sapiens
tttccagaaaacagcgattttaatttgaaagcgattttatgtatgagaggggaaaggagccccaaagagaagggacgcagggcaaaaatcatgcagccccagcaccccacctctgcgggctggccacctcccctcaattctcaggccaggatcctgtgtccccagcctatgctatgtgcccagggctggaggagagctgtaaagggaaggcctccgggactacactcgtgaaaccatcccctgtgggggccctgtcctcacagcccaggccccttccccaagttagacaggaagagatggggggggcggcgggaagctgggaaggctagtgcttggagagccctagggacaggccatttcagggccctgcctttcccaaacacccacctccaccactggcatttcttagtcaacctgggaaagtacagtacttctttgagtctaactgcaagtctctatcctcacaggaaattaaaaatagcagatcggttcctacatctccaccagccccttcaccaccaccaccaccttttttatatttcagtctgactgcagaaggaggtgaagtgttaaaagagactctggacagtgacagggcccctccctcttccagagaggccccatctgccaggtttgagaggaggaaggcctgtcagggccctactctcatgtccatcagcttgggaggcct

SEQ ID NO: 130077 - DNA, 369 bp, Homo Sapiens
actcgcagctcggtacccgatatgtattttttctttcctgtgaggatagagacttgcagttagactcaaagaagtactgtactttcccaggttgactaagaaatgccagtggtggaggtgggtgttttagaaaataacaagtcatcccgagtttccattgtggcccagtggttaacgaatctgactaggaaccatgaggttgtgggttcgatccctggccttgcttagtgggttaaggatccagtgttgatgtgagctgtggtgtaggtcgcagatgtggctcagatctggcattgctgtggctctggataggccggtggctacagctctgattggacccctagcctgggggaaataagaaatccatat

SEQ ID NO: 130078 - DNA, 1068 bp, Homo Sapiens
  misc_feature (572)..(662): n is a, c, g, or t
  misc_feature (671)..(682): n is a, c, g, or t
tttttatgacaaaaccagaatgttgaatgtttattgcatcaaacaacttgatcattatcattagtagcaagctgccacacaattgcaaccgctgtgtttttgccataggcgcccgctgggacacccaagcaggaaccattgttgaagcccgtctcaaggagctggcatgccctatgccggtcatctttgcaaaagccacccccgtggacagacaagaaaccaaacagacctacgagtgccctgtgtatagaaccaaactgagaggccccagctacatctggaccttcaggctgaagagcgaagagaagactgcaaaatgggttctggctggagtggctctgcttctagaagcgtaaggtaacactggcattcctctagcctctgctggagtgcagtgaggattttctagcatgttgctgcactgttcccatgcacattattctaactttttagtaactcacacgtgcattcttttttcaacgctatccttagagtgaaagtcagaaaaaaatactagaaactaactcagggctgagcgtggtggcacacgactgtaatcccagttactcagnnnnnnnnnnnnnnnnnnnnnnnnnnnnnnnnnnnnnnnnnnnnnnnnnnnnnnnnnnnnnnnnnnnnnnnnnnnnnnnnnnnnnnnnnnntccatctcnnnnnnnnnnnngtacatcataaaagtacatcatatgtgaacatgcaaaagcaatgcagccggaaagaacggagattttaatttttaacaaacaacaaattaaattattagcccttaaactctttcaaaatataaaagcagcaggccccaggtgagtcctgaaggaagaggctagcactctgtaaggcctccagtgtctacaatgttgatggtccccttttgttcagtcaagttttaataaaaataaaactgttctacagttaattgcactttgttcagtgtaaatttccaatgaccaagagcaggttaaacgatgtgtgtggtctattaaactgtggtcacctcggctaaggcacacttggcctggagtgagttactgtttgggaagccaaagatag

SEQ ID NO: 130079 - DNA, 2061 bp, Homo Sapiens
tttctgtgaataggtttattaagaccacctaggagaacctctttggcaactaccacaaattctaggccatttaaaatccaggccaagttcatatttgctctccatgatcaccattacaacaaccacaggtcacacagtattacagaacaaaagcatggtcactttattttacccaaatgcaaatcgtttttcacaaccaagacttttttctttcctacaatgttacaaatgatgtatccaagtccgactgtaatttggagttaaacagggatcatagaaccaaggaattatctctgaagctgctctttgggccactgtgccaccccaacagctctatcctgttgttcttttttttaattaaaaaatcattaaacaaaaaatggagatggggtcttgctatactgcccaggctgatcttgaactcttgggctcagacgtaccgatatactgatccttccggctcagccttcccaagtgttggggttacaagtgtgagccattgcactcagccatctctacacactgtttttcaaggaaaggcagctacacctattccgtctccaaaccaaccctcacctggtgtccagttttcttggaagtctcaatttttctcatgacagcacattacctaatacctaccacattaggatgttaactcataaaaacatactacaaaagctttaaaaaacatttatttgtattaagtaagtgcaacagtgcaaagaaacttatgcatttgggcccttgcttccctactgttcacattagtttagtttagaagattaagtataataacagaaggagaacagaagaaatgaatataaatatactcagggtagccaaatcctctaattcactaaaggatgaaccaaagttgttggccagattcacatttatgtgggagcctaaacaaattatgttccctttaactgttctaggcctgtggaaaagggaagtggacaacatttatattacaagacagtaattttattgaaacatctttttttgtctaaaactatgcatggagatattaatctcttgtttataaattaggttaagtctaacatcactatttgaaaccagtgttatttacaaaaatgaacctcttctttgctttattgttggtttacaggaataattttaaaccaacctcaatctatctttaaaaatcttcctgccttcaaatgcccagcaacccttataaggtagggggcagccctttgacagcaacattcatcattcaccaggaatgtagaaccacaagtgacaacacacaactacaacaacaagattaaatcattcccaacaattcctatttgcttttccaaagcatgctatgtctaattctgcctttctatgcagacaggtgggagagggagcccatagagtatattaatgttaattaaattaacttcctttaaaagctaacaggatggcttagtgtggatgaggatgaactgctgtggatgacactagcagataatgaagtaaactttaaacccagattagtaacatgtactccagtaactgaccagctcagatagagacttctcatttactctggatcacatgtacaatattttaccttccaattaaatatagtgccaaaatctttcaaaatagatagagaataggcttcttagaaattcaaataaaaatgttaaataataaaaactggtggcctattatagagtttctgacagactccaatatactgggtaccagaaagtaactctatctcagatgctagtaaaaaggtaaattttgtatatacataaaagacaatattacgagactgtagtgtcatttgtcaaaacaagaatatctagaatggaattttcagtaaacacttgggatgaagggcaatcagaatacaacgaggaagcaaaatccacataagttaattcctaatttgagaaatcaatagaatcaataaattgataattactgtctccataggtcacgaattccaaagactagttagtagttagtttctaactaaatgattacaggacgttctgatatatgctgtcttcttgtgatcagtttgttctggcaaga

SEQ ID NO: 130080 - DNA, 953 bp, Homo Sapiens
  misc_feature (70)..(70): n is a, c, g, or t
ttctcctctagttattaagtgtttgcagcaatagcacaacaaatctttttttaatacatctgacaagccncaatgatttcaatgctgggaggggaaaaacaacaaacaccactcttgtctatctataattaacctctctctctctcagtgctatattggttaaaatcaatggacaacccctttttgtatgtcaaattgtaaattttaatgttttcattagaatagtcttttatagcactctccaaaaagaagcaataaaataactaacagcaaagttcaatacaggagcactctccgggttaacaacgccaacaaaaaaagtgaaatgtaaatcacatataatacaattgaagcgtccaaaacaatttaaataattttaaatattttatttttaaattgctacaaatgctttatacaatatttcaacataaagtccccataacagaaatgtaacaaaatgggaatgatagtggaaggattaaagtggcacaaattcaccaaacaaatattaaactacaaatttttcagaggtagattacttttgaagttgagaacaaaaaacagtatgaataaaacctagccgctttccaccaactcagtcattaatttagggggaggcataaaatgtaaggataaatgatattaatatacttaggaagaggccaatttgttgtttttaatctctattagagatgcaagtgtaaaacctggtatgcaaattcatttatacttacgtgtagacatacatctgtacaggcctgggatgcgcctgtgcactgatatattgctacatagtctctgataatataatagttataaattagtgccagataagaatctgagaggataacgtccatttggatatacaaacgcaacaccagaataggcataaaaaagagtccatatccaatctggtttcctctccattacgctggcaatctacttgtgattta

SEQ ID NO: 130081 - DNA, 1468 bp, Homo Sapiens
ataattagaggtcggatttggatttcccgttggggtaagtgccccggaaagggcccttcgaaaaccccttttggggaattgttcaggaaacccctcggtttgccgcccgggcgtttttttagtgggggagaaatccaaagccctttggccaaggccagggatctccctaggaaaacaggtaagggccaaggtccaggttacctaatggggcccgcgcggccaaaacgaaatgggtctagaaagtttttggaggggccgaggcgggcccgacaaggtttggtggatggaaaggtggttggtcttgctttaacattttgaaatttattttggtttctgttcaacaaaaccaaaccacattgggatggcatttacagaagctcagaaaaacattatgcactgaaaaatacttctcattagaccacaacaagctttaaaaaaataaaattaagtaattatagttaagttacaaaaagctgaaagtataaaacattgtggaaacagtgaccatctattaactgggaaaacacaaaagaagagaaacaatttcaaccattaatcatttatcaaacatgaagtctggtgcattaaaggaatatctatcagagggtgaggggctggcttactggcagtttgacatactatacagctcagacccaaacccttcacagagagactctaagtgtacatctgacttgcagaactagacgagttgagtcactgttagctctggatataccgttaaattaaacctcaaaatctctccccaggactcttgctcaagcaagtcacgccaaatccaaccttcctaacaggggttttcagaaaatggcctgcagaagcacaggatctggtgcctcacagtttcctccatgctgcaatgctctagttctcatcacgcccatagcatctggcatcaggttaccctgtacagtcaacggccatagaagtcgccagcagggaaattccagaggtttagaattctatcagcacatgtgtcactggaagccatcatgggagtactatgtcagagcgtatgtaactagctgtcaggtctttccccgttgcctcagcctttctacacagactggccttcaacttcccctgagtccagaagtagactctttcagcaactctattcaggaatctgcagcaggaaaactgcttcctctattaacatctatgactgaagcacagatgtgtctagtagaaatcacccttcacccaaaagctgggcgcagaaagggaagcccttagctgactataggaggtgcctcttgtggctccacgtgcttcttacacaccaccccccagcttgagcgatgcctcagccagctcaccctcattcacacaatcgctagaaaacatgcttcaaatattctatctttgaaaagacaccatgcagaaaataagctttcctatgatgtgcggtattttcttcaatgctagatctctcagagttcatgttaac

SEQ ID NO: 130082 - DNA, 390 bp, Homo Sapiens
  misc_feature (258)..(300): n is a, c, g, or t
ttgctgactttaaaatgtttattctttaaaaaattagttgctttttatacagctatacaaagttcttaatgtttctttggcaatggaatataatggaattttacaactatataaaaaagttacctttgcctaagaaacagtatttactgtgtgtagatagttgagtgagaaaattctctaccatccagcaccctaattaattgacgtgataagctacctcatattacaggattccccataagaaaggagggaaaaagnnnnnnnnnnnnnnnnnnnnnnnnnnnnnnnnnnnnnnnnnnnaccttctgtgggctccaaaacacagtatcacgggccctatctggcaggggcaactttggccaatttggcccaaatacatttagggtggga

SEQ ID NO: 130083 - DNA, 844 bp, Homo Sapiens
  misc_feature (455)..(477): n is a, c, g, or t
  misc_feature (650)..(661): n is a, c, g, or t
  misc_feature (738)..(788): n is a, c, g, or t
caatatttcttgtgatgacatagagaacggagacaacctgggctgaagaaagaagattaaatgctgaaacatttggaatcccacttcgtccaaaccgtggccgtgggggatacagaggcagaggaggtcttggtttccgtggtggcagagggcgtggtggtggcagaggtggtaccttcactgcccctcgaggatttcgcggtggattcagaggaggtcgtgggggccgggagtttgcggattttgaatataggaaaaccacagcttttggaccctaaaaggtctggattgatcgtactgctttctgaaagaaagacaacaaagttgctgcatagtctacaaacaagtctctgaaaataggtgaatttctagctcttcatggtcctgaacattgatttcagtctttgcaaagaatgaagaagtgaattcgctgtacatttgtcaccagcactggnnnnnnnnnnnnnnnnnnnnnnnccgcttaatttcaaagataaaatgcagttacttttgggggtggaaggctcatcttaaaacatgagcattaaatatatttggaatagcagaaggttaagtaatttcttatgtatagttaaactaaagcagtacttcagtgggacttaacaagtattttttcatcactgaaaggnnnnnnnnnnnnatcactaaattgtatttggcaattgcaagttgcctgcagatagggccgtgatactgtgttttgagccacagaaggtnnnnnnnnnnnnnnnnnnnnnnnnnnnnnnnnnnnnnnnnnnnnnnnnnnnctttttcctcctttcttttggggaatcctgtaatatgaggtagcttatttcgtcaa

SEQ ID NO: 130084 - DNA, 722 bp, Homo Sapiens
ttttttatttgaggtcactgagggatttttatttgcactgattttgctataaagtgttactgaggtagagccaactgtccagggttggacaggggcaaggaacacaaggacccaaggaaaggggagccagggtcctacgttgtggtgcagtgcctcccagtcatccgtataaacaataaattgggcaataaatagacggtggacaaggatcggagggacaggcagagaaggcttcaaggagtgacaggctataggccttgaggaataaaacggtacagagttaggcatggacccagagcctacttccccagccttcccagataagtttagggcatatggagcagagagggtttcagccggaaggcatcaagaaaagagaagacaccccgctttcgaggggttgcccctgcaccgccaacccctcctttgagcagggggaggggcaggggacctcctggggaatccatggagctggtccgcttgagccgcaggcgggcacgggcctgggcaccccaggccttgcctcgagctgcagaggccacaagacacttctggtactgaaccatacaggcagcctgcacagcttcagagagtccccctgcatggggctggcaccagaaggctgcgcactggaagctctgacggcccaggtcagcgatgcaggccaaaggtgtgtggttggcgccaacaccaataaatgtacaaagcgcacagggcacttg

SEQ ID NO: 130085 - DNA, 757 bp, Homo Sapiens
ggctggcaaataaagggtttaatatttggttaaaaattgattttaaaaaacaagaaaaatatcctcaaaacatttacatttgatcactaatattaaagttcaaaatatcccccaaattacatttaattaaatgtttaaaattacaattccattaaatccattaatttaaaactacttttaataaaacaatacaacattagctacccattaacttttttaaaaagccacatcaaaataactcaaaactgtatttcaacaaacctgccagctgactcttgaggataaattctcaactataagacgattttctgttcttacaggtggagcatttcgtctatcatttcgaggtctgcgactactaaaacggtcagagtatcgtcctctacctcttccacctcgtgaccgagccctagcatgttcaatagtaaccctttcactacagagttcttttccatcaagctcatacacagcatcatctgcatcccttggatcctcaaattccacaaaaccaaagcctcttttcagatcaatatctcttatccgtccatatcccttgaagaatctttccacgtccttctccctggccgctggatttagtctcccgatgaatacccgacagccactcatgatgtccggctagtacttcctaccggacggggtctttggcggctgagacccagacaggtccgtagtctgcgacggagtcgtcgacctccacgcagaccaggacttaagtcgtccacgccactccacaact

SEQ ID NO: 130086 - DNA, 802 bp, Homo Sapiens
tctggtccgggatcgagacctgcttcgtgacctactgtgccttttgctgcctgtcgagttaatttgtagtgtttgctcccagtgtatgttcctgttccgagaaagtttttcaatagcattctttaagtcaccataagaggcaaactcaaccaccccttcatttaatttaggtcggtgtgcatccgcaaacgttacttccccagcttgtctcatgaaatctttgagatcctgccagctgactcttgaggataaattctcaactataagacgattttctgttcttacaggtggagcatttcgtctatcatttcgaggtctgcgactactaaaacggtcagagtatcgtcctctacctcttccacctcgtgaccgagccctagcatgttcaatagtaaccctttcactacagagttcttttccatcaagctcatacacagcatcatctgcatcccttggatcctcaaattccacaaaaccaaagcctcttttcagatcaatatctcttatccgtccatatcccttgaagaatctttccacgtccttctcctggccgctggatttagtctcccgatgaatacccgacagccactcatgatgtccggctagtacttcctaccggacggggtctttggcggctgagacccagacaggtccgtagtctgcgacggagtcgtcgacctccacgcagaccaggacttaactcgtctacgccactccacaactgacgcacttcgcagctttggcgctccacccccggccgtaatggccgaattcccgggcatatgtccggtaccgtcgactg

SEQ ID NO: 130087 - DNA, 1040 bp, Homo Sapiens
  misc_feature (212)..(238): n is a, c, g, or t
  misc_feature (929)..(963): n is a, c, g, or t
acaaaacaaaaacgggacttgctccgggcttcgggctcctggtcctgctttcttggacccgcctgaaagatttgcgacttacgggaaccgggatcgggctacgaggacctagaaggacttctggtcccgggatcgagaccctgcttcttgacctactgtccttttggctgccttcaaataaattttatttttctcccatttatttcctttcnnnnnnnnnnnnnnnnnnnnnnnnnnnagtcaccataagaggcaaactcaaccaccccttcatttaatttaggtcggtgtgcatccgcaaacgttacttccccagcttgtctcatgaaatctttgagatcctgccagctgactcttgaggataaattctcaactataagacgattttctgttcttacaggtggagcatttcgtctatcatttcgaggtctgcgactactaaaacggtcagagtatcgtcctctacctcttccacctcgtgaccgagccctagcatgttcaatagtaaccctttcactacagagttcttttccatcaagctcatacacagcatcatctgcatcccttggatcctcaaattccacaaaaccaaagcctcttttcagatcaatatctcttatccgtccatatcccttgaagaatctttccacgtccttctccctggccgctggatttagtctcccgatgaatacccgacagccactcatgatgtccggctagtacttcctaccggacggggtctttggcggctgagacccagacaggtccgtagtctgcgacggagtcgtcgacctccacgcagaccaggacttaactcgtctacgccactccacaactgacgcacttagcagctctggcgctccacaaaatggagggcccccggccgtaatggccgaattcccgggcatatgtccggtaccgtcgactgnnnnnnnnnnnnnnnnnnnnnnnnnnnnnnnnnnncgccgcttcctcgctcactgctcgctgcgctcgtcgttcgctgcggcgagctagcgccctatatgtatatcaaggtt

SEQ ID NO: 130088 - DNA, 909 bp, Homo Sapiens
gacggatcggtacgaactagagactctgtccggatcgaactgcttctgacctactgtgcctttgcggccttcaagaatgtaattttctcccatttatttcctttccagaaagttttttcaatagcattctttaagtcaccataagaggcaaactcaaccaccccttcatttaatttaggtcggtgtgcatccgcaaacgttacttccccagcttgtctcatgaaatctttgagatcctgccaactgactcttgaggataaattctcaactataagacgattttctgttcttacaggtggagcatttcgtctatcatttcgaggtctgcgactactaaaacggtcagagtatcgtcctctacctcttccacctcgtgaccgagccctagcatgttcaatagtaaccctttcactacagagttcttttccatcaagctcatacacagcatcatctgcatcccttggatcctcaaattccacaaaacccaagcctcttttcagatcaatatctcttatccgtccatatcccttgaagaatctttccacgtccttctccctggccgctggatttagtctcccgatgaatacccgacagccactcatgatgtccggctagtacttcctcgaatcaactgcgctcattagacgccatcctccgcaaagagagcagccccggccgctcacgatctgagcggccatgaagaagcctcgatccgagaaggcttgccctcaaagtgagccactcacctaccggacggggtctttggcggctgagacccagacaggtccgtagtctgcgacggagtcgtcgacctccacgcagaccaggacttaactcgtctacgccactccacaactcccccggccgtaatggccgaattcccgggcatatgtccggtaccgtcgactg

SEQ ID NO: 130089 - DNA, 2469 bp, Homo Sapiens
  misc_feature (43)..(43): n is a, c, g, or t
  misc_feature (47)..(47): n is a, c, g, or t
  misc_feature (430)..(430): n is a, c, g, or t
  misc_feature (585)..(656): n is a, c, g, or t
  misc_feature (763)..(805): n is a, c, g, or t
  misc_feature (1428)..(1448): n is a, c, g, or t
gggacaacagggcggcggaaagaggggaaaaatatgcgggcgntagncagggaggcggggcggttagagtacggggtgggatatccggcgcacgacacggggcgtatcaacagaggtgaagcggtaaataggtaaatataggcggagacatagcgccgcgtggcggtatggaataacgccgcgtaagcgggaaacgagagcgcttggcagagtggtttatataggggcgggacagccagaggaaggtgagattggtggcacatgtagggcgggacaaagagaaggggtggggatagggggagataaagaggatgcgcgcggtacgaacagcgtggcatgagggtataaatgggtgatgaatagggcgggcgcggataaggcggtggagggcgcggcggtcaaacaagagggcgggcgcgcgggcaggganttaacggggatggaaagggcgataaaccgaacgcggcgggagaatagggaatgtggggcgggcgcggcgaggtcgtagcggaaaacgggtatgcgcaatacgagacaggagagaatagggcgcgagggggggagcggtcggggaaattcgtcaannnnnnnnnnnnnnnnnnnnnnnnnnnnnnnnnnnnnnnnnnnnnnnnnnnnnnnnnnnnnnnnnnnnnnnncataacgcgcgcgggcaagctgcggtgggtatggcaaggacggggagatggtcgcggagaggggaagaagcggaggggcgtgggggggttgtgatagggaagccgannnnnnnnnnnnnnnnnnnnnnnnnnnnnnnnnnnnnnnnnnngtacgggctggggtcgcgtggcgcgaatagggtatcagaggccggaatgcgtgggtgtgaaggagtgtttgcgggatgcggatggtggacgggtttattttgtggtttgatgcgtttgtttgttttttttcctaggtgtataatattttattatcaataacaaacagctgctctaatgtgtctgtccagcagctgttaaagagtggaggacacccttgaccctaacaaggaaaacaaattaagcctttatgtacaagcaaatttagagctcttttaagtgtccaaagctattaattagtttaattaaggcattaaactaattctgaattaacatttttataaccaagaactaaaatgttcaaatttttttctagtacaaaaaaattaaatttgctttagttataaaagagctctgtcaatatacacaaactatatacttcagacattcacaaaaatgtgagcagaaggcttatcaaaagacatttaatacaattagttttcaacaaccccttggtggtccacatctacaaagatatccagcccaacccaaccccccttccaaatcccacccccacagaaaagcacatacttaccagaatttttagcaagtatggtttgggaannnnnnnnnnnnnnnnnnnnnaaaaaaaggcccccagggcaagttatttacagtttaattgccactgtcaactgatctggaccttgatcgggaccgggacctctggcgatccacagatgctggagacttagatctacttgaagaaccacgtttctggctcttctcaggcacgggagacctactaacagaacgggacttgctccggctccggctcctgctcctgcttcttgaccggctgtaagatttgcgactacgggaacgggatcggctacgagacctagaggaacttctggtccgggatcgagacctgcttcttgacctactgtgccttttgctgccttcaattaattttatttttctcccatttatttcctttccagaaagtttttcaatagcattctttaagtcaccataagaggcaaactcaaccaccccttcatttaatttaggtcggtgtgcatccgcaaacgttacttccccagcttgtctcatgaaatctttgagatcctgccagctgactcttgaggataaattctcaactataagacgattttctgttcttacaggtggagcatttcgtctatcatttcgaggtctgcgactactaaaacggtcagagtatcgtcctctacctcttccacctcgtgaccgagccctagcatgttcaatagtaaccctttcactacagagttcttttccatcaagctcatacacagcatcatctgcatcccttggatcctcaaattccacaaaaccaaagcctcttttcagatcaatatctcttatccgtccatatcccttgaagaatctttccacgtccttctccctggccgctggatttagtctcccgatgaatacccgacagccactcatgatgtccggctagtacttcctaccggacggggtctttggcggctgagacccagacaggtccgtagtctgcgacggagtcgtcgacctccacgcagaccaggacttaactcgttacgccaccctcgtgccgattcacacaccaggccttcgtacctagcgttatggtttt

SEQ ID NO: 130090 - DNA, 708 bp, Homo Sapiens
  misc_feature (219)..(265): n is a, c, g, or t
gctctattcgtcatgtttttattggcaggtaatttacatacaaagaaattcaaaaatcttaaatttcacaattcaatgtgttttgtcaaatgcctgcactcctgtccctcccccactgtaagatttacaacactctagcacccccaaaaagttatttcatgcccccttcagctaacctctaccatgccactccatccataaaccccaaagcaactattnnnnnnnnnnnnnnnnnnnnnnnnnnnnnnnnnnnnnnnnnnnnnnntactagtctgatttttaaatcacagattcattttcatataaatggaatcatacaatgtttattctttcatacctgacttctttcattcaggaacacgattcagagcttctgctgtgcagtagggggcatcaatagttcattttctttttattgtctgctaccattccattgtatggattcaacctagtctgtttattcattctcctgtgaatgaatatttgggttatttccagtttttgtcttttatgaataaagcttctattttcatcttttcagaagtctatttgttagatatgagttttcacctctttatccttggataaaaacctaaggatggactcgctggataatataatagggtatttgtttaaatttacaagaaacaaccaaacaattttcaaaagtgtttgcgttcttttccttactcactagaaatacatgag

SEQ ID NO: 130091 - DNA, 1212 bp, Homo Sapiens
  misc_feature (136)..(136): n is a, c, g, or t
  misc_feature (149)..(150): n is a, c, g, or t
  misc_feature (152)..(152): n is a, c, g, or t
ttgctcagagattccgttaagtgcaatctttattaatttttctcaagggtacctctgagactttgttccctacagcttgttacttgttattaaccgtttaacacaacgtcttgagaattctacacgcacctatctntgatggagatganncnaaagtcagaaagactgatgtttccctagagctagaaacaggacccttgatgcccagggtctgagaagttgttgtgacttttatgcgttaaatgagggtgatgggagatcagcccgaattgccgcctgcctcttgctaaataggagcagaggacttggcctgcagctccttgggagcccttgattgggaagagagtttcaagggaggcagctggattcaatctagcaggtggtcagcttcagctttctccatcgaaatcccattctcctgtccagaggcccagtgggtcatctccccaaggtgggtgtggaccctggcctcagaggccttgctggtgctgtcacctcccacctgttccattccgaggcctcacccagaagtgggaccctccccttcctccaccagagccaccgtgactgtttctgatgacctggagagtcaacaacaaccagaaaggtttctgcccagagcaggcttcttaaggcctttacgaagttttgtgccttccaagtgctgaagaagacctggtcagcctaaatcttcccagtcccgctgtggagctgtcagtcaccggagtaatgagctcctggttcctcgggagtccttcgtgctgtgtggcagggttcctctctagacaagtacacaggccctgccaccctgacatcaaactgttgtactatgatcacagtccctgtgccatccttttccaagactggggctcacaccatgtttttgaatgagaatccctgctggttgagacttttgcttccacttgtttccttggagatgtttttccaagagcataatgtacattaaagtcttcgagttgagcctattaaaataaccgggaccgagaggctctaaatcttgtcgggcgcgcctacggcccctcgaaggaaccttttcctaaacccatttcgttttgggccgccgccgggtccctctgtaaggataaagttggcaacactgggcgcccataaggtttgcctctcccctaggagacaacacccgtgggccccatgaaacccaaacggggtctgagacattccctcccgcccaat

SEQ ID NO: 130092 - DNA, 2040 bp, Homo Sapiens
  misc_feature (40)..(40): n is a, c, g, or t
  misc_feature (135)..(135): n is a, c, g, or t
  misc_feature (210)..(211): n is a, c, g, or t
aaaggggaggggtccccacttctggggtggaggcctcggnaatggaacagggtgggagggtgacagcaccagcaaaggcttctgaggccagggtccaacacccaccttgggagatgacccactgggccctctgancaggagaatgggatttcgatggagaaagctgaagctgaccacctgctagattgaatccagctgcctccctgaacnntctcttcccaatcaagggctcccaaggagctgcaggccaagtcctctgctcctatttagcaagaggcaggcggcaattcgggctgatctccccatcacccttcatttaaccgcaaaaaaagtcaccaaccaacttctcagaccccctgggcaatccagggtttcttgtttcctaagctcctatggaacaagcaatcagttctttcttggacttttggttcaattccttctcattcagaggaaatatggttgccgtgtaggcagatgtctcctaggagcgtgtgtgtgtaagagcctgtgtgaaattcagccaggttagcaccaaggcctggctgatggggaacccacaaatgtgccttcaggatgggtacagcctctttggcaatgaagaaatatatttatcagtgaaaaagggaatttctggctcccatctttgcaggacctggagagattgctgccctggcaggtcccaggatgggaagaagtaaatggagaggctcaggactgcagccctgtgggaaggggcccctcgcagctgagagcgctccccgagttagcccatctcgatgccctcagggagctccaccaccaccggggcacagtcctcaggttccgcagcaaagtcccaccggaacttcttggtcaggtgagcttggaacttttcagctttctttctcagggtggcatccacggcaatgctgcaggcagaggaaaagaaaacctgtaaggtgctggtgaggaagttgtcttgggagacaatgtctacgaagaagtcagcggggatctcaccaagctggtggtacaggatggagatgaggttgatgtagagggtgtggtgcttcatcatggctgcttctgaccggcacaggaggttcaggagccgcttccaatgctcaaatgcctcgtacacattccccagcaggaagcacacaaaagcaaactggagttcaccaagcacatcctgggggctgctggggaactgcttgttgagcacagtctccagggcatagctcaggtccatgctgtgcttggttatctcagctggcgtggcaccctctgggaacatctgcgtgggcagctctgagaagcggatctctgtcccggctctgggcttcatctctggtagccgggccaggccctcttggtagcttttgcactcaatgccacagcggggtagattctgccccacgcggtccttggtgtgcttcatggagagcacaggtagcacatcggaaaaggcacagatctgtcgattctcgggctgtagcttctccactgtggcttcgctgatgaagttggtgagtgagatccacttcttcagggtggcatatgggtaaggccccaggaactggtccagctcctggaggttggccctcatggcctccacctcagactctggggctggggacaggtctacctcttccctgagtgtgctccagcgcagcactgtcagcccccgctggtgcaggctaaggaagaaacccatacgagggcctacttccttcggattagccttgtccacagagctgtagtggaggaagtggatgcctggagggatcatcttcacgccccggaacttgggcccgacctcccaggagttatagtcaatcccaaactctgttcccttgggcatgttcaggatgaccacagtggccccttcaaagaagaggcgcttggctagctcaggatccatctgcacggcagccatggggccagtggtgggtgaccaaaagaaccctttttctttgatgaacagcgcctcgccccacgcctcgtgccgaattccaacccaggcctcgtacctagcagataggtgggtggggggtgggg

SEQ ID NO: 130093 - DNA, 744 bp, Homo Sapiens
  misc_feature (725)..(725): n is a, c, g, or t
ttttttttcttagcaattgacacattttaatacaaaccagtctacattcattcctaaaaggctcatttccagtaaaaaatatacaccagtagaaacttctcccagaactggggcagaggctgaggagacctgggccagattccccaagactgacaggcagccagcttgagccaggcacaggaagaggctccagggcgaagcgggggccctgctccatcttcaggttcaggcgggagactcccccacagagggagggaggggaggcactcggggccacatccaggcaagcaccacccccctgccctccacggcagccttgggagttggacgcgtcggccaaggctgctgctgttgctcctccaaagaaggttggcttcaaggccgtgtccagggacccacgagcagaggcactggggggcaagggatctccaagggggcaagggatccctaaagggggtagctcacaggtgagggggtttaggccccctctagggagcgcctgaggccatacattcaagagtgtccctggtgaggcccagggaagagccaggactggccaagggcccaggccgtcagctcctccacagtgagccccagggctcaggaagacagcggggtctgacacggggagctgggtttccagtgccacgggtgcaggagcaacctggaaaattcatgatacaactccctgttaagaatgggtctggctttagcccagggacggnggcactacagcacacagca

SEQ ID NO: 130094 - DNA, 656 bp, Homo Sapiens
  misc_feature (640)..(640): n is a, c, g, or t
aacatttgtcatcaccccaaactttattgcttacaaagagttctctacaacccagactctgcagtaccaaggctgcagttctttatgtgctgggggccggggctctctccccgggagcagtctgactcaatgtggacagctggacaaaggctgtcttggcaagatgtgggaatgagcttctcccacggagtctcggcgtcccctgccccaggaggttgaggctagcagacaccccctgacgattcacagctgatttaatgctacgtgagtcctgagtagctcccctgggagaagaggctaagctggggcaatggggaagggggtgctattcttagagaaatctggaagaggtttgaggagtcacatgcatgtggacagctcaagactgtgtcccttcaccccatctcctggcttgctatgctcctacagtgtcactgccctaccctgccctgccagagggcagccatgaaagtgctttgaggtcatcagagtgcaaagtgccgtcggcagtaccctctggccaggggcagggcagggtgagtgtcagtgtgatgctgagctgtgctctggggaaccagcacgctggacactgatagtggggctggggcgccggagcgtctctctctgctgctttccttancactgatcatgtccat

SEQ ID NO: 130095 - DNA, 1218 bp, Homo Sapiens
agcagatcccaaaggggaaacacaagtcattttattcagatgaggcactttcaatgtatgtgttttggggtgtgtgtatgtgtgtgcgcatggggaacagtgaggtggtgcaggataataaatactgtgagggtgaaggaacactcccccaagctggcaggagtatgtggcagcaatgtacagagcctcgggagtagagtccagggacagggaggtgggttcaaggctggcttggaggccaagggtgtcccccttagctcaagaagccaaagaaattggtggagcgggggggtgggcccatgagcatgggcatctggttcttgtgggtgatcttgattgtacagggcgtctgcatccagggttctccgtcaatttgcatgggaagggtttttgtggtgtggaaggtgatctcagagcacttggccagccgacgtccagcattcttgagcttggtatagatttggcccatctcaattgcaccctccagcccaaccacttccagtctcttgtcacttaggtctggtacacaggttttcaggatatcagggtcggtgatgactttagctgtagcacctaaggcctggttgatcccatagatatccccatggggtctcctggtatcaccccagaggttggagccaccatgcatgctagggatgtttagcactgcgatgccttctagggacaggttgctcagatccagcggtttcccacagatctcacctgtcaaagactcctccagctttttgcatgttgagaagatggattcagatgtggcaaattcgaagtaccatagcttgttcttcattctgctgtttgacttctccggatatttctctcgcatgatgtggaatcgatgagcaatagaggcatccacgccaatagagaagtagttattgatgatttgaaaggggactgggtcacttttttcttcagtttgttgaggtatcacctccacagaccatcgatccatatgtaccactttactcatctctaaatccttgaggatctttgccagattctgtccttcataccctcctccccatcttaggcatcgagccagatcatttccagtacccaggggcaacacagcaacaggaggcaaaactggcaagttagctttgtcaatggtctctagaatccagcctactgtgccgtctccaccacacaccaaaatccggctatcaggaacatccttgaataatcggagccctatct

SEQ ID NO: 130096 - DNA, 1752 bp, Homo Sapiens
  misc_feature (53)..(125): n is a, c, g, or t
  misc_feature (172)..(210): n is a, c, g, or t
  misc_feature (219)..(236): n is a, c, g, or t
  misc_feature (281)..(292): n is a, c, g, or t
gatcacaaaaaaaagcccgctcattaggcgggttaaattcccgggtactgcannnnnnnnnnnnnnnnnnnnnnnnnnnnnnnnnnnnnnnnnnnnnnnnnnnnnnnnnnnnnnnnnnnnnnnnnaccactttgtacaagaaagctgggtcaggaaacagctatgaccatgnnnnnnnnnnnnnnnnnnnnnnnnnnnnnnnnnnnnnnngcctcgagnnnnnnnnnnnnnnnnnngtttgtcagactgaatgttttatttcaacagacatccctggtttnnnnnnnnnnnngtggtggtggggagggttcaacattttatcacacctgacagagagcaaaactcccaccccagaactcagagccccttcggaggcatcacacaagtctttgctagctccaggacagaaaggagctgaattttctaacttgttaagaaaaatctatcaaatatgttcattctcgcagaggcgagggctgggtccttggggaaagagatcctgggcttagagcagctggggtcccagaggtgaagctgggggccaggccagctgggctggcaggagatcctgggagcaatcagttccagagccctagaatccatatttggcttgggtctgacggcggctgagcttgttctctgaccaggtgttcttcagttccagctcccgctccttggcctgatgaataagatatgtgatctggtgtttccgccgctgctggcctgttggctgctcacctttctttttgctgaatgacttcatggttttctcttctgtcaatgacttagtcatccattgctgggccccactgagctggtcatcacctttgatctccacaaagttgatttcttctctccctcggttcctcttgccctgcagccgcttaaatgcttcgtcatcgatgaaggaggcatctggggcaatttcctggggggggaccagggccgggtcctgtgcaggatagtagccaccactgtaataatcctgataataagcaccagcggcattggcatcgccatatgtggaaaactgattgtagctgtagttgtccccaggcttaggcatccaagggggccccacttgaacctgctgccatttgaattcaaggggggcattggctgcatcgtcctggaaagccggctctggttccgtgcctggaggcagctcttcagggacagtggggatggggtaagggtatggctcaactccaggtggctcagccttttcagggagggagaaaaagttttcgggggctacttcctcatcactgtcgtcttcttcctgcgtgatctgctttgtcacctgcagggcagcactcttggcagcagccttgatagcagagggcgacggagtggtggttgtggtgcccacaacaggggcaagagaggaagtcttggtcttagaagccagtctggagggcttagtatcaggggagccatccgagggtttgcgggagaaggcatggggcaggagcaacctgttagtctctttcacagtcaggtttttaggttggggaagcaaggcagacaaaccagtcccctcactggatccctgaaggatagttttcttctttgtgggttcatcttcctcagaatctgaatctcccttatgcaactccggcgccgcgatcttcacgggctctttcctcttctttggcttgggaagccccagcgggggaccggcaccgccaattggagggggcagattgaggcctcgtgccgattcagccacccagcccgtactaggccgta

SEQ ID NO: 130097 - DNA, 746 bp, Homo Sapiens
cttcctcagaatctgaatctcccttatgcaactccggcgccgcgatcttcacgggctctttcctcttctttggcttggaaagccccagcgggggaccggcaccgccaattggagggggcagattgaggccagggcctcggggcgagggcaaccccaatcccagtccctccccaactcccgccgcttcagccgggctcacgcctggaggtggggggaagcctcccaggccgaagggcaaggggggaggaggctgaagcctggggtctccggtgggtgggggaagcaacagcggcgggggaaaggctggcgccagcatctgagggggcggaggcagcaaggccggacccttgggcgcagggagagaagcgaacaagccccctaaagcgggcccagatgtaggagccaccgcctcctcttcctccggctcgggctcagcctcatccggctcgctctcatcgctgctggcgtaagcaaccagcgacatggcgcctcccgcgtttcgggcgcccttgccggcagatgaggcctacttgagaccggggatgcccggaggcctagtaggccccgccacctggcggggcggggaaccgaaaagtccgcctgctccgtactctagggctagccccggcagaaactcatggctacggctgatttccaccgaacaaggcgtacctcttcacttaagctcctagtcccgggcaaccgccacccaggcctcgctaccttatgaccgttatagttactgc

SEQ ID NO: 130098 - DNA, 1079 bp, Homo Sapiens
tttttctgaccctcccaaacatgtcagctctcacggcagctggcccacctggcaacagccccagtcagtgaaagagggttctttcctttttatttttgcaatatcccatacaaaagcaatagaaacgtaacagtcttaacaagaagtttacaattgaatatttgaacagaaaatctgtacacattatcatttacagcaattttacatggtaaattaactgattgttttaaaatgttctttctaaatcgctccactctgctgccctaactcttggagtattctaaagagtctaactagtgctatttacaagtaccaaattaagaccatataacttacataaaactcattagtttaatagctcaatttaacaatgtctgacttcagaatgctgttatgacatattgataaaaggccaaaaattaagtttccataaagatattaaaggtgtctgagaatactttgatgcctataaaagtagctgactctcaattggtcccatggattacatggttaaatccaaaacagtccacctgacaagcaataactgaagatgcctgtggaaaaccagttatgtagacgtgtcagcttaccctggaggacaacagggattacgcaattaagctcgctggaagagagcttcaagtactttcttggacttagctccatttacaatttaaaacatgcaaaatatactcactatacataaaattaatgtttcttaagaaagtaaggcaaaaataattcagcatgagctaatggactgctaacagagaaaccaccaggtacaagtgcacacacatgcttggtgcctggccagccttcacctagtcggggaggagctgtttctcttcctggccgccagggggcagttagctcatggctgagaagtctctcaagggttcagttaaacaagcttccaaatcaaactcatcctccacttgactgtccatgtgtctcaccttggtgggtgtgccagagtacacatcaaagtcatcctgagagctggtctggggctcggagctgctttctgcagattcaagcggacgcgtgggtcgacgatatcccgggaattccggacc

SEQ ID NO: 130099 - DNA, 1127 bp, Homo Sapiens
gccacgaagttaaatggggctgctaaccagaaaaacccccccagggtccaaaggggcacaccacatgcctgggtggctgggccaggctttcccccttagttgggggaaggaagcctttttttctttcctggccgccccaggggggcagttagccttcatggctgagaagtctcctcaagggtttcagttaaaccaagcttccaaaatccaaactcctcctcccacttggactgtcccatgtgtcttcacttttgtggggtgtgccagagtccacatccaaagtcatcctgagaagctgttctggggctcggagctgccttttctgcagattcaaggtctacagggtgtatttcttgcaaatcacatccttctttccgctggaggatcccaaaaatgcagagccaccttccagagtttgatttgctggtcccatgaacgtcgactatacttcttaaatttattaggggtcttgggatgaatgccaggttgtcgaaggtgtcttgggacttctttaatataacgatcgtaggcaattgtgttcttcccatagttgatctgcttctgtctcctcattaggacactttcatctgtctcaaagtcagccggcacagtagacatagactcctttgaatcagaacttcctgatgatgattttctctctcttccaaagtcattgatgaggagtttccttttatatcttgccatttctttgttaactctggtcctcatttcatcttcttcaactgcacttgcccagtcagagcatctggaacggggtttagggccttcaggagtggtaaagctctcgggtctgcgctcggcgccgcggtgctctgcctcctcggcgtcttcgggcctccagcgcctgccgtcggctctgcgcttccgtcccaggctccatcgcgcgggggacggcgggctggcgtcaccgtcgcagcggctctgatgcctcggcgggcttcgcgggcggcaggccatggcagcacgggccgggcgcgcagcgcagggccgaggctgaggcggcggcggcgcgggcagagagcgcagagtagagcagggcagggcctgaggcagaaacccgcgcggacgcgtgggtcgacgatatcccgggaattccggaccggtcc

SEQ ID NO: 130100 - DNA, 719 bp, Homo Sapiens
  misc_feature (706)..(706): n is a, c, g, or t
tttttttggcttttgctacctaactttacttggggggaacgcctacggtgtgggttggggtccttctgaacctcagagtggagagagctctagggtaagaggctgcctgatgggccctgagcccaggagtgcatcgccaggtctcccaggagcctgggggtagcatttgcagaggctgggggtctcgttcccctcactcccacccatgcaggaggcacagactgaacgcttagtaaaatatttcattcagtacgtcttgtttttctgagagaggcaacggcagagggttgggggcagtgtgtgtgtatttgtgatgaacctaactcctcatgccagttctctcgagatttcttcgcgggggctgccgcgaggaagcagccctcgcccctgtcggtggaaagaaggaagagagttctctaccacagaccgctgtgggtgtagccactgggtccggctctgcagcaaacgggttgtgtatgtgtctgcagaacttggggtgacgcccatctggtttaccgctcagggtgatggaatccagtgagctgattaggagaagcgctgtcattttccccagcctgggggtacccatcaaatcgccacccgtttgaggtcaagctcaggctccaataaccccaagcatcacgctaatactaagcactttccctgccctgggcggaggacaaagggggacaccacctcgcctgtnagcaccattgctg

SEQ ID NO: 130101 - DNA, 719 bp, Homo Sapiens
gacaatttatacagtttattacttaaatctaggctaactgtacctagggaaatcaaaaggctgacctagtaagtacattttatctaggatctatttttatttagtaggttcatacatgaaccttgtactataaagaatgtagaaaatattaaccttcagtttgcagtgtgaggaaacactgtttggggatctttctagacccttttcagaaagcaaagaaaccagtgcggaactttcttaggcttctgtctatctgtgtctctccagattctccatattgcaggatgggcacaaagccatgtttctcagaacatgccctgccctatttaagatctctgggaatgcagccccaaggagtttgggagggatgtttactgagtgataccttcatcactggagaagctggctttgcagactcttctcctttttgatcatcctaccaatatgtccagaggatgatcagaggctgtaaaagttactgctgctcaagccaagagaagtgccacttgctcagaggacatactcgggttagctgagttcttgtcttcatgctgtccttcctcctccttcatcaggagttggctgtcagcttggaaaggcgccagtgtgattttccacgtggaaaaaaacactagccagggagtcaggagacctgaattctggcctggggcctgctgcttgacctccggcgattacatgacctctcggggcctcatttg

SEQ ID NO: 130102 - DNA, 1003 bp, Homo Sapiens
cccaaagcggctgcagttaggtcttgaaaaagcttaaggtattaaaactagaaaaacgcaccaaaagttgtgcgtcaaaaagttgctccccaatgagaagtcttctaccgtcatggagcttctgtttccacatactgtccaagaccaccacagggtgcaccgtaccattgggaggtgcttccatattccgcaacaaatgaaacttccatgatgaagatccggaagaaaagatgtagtgatggaaaaggagccacatattccaaccatttaaataactttaatttacatactcactcacacaggtaccagtgctttgaaaatagattgttcagtcctaaaaagcagctttgttctgtcttctcttttctgtccctcccttctcagcccaagccagccctcccactttttcatcactgttcaagtaaggtttgattaagaatttcaccaaacgctcattcttttttggcctctgcattctccaggagagatttgtcggcagttactacacagatggctactgtttcattctttaggggaaaagtctatcccaatggcctcgtcatcttccttttcctctatgggaggggcattttaacactggttctccatggatctcttttggggtgggatttcttctctgctcacctgcttggggtgtcattcaatgccatgccgtgtctcagtcacatgtctttcccactcagagccctgtgaaaacgcccgtccacaaaattcacatggaaaacgcttctcagtgttaagagcagccccgtggtcagaaaatctcatcagctctctgtcttcagccttgctgttcatttcttcttccttgtcctcatcatcgctgctggagctctccattttctccttcatctgttccagctgatccaagttaacccgtccaaccagctcaaagttacggcttaccttatgctcatcccgaaggtggctgtccagttcctccgtgtgcttggtctcatagtagcagagctggcatttgtaa

SEQ ID NO: 130103 - DNA, 712 bp, Homo Sapiens
tttgggtccctcgcaatgggaaatttatttcctgaagttggagccacagggagtgtaagaggtactgtggttccaccatccatgctgggtccagctcctctgaagagctattccaagaggtcctcatctgagtcatcatgataaccacttttattagtgtgggaggctgtgtccaaagcatccacaccatccacaccattggcctctgcatgctgctgcagcacagagtatcgatgcaccaggaaccttcccccacagacatatttcttcacaatgagcactcctgctacgactgtgaccagcatcaatcccacgatggccaggataattggaacagaatttgacttggaattctgtttttccggactcaaaaagttgcttgtgcatttcttttttcaagtcttttacttctcggactgggatttaccccaccctggcatttgtccccctggaattttcccggtaccccatttgttgttaaggtgttccttctcttccgtacagacaaaactcccaggtcgtggcccttcagttctggctgttcccacacacttggagtcattttctggacggtagtagccaaaatcacagagaaagtcctccagggaacagaggcagatggagggctgcttggtcacaacatagtcttgaccattctgacacacggatgacttgcgtagccgcagaaactgttctttgtagcccaaaatgc

SEQ ID NO: 130104 - DNA, 962 bp, Homo Sapiens
  misc_feature (385)..(444): n is a, c, g, or t
ttgggaattccgcggcttcttgacttgggcatacaaagcatccatcatatgcccttctcgtgggctctgaggtctagcgttgagagccatggaaccttcataagaagaaactcccccatacattaactcatcatcgcagccaagtgtccgatgaaaatcttgaatttcagcatagtcacgctctcgagcttgtcgttccctaaattctcgagttttggcttgaatcctctcctgctcctgcttcattcgtatcctctcctcttctgatgtaaaggattcctgtatttttattttacccgttttctcaatcttgtcatcttttcgatgtttgccaaacctgaacatgtctcccaagcccttcagcattcccttcttggctttcatnnnnnnnnnnnnnnnnnnnnnnnnnnnnnnnnnnnnnnnnnnnnnnnnnnnnnnnnnnnntatcagtcttatcacctttctcttggtttccattcatttgtctctccagagagtgggaaggctgatcactggctgtggatacagactctctccctgatcttgaactttcttctgtgtcttcttccaaggtctccatgccttcatcatcatcatctaccgcgggtttatcataagatttgtcgatggcagctctgaagctctcattgcatcccctgcctctgattatccgcggccgtggacgatggaaaggaatatccccattcaaagtcacctcggcaactgcggtctgcagactctccaacgagcttgacttcttcagacccagggaaggacccacatctctgctgggagaacctgctttctggtcatccactgtattgagtttagtctcgtcagctatacctaaatccatgctttttgattttcgtgttttaacgaaatccaattgactggcatctgaaaattgctttgtgcgtttttctgacatactctgacgtccaatccttctcgttgaaaag

SEQ ID NO: 130105 - DNA, 1065 bp, Homo Sapiens
  misc_feature (57)..(76): n is a, c, g, or t
  misc_feature (687)..(687): n is a, c, g, or t
  misc_feature (692)..(692): n is a, c, g, or t
  misc_feature (769)..(769): n is a, c, g, or t
  misc_feature (799)..(799): n is a, c, g, or t
  misc_feature (827)..(827): n is a, c, g, or t
  misc_feature (873)..(873): n is a, c, g, or t
  misc_feature (881)..(881): n is a, c, g, or t
  misc_feature (890)..(890): n is a, c, g, or t
  misc_feature (943)..(943): n is a, c, g, or t
  misc_feature (956)..(957): n is a, c, g, or t
  misc_feature (963)..(963): n is a, c, g, or t
  misc_feature (973)..(973): n is a, c, g, or t
  misc_feature (976)..(976): n is a, c, g, or t
  misc_feature (980)..(980): n is a, c, g, or t
tttactaattttacacaagatttcttggagagatcctgagggtgaccctgtagggcnnnnnnnnnnnnnnnnnnnncatctatttctgggagatccacccatgagtcaggacatggcttcagagggcgtcttcttggcacatgtgggactaccaggctgtgacccgtgcggtacgctattacagttaaaccatgtgggagggaagaggggctgcaggcggtgccctctacccagaggaatccaggtcctggctccaggaaggctcaggcggctcctcattcatcgtccgggacttcccggagcccttcgctgtggcgcgaatgcccactgatctccagcagggcctgggcctcagggtccgcatccaggatgctcttgttgcccttggccaactgctcctctgaggggtctccaaccgcccacacctccatcttatcaaactggaagttctcctgagccgacagctgcgggctgttgtacgtggtgcacgtgggcttggctctgctgtgtcctttcccaaaatcaacatccacccaaagcccaaagtaattgtgctgcccccccatacccagtccgttcgggatcgtctgctgtccatggttcaagtacatgtagtggtcgttgtagcccgtgtgtgtgtacacagccatgctggggcagatggagaacaggaagcatctattgtcnccttngaactgaggctcaacctccaagagcaagaggcaacccaccgacacatgcttgtcatggtcctcgaggacagcacacnggccccggtgagtgatgtggccacaaactnggaaagctgtgtcaatgagctcaaacanaaagaagcgcagcggtgccgctctcccaggcactgggcgttatgtnatgacaanaggaatcangatgtctcaaaccctccctgtccacttacgctctcgtgcgaatcttggcccanggcaaatcctaanngagcgnataatcctancantcanactttccgtgtgaatttttcgccacatcaacaaaaaaacggagcaaatgtaacgggggccaagatgatatcataatcgttgctac

SEQ ID NO: 130106 - DNA, 734 bp, Homo Sapiens
atgcaacattttatggatttatttttactataaaaagatacctaaacaattgcaaacattaagcaaattattagctgctcaaacttttctggaacaacagagaaactctctcccactgctcagtagcagttttgggtcataacatttgcacctgcttggtacgtttccacctgtgatgtttcacttggcccctcagaaaaagcgctgccctgggatcttatgattcagtgatgcaagagggatgttggctggtgagaaatgcttatttgagagggaaggaggaggaggagaaaatactcccatagcacttttctttcttattttccttattttagaaaggccaaatctgaacacattttccatcccatgtagtaatatatctcacataattttggttactggagggtacacaacacaaatctagcaagctttcaaaatcgatgtgcccagcctaaattgacgggctgtcactgggactgtcaatgatggaaaaatgaatctgtgtctgagaacgccacagcatttcctccaagcctttaaggaacacactacccaaacccttgtcacaccgggttctcaggatctgcaagctgcagtcccgtctttcatttcgctgtgagctccctcacagcccaggaggatgcgttttcccagctcttacctagctctggtgctttgcagtaaagtgtatggagcctagggcactttcaagccaaaggaattccccctccccc

SEQ ID NO: 130107 - DNA, 733 bp, Homo Sapiens
  misc_feature (623)..(640): n is a, c, g, or t
gacagccaaatgcaacccggattttattagactaggaaatataatttatttcataaaaattaattttgttacaataggaatgctaaaggttatttataggttgcagtttacagaataaacagaggtgggattgggggccatccctggggccctgcacccccctctcccgggcatataaccatgtccacagacctggcaggggtccagccctttgccccaccaagagctccctgcaccaaagctcctggtcacctcccctaagggacccggctcagctgcctaggagctggggaatagggaccagagtgccctggagggtccaggagatgagaaggatcccctgcaccctcaggagaacccctacccctgagctctggagccgggggcactgtgagagaaggcagagggagaggcacgtagaagatacattgactgaccctgtgggctcagggagggcagaagacaggcacaccaaaccctagacgtccaaacctgggacgcagaggagcacacacacacgctcgctcaggtggggacacgtgcacatgctctccgaggggcatcctgatgtgcccacagagaaaagcataggcacgcacacgcgcacgcacacacgcaccccnnnnnnnnnnnnnnnnnnaatacctgcgtaagggccctgcaacccccaagggtacctgagctgcttcccaccaggtacatgccctcgggggctactcttgggtctgaattg

SEQ ID NO: 130108 - DNA, 1590 bp, Homo Sapiens
atttggggagagaatccccaagccactatgttcagggcccccagggtttctccctaaggaaaacacgacgttatgggcccaaggttttccactttaaccctaacggggggccccggcgcggccccaaccgagaatgggttttggaaaaagctttttcgaaggggcccgaaggcgggcccgacaaggggtatgttttttagtgtttgtgtagttgagggggaatccttctattttattagattaaaaaacacaacgaaacctgtaagaactaggggaaaaggaaaaagaaacagattaggcaaagatcagagatgacaaaggggagaagcagggagaagaaacggaacagcaagagccccaatcagggcaggaaagaagtttctgaggactagacatctcttcatttaatgacaattttctggcgcaaggctcggggcccagagccagggaggggctcaggaggtggcgggccggggcccagggctgaggcagtgggcggcagtccatgggcagtaatgtacttcttgtaagcctcacgaatgatcttgaaggctcgagcagtggcatagggtatgtctgtaacagggtcccggtatagggctggacgatgggtcactggacagacctcacgaacagggacttttgggggccgcccttgggggaaccattcctcgaaagttgcatcatcactaaaagtgatgaaggtacgtgagcagcgagcaggggggttgacgggtccagtcccagcatgaggagtcaatgcagacaccgagggagcaggatcaagtccttctatgtcaacgttctcttccttggggcctggctccccaacaagtggcactgtcactgaatgataggtgattatgggcccggggcacttccgcttcttatgaacctgcttctttttatcagcctcgagccgctcatatgtctccagtgaccgtaaattaagctcttctgtgatcttggcctcccggagcagttcctcctgggttagtggccgctcacagtggggcccctttcgccgtcttgactggccctgcctctcctgtacccgaaggaacgtttgtcgtgtatgctcagctgtagactgacgcatagacttccgactgtcagagccgtcatcttgtagttctaatggcagtagtgccttctcttctcgcgccttctgagagctaccagccggggtgttgacctttcgaggccttaagctcttgagaggttccttataggccttggtgactactcggcgcttccttcttggctcttctgcttctccatcactggatggttcatccccttcatcaatgtcaaagtcagagtccacttcgtcctctgtgtctgactggtccccttgatactcatcatctccggattcctctgtgaaacccccataagtcgtctggtagaactcatcttcctcctctgcctccaaaagcccagaaagccggttcccagcggtcttccggggtgcccggcccccagccaaactcataccgcctaccgagactgcgccgccacctgcagcccctcaccctcgtgccgaattcgccacccaggcctcgctaccttaggaccgttatagttact

SEQ ID NO: 130109 - DNA, 732 bp, Homo Sapiens
  misc_feature (649)..(649): n is a, c, g, or t
gctagcagggtggttttctacctttaattggggatacaaaaggcacctctcccagtacaagaggatcaaccaagaggtgagccccagtgctgtggtgcccggccagaaggaacagaggaaggatggagggcaaggcagcggaggggcagtggggccccagcatcccctgaagcctcacctgcagcctggggctgatgagatctcgcccactgcgcgcagagttgcagcttcgtacctgggccgccgcagctcctcagggggcctccacacctccacaccctaccctcagtggccagccaaagccatggggccccatgcagcagagcagggaagggacaagaggctcggcagaatttccactgtggccagcctccagccaggcctcgactggcagtgtgggctctgaagggctccttggggcatgggcccggagcagggtatcactcagtgaaggagagtcacactgggtcaagcagccagccagccagccagcctgtcctgtggcctccacttctcagcaaagtctcatggtcagctggggtgggaaaggaggcagagcagccagatcccactgcagcgcagacctgtcccccagttcatcccactgcctccacacccccagccacagctggggcagctccgtcttcanagaggaggaaaagggggtaacaagccacccccaaagcagccttaacaccagaggagggagggaggtccagcctaagggtgtga

SEQ ID NO: 130110 - DNA, 741 bp, Homo Sapiens
  misc_feature (677)..(677): n is a, c, g, or t
gcttccctaattatactggtgaagatctccagtacagtgcaaccaggggtgcagggaacagacaccctgcctggtctccatgtcagggatgcagtccgtccaccttgtattatatcagctggttttctgcaggtatcatttagctggttgaggaagttctcttctcttcctagcttgctgagaactttaaatcacaaacgagtcttggattgttacaaatggttgtgctgttcgcctacagagatggcctgcaccccctttcattctactgaaacaggtgattttccaaagagaagcaagcatcctgcattcccagatgggctccagcctcacgccatctttcccactggcctctctgtattactcctcctccccctcctgtgcccgaggtcttgccgaggatgacacgtacctcaaagggtgtgtgctggcctccgctttcctcacccgtaagtcactccccgagacagaccatgctcctgggagaccaagctgatcacatcgctgcctccagacacacgcctcgcactgctgctaactccctcagcccaacttccagcaccctaaggatgagggtgtccacaccacactcccggcactggcatcctgcccttccccacgtgtgttcacgcaggctcatccacacgcactgtgcccctccttgcctgtgacttcanagtcgtagaaactaacatgcccccagcctgcgtgaacccgtgtgctgcacatgtcacatgtgcc

SEQ ID NO: 130111 - DNA, 1086 bp, Homo Sapiens
tttgcatgtttcaagatttattgagtgggtgagaggacaatggtccatagcacagaaaaagtcaacaggaacaaattcttggttttcagaagtcacaccaggaggaggcgggaggacacggaggatggccactggatggcctggcctagatggaagaaaacctgtcttcctgggccatggcactctgtggcactggcagggcagagccagctgaagggtcttcaactctggatcccaagtccccagagccacagggcttttcctctgcccacccacgctgagggaaaagtcgaataatgttgtgctgagacaataggggcaagaaggtccggccatgagtcacagggtgacatcactcgtcactcttggtctgtgatcaacccccaaacaatcatgaggaggcccctccaggggagctgggaccccaggtcattgtcctgagaggctcagtgcctgcacctcttggggtttcctctaacagtttccagacccaaggcagcatccctcaaggatactgaggtctagcatgttcccaacatgacaactcccatgcctctgcacacagtggactatccagggacatcctcacaccgcggacagtgggagcccctcagggagtgcagatcaggggtgctgcaggaaaaatgggggcgctggctggatgcaggaaccagcaaagccatccaagggagagctgtcatctgtctccaggatagccgcacagcccacgaggcccgccaagtctctttcccgaggacacgcgaaatcccgaggggcccaccccggcagaggggacggaccactgcaccagcggctgggcctgacggtccagccaggctcttcccactccacctcggggcctcagtttccccttttcgtcggggaggaggtacacagcaccggcactatgggaggccacacaggggttcttgggaagaccactcctcgggccctgcccctcattgactcatccggagcgccaggacggatggccggcgggtacaggggtaaccgcgcggaggagactgagggcagccgcagccacaagacgctctctctagtgctcagcgccctcgtccgattaac

SEQ ID NO: 130112 - DNA, 1174 bp, Homo Sapiens
tttgcatgatacaagatttattgagtgggtgagagggcggtggttcatagcacagaaaaagtcaacaggaacaaattcttggttttcagaagtcacaccaggaggaggcgggaggacacggaggatggccactggatggcctggcctaaatggaagaaaacctgtcttcctgggccatggcactctgtggcactggcagggcagagccagctgaagggtcttcaactctggatcccaagtccccagagccacagggcttttcctctgcccacccacgctgagggaaaagtcgaataatgttgtgctgagacaataggggcaagaaggtccggccatgagtcacagggtgacatcactcgtcactcttggtctgtgatcaacccccaaacaatctaaaagagaagacaaatgaagccagcgacctggaatttccacctcggaaacacaggccaacttaacctcttggcattcacttaccatgaggaggcccctccaggggagttgggaccccaggtcattgtcctgagaggctcagtgcctgcacctcttggggtttcctctaacagtttccagacccaaggcagcatccctcaaggatactgaggtctagcatgttcccaacatgacaactcccatgcctctgcacacagtggactatccagggacatcctcacaccgcggacagtgggagcccctcagggagtgcagatcagggtgctgcaggaaaaatgggggcgctggctggtgcggaaccagcaaagccatccaagggagagctgtcatctgtctccaggatagccgcacagcccacgaggcctaggggggtttgacgtctgcatggggtcggcttagcccagcgaaggccgagggcgcggctcacccgccagtctctttcccgaggacacgcgaaacccgaggggcccaccccggcagaggggacggaccactgcaccagcggctgggcctgacgtccagccggctcttcccactcccctcggggcctcagtttccccttttgtcggggaggaggtacacagcaccggccttgggaggccaccaggggttcttgggaagaccactcctcgggccctgcccctcattgactcatccggagcgccaggacggatggcggcgggtacaggggtaaccgcgcggaggaggctgaggggcaggc

SEQ ID NO: 130113 - DNA, 1400 bp, Homo Sapiens
  misc_feature (35)..(35): n is a, c, g, or t
acacgtatgtgagcagggtattgagataagcaganacacgtgcaggaaagttgcgaagttcgtgttcccaggcatgcataccaaaagctagagtgatcgaaaataatagggactaaggcggaggtcgcaagaaatatggtcaactgaccgacctggattttcgcgaaagaaaatatatagtctgaggtggatcatgcgagatcgttgcgaatatgtagatggatacgagcagatagaggagaagagggaattggggttttagggtgagactgaacgagaaatggatagatgagatatgtgcaagaggaggtgggtggataaaagatgtgagattgtgttggagcatggggagaaatgcgcgtgtgataatagggtagcggtagcataggcaagaatagcgagagagttgatcagccgagtctgtcgtaaaagggtatagtatgttatgagtagtcggggcacgcaagggttcgcttttgcaagagtggatttgtagtagcgaggaaaagtatcgtattggataaggatttgacaggttatcgggtatttcgggggtatgaatggcccccaacggcagcaattacgtagttagactgcccatagtgagcggtgaaatcaagtagagagccgtataaggacgtaaaggggagtgcgagaatgagcttgatatgtgggtgagtgtgaggattgcatgggttagagtgagtggctctgaggggttgacaggatacgtagagttatgggatccacatggggtaggggttacgggtatataaaagatccgagggttaggagtctggtgaggggtgcgaagtatgttggtgaggatggtggagcacctcagacaggcttccatagactgcggtcaccagagtagacaaatgttttctcaagggggcactaagcctcccctcagagaggctgtgccgacgtaggggggtttgacgtctgcatggggtcggcttagcccagcgaaggccgagggcgcggctcacccgccagtctctttcccgaggacacgcgaaacccgaggggcccaccccggcagaggggacggaccactgcaccagcggctgggcctgacgtccagccggctcttcccactcccctcggggcctcagtttccccttttgtcggggaggaggtacacagcaccggccttgggaggccaccaggggttcttgggaagaccactcctcgggccctgcccctcattgactcatccggagcgccaggacggatggcggcgggtacagggggtaaccgcgcggaggaggctgaggggcaggccgcagccacaagacgctctctctagtgctcagcgcccgcggatcccgggaattccggaccggtaccagccaagaaaatagtaagttagtagtagatgatataatgtaatg

SEQ ID NO: 130114 - DNA, 1561 bp, Homo Sapiens
  misc_feature (462)..(490): n is a, c, g, or t
  misc_feature (1450)..(1450): n is a, c, g, or t
caactctaaattataacatttagcaattttgtgactttttatggtcatcattaatgttgtttatgttttagttgtagtcctgtcattactcactcgggtatggtaatttggtctttttcaaaatgaagttaaggtctatttgctcttctctgaatcataataagaactgccaacagccatttcagcaataactatttactgagattttaaaatatttcaaggtaattggtcctagcagactggaaaataccaaattcttttccagaactgaatcccccatcaaagttcaattttactcataattcccttttcatttgaagcatctcattgtaagccagtcttaacccttctctcacactttgcttggctgtttctcaggtagaactcagtaagtctggtagcctccaggactgccgcttagattattaaacaacatgtcagtggttggaagagtcaatgttnnnnnnnnnnnnnnnnnnnnnnnnnnnnnaaatgcagttggcggataattgcagctttctttcattccctacatgagttcaaatggcagcaaacaaactaggagaacgcagaccttctgacttgtgggtacccctactcatcacctgaagacccttggaaatcaaagccctgacccattaaagacggatggagacagcaacatacgatcatcactattatcttgctttgccccagtccaggttaaccatctgtggtatttttagttgctaagtccatatattcaacataaatcaattatatatccactaaaatctcagcactagtctaactactaaggaaatgacagcgaagaaaacagaccaaacgtctgcccttatgggatttatattattttctctgtgctggttaaaccaaggagcttctgctcttttccttagtcacctgggggaggcagaaacaaaggagaatattgataaacctggaaatagggccggagagtatcagagaaggaagccttcgggaaagtaaagatgtggcagccagtattcccgttataaaaggatacaactccggcctcatagtccagaaaaattcccacaagcaggggctgctcatgcagatgaagggaagttgggggagaagtaagtgctacatagcctttctttttgcacagcctgagggtccagaatccagactgaggctcttgcttcatgccagtgcccctctgcacattttccatacaaactcctaaatcccatccggttccttcgccaacatccacttcaaagtaacgtcttcctgaggtgaagccttcacaacccaagacacaggggaaggcagtaaatctcctggaagatgtgtcctgattctcctgggtgtatcacgagtcacttgtctccgatcctcagagagaattagttcgtgatgagctgtatctggatccagagtcacactaacttgatgactccttaacattttcttcacatcngaagtaaagcttggaaacattgcacatagtatgaagttccaaggagacagcctctgatgtttccagcttcacagcccaactcctagaataagcagaggcgagagatttctt

SEQ ID NO: 130115 - DNA, 414 bp, Homo Sapiens
  misc_feature (250)..(283): n is a, c, g, or t
ttttcaatctttaagttttcttgagttaatttttccaaatttactagtgatttgctttgtcattaacaaatgatcatcactgaatagtctttacaattgtcacttcagaaaggtttacattaaaacattatacttcctgtgatatgtggtttaagatggttgctttccttagctgtccattagcagcccaattttttatccctgttggcaaaactgaattctaatcaaagtatcagatgaatttgttaannnnnnnnnnnnnnnnnnnnnnnnnnnnnnnnnngcgctttaaggctcatcttggggagagtatctttgtattgacactgtttgaaagcatcaccaaaataatctgcagcctgattagccaatttagctatgatggcatctttcattttatctcttgtggctttt

SEQ ID NO: 130116 - DNA, 2590 bp, Homo Sapiens
ttgttcttaagtaatttattttaaaattataagatttacagtgccttgattatgcaaaatagcataatggaaattaaaccaaatcaataaaccaaagagaaagaaaacttaattttctctagtatccatacttaaaccatctttgtaagtatctgatgtcccaaccatgtcttatgtagaaagtataatcgtttcaaatgtttcacttgcaggtttaatttctcattttcaatttttatgaactgtaatgcaatttcaaatcctattatacctagtgtttatactgcaacagcagcaaatctcacatgtgtaatcaaatgtggaactggggcacagcttctagctgtagacagaaattatacactgcattcagtccaggagagtacattacattaaccagagcgtagagtttagtacacttattgcagggttggtatttctttccctctgatctgaatcagctgagctgctgagcagacatattactgctgtggatagtaagactgctgtgggggctgagggaaggggtatgaaggctgctggggtcccgggtatggagcctgtccaggactctggtgatacactggtggatatggcatattatactggccatacgcataaggattatagcccatgggcatgggcatttggcaatacccaggatatcctggataggtgggatagggtggtccctgcgcctgtggaggaggagctgagccaggcgtttgtgatggagctggcgcagcagtcccagcccccactggagatggagcagtagcagaaggagctcgatttgctggaagcacaggtggtggaggcctggctgggggctggggcttagtaggcggcatggttcttggcgctggagttggaggagttggtgcatgtcctcctgctggtgaggactgatacgcaggtgtaggaattgaaggagcactaggttctctggcaatgctttgttgcaagtcctttaagagttcatctctttctgtcttccgtgcaaaaactatatcactgcatttgttctggaacctgaccaggatttcagtcaactcattgtaaaactttgtgccttccttcaaattagctacaagttcaacaaagttgtcatatgcagtagctaaattcttcaaaacttcttctcttaagttagcttcattattagattgtttcatttttgaaaattcctgatgtgagacctgaatatttttaagaagtccctcctgtttctttagagattcttggactttagttgtaagacctccatagactcgatctagttcagtaacagaaagagcttcttcatttatcacaccatcttgagccagggctgtcaaaaacttgcttgtcatgtcaaaattcacagatttcaagtcattctccagaccctctctttccttctttacttcatcaagatttgacaataaggattttaagacatttacaacctcactgccctgcatggtctttgctggattagcagaagggatggcagcattcagctcaggctctggcttacacaaaagcacgatggtgtcacgatgagactggtaacattctttcacttgtccatctgcctgcacagctttatctaaaactgttctgaagttggttccctctgctcttaaaggcttatacagttcattggatggtgtcctttgccaacgttccttaaattttgctcttaaatcattatcggttgcttttttttcatccaacaaccttaatgactcatctaggatttctctatttcgttgcagtaattcaggcagttctttaatcaactgatcaacagtctggatgcctccctgttcaatcacagatctggatttagtcaatatagactgaggtacagtgtctccagacacatcttcaattgctgctggaagattaagggaagctagcacccccatttgccaaagtggtggcttctctcatctgagcaattgatctgttaatcaaatcggctttcctctgattataggcagccaaagactgctgtactgacacgggaaccatcttctcaaacagatcagtaaatttctgactgatgggtacattgaccggggtagatttcacaagtgtggctttgccaataggatctagatctttaaggtctggaactcgatcatgataaatgaagtcattatccttctttgctgcagcaagggcacgattgattttgtcagaaaaatccttcacattaacatattcatcatagcgagatgccactgttttaatcagttctgctgcatgctgtaaccttgcaatttcttctccaaatttcttctgctgttttgccaggatagactgatggtactcagcattggcctgcatgatacagtgctttgcagccaagacagggaacacctccttggggagagtatctttgtattgacactgtttgaaagcatcaccaaaataatctgcagcctgattagccaatttagctatgatggcatctttcattttatctcttgtggcttttaaaaaaaatacttcttgagcctgtgccagcataataagactgagggtcccaacagtatctggagatatgtccacggtcggctctcgacttaaggcagcggac

SEQ ID NO: 130117 - DNA, 716 bp, Homo Sapiens
  misc_feature (604)..(657): n is a, c, g, or t
tttgcttcttctatcttctatagagcttagtaatagtcaccggcaggcagaattccttaaatatttgaattctgctgtatcttaggctctcatgtcttcaaatctataacccttaggctccaatttaataccttgggaggacagcctggctctctgttcctctgcacagctacccagcttaagttataaaacagggcaacagaggtctataatgttcctttcaactgccacttagcccccaatcaaggattgatttgtaagtcaatcctttcatcaattctcagtgagcaacaatctaatgttatccttgctcctatttcttaactagcccctataacttcctgtcacttgctccaaactaaaacattacaagattcaccactgtgtgtgattctcagctattcaccttctcttagcaattttcccttggtttggtaatgatgagacaccaacaataaatatttgcagaggaagttcagattcaaaaattcatctttctctgatgaagtaaggtaaaggtaccactgccaactgactgaaaattttgaaaaaagacaaagtctggggcaatttgacagcccataaatgaatcatcttctacatnnnnnnnnnnnnnnnnnnnnnnnnnnnnnnnnnnnnnnnnnnnnnnnnnnnnnnaggtcttttactgggattggaattttgtgcatctatttggctggacatagtatggacac

SEQ ID NO: 130118 - DNA, 1924 bp, Homo Sapiens
cgggccccccttgtttcctccctccagactgcccccatgcgcccattccaaagggcagttggtattggacgcccttgcccctctgtagcctgggctgggaaagaccaggacaataacatcgtgcctgctgctgggacccaaaattgcttggaccatgggctgccttcttctgtgtaagaggccttccctacaaggctcccgccctccgccgaccctttacctagggcctgccagaaacacacttctccattgtgaaggggacaagaactaatggggggacagtggaggacatggatctacccccattcctgagtcacacgactcacccagagtcacggcccagactgggcctggggtcatggcgccagttgcccctctggcctgtccacagctctcggagctcgacatgacaacccaggtcccgcaggcggccttggccacgtcctcacagtcacggtgggcagatcgggcctgcatgatgagtgcctcagcccccaggtccaggatgggcttcgagaaggcctggccgtgggccaccaggtttcggatcagcatgcaagcctgtttctgcacgccggccttctgcgggtgtgccttcatggcctgcagtgctgccacagccccgccaccctccacgatgatgcggctgttgtcgggcttacgcagggccaggaagcacagggccgcgcagctctgctcacacacctgggggctggtcagatgctgggtcatagcagccacgatggactccgtcccaccagcacggacaatagcatctttcacgtcgtcgttgcctgcgatggctcgcagggtgctcagcacttgcttcacgagctcctgaacgccgctctggtccctcatctggtggtcattgcagtcggctagcagggacaccagaatgctcaggcccccgaggtcgacgacctcctggcagaactcgttgcgaatggccaggcgggacagggttccacagagctcgctcaggatgccagggttatccaggaacgctttggtggcttcgatgagcaccttcaagcctttgttctcctgcacaatcatcttggcatggttgtgggcatggccaaagggcacacggatgtcgtcatcgaaggtcatgacacgcagggcccagcaggcttccctgaccacgtcagtgtggtgcccatgatgggtgatggcaccagtcagcagaggcagcacgccagctttcaccaggtcttgccgattctgcttcatgtttcaggcaagcgtgacgcacacagcggatcccagagcaggtcaggtcagcctcatcagcattctgggtcagcgtggccactaggagctgcaggcctgggcatccaggaggtctggctgtccatcagtcagcaccgacagggcattgagggactggagcagaaggccctggtcacctgcagtggccagcttccaggcagtgaagatgatggggtaggcccccttctgggccgcgaggaagcggcagcccttgtcctgtttgcactggtcgcagaacgcgggtgaggtatgctgacacctcctgggggcgagagtctggccacagactcctggaggtcactgagcatctgcagggatgtcatgtgtgggctcctgggatccgtctgcacgagactttaggtccgccgtctttacaatgttgctcagatcaaccccttgcgattcaaactgctccacggcctctttcactgcctcctctggccccatcgcaaactcctcgatgttctcgcgcacagctgcatcaaaggtctcctgggcaatgcgcttggagaccatcttcgcctgtgttgatgttggcgtgcagccgatagatgctcctgagccgaggtccgcgccagcccgaccctgcggcacccccactccccactccgcgcgggacagcctcgcagccgcagcgtctcacctcgtt

SEQ ID NO: 130119 - DNA, 729 bp, Homo Sapiens
ttttttcgctgttcacccaatgatcttttattatcaggtatcctggctggcccaggacccagagacagacaagctggggccaagcagggcggagcatctgagacccattttacaggtaagaaagacaaggagcagaggcctgcatgaaactgcagtaagcagcaggcgccagggggcccaaccccactggaatcgcctgccctgccctgagcctggcccacagtggctgccacatttcagacagggcagtgagtgatgggacgtgccctttgccccctctggtagggcgtggggctgggggaaggagcaggacagtaacatccgtgctgctggctgggacccagaagtggctgggacatgggggctgctttcttctgtgtagaggcctccctacaaggctcccccctcccccgaccctttacctagggcctgccagaaaacacttctcattgtgaaggggacagaactaatgggggacagtggaggacatggatctacccccattcctgagtcacacgactcacccagagtcacggcccagactgggcctggggtcatggcgccaggttgcccctctggcctgtccacagctctcggagctcgacatgacaacccaggtcccgcagggcggccttggccacgtcctcacagtcacggtgggcagatcgggcctgcatgatgagtgcctcaggccccaggtccaggatgggcttcgagaaaggcttgccg

SEQ ID NO: 130120 - DNA, 1045 bp, Homo Sapiens
ccaggcaaggttttcttgaccaggtcagtgtggtggccatgatgggtgatggcaccagtcagcagaggcagcacgccagctttcaccagggtcttgccgattctgttcatgttcaggcaaggcgtgacgcacacagcggatcccagagcagtcagggtcagcctcatcagcattctggggtcagcggggccactaggagctgcaggccctgggcatccaggaggtctggctgtccatcagtcagcaccgacagggcattgagggactggagcagaaggccctggtcacctgcagtggccagcttccaggcagtgaagatgatggggtaggcccccttctgggccgcgaggaagcggcaggccttgtcctgtttgcactggtcgcagaagcgggtgaggtatgctgacacctcctgggggcgagagctggccacagactcctggaggtcactgagcatctgcaggatgtcatgtgtgggctcctgggatccgtctgcagagactttaggtgccgtctttacaatgttgctcagatcaaccccttgcgattcaaactgctccacggcctctttcactgcctcctctggccccatcgcaaactcctcgatgttctcgcgcacagctgcatcaaaggtctcctgggcaatgcgcttggagaccatcttcgcctgtgttgatgttggcgtgcagccgatagatgctcctgagccggtcttcgcggccacgtggggaaaggtggggcgcgcggttgtcacccagggagccgcctctagccccttccggccgccgtacgcgcgcaggcgctgtggcgcccctaggctatggcctcccagagactcgcggacgctcacgataaccaaggacgaccgcgaaccaaggtaaagccaacgaggccacctcgtgcgcgacggaggcgtctttgccgccccttccgggacgctcacggtggtcgccgcccccagcagggaaatgttttgcctccagagcgtccgcccagaaggagcggacagcgcgcttgcgcaagagagccgggccgcggcggcccg

SEQ ID NO: 130121 - DNA, 1083 bp, Homo Sapiens
cgggtttggactttcaagcccacactgttaaacaccttgccaaattcacatgggcactgcccccggctgaaccagcacattggaggcaggggctgcggcatcttacctgctacaccctcagcttaaataagtgaatgaacagatgaggcgggtcaatgggccagggggttggcgtgggggatcaagcggccacagtggggctgtggggttctggggtcagggtgggcttgggtggtttgcacacaggctaggaggactcaaggcagagtttattggcccctgagccccctctcccattcctcctcccctcatagccaggccaagactgagatggaggtgacacagacccacaaggactgagaggccctgcctgagggataatcaggcagccacccagggaggaggatgggggagtggggagaggccaggggcgtggtcctgacctcctgctgtagatggggcatcaggggccacctacagatgtcaggtcctctcctcccctcctggaggtgggggtggagcccagtgaacttgggcagctctggggctacgattctctttggccaccagatggatgctaccactgtccctgcccactctgttgacttcctgagtctggggacttctgctctggttccatttataagctccctgctctctgggaagggctcggtgaccccttgtcctctccctaccctcacccaagacatcatcctgagaaaacccgtcagtctcagcctgggaaccagagggcctgcccagcccagaagacggaacttggacatgagactttcacagaaagcctctggaagggttgggaaggcaatgagtcacttggcagttttggatggaggggcagcacctcaggatggaggtgccaggccctgcttgctttggtctggccttgtccaggaccgctctggggcggaacctggggctccggatccagcatccgccggccctcagagggatggggggaatcacagcttctcctcgcctgcctggatgcggctgtaggcctcttggtccagcgggacgtagcggcccttctgggcatctagatagaacagcgggtctttcacc

SEQ ID NO: 130122 - DNA, 400 bp, Homo Sapiens
ccgggagcaattatattttattgaccaaaagattcctgtggaaacaggaggggagtgccctaagccctcactccttagcactctgcgtgctgatgtagtcctggagaagcgcctgcgcctccatccgccggctcatcttggtggccttgccctgaaaacggcctttcttccctgctcctttgccttccaggacctcagccaccctgtgtaatatgaccacacctccccagtctggactgttcctgaggctatgggcaatgtgcacagccaggtctctgagcagattcaggttattcttctgcaggatcttggtgggagttctggagctttttcactgcttccacatgatcctctgctccacacctgaaagagaaaggtcagaggagacctgcgcagcttc

SEQ ID NO: 130123 - DNA, 402 bp, Homo Sapiens
ttttttttctgagtcaatctattttattgaccaaaagattcctgtggaaacaggaggtgagtgccctaagccctcactccttagcactctgcgtgctgatgtagtcctggagaagcgcctgcgcctccatccgccggctcatcttggtggccttgccctgaaaacggcctttcttccctgctcctttgccttccaggacctcagccaccctgggccccagggtctccacagacgcaggtggccctgccagtaagaagagtccaccacctttctcatcgcccacagttaagaacaggagggtctcctgtgtaatatgaccacacctccccagtctggactgttcctgaggctatgggcaatgtgcacagccaggtctctgagcagattcaggttattcttctg

SEQ ID NO: 130124 - DNA, 1328 bp, Homo Sapiens
ttttttctgagtcaatctattttattgaccaaaagattcctgtggaaacaggaggtgagtgccctaagccctcactccttagcactctgcgtgctgatgtagtcctggagaagcgcctgcgcctccatccgccggctcatcttggtggccttgccctgaaaacggcctttcttccctgctcctttgccttccaggacctcagccaccctgggccccagggtctccacagacgcaggtggccctgccagtaagaagagtccaccacctttctcatcgcccacagttaagaacaggagggtctcctctgacccaatctcattggcaatgatattcatgaactctgaatcaccctccttcctgtgtaatatgaccacacctccccagtctggactgttcctgaggctatgggcaatgtgcacagccaggtctctgagcagattcaggttattcttctgcaggatcttggtggagttctggagctttttcactgcttccacatgatcctctgctccacacttaagcagagcagtcagtgctttttcagttccatgacttctctccatccacttcagcacccggttcccagacagaaatatcaggttggttctgttctttttccccttctcagtgcccagaatcttaatgacctgaaggtcactgagattgctcacatgggtcccacagcacatgttggaatcaacgccctcgatgttaacaacccgaatgggcccagcatgatcatcaggcaaaccccggccactcacctgctccacctcaggatcatccaggctcagttctcggacattcacaggcagccgatctctgattttttcattgacgctctgctcaatggcagctacttgctctgcagtcatagagggggtgtccagctcaatcgcactccgaaatctccctaactcccatgatgttgtcttcagcttaaatagatggtcagcaactgccgtgatgagatgctgccctgaatgctgctgcatgtggtcaaacctccgctcccaatctacccggaccagaacctggcttcctggatccaggggtgtctgggtgaaatgatcagcctgttccccacggcgagtcactctcagcacagagatgtcattgattgtaccacggtcatcaggctgtcccccgccctcagggaaaagcactgtgtcttccagcaccacttggaaaccgctcagcacttctttcttgccgttgctcccttcagtctgcagctccgcgggacagcaagagaccacggtggtggtgaactctcgggcataactgtcacgctgacaccagaacgccatacctgcaggcgtgtgtcc

SEQ ID NO: 130125 - DNA, 1470 bp, Homo Sapiens
tttttggagtctgatgatctttatttcttagacagccctggactggggctatgaaacacagtcaccagcactatactcactcctagggtggctctgtctgtggcgttcctcaccatccccgggactcatagctcagtgccaccccccgacaccatgccctccagggggaggggacagcgaaggggagaggagggagagccctgcgcctggccctgtcctgagtccaaagattcccatggtgatcagagggcggtgttgggaatgtgggacacccttggccccgcctccctgacctccccactaccccaccaaaccagccttccttcctcctggcacttccagtgtccattcccggcagtgcaaatgtgttaggtggggtagggggtgggatagggagataaatagcagcctggcgttggcactggctggtgctctgtggtgggtatgagtaggggacggggccgccttcctggagacaagctcctgggtgctgtgatcagaagggtctgtagctccagtagctggagaacacggagatcttgtccttgagctgctggcagagctgcagggagacggtgaagtagaccagggcgtcgttgagccaggggatcacgcactccactttgtgcacgtggctcacctccaggcgctgagagccccactcgaacatggccccagggctatgcagcaccgcgcccccagctgggcggaagttcttggtggagttgggctgcagggcatgcagctggtacaccgtgaggcagagcttgttgaggttgatgtagacgttgaccagcaggtcggacggcagggcaggggcgaacatccgcgtgaggccgctggcggcgatctcggggagggtgagggtggcgggggtggtgagccggtttcgggctctggtcagctgcagcatcactgcgtccatcagcttgaggacctcagcgcccgtcttgaactggtagctctggtcccggctggtaagcaggtaaatggcttggctcacatggtttctggcatcctggatctgctgcagcttccactgcttgtcctcccggaaggcgaagtgcagcagctggttgttccggggcatcttcaggttcacatccgcctggctgagggcatccccctgcagagtcagcacacccttcacctggtctgtgccacagctgcctaggatgaagttctcttgcttggcgggcccctcagtgccggagcccggcagagtgaagcgcagagaggcctccttgaggatgtcctgcagctgcttcaacacagcgtgcacctcgtcgtgcagcagccagcggaactcctcctccagcaccgcccgctccgccgccgtcgctgccatcacggtggccatggccgcaggccgccgccgagcgccctccccaccggccgctgctcctgtccaccaatctttctgcctcgtgccgaattcgccacccaggcctcgtacctagccgtaaggtg

SEQ ID NO: 130126 - DNA, 799 bp, Homo Sapiens
acgttgtgagaggagtcgtgctgctgcacgacgagtgcacgctgttgagcagtgcaggacatctcagaggctctctggcttcactctcggctcggatgagggcctgcagcaagagacttcatctagcagcttggacagacaggtgagggtgtctgactctcaggggatgccctcagccaggcggatgtgaacctgaagatgccccggaacaaccagctgctgcacttcgccttccgggaggacaagcagtggaagctgcagcagatccaggatgccagaaaccatgtgagccaagccatttacctgctttaccagccgggaccagagctaccagttcaagacgggcgctgaggtcctcaagctgatggacgcagtgatgctgcagctgaccagagcccgaaaccggctcaccacccccgccaccctcaccctccccgagatcgccgccagcggcctcacgcggatgttcgcccctgccctgccgtccgacctgctggtcaacgtctacatcaacctcaacaagctctgcctcacggtgtaccagctgcatgccctgcagcccaactccaccaagcgagtggggctctcagcgcctggaggtgagccacgtgcacaaagtggagtgcgtgatcccctggctcaacgacgccctggtctacttcaccgtctccctgcagctctgccagcagctcaaggacaagatctccgtgttctccagctactggagctacagacccttctgatcacagcacccaggagcttgtctccaggaaggcggcccgtcccctactcataccca

SEQ ID NO: 130127 - DNA, 1251 bp, Homo Sapiens
  misc_feature (740)..(854): n is a, c, g, or t
  misc_feature (945)..(1195): n is a, c, g, or t
gttttcaaaaatatttaatgatacaaaagttcatctgttaactgaaaagagctgaacagaaaccatacatattttgtaaaatacacacacacacagcagaaccccagctgagacacctcacagtgtcagtgattactatgtggtggtgggctggaggatcattttctacatgtgtaagctgcttataaaattttaaaagcaacaagtgggggtttatgaaaaactttcaggaatgggttatctatggtggccgtggagcttgcttcctcaagggctctttgaccacaggaagcttggtagcaacaattttaaggtgaacctgccagaggcaagatgagtaagtagctgtggattcatttagtttctgcatccctccagcatgaccgtgagtagcacagccgtggtgccagcctcctgagtttaccatctcatcagaggctagctacacactaggagttactgaccatttctacatgccggagacctgtgctacatctcttatagacatgacttcacgttactcctcacccaggaacacctgaaggaaggacaaagttaccccaatcgtctcaaaacataaaacaggctcaggctaagcatcttcctccaagttacaccactgacaagtggtagagccaggatttgaactcagagctctataatcaaagcctgctgtcttatccatgatcttgccatccaaacccaaaaacaaatgacctaggccgggcgcggtggctcannnnnnnnnnnnnnnnnnnnnnnnnnnnnnnnnnnnnnnnnnnnnnnnnnnnnnnnnnnnnnnnnnnnnnnnnnnnnnnnnnnnnnnnnnnnnnnnnnnnnnnnnnnnnnnnnnnttagctagtgtagtggcgggcgcctgtaatcccggatactttgaaaattacatacaaaaattactaagaggcccaggcacagtgtcttatnnnnnnnnnnnnnnnnnnnnnnnnnnnnnnnnnnnnnnnnnnnnnnnnnnnnnnnnnnnnnnnnnnnnnnnnnnnnnnnnnnnnnnnnnnnnnnnnnnnnnnnnnnnnnnnnnnnnnnnnnnnnnnnnnnnnnnnnnnnnnnnnnnnnnnnnnnnnnnnnnnnnnnnnnnnnnnnnnnnnnnnnnnnnnnnnnnnnnnnnnnnnnnnnnnnnnnnnnnnnnnnnnnnnnnnnnnnnnnnnnnnnnnnnnnntccgtcgcaaaagaaaaaaacaacaaacaactaacactaaggcttcctcgtgccga

SEQ ID NO: 130128 - DNA, 503 bp, Homo Sapiens
aaagaataaccatttattaaagtagatacagaacacttgtttggccaaattttaatactgctttacatgttttctgtttgtgaaacaattcgtattacatttataaccaaaaatttcaactggtaccagattgaatattcactgtcgaacacacagttgataatcttgaggggaaaatacatcaaaggcatatatacaattatagaagttcttattgtacatgtagcatggaagatacattttatgactttttacatattctagaagacattcaaatgaagataaatagattcaaactggtcgataaactgttcaggtgctttgaggtccttcattttcttttttgtgataagaaaatccagaattattaacgttgaatttctcatcgtacattcatctaaaaacagtaaaaaaacttgtgaagggagattgtagattggttatttaggtgttttatactggcttattgttaattgactgctggggatacctgccagagaagg

SEQ ID NO: 130129 - DNA, 685 bp, Homo Sapiens
tttggctttttgatgctgtgacttttattctaatacacacattgatttgattaaaccaagttcagggataaggcaaatatacattcttgttcccgaaaacatcccaggcagtttcagcgtctttcagcacagatgaggtagggttggggctgcaatgtcatgcctaacctgggcttcagatctggaactagttcatgtggaaaatgcaaatgaaacctctgaagcaatgctgtaaaaaacaagaacatttccatccgagccaagtgttctccaagacaatgtcttcttcctagggaaaaaggaaccaaagcttccttcttggcaaaatatccactgctgtccagaaatcgctcaggatggaacacttctgggtctctccagtacttttcatcaaagtgtacagaataaagatttgtaattactgttgtgcctttaggaatggaataaccacgtacaactgcatcttcagaggttgcatggaaaatccctaatggaactatattacagaatcttaaaacttcatgcaaaactgcctcagtataaggcattttgcatttgtcgtcccaagaaggcttcccattagggcccataattaaatcaatctctttctgaacttgtcctgtcagagaaaaagtattcaagttattatgcagttcttagaattatacctaaagttatttccctc

SEQ ID NO: 130130 - DNA, 1319 bp, Homo Sapiens
  misc_feature (121)..(126): n is a, c, g, or t
  misc_feature (128)..(232): n is a, c, g, or t
gcccgggttttcttttgggaaacaaatttggcccatttttcctttccctttggggccgcggggcgcccaaaagaaagggtttaaaaaaatttttttggggggggagggcgggcgcccaaannnnnntnnnnnnnnnnnnnnnnnnnnnnnnnnnnnnnnnnnnnnnnnnnnnnnnnnnnnnnnnnnnnnnnnnnnnnnnnnnnnnnnnnnnnnnnnnnnnnnnnnnnnnnnnttgtgttgaaatatttatttcaggatttaaatccacccccttccgagaacaccagattaaaagacctccagcaatccatgattctagtatactcatctctgactgctgtatataagatgtgatttgattaaagaagacagacaacaagtgcatttattaggaacaacattctgaatactcacgagtagttatcttgcacacttaaccctaggccagaggacacagggcaaccacacaggaaaaggataccaggacagagtccatggagttttgcttataccacaaaaggagttaaggcagtttaattcaaggatgcgaaaactacgtctatgacataaacatgacattcaaaaataactcagcctttaaaatgtccccaataccaacaaatcaacaaagtagtcaagatgacagccactgtcaaggacagatgaacagtcacaaaagcgatccaacatgacaccgctatagcaggtgctatgcagagccctccctatgcagttaacacagattgacggatgctatttgcaggccaccagtctcgcatgtctttacttcacataaatgtattacactgtcctaggagagcaaatgcatattatgtgagagaaaaataggactcattatctcgtaccacaaacaggggttacagaaaacacaaggctggacaaggccacactgagacaggttagtgacttttctggcaggcccctcataggcactgagatgaggcctaaaaatatgctggggtgagttccgtccttccttctgtggttaccacctggattaggcttcctgagctcggtcggtttttcccctgtgatccagtcatggaaagtttcaactaggaattctaggggtgtccaggagctgaagtcagcctcaggcattgatttcctgttcatcggggtatccagggtaaccgggagcacagcgatggcggctgccccgggctctggcaacccaccagttgcgggcccgaaaagcctgcacgcatcgagaacccagagcgcccctgccgccgtacaccagcacccggcgcgcctcgcctgcagccgccgccgccgccatcctgctcctgccaccc

SEQ ID NO: 130131 - DNA, 1108 bp, Homo Sapiens
gggggagctgcgggagccgggctggcaggagcaggatggcggcggcggcggctgcaggcgaggcgcgccgggtgctggtgtacggcggcaggggcgctctgggttctcgatgcgtgcaggcttttcgggcccgcaactggtgggttgccagcgttgatgtggtggagaatgaagaggccagcgctagcatcattgttaaaatgacagactcgttcactgagcaggctgaccaggtgactgctgaggttggaaagctcttgggtgaagagaaggtggatgcaattctttgcgttgctggaggatgggccgggggcaatgccaaatccaagtctctctttaagaactgtgacctgatgtggaagcagagcatatggacatcgaccatctccagccatctggctaccaagcatctcaaggaaggaggcctcctgaccttggctggcgcaaaggctgccctggatgggactcctggtatgatcgggtacggcatggccaagggtgctgttcaccagctctgccagagcctggctgggaagaacagcggcatgccgcccggggcagccgccatcgctgtgctcccggttaccctggataccccgatgaacaggaaatcaatgcctgaggctgacttcagctcctggacacccttagaattcctagttgaaactttccatgactggatcacagggaaaaaccgaccgagctcaggaagcctaatccaggtggtaaccacagaaggaatgacggaactctccccagcatatttttagggctcatctcagtgcctatgaggggcctgcccagaaaagtcactaacctgtctcaatgaggccttgaccatcctagtgttttctgtaaccccctagttgtggtactacataatgagtcctatttttctctcacataatatgcttttgctctcctaggaccgtggaaatacttttatgggaagtaaaatacttgccaagactggtgggcctggaaaataaccatccggccaatctggggtcaacatggaataggggagggctctggcataagcccctgacttattacccgcggttcatgtgattggcatccccttttttgaggaaatgggttctttctt

SEQ ID NO: 130132 - DNA, 224 bp, Homo Sapiens
ggtcaccctgtgaagtggacttaactttttcttgaatcatgtggaaggattctgaagtcaaaagtttttaagactctcaggcttactgtggatctggattctaaggcaacacttccttgaagaaacaagcttacagctctgcccggatggccctagtcttcgtgtacggcaccctgaagcggggtcagcccaaccacagggtcctgcgggacggcgcccacggc

SEQ ID NO: 130133 - DNA, 1241 bp, Homo Sapiens
  misc_feature (1152)..(1152): n is a, c, g, or t
  misc_feature (1161)..(1161): n is a, c, g, or t
ttcccaaaacatcgacttcaaatttaaataatctttaatatttgctgtgaagcttgatctgaaaattaggaagaatggtgctatacgcactctgatatacaacatgcttgccctgtggatcttttctacaaattctacccaaccgtgtaaaatcggctttctcaggggttacaggccaaaatcagtatagtagggctgctaaaatctaacgggaacaccaagtctttacactgatcctaaatatttattattatcttgagctcaaagcagagccaacagcagaaacaacacgagggaggaagaagaattaggcataacacgagttctctaaatgtcatttaggggagttaaaatcctaaatttttcttaccaggtagaaagatgggagggaagcaccttgctattcgtatctcaacattatttgtaaaatcagctgccactgaaagattggttcctttccggcagattcattggaaagggccctgttcggcttccgccttcacccagcatgggctgggcgcatcttggagccccagggctctcaaacctaggcccaccctgcccgtcccccttatctgttctcccgggggttgtagcgcagcccgtgcggcccctcggagtcgtagctgtcatggtgcgggagctgggcccactccggcgggaaggtggccctgctgtacacgaagcactgcaccgcggtgggcgctggcggctcctctgcgcccggggcccggtcctccagcagctgtacccgcagcaccgtgcgctggtacagggccgggcaactctcgaagtcatccagaaagcgcagcatccgctcgtctaccgcgtagacctcgccctccacgaggcgccccgagccgggcaggtgcagcagccacgggatgttgtgctccccgcgatcacaacgggtagggctccagcgtgcggccgcgcagcccagaaaggctgcggagccgtgggcgccgtcccgcaggaccctgtggttgggctgaccccgcttcagggtgccgtacacgaagactagggccatccgggcagagctgctatccagctgcagtgagaacccaggtttcagcactgagttccactcaggtcctggcagtctgacgcagcggagctcagcacccacaccttctggtgtttcccccnccccttccncaaggtcttagagggcagtggtgcttcacgggactccccgcagcgatcttggctccagcgtgaaggtaaatcctcgtgcc

SEQ ID NO: 130134 - DNA, 1097 bp, Homo Sapiens
  misc_feature (995)..(1029): n is a, c, g, or t
atgaaggttgggaataggtgttcaggataatatactccagatattttaaaaataattacttaataataagaaattagcaatcccacatgtttccattgctacaagaacaaattgccaatgaagactattaaaagaaatgctcagctctcagagggtggtggcaggcaacactttccattacagaataacctctattcttccatgatacatatgtcctgtgaaaaaacttgtcagggcccagggatgaaaaatagagcttgtcctaaattagctaactgtaggttcacttaacatctttgggaaggacccaaaaaatctggccattagttttcgttaaacatctgcaagctgcagaattccttagtcctcagctatagtttctgctagatatcttaaagctgggacagttccactgtgactcctcctcagctatggggtgggtgctagtcatcaaagtctggaatgtcatcataggagtaaccacggtagcctttggatgcatagtaagcgatgcgcaggtggtaaaatccgggtaggaacaccagaatgccaatgatcagcactggaacggcccggtctgccccccctttgctgatgtagcctgacagcaggagggagcctataataatgagaaaggcgccaatcaaaaacagcacagtggcaagtgcgatggccttataagggatcttaggaggggttttcttaaactgaaggtcaatgtagccatcgtctgtgctggagagccttgaatatttcactttactactggggattccagtagccaggttggtacgggacggcatcataacacgctgacacagcggagcgccgcgccaggccgcccgcacacccagagctcgcccacggttggcagcgcccaaggttgcatggcatggcccgcttaagtgccactcagccggccccaggcgggatcagtgcgccgccccggccgtaatggccgaattcccgggcatatgtccggtaccgtcgactgnnnnnnnnnnnnnnnnnnnnnnnnnnnnnnnnnnncggccgcttcctcgctcacatacttcgctgcgctcgtcgttcgctataacggcggcccatatagtcta

SEQ ID NO: 130135 - DNA, 1418 bp, Homo Sapiens
  misc_feature (1309)..(1343): n is a, c, g, or t
atcatgagcagaatgatgacatactacaaggtgctagcaatacggctataaactctaaataataaccactacatgtttcattaggaaacagccaaaagtccggccgttaaaggaataatctgcagaacatcttgatttacaagggacaaaatgatgcaaattatatgctgtccaacctactggtgaactggatcagaatggtccaaggactgttaaacagaggaagtatttacattttgaaaacttgctctgcaggataaaaaaattcctggttgctgtcagtaagaaagcaagtaaaaaaaatattacagatgaactcactgatctttgattttactaaggtcttccactggaacatgaaggtagggataagtgtacaggataatatactcagatatttttaaaataaattacttaataataagaaattagccataccacattgttccatttgctacaagaacaaattggcaatgaagactatttaaaagaaatgctcagctctacagagggtggtggcaggcaacacttttccattacagaataacctctattcttccatgatacatattcctgtggaaaaacttgtcagggcccagggatgaaaaatagagcttgtcctaattagctaactgtaggttcacttaacatctttgggaaggacccaaaaaatctggccattattttcttaaacatctgcaagctgcagaattccttagtcctcagctatagtttctgctagatatcttaaagctgggacagttccactgtgactcctcctcagctatggggtgggtgctagtcatcaaagtctggaatgtcatcataggagtaaccacggtagcctttggatgcatagtaagcgatgcgcaggtggtaaaatccgggtaggaacaccagaatgccaatgatcagcactggaacggcccggtctgccccccctttgctgatgtagcctgacagcaggagggagcctgaaggtcaatgtagccatcgtctgtgctggagagccttgaatatttcactttactactggggattccagtagccaggttggtacgggacggcatcataacacgctgacacaggttattctcctacccgtcttcagaccttgccagggagagaaataagaaccgacgcgaatttagacgtaaaacaaacaataacgtggttctggaaagaggccaactgtgccaggggggacgaatgccccacacggatgactcggagcttgatttcggcggggagcgcggtccccggccgtaatggccgaattcccgggcatatgtccggtaccgtcgactgnnnnnnnnnnnnnnnnnnnnnnnnnnnnnnnnnnncggccgcttcctcgctcaatactcgctgcgctcgtccgttcgcatatgagaggagcccctatatgatctatacat

SEQ ID NO: 130136 - DNA, 997 bp, Homo Sapiens
ttttttccagggggaccccccggaactttggtttttcaaaaggttttttcccctggaaccctgaaaggtaggattaagtgtccaggataatatcctcaagattttttaaaaataaactctttaataattaagaaattagccattccccctggtcccattttggtacaagaacaaattggccatgaagactatttaaaagaaatgttcaactctccagagggtggtggcaggcaaccactttttcatttccagaataccttttatttcttccatgatacatattcctgtggaaaaacttgtcagggcccagggatgaaaaatagagcttgtcctaattagctaactgtaggttcacttaacatctttgggaaggacccaaaaaatctggccattattttcttaaacatctgcaagctgcagaattccttagtcctcagctatagtttctgctagatatcttaaagctgggacagttccactgtgactcctcctcagctatggggtgggtgctagtcatcaaagtctggaatgtcatcataggagtaaccacggtagcctttggatgcatagtaagcgatgcgcaggtggtaaaatccgggtaggaacaccagaatgccaatgatcagcactggaacggcccggtctgccccccctttgctgatgtagcctgacagcaggagggagcctataataatgagaaaggcgccaatcaaaaacagcacagtggcaagtgcgatggccttataagggatcttaggaggggttttcttaaactgaaggtcaatgtagccatcgtctgtgctggagagccttgaatatttcactttactactggggattccagtagccaggttggtacgggacggcatcataacacgctgacacagcggagcgccgcgccaggccgcccgcacacccagagctcgcccacggttggcagcgcccaaggttgcatggcatggcccgcttaagatcccgggaattccggaccggtcca

SEQ ID NO: 130137 - DNA, 841 bp, Homo Sapiens
ttttttcatactttttttggaagttaactcattttatttctaggatttggatttcaacattttaatttctttggaatataagtcactttttgcaagctaaaaaatagaatcaaactaaggtgatctagtcctctaggcatccaggctgatccttggaatcatgagcagaatgatgacatactacaaggtgctagcaatacggctataaactctaaataataaccactacatgtttcattaggaaacagccaaaagtccggccgttaaaggaataatctgcagaacatcttgatttacaagggacaaaatgatgcaaattatatgctgtccaacctactggtgaactggatcagaatggtccaaggactgttaaacagaggaagtatttacattttgaaaacttgctctgcaggataaaaaaattcctggttgctgtcagtaagaaagcaagtaaaaacaaatattacagatgaactcactgatctttgattttacctaacggtcttccactggaacatgaaggtagggataacgtgtacaggataatatactcagactatttctacaataaactacttaataactaagaaattagccataccacatagttccatttgctacaagaacaaattggcaatgaagactatttacacaagaaatgctcagactctacagagggtggtggccaggcaacacattttccattacagaataacctctattcttccatgcatacatattcctgtggaaaaacttgtcagggacccaggcatgaaaaatagagcttgtccataattagctaactgtaaggttcacgttacacatctatgggaaggaacca

SEQ ID NO: 130138 - DNA, 636 bp, Homo Sapiens
  misc_feature (522)..(535): n is a, c, g, or t
tgcttactaaataccaagaggaaaagtagcaaagttggtgtgctaggattaactcaggtaagggtgatgtgttttaggattgagaacagcagacttgggaatcactgctaattgttacttaaagcatgttacagctgttttgttctcagttttaaccaaagccagtggacatacggtagtaataagtaagtcttgttgtgtttcagcatttaataatagactttggaggtagacccctggtttaaatctaagtctagtttgaggaagtcacttaacctttattgaaaagactctggatttaataagctgtgtaactggcactcgatagttacccaaagttcagtctagatggcacaaaccacctctcagggaataaaccctaagacatcactcaaggaggacttcaattatttaattttgaactgttttgtcctctctggccataaaacttgacagtcatgaaaggtaaggcaaattttaagtgggttaagtttttaaatacgtatctactcattttctttnnnnnnnnnnnnnntacctgggggaaaaggatattaaaactgggtattttaaactcagcttaacccagataaacctgctcccagcatttgtcccagtgttgaaataaataggaag

SEQ ID NO: 130139 - DNA, 958 bp, Homo Sapiens
ttttttgatttttaaagtatgtgtattgccagattagaaactctttttcaaatgtaagtcctgcatgagacaaagaaaacacctttctttgggtaggaaggggtgggtggtctcacatttagttgaagcatatggctgcatttggagtataaattttttcaattttaaaatgtttactttttcctttataaaaagaacacatgcttgttatgtacaatttgaaaaatatgctgcaaataatttattgaattttttaaagatataaatttatggatattggaagaatctctccctatacagtgatcccactatgctttttctacagctgaaatcagaactggaagaggtcttagaaatcatctagtccgaccacctcctttgacagatgaggaagaacacatgttccgtatgattacattttgatgttctcttatagttggctcattccctaaggattttttaaaaagatttatctttttttaaaaacttgagatactattaaattggctaaaattcaaataaacacatcctccctacattctctctctccatctctgctctgactctcaaagatgcatatgctgcctcttagactgttcaacatatggggcctctgcattgatgccaaaagtccagcagtgtctggaactgccacagggcggcccaccgagagagagcattttgagacaaaggtccagctgcctcattcttgggcagtcactggaagcaagacagcaaaatagctgtggctttgctgaccttctcaggagacctatgggcttgaatctggcctctatctggggagaggtgtagagggactggaaaaagggaataggagaagggaaaagaaaatgagaactaccttggaaacaacagtattgaaagtggattaaccatcgctataaataaaaaacacataacgcacattaaatctcacaataggatttttctgtcatgt

SEQ ID NO: 130140 - DNA, 1278 bp, Homo Sapiens
gccagtttgcttctgcttggcctcatggggcctcagagaaagccacaaaggaggatgggtctttcctgggttcatttaactgccatttataacactttttcctctaaacagcttaatggacttcctactacttgtatagtttgattttcaggactctgttcagcaagaatacctactttacaaaactcagcataaaaatgaggtgaaacagtttaactaaaactggagtttggctgggtagtgtggctcacaactgatcccagcactttggccactttcttaaacctacacattggttgctgtgatattaattctatttttacaaaataagtgtataaccaggaagtactaatcctgctttctatgcccaattgttaacaggaaagggctcagtgcacttctcaattgtcacccctgcccccagccctgatccgcggcctctaccccaagaatgagccaagaaccagctgctctagggatctcagcagcaaaatcctgcccaaggctgttaaaatgtgtgggcactcatttacactcgtgctgtcatgaaacacatccttgaacagggactattctgtttcatttccataagcaaactggcgtctaaggccacaagccctccgtaaaaataagaactcggcacaaatggccagtcacatgcttacctgcatttttaaagacagctttcaggtatttggggactacattattaccaaaccttggctttgggagattatacaggtccgaggaactcgtgtctactgcagacgaatgcaattaccccaccttcctccatacagaattgttaggaaatgtccactcctttgggggtgatttttctcctcaagttgtagccaacattttgtccgtaactgatttcagggcaaacatttctgacatcttcctccagctcagtctgccatgccttggcaatccagtttcctgtcatatgcgagccatccaagttgatgccaagtaagatttgcccagctcaaagtgaaagtgtttgcgtcttggtatccggaatcctcagccccagtagcaaagctttagtcattcaccttcatccaatagacgtttgtgaacgtcctgctgtccattttgtcaataaacaggcagccctgcaggtggtccatctcgtgctggatgatgcgggctgcccacccgctcgcctgccacaccacctgttctccattggggtccagcccgcgttctggaggcaggggacgccggctagggccccacgctgggcggttcggcctgcgtctccgctcgccc

SEQ ID NO: 130141 - DNA, 441 bp, Homo Sapiens
gccagtcagatgcttacctgcatttttaaagacacgctttcaggtatttggggactacattattaccaaaccttggctttgggagattatacaggtccgaggaactcgtgtctactgcagacgaatgcaattaccccaccttcctccatacagaattgttaggaaatgtccactcctttgggggtgatttttctcctcaagttgtagccaacattttgtccgtaactgatttcagggcaaacatttctgacatcttcctccagctcagtctgccatgccttggcgatccagtttcctgtcatatgcgagccatccaagttgatgccaagtaagatttgctttctggaaagtgctgatggccacccgctggaaaacaggagccaactgaccccggaaatcagctcccacccggctgaaggacagcccaaagtacatgcactg

SEQ ID NO: 130142 - DNA, 1155 bp, Homo Sapiens
  misc_feature (560)..(560): n is a, c, g, or t
agtttacagaattttcattctcttacctaaagtctgtgctatctgagctggtggaaaaaggacttggagacagcgatttaaatacggaacaaggtcttccaggaagacagtgcagaactggacaaagagctcttgctccccgctgctgaaggcagcctcttcagcgcgatggaaggccaggattattttagttaccttggcaagggcatcttccaaggccccagtcacatcctgcgccagggccacagggcagcagaggcgcagatcattgaaggcaaccagaatattgttgagaaagcaggcgaggggtgggaaatctaggagcaccatgggtggctgcagcgtccccggctgggtggctggcacagcagcaggcatgttactggtgcccaggatggctggagccgagatgagcatgtaggagttcatttcttcctggaatttctccactgtttcctgaattgctttctggaaagtgctgatggccacccgcgtggtaaaacaggagccaacatgacacccggaaatcagctcgccaccacggctgaaggacagcccanagtacatgcactggcccagagagagagtccaggtggacggactatgccccggtaaaggtcgagtactccagcaacctggacaggaattgtgagaccttctgtagacacctaagaccattggaagatggcactctcatttcacagttgtgcatcacccatggcaagggcacgcagtagggtcctcgtctgagaaagatggacacggtaactggagtgactgctatcaaagcagaatggacacacgggggaaggcctacgaaatggatgttaagcaaatatgggaacaatagtgactcgtatatctaggcagttggcaagtcaaggaatggaccggaagacaaaggccattttcggggccctgaaggaatagtttaaagcggttaaacttcaagccctccattggaacagacgtttccattaacgaccgcaaggttagaccagatgaacaagcatgcaggaccagacaaccggaagtacggcgacgacagattgcgacggatccgaccgtgttcaagaatacacagtagattgccaactggagcaatatcattccagagtcccccggattaacggcatatgaaacatattccatttc

SEQ ID NO: 130143 - DNA, 633 bp, Homo Sapiens
  misc_feature (268)..(282): n is a, c, g, or t
  misc_feature (285)..(285): n is a, c, g, or t
  misc_feature (295)..(325): n is a, c, g, or t
  misc_feature (485)..(578): n is a, c, g, or t
ttttttttgcaaaacagtgaactatttatttcaaaagcttttgcagaaaacattaaaaagtaacagttcctattttcatagtcatcagtttgctcatgttttctgtatgaggcctgacccttggtgtacaagaaataaactgcttttagcagggggatgtccttagctcttggtcatctggcataacaggtaacatgataatttaccactggtgcactagtgggttcagaatttcagcacttccaaaatgaagcactttcccattagnnnnnnnnnnnnnnnaanatggggtctnnnnnnnnnnnnnnnnnnnnnnnnnnnnnnnaattcacaggcatgatcccactactgaccagcacagaagttttgacccactctgtttccaacctgggccagttcacccctccttaggcaacctggtggtaccatgctccccagtggccaccatattgatgccaaacagtatagataccccatcagtatannnnnnnnnnnnnnnnnnnnnnnnnnnnnnnnnnnnnnnnnnnnnnnnnnnnnnnnnnnnnnnnnnnnnnnnnnnnnnnnnnnnnnnnnnnnnnctcatctagtttaaatatagcctgagtgggttttgttgttgcctcgttccgaaat

SEQ ID NO: 130144 - DNA, 695 bp, Homo Sapiens
ttttttttggtaagatgcctctttattggtgctggagctgttcctgagggagcaggccatgggaccctcatcgggacccttgccctcagctacttccgcctgcgggggatactctgtcccaagggtacctcttctgtcagcttctgtaacaagcgggcctggtaagcagggggatcctctccagccaaaggctgggggcgtacgtgcaggtagcgctcagtggccgtctccagctcttccacctcatacaaggtggctgggtccagcgagtgggcattgatgaggctcacaagatactctttgtagtgtgcctggcacaggccggcatagccagctggagtttccttgccacaagcttcgtccctgagcccattgggaacctccttctgctctatcactcggcagccgcctccagggactgcccgggccccagctggaggctctgtattaaacatgacgttattgtcctgtagcagcttctgaagccggagagcagtccagtcccgcaggtagaagaggcagtctcgagggtggtggccgtgcagggactttttcaccctgcagttaggctctggacatttattcttggcgtaaaaggcattgtagcagccgctgcagaactggtggcggcactgggtacagtgaaagtgcatgcagcctcctcggggcatggcgtacgagaacttgcatttggg

SEQ ID NO: 130145 - DNA, 171 bp, Homo Sapiens
actgggtggtaagatgcctctttattggtgctggagctgttcctgagggagcaggccatgggaccctcatcgggacccttgccctcagctacttccgcctgcgggggatactctgtcccaagggtaccccttctgtcgtcttctcgcagccgtatagtagtagtagtaggc

SEQ ID NO: 130146 - DNA, 1146 bp, Homo Sapiens
  misc_feature (54)..(62): n is a, c, g, or t
  misc_feature (1121)..(1121): n is a, c, g, or t
aatttgcatatctttgtaagtttttttcatataaaaatacatgcacaaatcatnnnnnnnnncatcagaaacaatgtcgcatttggaaaaaatggtcccactttattactgccactacactgttcaggcctataccatcttgtgtggactgttaccagcctgtcagctaatgcctttgatgaaatttacacttcaataaattgacatttaaatttacacacaggtcaatggtaggtttaagactgtctctgctatgttgattgactagacagatccaggtgtattttagacttggaatacgacaatcttcacttacagagaaaatagttgtctaaaatttgccctagccaggaccagaaggggctctctagtgtctgacacttctcccattcctgaccagctttcaaaagagaaagagaaagattataatgggacacagtaatgatcccagggcagcagaggcagttccaatgtgtatttttactttcagacccctgggttaagttggcttccaacctgtccctggagagtccaggtcatgtccaaggcaggaagttgcaatgtaggagtagtcccaggagccagtaagtcaggaagtagcctagaatgtatcgtgtgactggagaacaggttttccagtgatacaaaagtcccatgataggatttctggggaccttttgtcctggtggggagtcctctgcaagaggcttccaaggcacagtctttaaggatcttcaacagcggctcttgatcctgaagcaagtgagctggaaaccagtacataataggagtggaggagcccataaacctggtgagaacctgaacatgcatgcacagacctccaaacagcagcagcactgcagcgtggaccacgtacacaaacacctgaggactgaggaatccaagatcgggcttctctagggtcttattgttcttgctcctttgcagcccaagtgtaaggcagagccaagggtgagtggtcacgtatgtccaagttgcccaggcgaccagtatagccactggtgcagccagtagaaaattgggcaccttgttgagctcatagtatttcaaaaagccaacattccagtagacatcctagttatagctgtatagtagtggantatcccagaagcaccaaggcggttc

SEQ ID NO: 130147 - DNA, 2982 bp, Homo Sapiens
  misc_feature (1701)..(1718): n is a, c, g, or t
tttgcttcaggcgcttttattaggttccactgcagggctggggtcaatgtaatgcaaatccaagcccagtgatgcacacctgtgagccgaaacagagccgaagcaggagcacctgtgtcccaggagcagctggttggagggagccagggccaggccccacctcctctcgggaccaggagactggcagccgctgtgttcacctgggcaggtgtgcacccagtcacccccactggattatggtgctggtagcatgagagggtgtgtccacaccaagggcaggtgaagatgcgaggtggggctgagacctccttcccacaagaggaggtggctgagcctcccagggcctgaactctcacagcagggctcacccccaagcctgtatgcttagctctgactctctttggacaataaaataaagtgcattactgaacaaagagtaactcaaaaccagaatcagacaaatcgccaatgcttttcctttagctaaaagacaaaagaaaacatgaatgatgtgaatgccggaacttcagagtaagggaaatgctggtggaggacaacggaaactataatagcgtggtggataaggacgagcgagtgggagaggaactggcaacgcggctctctctagaagtccgtgctgtccagcctctgcccagtggtgggggaaggccttggactcacagggaagcaatgcaggaagccttggccacctaggctcacagctcatctcaggaccagaggagacagcagaggacaaaacttcagtgtgacagctgctaggagggagagcagacagcccgcggtgggcaagctgggagttgcatccgcagcagtccgcttcaacccagctcctctccacccttcctgaccctccacaatagctctgccgtgaccagacccaacccaactggcccctggtcccaagagcagatgagctgcttgggccttccacttggtgtcccatgccaggcggacctggaggtgtcagccatggccctgaccacttcagaagccaacaggcaaatgttctctgttcatagtgccaagaatgtgggtcacgtgggcttaccccccaggatggacacagaagtccctaagcagtctgcagctgggccagcctctcccgtgggtgcagagcagcccagatgtggccatcattaaggcaaagaagcatcgagatgcccaccactccccgggtaagagccatgccccggcctggccacgccacagaggaacgcagagcacacaagcaggaccccaccacgtgctgttccagatcgcccagtctccctctattggtacactatcaattgtgcagtgccccagggaggtcccaaatggccctcacaagaggcacagcccctaacgccctcagccaggcggtgcagtgggacgaagcagcgtattggggagggccagagcatcggcaccggtgacccagctctcccacccaggccatcgcagggcagcctcagggcaggcgccaccactgctcctgctcagcccgcagtatctgcagttgctgcagctgtgtggcttggtagaaaagtctcaggcactgaggtttacttcaagggagaactgactggtgcccccgtccacactcatcaccctggacacaacctcgggggcttcactaaaggagggaaggatgtggaaactagtctctctcactcccccttttgtgcagtttttatcttnnnnnnnnnnnnnnnnnngtcttctgggcaggaattactgataactgttattataaccaatgcagactttaaaatcccacctggacatcgggtgagaggaggagggcaggcagcaaaccgacctgcagacctgcagaggggagccgtgtccagggccactgcgtccccaccagacaacagctactagaagaggaaagtggccctcacaggcagggtgcctgccaccaagcagtcagacaagggggtaaccaggagctcccagccagaaaaacatgggggcagggaggccaaacaaaaagcactgaaaataaagagaaggctgggtggtggcagcatcggcccctccctgtgcgccccaattccaggtgccacgtagaggcgagaggtctttccaacacggcgggggacttgtcaacaggattaggcgtgaggagccgctctgcgtttccagtctggagactgcattcagcctgcagaataccagccgtggcgcccgctctccagggaggaacgtgctgagaagcttcagtgggtcagggagcccaggacagccagccccttgttcctccagggctgcccactatggggcagttacagggaacacactcagcaacgcttctggcttcaggaagggctgggctgggcccggtcctagccagcagagggcaggcgccctaggtcctggggaggctgcacatctcgcagtggcctgtgcctggctggttcatgaacgtgcagtgctgacaggcccacatggctgcagtggccgtgtgtgtggagcccccgacggcgccgtactcatggagacctgggagctgcccgccaactgtgctgcacagctgctcgatggtggcccactgctcagacctcttccatgtctgggcgagctcctcatttctggtccgcacggcctccagcagcaagctgatgctgtcctgcagaggcataacttcattggtgaccaggaacagcaagaggtggaaatctgagatggtatccaagaacacagatgaggtattctgagacaaataggtggccaagctatggaagtcctgtgtctcacccaatacatcccggttttcaataggaaatggattttgcgaaatagaaaaagtgtaaactggatccttggggaaagttgttgtgatgtctatgatgagatactccacaggcaggggccgggccagctgggtgatctcgttgccaaacttgtctacgtcctctttagagcagccatccttggagttgctcaacgccctcttatcccgggaattccggaccg

SEQ ID NO: 130148 - DNA, 716 bp, Homo Sapiens
aacacaccccctcccttttattttttcagtatattaaaaaggaacagtacaaatgctgtggtattaaaaaggatccttatttttcaacaaatgaacttttataaacaattctgtaatgaaatgaaaacagtatcttaatacaagcttttgttaaacaagattttaaaattttaaaattagaaaacgttaagattaaactctttcaaaggttcaaacaaaaaaacaacctgtacaatctccattacatgtgtctttgtacacagtctgggcactttgaaaatgttaaagtttttaacgtttgactgacagaagcagcacttaaaggcttcatgaatctattttccaaaaaagtatgctttcagtaaaacattttaccattttatctaactatgcactgacatttttgttcttcctgaaaaggggatttatgctaacactgtatttttaatgtaaaaatatacgtgtagagatattttaacttcctgagtgacttatacctcaaatgggatttaatgaacaatttctaaattttagaatgaaacagtatgtgtaaatctacacatgtatgttcaactagggtaaagctcaagagcatgtcacagaatttatacctaaattatataagaagttaagcaatgcctttatccccaaactttaccaataagccttctcaaatagaatgttagtaaagtgaatcactgaaaagtttcattttt

SEQ ID NO: 130149 - DNA, 693 bp, Homo Sapiens
caggttttatacattttattcatacatttctccaactttgaaatgacaaaagcccaattctatggtttcccattacacagcatcctacaggtatgtatattctacaaggaatactatggagtttctcttcttcccctgtcacacaagataactgattagggtttcatcaacttgtactgtgccggcagcgcaccagcattctggttgttccggcgacagggcaaagggatcaggatgggagggcgtgtgctaaggcatgtaaatagatacacacagagagaaagaaaagcaggacatttacaaagaatccaaacctttccaatcccttcagctcctgggtgttgagggacacctcctgcacaaacgctcttgcaagctaaggctctgctgtaccctgcaaatacttacaattggatacggtgaaatatacaacaaccattaacatctctttctttttatcactgagacaatacttcaacaccttttataaaaaggcaataatacatacagaaaaaagaacacgttggcaaaactttatgcaaaaccaccccagaactgagtttgaatggcgacgtgcctacactgcaattaaacacgatactcgggtcttagcacgtgaggattgggcggtcttcacatcagtcacgctgcctgctgcacccggcagccgcctacctgcctgcacagatgaca

SEQ ID NO: 130150 - DNA, 2348 bp, Homo Sapiens
tttttttattcaatgaatggaatttaatgtaactatgacataaacacacacagggtggggaggacgggtgaccaagcgcagacgtgggtgacacgtggccccgctctctggaccctcagtgggaaaaagtctgaggctggcgtctctcaccaaaccccacctcccctggtgggtcaatactgatctggctgagtgacagcatctcgtgacccaggctggccctgggaaggcgccacaggcgaggcctgcgagtccagggagcaggcagacgctacagtggcccccgagcgcgccaggtgccagcctcgacgtgtaaatggcccgctgcgggcgctgctgggaaggaagacaagaagggtgagggctcgtcctcaccaagtgcttcctgagtgccgtaggacgtgggtgggacatggggacagtgagggtaacacaaacagcaacgaatgcacaaagacaagttccaggaacacccataaacccataacgttcaacaaaatggcaacaaaacgacgcccctgctggcctggcgaggctggcgcttccttcgtggcagatgccacctgcagctggctggctggcaagcgttggccaagctttttggtacctgggagctcaacagcataaaaggctgtaacctctacacggaaaaatttcacatccttcccctgaaactgacttcaggggcaaagaaacgagacttcttgaagaccagcctcttctgggaaaggggcttctgagacgagtgtcgacggcagagcagatggcctggggaaggcaggggtccctgggcagaggctgggagggtggccagagaccagggagggcccctccatctggtgggtttggcaggtgtgtcccctggtgctgccaccaggagccccgaggccggggtgttggctgcgacagcccctcactgggtccggagctggtaatctccattctgcgtgatataacgcacccagggcagggcctggtacccactcttctcaatgatcttcaggtagcgcacctggatgccggaggtagtgaagtaagggatctcgaacttgacactgatcgggggcttgccctccttgtcttcggcctccacactaggcaggccgaagtgggcccgcatcaggtactccttgccgcccgggaaggacttgatggaccacacgatctcgctgttctcggggacccacttaacgctccccaccgtcgtcttgaacttgggtgagtcggcatcattgggcacgggaatgtggatctccacgttgttggctgttgaccgccgcttgaactggcttttggccttgatcatgtactcgatgcggctgtgggagtgcttctcgatcaccgactcgatccatatcaaaggcttgacgtgggtgttgagacggtaggacatgagctcgaactcgccgtcgggtgggatgaaggagatggtgcggtcattctcgaagcgtgatagccgcacacactggtggaacttcacatcctccagctccacggatttgcttttgccgcggcccgtgttgtcaaagaggaccttgtcgttgaggcccaggcgcagctcgggcatgcccgagaggaagactcgcatcttgatggagcccacgatctcgctgcgcaggacattgccgttggcgctgaccaagaggttgacagactcgatgacgtccaagaacacctcattcttccgatacttgatgccttcggaccgccaggacaccgcgttggtgacggtggctggtggccgcggggcccctgtttccagcttgtggccttcctgagtgatgtactcctgcaggatcttgctgtcggtggtctgggggtagccgaagtccatgagctcgtccagcagctcgtagatgataacaaagttgtcccggatgctctcctcctccagctccttgaagtactcggaaaacacctgcaccaccttatagaggaaagaaaagaccagcgacacgcacgcgttcttcttggatgtggcaaccagatacaggttgttgtgtttgatccacatgaaacggacccccccgtgggccaggatgggcgacagcatcccctcctcctccttctccatcaggatgggcatgaagtgctccacctctgacatgtccacgtcgccacggtagttccggcagatgagcaccttgcccttcaggtccagcacgtagacggcgctggcggacatgatggctgcaggaggcctcggcagcggccgagggcggtggcggcggcagcgacggtggggactgctgggcgttgagcaaggccgggcgccgcccgcgacagctcacctccacccccggccgtaatggccgaattcccgggcatatgtccggtaccgtcgactg

SEQ ID NO: 130151 - DNA, 1754 bp, Homo Sapiens
tttttttagatggcatctttttaatgacatcctaaaattcagaggaggggccagcgggacctctgggctcagcggctgtgaaggagggacccgcaacacccgctaaggcaggtaattgcaagaaggcactcgcgagggggacttcaagcccctcttctatttcttcatataaaatcagggggatggggaaagctccaagggcgagggaagcagagagagtttctctcccagcctatggaataaggaagaggtgaggaaggggcgggtgctgggagcaagaaactgccaagtccaggacctgccctcacacagacacacacagcccgcacctgccctccctctaaaatctgcatccggggctgtaaggaagccccgtgttcaagcccccatctcttctcccttctagctggtacgaagttggtaatcgccactctgggtgatgtagcgaacccagggcagggcctggtaaccacttttctcaatgatcttcatgtatcggacctggatcccagagacggtgaagtaggggatctcaaacttgaccccgatggggggccggccctccacctcttccttttccacactggggaggccaaagtgggctcgcatcaagtactccttgccccccgggaaagacttaatactccaaatcacgacgtttctctccggcacatacttggcgctgcccacactggtcttgaatctgggggagtcggcatcgctgggtacaggcacagatatctccacaccgttggccactgactgtttcttaaactgccccttggccttgaccatgatctccacgcggctgtgggagaacttctcaatgacagactcaatccagatcagtggcttgacctgggtgctgaggcggtatgacatggagctcaaagtcaccatcaggcgggatgaaggagatggtgcggttcgttgtcaaagcgagagagccgcacgcactggtggaattttacatcctccagctctactgatttgttcttgctgcggccagtgagctcgaagagcacgcggtcattgaggcccagccgcagctctggcattcctgacagaaacaccttgagcttgatggtaccgacgatttcgctcagaaggacgctgccgttggcattgaccagcaggttgacagactctatgacatcaatgaagacctcgttcttcttatacttgataccctcggagcgccaggacacagcgttggtgacagtgggtggcacccgtgacttgcccgtctccagcttgttgctctgctgagtgatgtactcctgcaggatcttgctgtcggtggtctgcgggaagccaaagtccatgagctcgtccagcaactcgtagacgatgacaaagttgtcccggatgctctcctcctccagctccttgaagtattcgcagaatacctctattgtcttatacaggaaggagtacaccagggaggcattggcattcttcgatgtggtggccaccaagtagaggttgctgtgtttgatccataggaagtggacctggccgtggctcagcagcggggccagggcgccttcctcctcccgctgtaccagcaaaggcatgaagtgctcaatcttgctcatggccacatcgcccttgtagttgcggctgatcaatggcttgcccttaacgtccagaatgaagacagccgaggcggacatggtggcggccgaaggacttaggagtcggggagggagcgccgggaggcgatggcggcgccgcttccttcttcctgcccc

SEQ ID NO: 130152 - DNA, 716 bp, Homo Sapiens
  misc_feature (642)..(642): n is a, c, g, or t
gaatgaatgacaaaagcattttattgaagattcacctgcagatggataagagggaatgagaggagtagaatgggacactaagtggttctcatcctaagcttgcagggccaagtgctgccgggtgttggagaagtagtttggttctgatgtagatggataatacaggatctagtgggagatggcattggactgggaagggacatatgtgaccccaataattctggagatgacactcctggtcattttcttctctgcccatgggaggtgagaggtcagctgacatccttcccattccaggtgggtcaccaggcccaaatcaagaagtagctaccaaactccaagaggcagagtccctgtcccagcacagaagatcatcctggggcagagagagcccatgggatagtggaggggatactagtaagatgagccccagagacagaggatggaggtgaagtgaaggaagcacagagacaccagtgctgggcccagctggacacagtgagctgcagggacctcgtctcctctatcgtctcttgttcagggtggtggtagagatgatcttgctgctggaactgccagagacactgccaccaaacccaaagccacttccagagccggagccaaagccactactcaggccanacccggagccacttcctaatcctccgctgatgcctccagtgctggtgctaccgctgaccacagagatgctcacg

SEQ ID NO: 130153 - DNA, 1070 bp, Homo Sapiens
agaaggctcgtaaactccgatccaccagctctgcctgactccactgaagcaaaaccacacatcactgaggtcacagcctctgccgagacctgtccacagccggcaccacagagtcagctgcacctcatgccacggttgggaccccactccccactaacagcgccacagaaagagaagtgacagcacccggggccacgaccctcagtggagctttggtcacagttagcaggaatcccctggaagaaacctcagccctctctgttgagacaccaagttacgtcaaagtctcaggagcagctccggtctccatagaggctgggtcagcagtgggcaaaacaacttcctttgctgggagctctgcttcctcctacagcccctcggaagccgccctcaagaacttcaccccttcagagacaccgaccatggacatcgcaaccaaggggcccttccccaccagcagggaccctcttccttctgtccctccgactacaaccaacagcagccgagggacgaacagcaccttagccaagatcacaacctcagcgaagaccacgatgaagcccccaacagccacgcccacgactgcccggacgaggccgaccacagacgtgagtgcaggtgaaaatggaggtttcctcctcctgcggctgagtgtggcttccccggaagacctcactgaccccagagtggcagaaaggctgatgcagcaggtgagtgggcactttccgggccaggggagtagaggaaggggcgaggttcgcaggggctgcagggaagacccgcaggacacagaagagcagctaccgcacttggaagggagtctcgtttcttacggagaattgggagctgaatctgaggatctctgcctggctttgcttctgcctgccttctccgagttcttcatttccttctctgcaatgtaaacatgtgactcctagagcccccagtttcttctggtccttggaagcttggccttctggcctctgaggcaaaggtcagtgatactgatgggagggtaggtcggactcttggttgcaagtggcagaaacccaagtcagggcagtttatgc

SEQ ID NO: 130154 - DNA, 855 bp, Homo Sapiens
tttttttctgggccacactgagtgaattttaatgcaggatggaagcacacagatgggtgatcaggtctctctttactgaaacacagaacatgtgccaaggtgagtccaaggacacctctgggaacaggtgaagcccctccccatacatacactccggtggatgtgagcgagggtcctgttgccacatctggggttaggggcttggacatgctgcccttcatgggaaccttctgggtacctctcagcacagtaacgcagctgcagtctgtcggtgggggcccaggctaggggcagcaccctcttttggcatacgggacatgcctggctgcagctgatgtccgttagcctctcctgacacgcagtaaggagacctggaagtgaggcgcgtgggcgtggagttcccggtggagctgctgcatcagcctttctgccactctggggtcagtgaggtcttccggggaagccacactcagccgcaggaggaggaaacctccattttcacctgcactcacgtctgtggtcggcctcgtccgggcagtcgtgggcgtggctgttgggggcttcatcgtggtcttcgctgaggttgtgatcttggctaaggtgctgttcgtccctcggctgctgttggttgtagtcggagggacagaaggaagagggtccctgctggtggggaagggcccttggttgcgatgtccatggttggtgtctctgaaggggtgaagttcttgagggcggcttccgaggggctgtaggaggaagcagagctcccagcaaaggaagttgttttgcccactgctgacccagcctctatggagaccggagctgctcctgagactttgacgtaacttggtgtct

SEQ ID NO: 130155 - DNA, 542 bp, Homo Sapiens
tttttttatgtatgaattatttttattggcatttagactatggtgctcaaaagcctgcttttgaataacttcccccaataatggtgctatttatcttcaacataaacacgagccattattttcagtttgttctgacactgaaatagtgataggaaattgccaactctaacagtaaacttttgggaatttttgagctacatatatgaatccctgatctgtggttttctatattttctcataaattcccaaaataaaggtatgtgtgcttcacaactagttatatttacaaatagtgtcactcaggtcttaattgaatcaatccattaaagcattagcagatgctttatggtatgtgtcatgaatacaaatgacagccaatttggcaccttaacagctcacacaggaagagtttctgtataaaagctatgtgattaatttgataagggaatacaagtaccactcaacatttccctgtttacaaaaaaagctataagcagattgggtaaaagaagaaccatccatactcttacccgaaagatttc

SEQ ID NO: 130156 - DNA, 451 bp, Homo Sapiens
tttagttggtgtttgttatttattgattctccctccaaaggggcctaagctcgacaaaaccgttacagttgtcagaacccagccacagggctcagcccctttcccccacgtcacgtctgcatcactactgtgggtgagcctggacggacgggggctggggctgcccgtggcagcggcaaagggatgctttccagagacagccaccacgcaggagggaggatcaccccaggcaacccagacacgggtgttcacatgtgaggctgtgagctccacatagcagtgggtgtgggtgggcgtccccaggctcagttcctgaacacacatgccgggcgggagacctgccctgaggctcggcagcccctcagtggggtctgctgctggactccaaatgtgaccgtttgccagaggtcaacatcccatggtggtcccctggctcagaaaaaggtcgctt

SEQ ID NO: 130157 - DNA, 2198 bp, Homo Sapiens
  misc_feature (729)..(729): n is a, c, g, or t
  misc_feature (738)..(738): n is a, c, g, or t
  misc_feature (763)..(763): n is a, c, g, or t
  misc_feature (800)..(800): n is a, c, g, or t
tttttgtagttggtgtttgttatttattgattctccctccaaaggggcctaagctcgacaaaaccgttacagttgtcagaacccagccacagggctcagcccccttcccccacgtcacgtctgcatcactactgtgggtgagcctggacggacgggggctggggctgcccgtggcagcggcaagggatgctttccagagacagccaccacgcaggagggaggatcaccccaggcaacccagacacgggtgttcacatgtgaggctgtgagctccacatagcacaaaggaggcttgctgactttgggcggccatgtctgctgggacctgggtgatccagtgcgtgccacagccagaagcaccattccctgcatatggccactagccaccctggggtgggacagcctgtctagacagacagcaccttgggggctcccctgagggtcagtgagggcctgaccccaggcaggactgcgtggacgctgttctccagccgggacagacctggcctccgctgccttctgccctactgcatgggctcccagcctggccccgcacaagcctgggtgtgatgctgggtgcttccagggcatccgcctcgcttctctgcctttaaggcacaagcaaggggggaaaacatccctcagtggctccccatatccgtgtaggccacgcgcttggactgcaaaccactgggttctatgaaatataggtttgttaggccacaaccnagccttgtngttatgaaacaggaaaacaggaaanacatgaggacatgtaacatagtaaaaagaggaaagtnacttgttcacaaaacttttgagttatgtgtgtgagtgtgtaagaaccagatcagactggaaaaaactctctcccactgtgggttcactgtcaacaaaacatcaggccagccagtgtctaggctgtctcctcaatttccccgataatgtgcctcacattcctcacagaagcctcccaggcttcctgcacattctgtggcatttctcagtgacctagagggatctttaaaccgcaacgagcctaagtggctgaaaacctcaggaacgcctgtcagtgtcccagcaagttgagtctgagtgacacatcctgagtttccactcctgagtgaggaaggcctcgctgctaacacttcccctggggtgcgccgagaggaagcagtgggtgtgggtgggcgtccccaggctcagtccctgaacacacatgccgggcgggagacctgccctgaggctcggcagcccctcagtggggtctgctgctggactccaaatgtgaccgtttgccagaggtcagcatcccaggggtggtcccctgggctcagaaaaggtccgcttgtagctccgcccattggaccctcctcggtgccatttgcagatgtcaccattcagaatgtcctggatgtgctgcacgatcaggttgatggcaaccatattgtccactcctcgtgggatgatcacatcggcatacttctttgtcggcaggcagaactcctcgaaggccggcttcacgaaggtggtgtactgcgtcagaatctgctccaggtccctccctcggcgcacgtcccggagaactcttcgagacagcctgacgtcggagtcggtgtccacgaagaggcgcaggtggaacatgtcccggatctcctggctgtagaacaccaagatgccctcaaacagaaccacgtccgcagggtagaccaccgtggtctctggtaaccttgagtgtgtcacaaaatcataggtcggcacctccaccgttttgccctccacgatgttcttcagagtcctgtgcatcaaatcattatcaaaggcatctggatggtcaaaattgtactgtcctttcaaggccttggccttctgctctgccgtcaggaccttgtagaacctgtcctggctcaggatgaccaccttccgctgccgctgttccacctcgttctgtcccagcaactccatgatcttctcacacacggtcgactggagacacagaagcgggattcccgcctggaaccgctggtcccctatcaggaagggccgctggtgcggacggtcggcctccggcgcggggctctcgcagtcttcgcctcccgccgaagccatctcggcctccgctcccgcgcatcgggtccccgcgcccgccccttccccaggcccggcgcgcccgatcccgggaattccggaccggtacc

SEQ ID NO: 130158 - DNA, 685 bp, Homo Sapiens
ttttgtttaaaatcaaatctttattcaaaagatagtcaaggctgacaacttatgcagtctgtgacaaagagcaagtcaagccaaggaaaaagctctcacaaagaacgtagctctgttctcttaaaatgtgtaactgttttcctggtagagcaaaatttcttgaaaggggcccagttgcgactttaagcagcgtttaaacagcctgcctccgtgtccagcatttaaatcagcacaagagaatcggctgcctgtgggccctgcctgagcctcagcctagcttggagtctgaggctccaaggaggcctgtgtgtataagccatcccatggtcaccctcctggacacgcccccctcatggcagcccccaccttaagcagcaggccggctgcaacccatcatccgagggtggttgccctttgctgcaggagggcgggaagccccccctgcctgccctgccctgcagtggcttcaggcatctgggatggagtggtccatggtgtggtggagcaggactggaggcaactttttgaccatgtgctcgtagatcacactggggatgatggtcagggtgacaacgttcccagccgtggccagaatctccatgatctttttgtccttcagcccgataacattctgcccgtccacctcacacacgtagtggttggtgaggagcccgttgcgggccgc

SEQ ID NO: 130159 - DNA, 1012 bp, Homo Sapiens
  misc_feature (134)..(134): n is a, c, g, or t
tttgggttccaggaaaacacgcgttaagggcccaagtggcccccatttcatatacctctttttgtcccgccacccgcaacatgaatgccctgggagacgatgggacctcgttttcgtaggttgtgtgttgttgnaaaaaacagcagctttaatgccccccagaatcagcaccatgtcatcacaggcttgggtcaaggggcgggtcagacgccagtcacatccgctcactgcccacagccacccccccacagtgagtcatctgccagggtggcaggagccacaatgggggtttgtccacaggggggaaggctagacccacgggaccaagtcactgaaataacggacgtgcacacgcacgctcacgtgcacacaagcctctagcaccaaggggagggacagtggggttctgctgagaccccgactcctccaggggatgctgaatctcagctcattatctgggcctcagtcctgggcagtacctgtcccctggctctggaccacccggggtgggcagcggcgctcgcaggcctcacgggtcccaaaacggttggcattccctccacagccaccatagacaaaagggtgacaggcctctgtgctgcctgtcacagcccgatggtaccagcgcagggtgtaggcagtgcaggagccctcatccagtggcagggaacaggggtcatcactatcccaaggagcttcagggtcctggtactcctccacagaatactcggagtattcagagtactcatcatcctcagggggtacccgctcttcctcctctgcatgagagacgcggagcacaggcacagcatggagctgggagccggcagtgtctgcagcataactagggaggggtcgtgatccagatgcgatgaactggccctggcaggcacagtgctgactcatctcttggcgcacaaagccccggatgtcatcctccgtcagtgcagcttctcccttctcgcctcgaggaccggccctcgtgccgaattcgccacccaggcctcgctac

SEQ ID NO: 130160 - DNA, 2079 bp, Homo Sapiens
  misc_feature (19)..(19): n is a, c, g, or t
  misc_feature (33)..(33): n is a, c, g, or t
  misc_feature (63)..(63): n is a, c, g, or t
ttaggtttttaattacctntattttattttgcnaaaacatacctgggaataccttttattttntttttaccttggggtgatggttccaaaccataaatgtgattatagttaacacatgacccttctagcgtcccagccagtgtttttcctgacctctcttctttggagaggaggatggaagggaggggtccggcatgctgctggcattttgctgtgtcctgcagcccctttccgggacacctgggttcacacagctttttagcttacataactggtgcagattttctgtgtggagatgttgccttgaccagccttggctggactttaccaggcatgcagaagcctgtaccaacacagactacagcacccaggaggtgcgagtgtggctgctcagcggttataacaggcctgactgcattgttcaccggattataatgagccaaaatgtttcccggtgtttgctggtttcagggaaggagtttgatatagcagattaaccaccctccttgtagctattggggcttaatggtttcctggtgattcttaccaatccacaataaacatggcccattggcatatctgctgcacaagtgtcctatctcaccaatctgggtttttgttctcagtaactttccttcttgtcatacaacatcttcattcctctttctgaaccctcccttcccctaccccaacccagagcccactttgtctccactcctgatactacactacctggcaggtggcatgagtgcagggcccctggcttcctctcctaatctaggcacaagcccaaccaaagaacaagagccaaatcaaacaaggcaggcaggggtggactacagtcacagggcaactatagttgaagccccccagccccagggctggatggacgggggaggctggggtttaagtcccaaaaggcagcaggccctgggggggtagggggacgctcaggcagccagggcacagctgaggggacaggagtgatagcagcaacagaccagtgaggctgagaggctggacgctgtgcgcctggctcagcttcagctccacctccacggggttagtggtcactgatgttgagggcctcctcctcggtgagctggaagctcgtggggaagtcaaaggcagccgcagtgtgcagcagactccggcagcgctccccgtgcagcacgacgcggtcataggtgcagtgggtgctggcccgcactgtggtgtcctccccatcggcaatcacccagtggaagcctggctcagtccgcagctccagcttgtccaggcgctttttggtcagtgaagcgcagtcagcattgaagtccccaagcaggatcacgtccttgctctgccagtgctgggagacctccagaaacacatcgtagagggcgttcagctccttctctacggccttaggagtggtgtgcagcgggaccaacaccaggctgggaaggacattgctgggcaaagagaactgggccacaaatggctcccgggcaaagacgtcatcctcatcgttgtacacgtaggaactcaggacctgtgttttgtgtgaccgatagaagtacacatacgtctccatgtaggtgctgcgccccagctgggggctgctcagggtgctgtagggcccagagccatcaaatcgattgagttctcgaagcaggagcgggatggcgctgccggaagagtccaccacctcctgcagcaccatgatgtcacagcgagccagtatccgaactaaggtgtccatcacctgctccctggccaccttggccagtgtcagccgctgggcattgaaggcgcagatgcgaaaggcctgggccccattggccaggatgaggaagaggagtgcagttgggtagtgcatggctgtgtgtggctgccggggacaccccaggaatccaggctgccccagggtgcgctctcactgggctcagttctggctctggaagcgctgctcagaccagcttgtcaccaagtctgcctcatccttaagttggatcgcgataccccagaagagcagctcctgcccgtacgcgtggcgacgcgtggtcgactatatcccggatacctgaccggtacgag

SEQ ID NO: 130161 - DNA, 942 bp, Homo Sapiens
aaacaaaagagatcatttaattttttcttaaatgctttagtatctcaatgcataaacacactgtttacttttacagctggtccagtgttatttactcttggcaaattgtagacttacaaaacaaggcaaatccctacctattcaccttctcagcaagaatgacttctaactcacacagcacatactgggctccagtaaagggatctgctcatatccatagaactaatgaaagatatatgactaagtatacagcttaaatgaagccaaatgagcttaatacagaaaatatatatgatgatattaatcatatataaacaatgtaaaagattcataagcaaaattttattttgccatcactaattcttgtgattatgaagatataacctaacctaggaagaaaataggcagctgttctttttagaaattaattatctactgtacaagcccacaggcctgcaggtacaatgaaagcatgaaggtaacttctttacactgtgaatgggtaaagaaatccaatgaggccaatgttatcggtttcatcgatgccaatattttttcacttgtcttgatattaagtaaaggctaactgcctatgtgaaaactttggtaaaattattgtggctgcaataaaactacaacatacacacataacctccaacagatccattttaaatgaagaaaaacaactacaattcgtttttaaaaatgcttcaaaaacagcacatactgtggccacttcattgttcctgcatccctaaaaggttcttaaaattaatcagtgaggtttcttccatctaattacatgaactttgtcacatgatgtcacatgctagctaactgcatgagcagtgcagctgctcgcatcaaccaaacataacaaatattaaaattattatcagaaaagtagtaggtaaggattctactttgcgagttgatggaact

SEQ ID NO: 130162 - DNA, 1280 bp, Homo Sapiens
  misc_feature (175)..(185): n is a, c, g, or t
  misc_feature (192)..(200): n is a, c, g, or t
  misc_feature (211)..(332): n is a, c, g, or t
  misc_feature (370)..(379): n is a, c, g, or t
  misc_feature (404)..(420): n is a, c, g, or t
  misc_feature (428)..(582): n is a, c, g, or t
ctccccccctttttttcccccggggggggaaatattatttccccaaggggggccacagggggttgtaatcccccccggggaaaaacaggttttacactcccccgtttggggagggttcccaccgggcgggggagtttttattaaatttccccccccttctccaaagaagggcccnnnnnnnnnnnaaatatnnnnnnnnncccccgggggnnnnnnnnnnnnnnnnnnnnnnnnnnnnnnnnnnnnnnnnnnnnnnnnnnnnnnnnnnnnnnnnnnnnnnnnnnnnnnnnnnnnnnnnnnnnnnnnnnnnnnnnnnnnnnnnnnnnnnnnnngggaaaaaattttgcccatttccttttcctttgggggnnnnnnnnnnaaaaaaaggttttaaaaaatttttnnnnnnnnnnnnnnnnnccaaagannnnnnnnnnnnnnnnnnnnnnnnnnnnnnnnnnnnnnnnnnnnnnnnnnnnnnnnnnnnnnnnnnnnnnnnnnnnnnnnnnnnnnnnnnnnnnnnnnnnnnnnnnnnnnnnnnnnnnnnnnnnnnnnnnnnnnnnnnnnnnnnnnnnnnnnnnncagatgtgcaggtctttattttcctctccctcactctgctccaacacccagcataaggcactacccccagatgggagggagggagggcgcactgtgaactcagtgtgagggggtcagctgcagcagacggagttgcttccatgtcactctcctctcaagagaagctgctatttcagggtaaatggagtctgctctcatccatggttaaaagtggattgagacgctctacagagaattccatcttctttttaaggaacacatccgaacgacttcagaagggaaattttgatatttaaaaatcagtgtctctcacttcccactccatccgccacctccctttctaagctcagagcacagcgctcctacggtccagccaggcatctctccagaaaggggcttgagagtttcgggcccctgatggagcggctcacttgctggccgtgaacgcctggattcccgtgatagctctcccaaggatcagggcgtgaatgtcatgtgtaccttcgtaggtgttcacggcctccaggttcatggcgtgccggatcacgtgatactcgtcagaaatcccattaccccccagcatgtctcgggcctggcgggcgatgtccagggctttcccacagttattcctcttcagcagagaaaccatctcgggggcagccttgtcctggtccttcaagcggccgagctgcaggcag

SEQ ID NO: 130163 - DNA, 1160 bp, Homo Sapiens
  misc_feature (550)..(644): n is a, c, g, or t
tttccagacaatatttttctgctgtttaattgatctcaaggaaggagaaattcaagtccacaaaaacttacatcaattctgtttatcacatacaaaactaaacatacaatataacagcaaataacaaacatgctgaatattttcaagccattttgaatggtgtcctgtacatgtacataaataatacatactgcttctgaattaccttaaaatacagtaccaccaagagttatatttctatgtaactactccataagtgagcataaaggaatgaggaagtagacgatatccatatcagataaagtagaaagtcttatgtccttctgaaaagcaacacagtaggcccaagaacaactacaaaccattttccttttagctaggaggtatatggcaagaccaatgatattctcttccccatcctttttgtcacagggtatgaagtctatcctattcaagttagttacaagtcttcagcccatttagtcatctaagaagttgagaaagtctaaacctaagtaatcacagcaaatactgcaaatactgatatacnnnnnnnnnnnnnnnnnnnnnnnnnnnnnnnnnnnnnnnnnnnnnnnnnnnnnnnnnnnnnnnnnnnnnnnnnnnnnnnnnnnnnnnnnnnnnnnaaagaaacttggattgttttaattggtttaaatgcagggtatatgtaaacaactccccagaaatgagaggcacttctcggaaatacaataacccatgtcactagactagcaaaacactcagtgcttttgacttgatgaattgaatgagttcatgattcaactttctaatgttgtctacttgaaaaatagcaagattcttatctgcagcatttaatgcattaagatgtattagataggcatatcagatatcataaaattaaaattgtgcttatgttaattctgtaatagacctaactttaaaacacctcatgttattcactaggagctatgatctagtcgtgacaatattggttaaaatagtcaatctgaggcagaaagtaaacaagcaaagtcacttttgcaggctttttaaactgtataacacatgaaattatgactattccccagattatgcaaccagcttcaatttaaaaagctgggaacaaatattatgaggcgttacttatcacctcgtgc

SEQ ID NO: 130164 - DNA, 749 bp, Homo Sapiens
  misc_feature (71)..(71): n is a, c, g, or t
  misc_feature (270)..(338): n is a, c, g, or t
agttgttatattgttattggcttttatttgtattattattgttcttttccttcaaatagtttcaatccttnggttggttgaatccgagggtgcagaacctggaattccatgcttgaaaagtggcccactcggaggctggagggtggaaggagtggatgatcacttagccctgtctatcagaggatcagggagtagaagagacaagaagcatgtggtctgttggtcatccctaccccaggcccatcagcccaaatgtgaattcttcagctnnnnnnnnnnnnnnnnnnnnnnnnnnnnnnnnnnnnnnnnnnnnnnnnnnnnnnnnnnnnnnnnnnnnntacttttgttgtacagatcttcattttcattagcactgtcttccttcctggccatagggatcaggcacagttatctaaccaaaggccaggtaaaccacaagccagctaccatcggatgctgcctaaatgtttgcatcctttcttgccttctctgcgttttcacaggctcctcattgtgtggagttcactgcctggctccgcagccaatggcacagccaaatatgagcaaaacaaatcatatgatgatagtgttgtactcaattttccacagtagattcccactggtgatattctaaaccatggaaatagacatgtcatagctgtatttacccagacaaaagagtgcagctttttggtttgggaatttgatttgtttttatatcatctaagagcagtacacaagcaagcgtg

SEQ ID NO: 130165 - DNA, 649 bp, Homo Sapiens
  misc_feature (73)..(82): n is a, c, g, or t
tttatttttcgttagtttattacaaaactacagatacaatacacaaaattctaattccgaaatccttctacannnnnnnnnnctgagactaaatgccctcaaagcccgtctgcttggcctgtattacaacctgactcctcggctcctggatgcacaggtcagatgttccaacaaccctgaccatggccagtgctatggagtcactccaaaggtggttgagccctctgtgaaaatttaaatggctgctaagtcattctaaataaatagtgaacggattgtttctgcccctaagatgaaatcccacagatcttatgctcaagctcaggtcttcctactgccgccttcgacatctagaaagtatggtgggatcttcactgatttgttaaccctgggagtgccccttgtgatccagatgagtcaaaacaaacggccaggatctcttctaaaaagcccatgatggcccttctggctgtgtctccagttggtgcctggatgctgcccatgtgtttaagggccattctgaccatctggtctctttcctgtgggctgtggggtgctccagtgtcatctccctctgctcctgattttaaaaactgtagaatataggactggaccatattcccactcagttcaagggtttctttcatac

SEQ ID NO: 130166 - DNA, 843 bp, Homo Sapiens
atagcagcaattttatttaaataaaattataagctattccagcttaaacatattattttctaccatttagccggctgccatgcagaaatcttgtacagctgttctggaaaattggttaataaccagttttatccaatgagaacatagagcatatttataaaaattagattttgaagtctggtctcttcaattcatgtagttaatttcctaataaacatatactgctcatcctaggtaacatcctttagtaaaagacttaactttgtacttaggtttgcctttatgtgcaagaataatttcactgatattagatgagtaattctgttggatgtaattctgagtctagagttagtttagtgcctttaggcctcaaatttgctgatattaggagttcattaagtcagcttaaagaaatcagtggttattattaaacaacttactttgcggttaaaattgtcaaatacatatatagcttagggagccaaaattaatttttatatttactgtattaatctttaaaaatctggggggcagtaaacaaatttttcaagcagtggagtcagcatgacaaaaataatcttgtttttattttagattcagatttcattactgcactcaaacgactacaactgggcttggcgttattatacaatccaaactgtttccatcagaaacgctaagactcagtgtgcaatgattgttattaataattagctccttggtttcttgatagaaaaaggctatcaacaagcatttgtttatccacaacaaaaagtataattagcttatcccacttagtaaatcttgtatgcatgccaactcataccaaactgctacttttac

SEQ ID NO: 130167 - DNA, 2536 bp, Homo Sapiens
agtggttaaaatctcctacatgctttattggacttcaaagaattttatgaaataacacagaaaaccccatttgagggtgtccagggagtacaaggcagtctgcagcctagcaccctcctaagaccagccccaggtatacccaccccaggcccaaaataggatcccaggataaaggtatggcagggagtggggcagaggaaaaatacctttacagccatagcaaaaacaggtaagggagagagttgtctagagggtgggaagggtgggggaaagtggtcacacagccgccttcacctataccatcttccttagccaccccttccccaaactggttgtgtcctttttgagcctctggccaaggctacaaagtaacatgaaaatgggatctaacaaggggaatatgcagcgtaggcacttgggaaattcagattactttttttccttttaacctgtttgtcttttggttcaaaaaatgacagcatccttgcccaacaactccagggctccataagagccctgtatcatggctgtggctctcctggccaggggagccacttgtcctgagccctaggagtattgatgcttggggagctttggggcagcacctcttagagacaaatcctcctgcagtgtgggggagcaggggtaagagggaggcaggtgtgggtgggagtagagagaaaaagtgactgccttataacctacagttctggcatccactcatgctccaatgaacagatgcctctcccaacccattcccaagcctggcctctctttaaaagtctctggtgggttgttctctgagaattggtttcactcccccatggatccctggaggcctgagtgagattaggatgaggctccttctgacccacatcaataccaaagaacaaacttcaaagattaggccctagccccagtctggagcaaacagaaccactgtgagtggggtggaacagatctgaggcacacatgtcagaagctactcgtcctatcttccctgcaactgctaggggaagttggggagtggtgggagggaggagcccgaaagcaagagacagaaacaagaaaccaaacctcaaaactgggacagcagagacagaagctgacccccagaagttggagctgggagctgagggaacagcaactaagccatgcactgaagtggagaagggagtgacagcagcagcccatggttgggacggaggcagggcaggccaggccatggtggtcagttaataaataataatgaaggacccaaggatgagggggcaggtatgtacagtgcccagacccctggaccagcccttcccatgccccactcttggggccagttatcttgaaggaagggagggaaggagagacagaacacccaggggaaggacaagctgtccctttactgccaccccatcctgcctacttcttaagaggcttcttaaagattttgaggggaaacttcttccggcctgggctggagtctgtttcctcgccaatagagccattatcctcctcagccacagccttcttgccagccaggtggggaatgcgtgtgtttcggctggcttgcagggctcggctgtccccaactggagatggtgtgtctgggtctgggtagctggggctgtgagtacgggaagaatccaaatgtggagagccaccaggtggggctgaggggctcagctcctatcaggctgtgggccttgtccagcccatggttcagcgccagtaatgccttcttggccagggcagggctgtcaggcagtttctccaccagagaccctgggtggaccccctcgatcagccggtggctgccattggaagtcatggcattgagagcctcgtctgcagcacggctcatctgaggaggtttgggggccacacgctggcggtcactcatgtggagggaggactccgaatcggaatgggtcaaatccctctgagatcccaggccatgctgtggctccgtcaggcgctgccgaacactgctctgcaggctaggggactgcatggacaagggagacacaatctcctcatccatgtcatccacgtcgtcagtcatgatgaagtgagcagggttggggcgtgtactgcccatccagctggggtctatgttgagggcagccaccagtgagtggatgccagggttgttgacaatctggaaaccacagaggatctcgatctgttgccagcggtgcaggcgctcccgcaatgctgctgtcacctcgctcagtgcttgcttagctgttagaattttatgatctacatcatccagggaagagctgtgggccacgtggaaggtgccaaagagtgtgtttctcttcttttttatcttctcagccccctccttggccaccagcagctgcttctcagcattttgcttcttgatgttgtaatactgcacctccacctcatgtgtcagctgcagccacttctgaagggcctctggagcataccatgagctgtgagattctagctccttctctgctttcctcaaggcctcccgaacctgctccaactcctcctcagcatatttttg

SEQ ID NO: 130168 - DNA, 1221 bp, Homo Sapiens
  misc_feature (782)..(814): n is a, c, g, or t
  misc_feature (816)..(920): n is a, c, g, or t
tgacgtctctgaacccaaaaccctgacggcctctctggctgagcacagggcatctaggcccttagtgggttctcccagagcccaagtaaaaactttatcctgtgggcagtagggagccctgggaggtgtttgagcaggagagggaacaggattaagaatgggtttaaggagcaagactgagactctgattcagcgagaaacaaccataggggcagatcccttcatctgtcctgggaatgtcctcccaagactggagtcctcagctcagaacaaagggaaaggggtgcagcttccaccctggcaggctctcagaaatttttagttcctttttccaccaacttcccacccctgtttctccccctcccagtgcgttctctctgtgactctcttcccttactttcagaggcataggatctggagccagactgcttgggctcaagtcctggctctgctgcgtgacttgagcaagttaattcctctctctgtgcctcggttccctcaaccatataatggagacaacagcattacctatatcagggttttcctgaggtctcaatataagggactcagagctgtgcctggcacacaatgaatgctaaatatatggagccattattatttcctgtctcagaaagtctggctgttaaagaatgttgtctttcaagatcgttatttctaccacgactttaaaggctgtgttttggaactcaaaggcaaaaattctaatatctgtgctccttgaacaacctcttctcctagagggctgtgcatataagatatgnnnnnnnnnnnnnnnnnnnnnnnnnnnnnnnnntnnnnnnnnnnnnnnnnnnnnnnnnnnnnnnnnnnnnnnnnnnnnnnnnnnnnnnnnnnnnnnnnnnnnnnnnnnnnnnnnnnnnnnnnnnnnnnnnnnnnnnnnncctgaggatggtgaaggtacctgactgtgtgaggtggtaggagaatgagagaaacctcagtcagtgtctcaaaataaaatcctgctacaaacattgatctcttttcatagcctaagggatgttgcatcgctaaaccctgttgacttctctaatctcttctgtagctgatctccttcccttgctacactcggttactctggccttgattctgatctccaaatacattatattttttatttgggaccatcgtattgcctttgcacctttatcaaatataagttgcctatatttatttggatct

SEQ ID NO: 130169 - DNA, 734 bp, Homo Sapiens
atgggccaccatgccaggccccaaacttttatgatggtgaaactctcctaagccagtacccatttctatttaaatattaccagttcctcaaggtccacctttctttctcaaagccttttattctggtccacactgatctctttctgaatttctaagccctctccgcccatattacacaatgttgtccatttaggtaggatcaaatgttattctcccattgtttcctgtgttgactgaggtctttccaagaaggcaggaaaactgcttctcagtaacaacttcttcatcccccagaaaggccaagacaacagactctcaggctgtctttaacaaatatcaatgactgtacccaagggagtcatacatacctcttccacaactaatgttctcttcacatacaccatctgccaaacaaaaccaagggctaagggaaaagaagacatcttttgttttgcaaaagagctcccaattcctttgagaaaggtgctatgatgcatataaatttagcactccatgacctcaactggaatctactgaaataaacactaaatgagatgcaaattccactcatatataacaatcgggatgagtcaatactgaggtttccattacatctgctcatttcctagagtcacactcgaacacatgtgtgtaggctttgtggagggcatgcacttctcagaatgtctgttaacaattaagaaggcctgtgggctggggttaatggtgattgc

SEQ ID NO: 130170 - DNA, 1058 bp, Homo Sapiens
  misc_feature (319)..(327): n is a, c, g, or t
  misc_feature (870)..(870): n is a, c, g, or t
  misc_feature (878)..(878): n is a, c, g, or t
  misc_feature (884)..(885): n is a, c, g, or t
  misc_feature (900)..(900): n is a, c, g, or t
  misc_feature (916)..(916): n is a, c, g, or t
tttcatttttgcaacaggcttttattacttttttttaaaacccatataagaaagacatttaaaaagaaaatatcctggaaacaaacacttacacactgagcaacacaaccaaagaaggcactaccagcagttactcccacctctgggagggaacgggtactcgatactatacttttttcagaggtttagacctcagcataggccttgggtctaactgtgctttagtaaagtctgaattgtccaataattttctcatttcataaacacccttatctctttatatatagctatatgcctttatgtgtatatatacatgacnnnnnnnnnccttctcaaaaataaaatagccatccccatagagggaggttctcagcagcattcacagcggttgcagcaggagccatgccttctattaatgttagagacatgcaggacgaaggaaaatgactctccacctgctccctttaatatacagcagggagagagtttctaaagggagggaagtgataaggctgagcatgagatggctaaccagggtttttgtggtttaaaaaaatcttagagttgcgagcttgtgttgcctttgaagctctggagactatgcacagttcatacgacgaggggtcagcattccttctgggatcaggggcagtatggactcagcctgggtcagagagggaacttctgaagctacacgaacaagcttgggcttgaaccgacccaagagggacttgggaaggcagaggatagcaaagaaatggtttctcagaggctgggttggaaaaccagccctgctttgaaaattacaagtccttctccctctgcactggagtgtctctgcagtcctggctacttgttgggattttttgnctaatttnatttanngatcagcctaaacanaagcagtgcaatgtantcaggatttgatcctcccgtcagggtggccgggcaccgattggggcaaactcaggcacaatggagggagggggggtggccccaaccatacgaagcggtctcttggcttgctcaaacgccgcatgtcactctggagggaacac

SEQ ID NO: 130171 - DNA, 666 bp, Homo Sapiens
  misc_feature (615)..(615): n is a, c, g, or t
  misc_feature (628)..(628): n is a, c, g, or t
tttgtgatgggggagaaaacacttcattgggttcaaagataatattccctatcataaatcagtggcataaacagccagtgggccaggtgggcccaccgtatgctagctgacaagggcagtcacacaccggtaagtgctgatacaggatgaggggtgcggagctgaggatgttgttctctttgatgaaggcctgaaaacttcccctggcccctgctgcccacctcagggctcctcaggacgaagggcatgaggacaggttcccactctggcccttcgctgggggacatggtttggtttccccatcgccaggctggccagctggggcccaagcactgaccgtccttccccaccttatcccatcagctgccctgcacaggagcagaaaacccatgcctcagagctacttcctaaggacactgcctctagaaggccctaaagtggcagagccggggatggcaggtgcagccctggccactagcacagcagttgccctcagatctgttagctgtgacccatagattgggggagggaggaaagccaggaggagcttttgcagaaaggtctggaagctaagtgggggtttcaggagctctcagggtgcccctgggcaggtcncaaggaggcctgnggtgcctgaccagcacctcactggccctcaagccctgt

SEQ ID NO: 130172 - DNA, 917 bp, Homo Sapiens
  misc_feature (480)..(521): n is a, c, g, or t
ccctgcccccgtgaggatgtcactcagatggaaccgcaggaagctgctccgtgcttgtttgctcacctggggtgtgggaggcccgtccggcagttctgggtgctccctaccacctccccagcctttgatcaggtggggagtcagggacccctgcccttgtcccactcaagccaagcagccaagctccttgggaggccccactggggaaataacagctgtggctcacgtgagagtgtcttcacggcaggacaacgaggaagccctaagacgtccctttttttctctgagtatctcctcgcaagctgggtaatcgatgggggagtctgaagcagatgcaaagaggcaagaggctggattttgaattttctttttaataaaaaggcacctataaaacaggtcaatacagtacaggcagcacagagacccccggaacaagcctaaaaattgtttcaaaataaaaaccaagaagatgtcttcacnnnnnnnnnnnnnnnnnnnnnnnnnnnnnnnnnnnnnnnnnnatggtacaaaatggctgggggtgtggccatggatggagggaagagtaggctggcctgtggcgtgggtgggaggagaggggacggagagggcactcggcccgctgcaatctgacccctctctcctcagggcaggaaacacagagtcagacagtttgggggggtcttgggccaggggtggagggctcaagggcacagggcccaggctgaggcagggcgggcaaagcgcctggcaggatgaagggcaagtggccccccaaacacagaggccctggccatggaccctgggaggtgaccggggtgagtcaggtgcctgttgtcatccccagaggaagcgctggacctgcccgatggtgggccgagaggacagcatcaggctgggagaagtggggcgagttc

SEQ ID NO: 130173 - DNA, 1022 bp, Homo Sapiens
  misc_feature (163)..(163): n is a, c, g, or t
  misc_feature (179)..(179): n is a, c, g, or t
  misc_feature (183)..(183): n is a, c, g, or t
  misc_feature (211)..(211): n is a, c, g, or t
  misc_feature (247)..(247): n is a, c, g, or t
  misc_feature (252)..(252): n is a, c, g, or t
  misc_feature (256)..(256): n is a, c, g, or t
  misc_feature (258)..(258): n is a, c, g, or t
  misc_feature (281)..(282): n is a, c, g, or t
  misc_feature (853)..(894): n is a, c, g, or t
atatgatcattagatgcctgagccagatcgcagagttgacatcctccctcgtctcatcctgaatgatcggaacacactgcgctctttgctgccactacgcaagtgtccttgcccagctcagccatgacagattgttgtgccacccagcacagccatgcctccncctggctccgtgctcntacncaggagagctccctatccgcctttgtcnagagctgaagccatatacgactgggtgttgtccccntactntgcncncaggagtaaaaaaactctccctnntctcacttcctttcctgcctcgggaggtggcagggcagttccctggctgaggccttttgcgccccacctccaggaccaagggccattctagacagggtgtcttctaccaggacccgtccctagccttcctggcctggagggcctggtcttgcactggcagctgtaatacaaagggaactcgccccacttctcccagcctggtgctgtcctctcggcccaccatcggccaggtccagcgcttcctctggggctgacaacaggcccctgactcaccccggtcacctcccagggtccatggccagggcctctgtgtttggggggccacttgcccttcatcctgccaggcgctttgcccgccctgcctcagcctgggccctgtgcccttgagccctccacccctggcccaagacccccccaaactgtctgactctgtgtttcctgccctgaggagagaggggtcagattgcagcgggccgagtgccctctccgtcccctctcctcccacccacgccacaggccagcctactcttccctccatccatggccacacccccagccattttgtaccatnnnnnnnnnnnnnnnnnnnnnnnnnnnnnnnnnnnnnnnnnngtgaagacatcttcttggtttttattttgaaacaatttttaggcttgttccgggggtctctgtgctgcctgtactgtattgacctgttttataggtgcctttttattaaaaagaaaattctaaaatcc

SEQ ID NO: 130174 - DNA, 704 bp, Homo Sapiens
  misc_feature (54)..(65): n is a, c, g, or t
tttgcagaaggttaggtgtttatttgcactgcttttataccgtctaccaggttnnnnnnnnnnnncagagactcttttgaaggcatagattttagatatcaacctcagactgtggcatttgggatttccagagcatgtcgttgaggcacttttgtacccagaggcacatggaatttaccaggctgtggagatgatgtgctctcgggatgctgctgccagtagcctggtgaggtagggaagacagcagtggacgcacagtcagggcccagtacacagcccgcctgcctttcgtgtgattgtccagcaggtggcacctgttccctcctgccacccaccttataattgcttccctcttgagcaccttcagccagaggtgggtgggaaggggaggacgtgcactgggttctgctatgtgccagcatctttggtataaggagccattccctggcccagggcaggcagccagtacccaccggggttggggatcattggtgggtctccattgcccatgctctccctgcctctcattagtagggaatcgatgggcccttgttatgccaaggcaatgctaaaatctctgctttacctgcccccttctcagcaaggctctctgtgggccacagctgatgctccatcagtgccaatttatgagacaagtttctgccgctcagccttggcacagcagatggaaaatacctgcagga

SEQ ID NO: 130175 - DNA, 1312 bp, Homo Sapiens
  misc_feature (616)..(616): n is a, c, g, or t
atttttccgaaggcattttttctcgttaatctgggagcacaagaagattgattttaaaggggattgtgtttataggtgacatcccctatattctgaatgctgctccagagtcagttgttgaagaataagtaaacatagtattgcttctccgttttacttttgggtaaaaaaattcagggtttgtttcttttactgaatttactaatctcaggacacctactgaggagagtggctgtagttgacatgattttacataaaaatccatttacgaaacattttgtataagttaacttccaattacccctcagacaacccatgagccactgttcccggccagctagctcttaaaaattattgtctggcatcagctgtttgctgtataactttttatcatgtcatcattcatattacaaattgtggcatttaggggttcaagaatgaagatgccagaagaataagcaaatttctcgtttgactgatgtcttcctgtgggttctgtgttttgttttgttgttgtagttttaatatttttcaagaaaggggaaattcagtttataaaacagtacctatttagagaacatacagttttccagcagttacggaggggcttcagcanagattacagcagtgaggaatttcattgcatttattcagcctgtaactaaaacaaataaaaaagggaaatagcttattcctattttgacttcctcttattgtgtcttccttgcatgtgttagccttgtgatttgagattaatcaggggttatttctagttgtccccataaagagaagagaagcaaaggaagacaaagaggttgcttctaaaactaaaacatatcatttagtattccagtttagccagttgtaagaataatttggaagataggagaaaaccatcttgtatgtttgctgaaaatatttatggaaaggaggcatttatagaatgaactgggagttttattatgtgaaattgttttgttagaaaagcatagtaatataactattctacaaaacagttctctcacatatgcacaagttagcttattgaagcattgtttaatacagtattggaaactgtaaacaacataaatgttcatcactaagttccatcaatggctgcataaactggtgcatccttagtatggaatattatatactttttttaatgagaaagaaagctatgtactgacagatctctcagacagtgaaaacaaattgcaaaacagtttgacacaataataatatctatgtaattaggttttatacacacagacaccacacacatgcaaatgtatatatattcttggaaatg

SEQ ID NO: 130176 - DNA, 732 bp, Homo Sapiens
ttttttacaatataatctgttttattttacacttctctgattattgaaatctaaatagaggtttttgctaacaaacaaaaaggaaaataaaaagacagcaaggacacgattaaatgttgagtgcagatgaagggttgtatgaggccccatcctggggaggctgtacaccttcttggcacagcagcagtgtggcccacggagcttgaacctggtgaagacagcaagtaagccacagctcaagagttctgaggcttgggaacagaaaagagctccttcctgctccaccccaatctgggttgcatgggcatggaaaagagcaaacacaccctgcaaagcatactggacatgcctcttctttaccttctcaggccagaacaccctcctctccacaaacgtgtgcacacttgcacgctcattaagcatgtgcacacatcatattcacacactcaagccatgctcttgatttcagggctctattgcaggctcaggtatcaaccccagagccgaggtgtgtgagagctaccttagcagactcacaaaaggctactgcagaggcaggggtcaaccatcccaaggacctggcaagggagaaactgaattctgtatcccactgatgtgagaggaaattctaatgagcaaatgggaccagcggggcccagttagggaggtccagatgccagttctgagatgccaccagctctgccttgctcttcagtagccagtcagtgaaaa

SEQ ID NO: 130177 - DNA, 2689 bp, Homo Sapiens
  misc_feature (84)..(92): n is a, c, g, or t
  misc_feature (134)..(143): n is a, c, g, or t
  misc_feature (623)..(631): n is a, c, g, or t
  misc_feature (748)..(757): n is a, c, g, or t
  misc_feature (769)..(849): n is a, c, g, or t
  misc_feature (1971)..(2005): n is a, c, g, or t
  misc_feature (2392)..(2509): n is a, c, g, or t
ccgggaaaggggttccccccttgtttaccccgttttgctgggggccaataggaactcttttttctgcgtttgggagagaatatnnnnnnnnngatttcccgcccaatttttacaccacaaagttgctcaagaannnnnnnnnntccacggggaaagacctgtgccgcgtttcccttaaaggggggtattttggggaatacgagtttttttatgccacgccccaacccccgcggtgaggtttccccccaatctttagtctttagtgggggggcccaagctagaagcccaggtttttttagccccgccgcgttttacgccccgcgggcgccatgagtctaattccgcccatggcgccccaaagggcggctttctttttcccctccagggtgttccagggttgtttccacagtcccgtcttgtgcggaggggctcccactgttcgggcggggaaattttttatggcatttccccaccccgtcccccgcgtcatgcggccatgggcgggggccgtaatttttatattcgggcctccgcctggggcctcccgggggaagagtcccggaaatggcctcccggactccctgcttgagttttttcgaaagcacagggcgtcccgcgggggnnnnnnnnnggggggaaacccaaccctcgtcttgttcgggggttttctagggaacaggcttaggccccgtttccctacctttttgggggcgggcccccacactaaattttttggaatctttttttnnnnnnnnnntttttcttcacnnnnnnnnnnnnnnnnnnnnnnnnnnnnnnnnnnnnnnnnnnnnnnnnnnnnnnnnnnnnnnnnnnnnnnnnnnnnnnnnncacacttgaatgctgttactatttattgacatcaaaacgaaacaagctgagactaaaagttgctatttaacaggaatagacactggtgcagtttccttcctggagagggtatgcactcagatcatgagacctaagatcaaacacactggattgtcaagagtcaaacaaggactacattttacctcttaatagaaaagatgctgatgacaaaacacgaagtttaaaaatattctttacgctaagctcatataagcaaacaaaaaactaaaactaatcctaaaactttaggacactggatacagaagtaacataactatttaaatttttgtatcaacgaaagtgtgttctatccttcactgtacctgtactacaaggacatgcttgttgcttctacactacccaatgtcaacacttatcatcaacaatacaatagaattagatcggaacaaggcttcaaagcgactctgctccacccaaattcagaaaattcaattcaggatgaacaacagcttttgattttagaaccagctcttacttttctctcgtgtcatatgtgatgaagtcctcacttgacaattccccctgcaaattgcaatgcatgtccttgccgtcacctttttctgacactttaaaattaatttgtagaaattgcaaaagcaatgaaattgtacttccaattctgaacctctgatcagattcctgctttgacacaagacttactcctctgcagtgtaccccaccagcaccagcggcttccctttctctcatattctttggccctgaaggcaccttctggattgcttaacggtgtgctctttggctgcctagacagtcaggacacttaaggccatctggacttatcactcctctcctctttcttttctatggggtaataccactttcctgcttcctttctgctgctgaatctccagacttggtgctgtcatcaggggggacagagtcgatttcggcttcgagctcctggttggtaaagctgcatcgctggacgatctttgtttcttattcgatctctcttgaccacttcttctttcttttcagttttttctgagctgcctattgattctgtactttcagccttctttcctttatcccgaagtgtgnnnnnnnnnnnnnnnnnnnnnnnnnnnnnnnnnnnaaaagtcttctctttctcatagcgctccttctgcctacggcgctcttcttcttgccgcttcagcctctctctttctcgaagtatgcgctcctgatctcgttcatattcccgttccctctccctatagtctctgccgctctcatcttcaggtctctttggtttttcatctttaagttcgctatcagaacgcttgggcaatgtacaactttgcccactggctctttcatcactgagattctctttgtccaatttcttggctttttctcttgttgtccaattctttttcatctccttttgtctggcttcttgagcagcttaatctttggttcatcctgttaatttgtccctttctggaattctgtctatcttctttagctttgtctatannnnnnnnnnnnnnnnnnnnnnnnnnnnnnnnnnnnnnnnnnnnnnnnnnnnnnnnnnnnnnnnnnnnnnnnnnnnnnnnnnnnnnnnnnnnnnnnnnnnnnnnnnnnnnnnnnnnnncttgtttttcaggaagctcaaaagtggggttgtctttttagctattaattctctattttttgcttctatttcctctagcagtgtctctggagtagatgtcattttctcattatctgtggcataactttcccccggccgtaatggccgaattcccgggcatatgtccggtaccgtcgactg

SEQ ID NO: 130178 - DNA, 989 bp, Homo Sapiens
gtctgttttttgcttgagttaatttaagttagtttctattacttgcaactaagaagttttaatgaattcacttgaaatactattgttaggaaggaaacaacttgcttgagaggtcaagcttaggctgaaagtcaacattggccaaggcacttagagagcaattaatcctcgtggcaaggcagggatggggtggaggggatagatgatttctaaggtcctttctaagaggataagagtgcttcccctggtcagtggttctggctagtctcctccctcccttcaaaatgcgaagcaaaaggcagggagaaggtctccttgcagatcttcagctctctcagggaaagagacccacgtcactcccagcagagtcctgcatggcagcaaggggccagggcggaagaagaacaaaagacacctggagaagaaaggcagtgcctttccctgcagcagccagggctgcagatatgatggagcaggggagatggtctcttctagagcagcatgagccgagttacacagatgatgtaaggaagaagtagagaaactgcagtctcagctcagagttttccttacatgcttgtgaaaataaagtcaccctctgttgcaggctgaataatggccccccaggatgtccacattctaatccctggaacctgtccatgttttattatatggcaaaagagactttgtagatgtgattaaattaaggctcttgagattgggagattatcctggattatcagagtaggcttgatgtaatcacaagagtccttctaagagaaaagcaggatgcagccccctgatgacagaagcagagaggaaagcagagttggagacagaagacgctatgctattggcttcctaaagacagaggaaagggccacaaaccaaagaatacacttgtattcttcagtaaatagcagctgccttggagtgttgcttgattcaatacatgtaatagtaatcgttcaataaatgcttgctattat

SEQ ID NO: 130179 - DNA, 665 bp, Homo Sapiens
tttcttagaaaaattgactttatttggttggaaagtagccctcatgtaaaataaagaacacctgtacagacctggtttgggggagaactgccaaggaactggaggggcagggctgtggccccagaggttggaggatttggggggagagtttcttctttggcaagggagagggtggcacaaagcccaggcagaggggtcagctcggggtgagaccatgactagcagtactacttcccaccctgaacagaatccagggatgctctgtcctggacacgtcagaagctggggttgaggtggccctcgggtcaaaggtcaggagctagagtgctggccagggtcagaggtcaggaggtcggaggctgctctctgaggtcagggggcagagatgggagtgctcttcagggtcagagggcagggagttgggggactgttctgtggagtcagaggtcaagatgtgggagctgccttcagcctgtgccactccccaggcccccaggccctctgagtacagctcccggttctgctccttccactggcggaacttctctcctgtcagctcagggtcacccagcacttcttctaggacctgcagctcctgcagctttgccttgagtgtgctctgtagcgcccgcacacggtgcactcgctcattgagctgagggtct

SEQ ID NO: 130180 - DNA, 631 bp, Homo Sapiens
cctactaggagagagtttcttctttggcaagggatgagggtggcacaaagcccaggcagaggggtcagctcggggtgagaccatgactagcagtactacttcccaccctgaacagaatccaggatgctctgtcctggacacgtcagaagctggggttgaggtggccctcgggtcaaaggtcaggagctagagtgctggccagggtcagaggtcaggaggtcggaggctgctctctgaggttagggggcagagatgggagtgctcttcagggtcagaggtcaagatgtgggagctgccttcagcctgtgccactccccaggcccccaggccctctgagtacagctcccggttctgctccttccactggcggaacttctctcctgtcagctcagggtcacccagcacttcttcttaggacctgcagctcctgcaagctttgccttgagtgtgctctgtagcgccccgcacaacggtgcactcgctcattgagctgagggtctcggttgcggccgcatgaaagagctccgccactgttcctgggtcaggggctgtgggtggcctaggagggacacgccaccttgctcagcccccgtaccattccttccagttctctctcctaagcgatctctag

SEQ ID NO: 130181 - DNA, 744 bp, Homo Sapiens
  misc_feature (685)..(685): n is a, c, g, or t
  misc_feature (711)..(711): n is a, c, g, or t
tttttaacaggaagtattctgtccctttaatagctttgttttaggggtaactcccctcgccttgtggggaggcttaggacgggcgggtgcaatcctcgaaggggagtctcagcgaccatgggggacaccatccacatgcaggcggtagttggggcctcggcagcgcctctcggggtgccgggggtccctgttgcccctcagtgccctgtgggccaagggctgcaggggccggctgttaccgctgaggctctggaagatctgagatggaggattctggctcaggagtctcagggagtgcatctgaagggaggtgatattgagggcccggtcaatgaggatccaggtgacagtctcggagcagggcggggtgctgagagagccctgataggtgatgaagccgaaggattcagggaacaggagctccaggctcaggtcttgaagaaagtaggcatcattcttgtaggagatgcgagtgatggtgtcgcggttaaggaggcgactgagggatgggttagaggtactggcaacgttgaccaagaggctgagaatggccaggccattggggccgcgggaggcagcgctgaaattcccgtagagttcctggttgaagtgaatgagctgcacctcagcagagaagccctggtggttgatctgatgttccgagccggctccgtcgcgagctcanacagcagccgcagttcactgagtcgngtggctgtaaggaggggacctccagacacattg

SEQ ID NO: 130182 - DNA, 1180 bp, Homo Sapiens
cagggtccgagaacacctttattgtgcacgtcccccgcagagcagcctcaggcgtcctggtagtagttgttgaagttgatgcgcagcagaaagtcctccaggtggggctggtagccgcggttcaccagcttggtcaccactttgaagagaaagtgggagtagtacttgaaggtgttgtaggactgctgcatgagtgcaaagttggggtgctctgcaccccgcgggcccccagggggcccccaggcctgggagatgagctggctgcggaacttgagcacgaggctgaagatgctgtggatgacgttcatgacgggcgccgccttctccgtgagcaggcccctgaagacggccttgtgcaggtactctgcgtgcgcacgctggatctcctccaggtcgcccacggtggccaacctggccctgaactcgcaccaggtgacgtgcaggatctggttggcgatgtagccctggatgaccttcacgaaatgctgcatctcgtgcttgaacagctgcagctgacggaactgcacagagccggccatgtggctcagcagggctgtgcgcttgaggtggaagcagacgtccttgagcgcccacatcatgagcttcagctgcagcaggaaggagaagacgccgctgtacttgctcaggcagccctcggtgatgacaatgttgagaggccagtccaccttgtacctgagctccaggcagctcagcacatccggggctttgggggcacaacacctcgggcaggtacttgagagcgagggagaggttggaggcgtgcggggtgtccccatgcaggctgcactgcagggccttgcatcagcacagaagttcagcacaccgcgggtttgagcagctttccgggcttttgcccagctccaaggttctcaaagagcaggtcgctgagggactgggcgaactcgccgtcctccatcagcaggaagtgccgcagtgcctcatagtgcgcctccaggtgcagctccacgaagaagtagtcgacagcggccttgttcaccaaggagatgtgggcggccagcggtgccgtgatggagcgcttcatgagcacgggcagcgcctcagcaactcgctcagctgcacagcagtctcatcagcggcagactggacctggggtccacggggaaggcgaagcccgcctcgccatcaaaccggctactag

SEQ ID NO: 130183 - DNA, 1526 bp, Homo Sapiens
ttttttggtgcagcgatgtttaatggcaattcgtataaaccaagcccatgcacaagtagaaagtgcccgtggagccggcaggaggcccccgccgcgctagagaaccacaagcccggccgtgcagccctccccgcggcgccttaaatagattcttcactatactctgtatgttacagtatgtacaagacccctcccctcgggggacggggcggactccgcaacgcgttcctatgtacaccacctccccttcggccctgaggtcagtggccagagtcgggtgatggggtaagacagggccagagagggaggaaacagacgcaaacatgcggagtcgggtggggacacggtcagccctgaaacacgaggggcgtgcgcagcgaaggcagtggtgggaaccgaggcggatacattcagagacgcgtcgaacaaataaataaggcaagtcaggagggggccgagtcgggtgcaggcaggaggagctggggagcaggggcaggcagggctccggaggtcacagcggaagatgcaggtatgtggggcgcgggttttctggagccaggaccaaaagagacggggcacgaccaggagggacgaggagaggggtgtgggagcaaggcgtggggaggagggaggaggcctacagagggctccaacaaaggtgaacaggaaagctgccgacaggggctccccctgccccagaaagccctctccctgttaagactggcacgaggcgcccccagggtggtgagaaaggcggtggcccaggtcatgtggccagtcccggctggggaagcccttccagctcctggttctgcttcagttccctcatcctgtgtcggcagcgccgcaggaatctcatgatcttccgggctgcctggtcctgcttcttggtgagaaaggagcctttgttgcgggcaggcagggtggccgaagtccggtggggagggccgggcctgcggcggtaggagcggtagtgctgctggatgagcacagccgctcggcggctctgctgaaatcgcttctgttcatagtagcttcggaacttgctctggatcaggatggccgcctgggtcatcttcttatagagtgcaaacttaagtgcaatccaggtcagctgcttgtacttccggtaacagcgctggattacagctgctgctacctcctgctgctccttcagccgccggcccttgtactttcggaaggccgtctggatgactcgggcagcctcatacagttcccgctgctcgtgatctgatagtgtcagcagggcaaaatcactttccatcttgccactggtggatgcagagagaaactctgcccaggagggtgctgaagggacagccaggcgacctcgctcaaagggcagttcgctgggaggggttgagctggggaaatggtccacattctccaggtagctggccagccaggacatggtctcactgagccccacagccctgtccgctcccgcattgaggctccagcctcgggcagccccacgaagtcctctcgtttaatccgctccggtg

SEQ ID NO: 130184 - DNA, 960 bp, Homo Sapiens
  misc_feature (300)..(330): n is a, c, g, or t
  misc_feature (709)..(709): n is a, c, g, or t
  misc_feature (736)..(736): n is a, c, g, or t
  misc_feature (749)..(749): n is a, c, g, or t
  misc_feature (764)..(764): n is a, c, g, or t
  misc_feature (824)..(825): n is a, c, g, or t
  misc_feature (827)..(827): n is a, c, g, or t
  misc_feature (913)..(913): n is a, c, g, or t
cttgagtttgcctctattgctttatttggtgttttatacaagtgactaaaataaatagagtaacaaaggcagctacatggcccaaatctcccagcttcctcaggctgctgtctaggatgcctaaccccggggtaccgctgaccacccccaaccctgcaaagggcagggctgtgggtaactggaggaggaggtcacattctggggttagaaggggcccaatggatgggaattcttcatataaaagaggaaatgcctattaaaaaagtcccaaaaatgtaagaaactctattttaacccccnnnnnnnnnnnnnnnnnnnnnnnnnnnnnnntaatcaaaggtcccttgtctacccctgagggaagggggaggaaccaggcactgctggtgagagtcacagtggccacaatctcctgtatggcagcagctggtaggctgagcccaggcactgtaagagcaagcacatgacggccaggacacccagtcacacaccaggagcgcccggcccagcctggccccacagtgggctacataacatccacaaagaactcgctgggattgcccatggccatgtggaagctttggcggctggctgtcagttctggggggacagagcccaggtctctgactggaggggcccccggaggctgcactgctggagggactggaggtggaggtgggggcatcatgaccccatcatggggttgtangggagggccatgcaggggcggtcatanggatggagcctgngtgggtcggagatangggcaccccagttgagctctggatggggaggccccatcgtgtccactgctcccacccgcnnangtgccctcggtggagctcaatcatgcactgcgactgatcgggggccgtctcggctcctcgtgcgatctggctcaggcaatcctaangagcgataatcggacagcaactgtctggggatgtacgtcaatcaaag

SEQ ID NO: 130185 - DNA, 1804 bp, Homo Sapiens
  misc_feature (665)..(687): n is a, c, g, or t
  misc_feature (1794)..(1794): n is a, c, g, or t
aaaattaaagataccatttattttttaaaaaattaaaaaataatgccaacattatttcatgcatccgcaggcctgccccctgcctcccaccagcctcccagggctgggcccccctcctcccctggctgtcctgtgtaataaagggaaaaacaatgagcaggctcagtcaggcccaggggagggaacgcagacccagggagagaatcaagacgctacagcaactcagcctcgcatcatggcaaacccaagcacactggtagaaaacattcgtataaaaaggggagggcatgctgggcacaggcctgagggcaactgctccctggtgctcagagactgctgtcccccagagaaagcctgataaaaactgaggaagcaaaaaggagagagtaggggttcaggagagagaaactcaggaaggctggaggcaggggcttggcagcttgggagctccccctgctgctatcaagtcagggctgcccagtttctggcctgccacctatcctctcacgcccaccaggccctggaccatgggcatctagtgacagcagctttaaggggctctgcccaggggtgcactggcctgagtggcccagaagcctcggcaggtgacagctaagaagacaaggctcttccccaccactctcagcgggaagatgctgaggggnnnnnnnnnnnnnnnnnnnnnnngtggaggggtgggctgagcctggtggtcaggaggcggcaatggcagtgccaccacccagcttaacaatcatctgctggcagtcgttgcaggagcgccggtcgcccaccttctccagggtgcgggcagcttcggccagcagcactgcccgctggcccggggaggagaggaaggagaggggcaggtggcggcaggccagcaggatggcggtggcccgctctcgctggccgggccaggcatccacctctccgtgcttggtgctctgcgtggtgcgccgccgcaggctgtgttccagcagctggtgggtgcgggtggggctggctcctgccatcaggcgcacggtggcttcatgcaggaacaccttgcggtatgctgggcggaagctgtgtgccagcctgcgcaggctgcccaggtcccgttggaagcccgccagttcagcgcctgacgcgtggtaggtctcccccacagcctggctggcactggcctgtttttgccagagcgctgtccgtagcgacagtagcaggtcacaggtgagcagctggaccacgtggttgagggcagggtcagaggtggccccactgacgttgaggctgctccataggtggccactggccctctcgcaatggcagaaggaactctgctgcccatctgctttcccagggagtgaggcatgcatggctctgcaggcatggaagatggccttcaccagggggctctctgtcacttccagggccttggggatgcgttccactttggtaaaatgagagcgcacagctgcatcgtctccctggagccagctgatggccacagtgattgcagacgtccaccaccgacagatgatgtctggacccagggcggacttgagcacggagctcctggagagtggggggctcataacccccacagagtccacaaaagaatgaagtaatttcaagtactccagagcactggagaattcacagctctcttcttcctggtctccagccttcttcttggcctgaggtttcaccaaggactctatagctcgctccagccgacgcgtgggcggacgcgtgggtcgacgatatcccggtattccggaccgttcagcctgcttttatatgtccccnttttcattga

SEQ ID NO: 130186 - DNA, 1037 bp, Homo Sapiens
  misc_feature (993)..(993): n is a, c, g, or t
ccaaggtactgacataatttagtgcaagaaacaaaattttaaaaacaggttttaaaaatatataatttaattccacattaaagccaagctatcgtggtgggaagaaggtgtaaaaatcggtggaaaccctgaaggccgagtacacacacgaagagagagggagttagctgagaagcagcatccagggaaagaaaggtctccacaagctgagatgatggccctctgccctctgaactgttcattaacaagtcaccagtcccagttctttgttcaaatcctcaaacttggagaggcactgctccaatgagacagctacagcaaccacggggaggaagtgctttgggctgcaggagagacagtcaaagccaaatcacgtccaggcgggatgaagtaaacctggaccgaggagcctgacccagctgcggagctcacacatgccccatagggacggtcctgccatatacacaaacagcacactcagcatgtgtgcagaggcaggcaactcctgagcttggttctcgcggggtgggggtgaacaatatactttaatggccaagaagatcccagctctctgcatgagacccacatcctctcctgggctgtcactcaatcttgggaaatactggttcaaggaagagaaacaagggctccattgtgtgagagcagcaggcaagctccccttctgcatctggacaggaccccccccttctccctcagagcaggctcagctcagctgctgacattgctttcctgatggtcaaaaggtcagaacccagctatgttgtcatagcagagaagtgacctcagctctagcgtagagagatggtcaaggaacacccacagaatggggatccttctttttcctccacctgagccagaaaagataacgaaccctgctgtctcttatccttagcccattcgacatcccttttcaacctcagcttgaaacccgaccctccctaccccaggtgtccacattgtcagtgctgggcntcagcctcgtgccgattcaaccacccggcctcgctacctagccg

SEQ ID NO: 130187 - DNA, 507 bp, Homo Sapiens
gaagagtcaatatttatttctaaataaaacattgtctcttatcaaaatgaactacaccaaaaaaacaaatgcagcagaaaactatcaccttaggatcagactacacctggctttaaggattttacaagatgataatcttaaaaggacaatatgctataagattacaagaaaaataagattcataaatgttaatattgcaaaggcacaagaaatcacattttttattcctttgcagttgaattactaggaacaagtcaagaagcctcaaaagaatcaaggcgtaaaataccaagttagtaacaaggtctaatctatgttgttttgtgtgatgtacataccatcaatactacggaaatccagtagataagttctactatccacttggtataactgtagactcattttggagtaagtgcttgtcacaggattcttccttcgtacacgcaaataatatgggtttacaccttccattcataatccaattgttgattgctgtacatcgcatga

SEQ ID NO: 130188 - DNA, 1091 bp, Homo Sapiens
  misc_feature (390)..(390): n is a, c, g, or t
ttgggaattctaggcaaatatttattgaataaatttataacacgtaatatataacacgtaataatatatgaaggcctttatgtaaattaatatttcaaagccctgtgtacactaaatataaaatagccaaaaatcaagtaagcctgagacctataattcactgtgtatattatgctatatacatactgcacaatgaacaacaaaatgatcttaattcatttctgcatattaggcttttaactataaatcatgtgccaatccctgtgcaaattgcattccaaaacgccagccctcggttataattatgtataacttgattacaaatggaagcatttggctgtgacttattatgcatgcttattgctgcaaaagaaataagcaaagttttcnctgtttattgtgcaagaattttaattagatttgcacacatctcaaaaaattctattgtgtgacttccaggtcttggagttaggtcaacaggagaagagtcaagtgaggtcacagatgaggtaagagaaacttctgaggattttccttgagcctcagcatctgaatcactcctttggcaagatcgatagttgctaactgatcccgatctctgtggagtagcagtccctgatttggcttctgtaatttcatcatcaatactacggaaatccagtagataagttctactatccacttggtataactgtagactcattttggagtaagtgcttgtcacaggattcttccttcgtacacgcaaataatatgggtttacaaccttccattcataatccaattgtttgattgctctacatacttctgccataatatcatttggtcgactttgacttctaattcctaaatgccattttgctttccttacaccttggtgtttggatttctgtggatttaattcatcaagggtatggcgtgcccttggtgtttcagcaaccaagaatggtactctttcatgatggggccgagtcaggtgatgatcatcaagaatagaatcaggtgggcttgtcgccaaattagaaatcttttgctttattcattattcttctgttatctattatgagatggtcggcaactgcaaacgattc

SEQ ID NO: 130189 - DNA, 1186 bp, Homo Sapiens
gtggtgctctgtgaatcacccctagtcctattgaaatgatccatgtttcctcagaaacatttaaatactcatgaatgaaatttacactttgtgaaccaatctcaatcagctaggctcaacacatagaagcttagaactagaaatgacagtactgaatcatgtaagattttttaaaatggatttctttcagagcaatatgctgatgatgaattgaagtagttcctagattttgggaaacatctgtgatcatctcccccaccacaaattcatgacaataaaaacaaacaaaaaagaccaaggtgaagattatccaactgaaatgtatttgtgttcctgtttattaacatgttggtaaacttaggtgtcagcttttccataagtcccctctggaggtctgtagtacttggggaaagccatcagctgtagcatgttgaaagcatactttctgcatttgatattcttcagtacattctctatgcggcatccttctcttctcatgcaatccagcgctcggataaagaagtccttgtgtaactggtgctcatctctcaagattgagcattgttcaagtgtcactgacatcgatgtcctgtctttggcacttttacaacaggtgaaacgaataccattcagtttgcggcaaatcgttgcagccagccacataatttctacattctttctttttttggattggatattttgaaggagattttctagcaatgcttttaaatcattttgttcctgaaaatgtgaaatataatcaggaggcatcttttccataaatatcttgtaatattcttgtagaagttcgaagttttcctgattaatactttcttgcaaagagacatctccaaacctttcagccagagtttgctgttcattgattccaacattaaaaagtactggatacacatgaagcaactgtccttctttaatctgtagaggtagtgactcaaacattctggctggaagcttgacctctaacacgtaatgttctcgtcttcctgttataactggcaacacatcattggatttggcttcaattattttaaatgcgactttctttaaatcggaaatgccaacggccatgtcctctagcattccaaattcaatcgcttgatgtactttacagtcctttcatattgactatcaaccccactgggtaaagctgtgtaggaagccctgg

SEQ ID NO: 130190 - DNA, 1509 bp, Homo Sapiens
ttttttttgagcacaaaggtccactttacttacatgaaggaacataaaggcatgagaaacagtcatctcaataaatgcaagacatgagcataaaagaggttctcggcctttccagcgttgttattacagagagaaacctacaattattttgttaaacaaaattcaaggctccaggactcatctctggagctgatatgtcttaaatactattatagtaggaaagggagaggagaaaattccccacccactcccccgatttggcccgtgtagcttccctttgagggtgtgtgacttgccatctgcaaaagtcatggccaaaacaggaactaacaggccaaactaccatcaatctagtcttctacagcaccctaacagagtgccagggtcctctgtcccctccgcacctgagggcaaagttccaggaagtttactgccggtgttaggaggtgagctcaagttcagtgtctctgcctctggctccacagaaaccagcccctatcacgtggcttctggaaaatgtgccctcctcaggattggtccagggagtagtcacaggtagagaaagtaaagggagcagcaattgaaactcgcccttgaccctgtgtccagtaaggaggtgaagtctgtctggctcactctctccattccctgccatgcccacctccctgctggccctgccattgcttcaaggagggctgttcctcctgggtgagatttttcactcttgaactagagtgcctttgtatgtggtcagggggaggttggaggaccctgggatctcccaggccttacaaaagtggcggcacataaatacaacctaaaaacagccatttcctgccagcaggtatcaactggccccacagcttcagctatggccaaagaggccagcgtggcaaggtcctgtctcagatctggctgatggcagggagccaagaggtgctagcaccctcctcagcccttcactttgatgaccgtccttcctcgtgatcatcaaagaggttagggttctctgccagcgtggctctcactttcttcttctccttgaagcgtcctgagttggagaccttgacgtgcttgccctttgtgctcttgtccacaatcttctccaggcgggtgttaaagtcgctgttggggcctccagcgtcaggcctcgggggttctgcatctccctctgtttgggcataggtgtcagggatctcatacagcactttgggagtggatttctttttccggaggaaagtcagcttccaccaaccaatttcagtcgtcatggcgctccctaagccaaggatggggctttctgtaatcccgactgctccaggctggaggtgagacctttcctagagaagcagttgagtgtaggagctgcctgggagggtgagactcgggaagcaagtggtgcctccgggctgctgtatcaggcaaggctcagccaggagaggtgggtaggagcagctacacgtcaggtgcaagagaaacaggtgcaagagctgttacctgcttctgctg

SEQ ID NO: 130191 - DNA, 688 bp, Homo Sapiens
  misc_feature (109)..(149): n is a, c, g, or t
  misc_feature (263)..(322): n is a, c, g, or t
cttttgccaatattttatttaaaatagttcagtcctagttcttttccatctttagcgtaaaacaactttttattattgttaaactcaatttgggttcaaaatcctattnnnnnnnnnnnnnnnnnnnnnnnnnnnnnnnnnnnnnnnnncaaaaaaatcatatttgattcataaaaggtgtggagtaatatgtattatatccccctattctagtcttgaaatgatttatataattgtggctatttgccatatagatctgaatnnnnnnnnnnnnnnnnnnnnnnnnnnnnnnnnnnnnnnnnnnnnnnnnnnnnnnnnnnnntaaggtcccaggtgatgcctctagagtaaaatgtgttcactgggtgcagagaccatgaaaaggtgcccctctagggagggtgggacatgggaagagggtgggacttgggagggcagggctataaccacgaaggggtcagcttgtggcttgggtgatgggggctgaaataaccaaagggtggcgacgcttagatggccacactgttttccaccacgctgggccgcaggtactcgtagggcatgtccagctttgcattccggatctcaatttccttatccagggcagccagctcctccctgaacttcttcagcacagccttaggctcagggcccgaaaaatactcctcctcatgctggcccacagcca

SEQ ID NO: 130192 - DNA, 1041 bp, Homo Sapiens
  misc_feature (104)..(314): n is a, c, g, or t
  misc_feature (423)..(482): n is a, c, g, or t
  misc_feature (722)..(722): n is a, c, g, or t
  misc_feature (753)..(753): n is a, c, g, or t
  misc_feature (818)..(819): n is a, c, g, or t
  misc_feature (822)..(822): n is a, c, g, or t
  misc_feature (956)..(956): n is a, c, g, or t
  misc_feature (958)..(958): n is a, c, g, or t
gccaatattttatttaaaatagttcagtcctagttcttttccatctttagcgtaaaacaactttttattattgttaaactcaatttgggttcaaaatcctattnnnnnnnnnnnnnnnnnnnnnnnnnnnnnnnnnnnnnnnnnnnnnnnnnnnnnnnnnnnnnnnnnnnnnnnnnnnnnnnnnnnnnnnnnnnnnnnnnnnnnnnnnnnnnnnnnnnnnnnnnnnnnnnnnnnnnnnnnnnnnnnnnnnnnnnnnnnnnnnnnnnnnnnnnnnnnnnnnnnnnnnnnnnnnnnnnnnnnnnnnnnnnnnnnnncaaaaaaatcatatttgattcataaaaggtgtggagtaatatgtattatatccccctattctagtcttgaaatgatttatataattgtggctatttgccatatagatcnnnnnnnnnnnnnnnnnnnnnnnnnnnnnnnnnnnnnnnnnnnnnnnnnnnnnnnnnnnnaggagtaaggtcccaggtgatgcctctagagtaaaatgtgttcactgggtgcagagaccatgaaaaggtgcccctctagggagggtgggacatgggaagagggtgggacttgggagggcagggctataaccacgaaggggtcagcttgtggcttgggtgatgggggctgaaataccaaagggtggcgacgcttagatggccacactgttttccaccacgctgggccgcaggtactcgtanggcatgtccagctttgcattccggatctcantttcccttatcaggggcagcagctcctccctgaacttcttcagcacaagcttaggctcagggccnnganaatactcctcctcatgctgggccacagcacatacgggctggcgtctgccagctgcaagtgatggaatctggagagaagctggtgggagtgggcatgtcgcatcatgtctcagcgtaatcctggtggtggcgggnancgcatctgcaggtgataggcacagagtacatcagctggccagtgactcgtgcgattctggctcgagcaatcctatatgatcta

SEQ ID NO: 130193 - DNA, 1034 bp, Homo Sapiens
ggggttaataccactttactattattaactgattcctctaatattccagaaagagcacaagattttttccatttttgatagctgcctattgtcagttttaactggagctgaaaaacagaagacttaaataaactgaaagccatcatcgagttttaaaaagggacactgaaataatccttcttgaagatattttctttaacagccacttatttctaccctgcaaaaagcttgaaatataaaattagtatttaaagcaccatacaaaataaaaaaaccagacaaaggagtaaggtatgttccaatttaatctttatgcaggcaaatttgtaaaaaatgttaatcacatctacatgaagtcgcaaaagagatgcaataattattgctcacttttaaacattaccttatattacggaaatttggctacttactctcatcactattacatgcacttcaagttaaatacttaccaaattttcactgtttattcctgctaggaaaggacacagttccttagaaatttacttcactttaaatcttaaagacataaattgagggtccatactttgtttagtgcttatctagaagaatgcattgccacatcacatactcaggtattgattttcagattttagaaaactatcattgttcatactaaaaagcatcacagttgactgtttattattggttcagaaagatcacaggaggaaacagaatgtaaaaacattcttagcatatgctggttttaatctaggatatagttaaaaactagagggaaaaaataatccatgtgttacatatagcgaggctaaataaagcagggcataaattagaaatttactcagaagctaattttcactggtatacgtggtctcagaaatcagtatttctaactccaatttttcatgcagggttagagtggcttaaataatacttttgaaatttttaagcctctcaaagaaaccctgttagcaactagtctgcaggaagaattttggtaaacccttcttccactctaactccagcttactgctcat

SEQ ID NO: 130194 - DNA, 1364 bp, Homo Sapiens
  misc_feature (101)..(160): n is a, c, g, or t
ggagaataaataatttattgaaattggaggaataaataagatatgtgggcagggttacaaatacctataaaaatcattaacatttatatacacaaaagcgnnnnnnnnnnnnnnnnnnnnnnnnnnnnnnnnnnnnnnnnnnnnnnnnnnnnnnnnnnnngcctgatgccttggaggcggggcctgaggccgtcgggcgggtcggggagggggtttcctttccgcagcagccgtccgggcccccagaggtagatgagccctctttgcggcgggggaatccgccggaggccgccgcagatccagatccagatgtggatctggccgcctttcagatccgagccccgcatcccgctgcgccctaggagcgcgcggcggccccagagccctggctcggtgccctgagggccccacccccctgagcgcgcccgcggagctgcaccccttgcacgatcttctccacccaggagcggtgcgcagagaggctgatgtagaccccgggcctgttgcgctcggcacagccctcgccccagctgatgatgccggccagcagccaggcgccgtccacctggcacatgagggggcccccggagtcgcccagacaagcatcccgctccccctccaagtagccggcacacagcatgtcctcagtgatgggtccctgtcctgctccccgccagtacagatggctgcagacttccgagtcgatgataggaaccttcagcttctgcagggtctgagggtggggcaagggaactccatcttggatgctcccccagcctgagatccagcagtgggtgtttggagggaggtggatagaggcatcaggtaggcagatgggcaggacccgctctgagaactgtatggagcgctcgagacgcaccagggcaatgtctgcacaggcaccttccttccaggaatacacagggtggggctccacccaggcaacacccaccttctgggaccgagagccagggttccccagctgccaggcccccagcagcacagagaacaggtatggtttgttcaggttgtccttgaaacagtgggcagcagtgatcacccagcggctggtgagcagagaacctgcgcagtggtgggtcccattcttctggatgctcacgatccagggccactcgctgtcagtgctgtcctcgccgcccacaacccggttcagctgctggggcttcccacaggctgggggaacaggtatcctggccgcattgaggatggctgtcgacgccagcagcagcagggaggtgaaggtgccgagacagcccccacccagggctgggggcgctccagaaaccaccatggctggtggggcgggggagcaggcagcaggctcgagagacccagggcgatgc

SEQ ID NO: 130195 - DNA, 656 bp, Homo Sapiens
  misc_feature (607)..(607): n is a, c, g, or t
tttttttggagaataaataatttattgaaattggaggaataaataagatatgtgggcagggttacaaatacctataaaaatcattaacatttatatacacaaaagcgctggggcccgggggcggggccggaagtcgtgggggcggggacatgaggccgttgggcggggcctgatgccttggaggcggggcctgaggccgtcgggcgggtcggggagggggtttcctttccgcagcagccgtccgggcccccagaggtagatgagcctatttacggcgggggaaaccgcccgaggccgccgcagatccagatccagatctggatctggccgcctttcagatccgagccccgcgtcccgctgcgccctaggagcgcgcggcggccccagagccctggctcggtgccctgagggccccacccccctgagcgcgcccgcggagctgcaccccttgcacgatcttctccacccaggagcggtgcgcagagaggctgatgtagaccccgggcctgttgcgctcggcacagccctcgccccagctgatgatgccggccagcagccaggcgccgtccacctggcacatgagggggcccccggagtcgccctgcanagaggaggcgaggttaggaacccccgtggcacagggggtggcagaatcc

SEQ ID NO: 130196 - DNA, 972 bp, Homo Sapiens
tatatgtgtggcttaggaccctccgtgaacagatgatagagggcatctctcccaggtgacccttcttttctgtcccaggagggtgggtaattccctttgggatggggctcccacacctccctcaggtccccactcagaccagcaccagtgtctgcctctgagaatgttggcagctcacagagagcagggccggcccgggatggggggcaggtactccccaccttcctgcctcccctcctgctcctcatccctccctccccctttattaccgttttttgtacttgatgccttctctgtgagcagtggctctgtgggaaggagggagccgggagcctggtgggaagccttccccagagagatggctttaggggctttatttaaagactgtgatgatggagccacgcaaggctgcacctctgtgtgttgggagacgatgatgatgtccattgctgtgtgatggcttggaatttaatttattaaagtcaaattggagtttataaactggacaactggttatcctttgaaaggcagtaggcagccaggctgtgacatggatggtgtgggaggatgagacaggggcccggataatgaggttgggtagatgacacacattgtggatctgctaagaagttcctgcaggaaagaaggggtgtgcagagaaaggatggaagagacaggaggctctggagtatgaaattgtagcaaaaaactcaatcaactagtacaggttagtcttcattcccctttctggaacaggctgctccttctaggatgtaatggagatcaaagcttggaccctgtaactagactgcctgcctgggtttgagtcccagctcttctaattacttgtgtgaccttgggcaagttatgtaacctctaagtgcctcagttttctcatctgtaaaatgggaacttcaatcatcatggctatcatttggttgtggatgagaagtaaatgaagtgctgagtgtt

SEQ ID NO: 130197 - DNA, 456 bp, Homo Sapiens
  misc_feature (173)..(222): n is a, c, g, or t
  misc_feature (244)..(244): n is a, c, g, or t
ggcatctttcccaggtgacccttcttttctgtcccaggagggtgggtaattccctttgggatggggctcccacacctccctcaggtccccactcagaccagcaccagtgtctgcctctgagaatgttggcagctcacagagagcagggccggcccgggatggggggcaggtannnnnnnnnnnnnnnnnnnnnnnnnnnnnnnnnnnnnnnnnnnnnnnnnntattaccgttttttgtacttgnatgccttctctgtgagcagtggctctgtgggaaggagggagccgggagcctggtgggaagccttccccagagagatggctttaggggctttatttaaagactgtgatgatggagccacgcaaggctgcacctctgtgtgttgggagacgatgatgatgtccattgctgtgtgatggcttggaatttaatttattaaagtcaaattggagttt

SEQ ID NO: 130198 - DNA, 521 bp, Homo Sapiens
gtgtttattcatttatttatttataagagtcagggtatcactacgtcgtccaggccgcagtgcagtggctattcgcaagtccaatcacggtgcactatattccctaactcctggcatcaagcaatcctcccacctcagcctccctggtagctgggaatacccaactccatgactgtatgcacactggtgattaaaaaaaattattcctttgatgactgtgtaatggttacaaatgtatcctctgagagggaaggctgctgtggggggtttcactgcctgacatgtaacacatgtgctgcaaacatttactgaaagaatgaatggaacgccctgaagttcactgagccaggctggtctctcagttctagcaatgatcatcccaggccctagaaagccaggattgaagaggcaggacctatggacttggatgcatgccagctacaagccaatatggcacatttgtgcaaactggaaaaaggctccacttccagatggactaactagaaaacagtgagctctag

SEQ ID NO: 130199 - DNA, 1275 bp, Homo Sapiens
  misc_feature (400)..(466): n is a, c, g, or t
  misc_feature (489)..(575): n is a, c, g, or t
caaaaatataatttatttaattcttttgatttaatttttattaatggctgtgttaacaactggcttgcaaaatttcagaatatttaatagttgcttccctggagctggtgtgagctgcccccagcacagcactggatgaggtgttgaccttgatatagccttgactcctctgaagcccgtggttcactttgccaaggcatctattgggtatttccacctggatgtcacactatgatggcaaagtaaatgactgtgagaataaactcctcatttccccactcacatccctttctgccttcatccaagttaaaaatcttaaagtcacctctttcctccttctctctcggtcttcccgcttgctagccaactattaccaagtcttcctttgaaacatctcttnnnnnnnnnnnnnnnnnnnnnnnnnnnnnnnnnnnnnnnnnnnnnnnnnnnnnnnnnnnnnnnnnnngttccactcctacgtattctggnnnnnnnnnnnnnnnnnnnnnnnnnnnnnnnnnnnnnnnnnnnnnnnnnnnnnnnnnnnnnnnnnnnnnnnnnnnnnnnnnnnnnnncatttttttctttctcgttgttattatcttctaattcagtataatgaaacacagacttggtgatccaacagacttcggtgtgaatcttggctttgccaaagggtattctttttaagctccctgagattctctttcgccaactgtacagtgggaataatgacccttttaacatacggttatgttaaaatgcctcagctgagcagatatacaaagcagcaagcaaagtgtgacatggaggcttgtatcatggaccaagtgaggaatcactaaagcctgaaatacagtgattgtctactgacatgtctttctaaaatctgatgtttcacacctatgctccaagtcctctgttttttctcaattgcccaatgaattaagtctggaccctttaacctgaccacatgccttcatatctcaccccaacccacggtgtcagcctcatacctgccccatttgctcccgtgtaacctgtggcccaaactcagcaaagttttcaggggtcttcaagcttccacatctttgcggctgctgttccctctgtcttgaacaccgttcctttcctctctcacctgaactttccaacacagctgttaaagtacaactcagaggtcactctctacaaagtcttccttgactgcctctgacaaaattaatgatcccttctttgtgttcccaccagcctttggtacaaaccttatttagc

SEQ ID NO: 130200 - DNA, 571 bp, Homo Sapiens
  misc_feature (44)..(53): n is a, c, g, or t
  misc_feature (462)..(519): n is a, c, g, or t
aatggcagctaaagatatacagattactgttaaattgcagtccnnnnnnnnnnaaagatattttcttgaattatttagaacatggtaagcctggtattttttaatcaaacaaaatatttatgaaatgggttttctcttaattctggattcatcatggctttctaataccaattgtaatatttacaatattcaccaaaacttagaattttgcaaatgctggaattctgccagtgtttctttgctaagccttgcatgcaaaatttgaaattttaacattggcacccaaaacctacatggaatgtatgtctggagtatttcaaactttacattgaaacataatttccttggaaaacaaaccataagcctgaggaggtttttatcaactggaatgctttatattagtttgtttttcactgtacattcctcattttacattcatttaacctgccgattatttaattnnnnnnnnnnnnnnnnnnnnnnnnnnnnnnnnnnnnnnnnnnnnnnnnnnnnnnnnnncaaattggcatgtctttaaagtatttttcttcctgattaaaaatgtgtgtgt

SEQ ID NO: 130201 - DNA, 756 bp, Homo Sapiens
gcagagatggaaaggattattactgtttattaacacaggaaagcacaggagcctgcttccaaagagggactgtcccgtaattgagagatgctccaaggctgaccatcctccttctcctgctgcacacccagcagccatctatggctggatttggagaatttctggtcaaaccggtgagtatgaggagagcagggcagttggggagagaggtcccagcccaattctgcccagagaagctcccaaaagagagggaagtgtcctgatgaagagcccatgaaaggggtgagacccaggaggctgtggagattgctgcgggctcctctggtcagtaaggaaccctgacaagatccctaggatgggggtcccttagtctcactgaagttcttgtaacttgggatgggggccaggtcagcctcctctgatacccgaagctacacatctggccttccccacttctagaggaggggtcttagatggtgctgtgggagcagacaagccctcagcaggttgcaagcaggtcccctccaaaacccctcctgctggaatcctccagatgtgaggagtaggagcagacagatcaaggctggaacatctggcagggtttagcatccacagctggagggtgagacctctccctgtggatctggagaaataccttcgggctcagcctattgctgccttgccttgtcatcatgacagggttcgcgcctgtcagcctcccgggtcccctcactgctaacctgacgtgtgatgctg

SEQ ID NO: 130202 - DNA, 1056 bp, Homo Sapiens
atgataaacaccttttattatatctcagtgtgcaaaaatacaaattatcttaaaaaaaatacagagcactctcgctatggatccaggcaaagacaggacaaacaaaaattccctaacagatgacagtgaacacttcggtggattgaatctgggaactacaatagccctgctctcattatactatgaagccaaattaatcaactttgataatgatacacacttaaactatgaaaaccaattaaggcacagtatcattcaaaatttatagacagaagagcaataatcccgagaaaatataattaaaatactctgctgaacatggaatgacaccacatttgtaacttaacactggcaaaatttggaatgattatagcataaaagacatggtttttctgaaaagtggacagggaggtgtggtatataggaaagtggctcacattcaagactcaagtttattttttaaaagatctcttctgcattagattctaggtttcttttttggtttcaaaactgggtctacaatccataaaaatgacattaatggagatcttaaaaacaatctgattataccagcagtttggtaacatatcggtagagctgttctgtaaatgcttcaggggaaaatttttccttcactctggctcttccagccaggcccatggtggcttttaaggaaggttcacggatgaacttttctattgcttctgagaagtgcaccgggtcaggctcacacagaaaccctgtgacactgtggtcaatggactccaagggtccacccgaattaacagcaatgactgggcactgcatgtacatggcttccagagggacaatgccaaagtgctcattgcttggtgtgtaaagcacacacgtgcagctgtggaggagggagattttctgtttgtctgagaaagacctcaagaaggtcacatactggccaaggtcggactgttggaccattttcttcaattcctgataatgttccacattctccaggactctctcgtcataaccacctgccacgatcagatgaaccctctcccaatcttgggatgtccc

SEQ ID NO: 130203 - DNA, 919 bp, Homo Sapiens
  misc_feature (68)..(68): n is a, c, g, or t
  misc_feature (593)..(601): n is a, c, g, or t
ggggttctgggcttcttgctaatagagaatctgggtacctgagtgattaaggagcaaagggacacagntcatctggggatcataaattgatggagtggcttattctgacttcattaggagttcccaggagagccagggaaaggggaggaggattgctgggttcaggaaaggcacctgtcacacgcgtgcctcactgacttgctcgttgctccaagaacatagtcaatgctccctcttctttgcatctccagcttcagtgctcttcagtttgtcaggcgcctgcagtcccaaccctgggagagcactcctcagctggcaggctccaaaatacccaggacgaggggaaggcagggatggcgtggatggggcgggaggctttccccatctcccccagcttcaagcccttgtctccccttcctacttagaagatgcttccaatgtgggcctgccagctccagctgacagcaccaggcactgtcccagacaccacctgaaaaacaatcaaaggcagtgaacaaaccatgaatccctcaggaaatacagacagttaaacagtacacggaggaatgcacagccttgctgatcgaatgagnnnnnnnnntcgataaaacaagcccagtgctgcaaaggatgcggggaaaataacacatccctttgctgtaaacagattccgattttgaagatgcttctgtctgcatggaaaaagccccacgcagctgcctgaccccccgacctcgaatcatatcttgaggcggggttctgcatctgaggaaataaccctcagcaggaaaagcgttcacagcaaccttatttaaactgagaggtggaaaaaagaaaacaacccagacgtcccttgctcacacttgtggagcgctcacactacgcgaggtgccggacacgcattagctctttgatcctt

SEQ ID NO: 130204 - DNA, 1000 bp, Homo Sapiens
ttttttttacgatagttacttttgttatgtattttaccacaatttttaaaaagcaaaccaaaaccaaccaagagtgcttcccccacacctcaaaatcatcctgcagcagctccctggcccagctctctctcaccctgaccctgggcccctctcccaccacccagggctagccctgtggaccaaccatctctgccagcccctccccgaccctccagccagggaggtggggcgctggccggtgaatggggcaggccaggcccaaaggctggcccagggctcaccagctctggactgggcgtcccgtctgaggtggggatgaccaacatgccagctctgggttttagctgaggatgggcacatcaagcactgacagccagcaagctgggcacaggcgatgctcaacctctaacacatcggctgagaacctcacctgcctctccctgcctgggagccctggcaagacagctcctctcccaggcccagcacaggcaggcgctggacagccacttcctaaggggtgcgcggccgtcaaggcagaggtgggtatccctgcacctcacacctctcaggaggtcaggatccacatccgtcgcctgctttcctgggctgcccctggggcttgtgggctgagatcaaccccttgtgccctgctttcctgggctgcccctggggcttgtgggctgagatcaaccccttgtgccctgccccaggccctccctcaggcgaggccctgcccaggcaggtggttcttccctggctgttcccttccaacaggtggggcccagaccatcctatctctttggacctggagacatttccttaactgggctttgcagcagagggaagagaacagtggcagagccaggcgcgtacctcctgtgcccaggacagcacctgtaagcaagggggaagggagcctaccacccagaactcaaatggagagaaagtcaagacaatcacccctgacgtggggctgcaccaatccctgacgtcttgacac

SEQ ID NO: 130205 - DNA, 707 bp, Homo Sapiens
  misc_feature (62)..(79): n is a, c, g, or t
gtgccaatgctaaaattaaccctcaactaaagggaataagcttgcggccgcggctgtaggcnnnnnnnnnnnnnnnnnnggaaaatgacatgtttttattgctatgtctgcagtggctttttagcacagtagaatgtccccgcaggcccgccaccctcacccagccccagccctgcagcctctgtctgggtgtcggggaagcctttcttggggtcactcagccgtctcgggactggacgtgacagacaaacgtgggttaaagctgctacacagaagactggaggtgcgggaagtgcatccaccttaagcctggacgtgggagccgtgtccagggtcccttcctgggggtgtgccccgcacagggtgggaagcctgagcaggccaggttagcagcccagacacccaggacggaatattgcagcctcttgccccacagacttgtggcaaagggacagcgtggggacagccccgaggcccccaccatgcacttttccaatccagtctggggctggggaccacacacgcacatccacacaacagactcacacacgcaacagctcgaagcttttgttttgcctatgacagttagatctataaattcacactccttggctaggcgacgcgtgggtcgacgaatcccggataccggaccgtaccagccctgccttttttgtttaaccagctgggttctattagtgttcacctat

SEQ ID NO: 130206 - DNA, 2096 bp, Homo Sapiens
  misc_feature (61)..(99): n is a, c, g, or t
gtgccaagctaaaattaaccctcaactaaagggaataagcttgcggccgcatacgctgtcnnnnnnnnnnnnnnnnnnnnnnnnnnnnnnnnnnnnnnnaagaccacagaaggctgaccgttctgtttaattatctgtaataatccttaaaaatcagcacacaaatccattccaggtagctttgccaccccacctgctgtggtggcatttgtccagatgccaccacccccctaagagtgggtcatcctgggggagcaaggcctgagaaaggaaaggaagggaaaggccccctagtgcctgccccacagccctgaggaaggcacatatttagcctggcctgagacaggacaggaaggggccacagggctgagtgcagggacaaaggggtcagggtcccaagtgtccgggcccccagctacccaccccatgtctgtttttggttttgtcattaaaaaaaataaagtgacaaatactggtggagaccagttgttgcactgtcttctgttaaaaatacggaccaagggcatagaaagtctcctcttcagcaggtcctgcttcacaggatgtctgcccgcttgtcccgcacacggcttcgagccttggtccgggctttgaaggcagcagcattgtacaggtgcttctcaaagcgtggaaccttgcaggccttcagggcagtggcatccagcaacagcacagggcccaggccaaagatgtcacggagtagctcattgttctggaggtggtggtgcatgcccgaacccagcacttccttgaaggcagcgtagatccggtgccgagcccagctgtccatgtagagcacctcaaagccgaagcgcactatctcttcttcgcattcaccgccctccacggagtgcagcacggcgcggaaagtagagcgctggcgccgacgatcagccttggcacggtacttgttactgtcagtggccagagtgcgcaggacactgcagagggcctccatgtcctcgtaaacaaactcctcctcaaggtcccgggcaagctcaaagagcagtgcaatggtttcaccggcagcgatccgcaggttcacactttcactggacaagagctggggcagccggggcagctgcctgtcaaggatgtggctgatttgggtgctagggcagatggtgagcagcaatgcccaggcctgcagggcagcagagagcaggccgtgcaggctggcaggaaccacaggacttgtggagctgcccccccaagccatagaaccggctgaaaacactttctaagcaggccaaggcaagagaccaggtcctggatgtcagcggcagccacgtagcagcccaggccaagggcagaagcacagtggagccgggcagcagggctagctgtgctgtcactgagcacagagaccagcagaggctgcaggctgtggaacagctcctcacccttaggtccagggcccagctgcacgcagagcaggcctagcacagcagcagccagggcttgttcctcgcccttccctttcttgaggcacttttccagggcatcggctagcgtgaggcggcgctccagcaagaagtcggggagtaggcgggacgctagggccaggcgcaggctctcaagagcaccctgccgggtcttggcactcttgtctgtgagacagtccacatactccttcagcttttcctcaaggtcttcctgctggccctgctcatccacgacatcccccccaaggctgtcctctgcagtggtgctgagaaggctggggcattcactggcggtgctgcgggcctcactggctgcctcatcgtcactggaacccgagtcagcttgggcactgctccgggcacctcctccacggcgctgaccacccttccggagcgtgttgcccttacgggcgcgaggcatgccgggaaccgggcgcggggggcgcggggtcagggacccggtgggtgtgggctccaggccaacgagacgccggccggtgcgctgcgctgagacttggccagacgacgggagccacacgccacgcgcgcgacgctgggtcgacgatatcccgggaattccggaccggaccagcctgctttttttaaacacgtgttctatgttcactatgg

SEQ ID NO: 130207 - DNA, 726 bp, Homo Sapiens
tttaagttgccaaataaactttattttgatgaggtttcaaaaacttgaggtatttaggaatatagctttgattacagaaattattaaatctccatagaaattagaatataaactgctgggaatacagtagaaaatcactcaccaggagagaggatgcctgtacctcgtaagcattatgacagcacagccacatatgaaatccatgcccatgtggacaatgacagcaaacactgttccttaacacaccactcagacccacccgcatcaccaggtaaacccaccggtctccccacagagtacttcaaaagatagatggcaaaatggatgtggagatagaattccagcttctgggcaaaggagtccccatctcggatggaacttgaaatgtgctcctcccacagatcgaagaacaccttctggtctccgttgtcaaatgcagcgacaagatccttctgaattgtcaatgatttggagtctctgaaagatccgcctactgttttacacagtggttttccttttattttgcattcttttgaaaatgttttcaaggtgtcttcaaattcagcaaaatctaaatactctttcactagtccaagtaattcagattcatgagccagaatgtcccccatattgaactgttactagtaattaattctcacagcaaaaatctctgctgctcggccgcggacactcgcgctatcccagcccggccgccacctccgcagc

SEQ ID NO: 130208 - DNA, 818 bp, Homo Sapiens
tttttgaaaaagaaaaatatttattttcagcaagaccaaagtcccaagtgggggcaggtgccaaatttgcccccgccaccagagggcctaggcccacaggaagcctgaagccaaattcaggcgtggaaggaggggagccaccagtggggcgggacagtcacttgtactgaggagagagcggggggacaagtggagcagtgcagacactcagcatcttgtcgatgtccacctgggttgacttatccacctcggccttgtggtcactcacccccaagctgggcaagcccccaggctcctctccagcctcctctccgaggggagccagggcatgggtgggggtcactagtggactgggacagggcaaagcgaggcctgggcccagctcacctgccaagggcagcaaggcctgcagttgctccacacctccctcctcgggaaccggggccagctctgcctctgcctccacctcagcctccccgtcccccttccctgcctggttcagctcagggttgcaatagttgacgtactggtacagcggccgcaggcgctgggcctttcgctccagcctcaatgtctctaagggtgcagacaccatgctggccacagcgtggagcacgggagcccccaggctcttgcgcttcttggcttttttgtgctgtttggcagatggtgagggctcactctggctgtcctctggctcctcctcctgcagcggcagcttgggtggcagctcagcttcagccttaagatgggcacgaaggcccgggaggctgagagacttgacaggctggagcgaaaggcccagcgcctgcggccgc

SEQ ID NO: 130209 - DNA, 463 bp, Homo Sapiens
gcggccgcaggcgctgggcctttcgctccagcctcaatgtctctaagggtgcagacaccatgctggccacagcgtggagcacgggagcccccaggctcttgcgcttcttggcttttttgtgctgtttggcagatggtgagggctcactctggctgtcctctggctcctcctcctgcagcggcagcttgggtggcagctcagcttcagccttaagatgggcacgaaggcccgggaggctgagagacttgacaggctttctctttggaccatgacggggcctcacaatggagaccacgggcctggggcctctctcctctagcgccccggcatgcggcttgggccgctcctcccccagcttgggtccttcctcctggagctccgactccgaagctgcgcctgctgggcgctggtcttcactctgggttccgcgggcctcatgggcaggcaccaggaactggtctcc

SEQ ID NO: 130210 - DNA, 1379 bp, Homo Sapiens
  misc_feature (1287)..(1306): n is a, c, g, or t
ttggaccatttttacaaagatttcagcaagagagaactcgttgtatgatagagattggtgtggcgttttatgacatgctgctgaatgttgaccagtgtagcacccatttaaattacatggatcccatctgtgacttcctctatcacatgaagtatatgtttactggtgacagcgtgaaagagcaagtagagaagattatctgtaacttaaaaccagctttaaaacttcgtcttcgattcatcacacacattagcaagatggagccagctgcagtgcctccacaagccatgaacagtgggtctccagcacctcagtctaatcaggtgcccgtgtctttaccagtaactcagtgaagccagactgtactgtggagaaagtagaaatatatccgtctttgagagtggactcaaaccttttaaatctgaatgcgatcacactgtagtgatatagtagaagcagtgatgatattcagattgttttattttgattcaaatgatgaatctgttgacaccttataactcccatctccctatctatatttttgtctctaagagatcaagtaagatacatgttgttcatattcataacaacttattagagctatgtaggaacatagaggtatctgtgatcaaatgacttgtcattggcactttcagtctttcctattctagccgttgtttttgtttgtattttttattattaatgacatatttagtcttcagatatattattttaaaggcaccacacatgtaaaacagttattacaaatattttatacataaatctcttggtagattttcagaataatagagatttatatcaagaaaaggaatctagattttgttgcattgtaggagcaaacaaggcttcatattctttttaaaatgacttgaaattttattataaatttccatagtttctatcaaggtcaactggcagttttattacctttgctatggacttgaacttactgtataaaattagttggaagccatgtaagaaaataacatctgaaaattcttgaacttaaaatcatgcttaaatggttgattctccaatttctttttttaaaaataagttaattgcttttgcaggttgacactctcacctgacagatgatgtaattcttcaatttttataatcttaaaatttttaaattttatatttgtaaatacagtacacattttatttcttggattttgagagacattgttaattttgggggaattggcattgcgaaagacttgaaaactaatgagtaaagtctgctgaatgaataaaccgtgnnnnnnnnnnnnnnnnnnnngcatacagccgcggccgcaagcgtattccctttagtgagggttaattgtagaatggcactggccgtcgttaac

SEQ ID NO: 130211 - DNA, 757 bp, Homo Sapiens
  misc_feature (585)..(599): n is a, c, g, or t
cagtaaacattccttttttattttaaaatacttcacaaagattgtatatgttcatgatgtacagttatgttttgatgtatatatatacattctgtaatggttaccacagtcaaattaacacattgatgaccacccatgctgtacattaaatctccagaacgtgttcaccttacaacttggtttttaacctttgaccaacatttctccattttccctaccttctggactctagtaaccaccgttcctccctctgcctcggagtttaagtttttaatattccacaattaagtgggatcatgaagtatttgcctatgtctgccttattttatagtgtccaccaggtttattcatgtgacaaatgtcaggatttcctttttacggctgagtaatattctgtttaaatatacatcacactttctttattcatccattaatggatgctaagtttgtttccatatgttgactattgtgaataatgctgtaatgaacatatgcgagtggcagatatctctttgaaatactgatcactgcctttggtcatatatgcatatacccaggagtgagactgttggatcacatggtagnnnnnnnnnnnnnnngcagaacctccatattgtttttcacaatggctgtaccaatgtacattcccaccaacagtatacaaagcttcctttttctctgtactctaacactaatctctcttgatagtaccatccttgcatgtatgaggtacatgtattgtggtttgatttgattt

SEQ ID NO: 130212 - DNA, 565 bp, Homo Sapiens
  misc_feature (375)..(402): n is a, c, g, or t
  misc_feature (420)..(475): n is a, c, g, or t
tttataaagaacagaaatttatttctcacagttctgggggctggaaagtccaagatgaaggtgctggcatgttcagcgtctggtcagggcctggtgtctcctcccgagatgacagcttgttacagcatcctccagaggggaggaacatggtgtcctcacacagcagagagacaaaaggggaaaagggaccaaactccctccatcaagccctttcacaaggcactgagccattcacgagggcggggcctcacgatccaagcccctctccaaagtgccccctccactgacgcactaggcaggtcagtctctaacacacgcttttgggaggtcacgggcaggggacagcagagtcccaagccagtctgattctttccnnnnnnnnnnnnnnnnnnnnnnnnnnnnagacacagtctcgctctnnnnnnnnnnnnnnnnnnnnnnnnnnnnnnnnnnnnnnnnnnnnnnnnnnnnnnnnatgaactccagcaattctcttgcctggcctcctgggtagctgggactacaggtgcacgtcactacgcctggctaatgtttgcatttttag

SEQ ID NO: 130213 - DNA, 2187 bp, Homo Sapiens
  misc_feature (134)..(150): n is a, c, g, or t
  misc_feature (739)..(776): n is a, c, g, or t
  misc_feature (911)..(940): n is a, c, g, or t
agagttaaaagggtaagtataaaaagttttactttttttgtgtaatttttaatacaagacatctaaagtcttaaacattaagttgatcccatcaggaacaaaatatggcacgaagttcagaaacaagaacatcnnnnnnnnnnnnnnnnngcacttaggcttttcagtcactatgcaatgattatcgattcgccaaggacagtaacagtcaaatactagagaaaaggagataggagaaacatcttttatttcttctaaagaggtgaaaataagatttttttaatatttctcactcataagatttttaaactcttaaaaatgcaatatcttcttttcaaagcacatgccatcttaaaaaaatcttagcaatgtacatttgcactcaaagaaaaacatgcagcgccattgtcttctgacaaaattctgcattaaaaaaccctatgcgactttctgcaaatatattgcctctttattattcagggactccaaaccacaaacattcagtgcaatatttatcgtttcttatttccgtaggaaacacagaaccaatgatgtcttctgacaactgtttcctgatggttgagcaacagtctccctttgctttattttaaagtactttttttaacttgctgatgtaaggtataattggaattcattaaaacttgaggatccaatggagggtgaagaatgaaggatggaggaggaatacttaaggtctaccctgtgccataaacttagnnnnnnnnnnnnnnnnnnnnnnnnnnnnnnnnnnnnnncctcagattttatcaatgcaccctttaaaaagtgtttttttaatttctgaaagcagcttaatgtgaatcaaaagcagttcctgagcaactgcagtaaacagtcttttaaaatatatatgtacatacacatgtacnnnnnnnnnnnnnnnnnnnnnnnnnnnnnnttgcaacttagctcatttggttctgtcttaatttacctccccagcatttagtcccttctttcctttcagtctccaatgtgcaagtacaatagcatcagctctgggagttggcgtggagcagatgtttcttatcactcctgtgaggtcatctgcttgtctgtcaggccaggtttccagagttgctgcaggtcatagttctctcaatctcacaaaacctgtaagcatcatggccacctcacgttttcttcatcagacgccgtgactgccatgtgtggagcttgttgtaggctgtctggagcatctcttctatgtgacttaccaaatttgtgcttaaatactgtctccgaatcttttcttggaatggacagagcttcgtaacttggaatcgttccaaattacttttcattttcactaccttttcttctaggaatggcgtattaacaggaaagcaggaccagaaatgtcgtagaagttctccaacggctacatataagtgtttcaattcagattgaatatcatttggcaccatctggtttatggcttgctgtgttcctccctgcataagtgcccctccaggtgacagtgctgtgatggtactactggcagcactacttgagagaacctgagttaacttgggtgtataagcttccatttcttgtctaatactttgaaaagaattaataatgtcctgacttgttgcatactgtagtgactggattggagttggaccatgataatacctatctgacttcttgaggtttagtgcaatcgtttttacagaattatttttccccaagtcttcatattcaatggactcttgtaatttcgcccttttgactgctggctgaaagcagtctgcatctccggaatttccatccatgttgctgggctcactagtttgttcattttgtgcttcttgttttctgagtccagctgccaggaccatggcactgtgatggttaaatctcttgatgatggcagcattactattctcttttatggatttagaattggaagcagatggcacagaggaaatgccatagccctcatctaatggtttatcttccaaagctgttaaatctagtagtgggtttttcactcctaatgaaaccattgtttttaggcctttttcatctattttggcacattctgcaaagagatcctttgaccctgtattcagccgatccctgtgaaaataatgggactggaaaaaacgtgtccagaattccttctctgtcatgttgtcc

SEQ ID NO: 130214 - DNA, 1002 bp, Homo Sapiens
ttttttggagagagactgtgtctcgctatgttgaccaacctgcttttgaaattcactgggataagaggcaaggtagagactaggctccctcagagaaactataagtcatttgtctccctaccttccttccctctaggtgctgtgagaagccatctttccgacttcaaaaaacaccgagctgctagaattgaccactatgttgtggaagtcaataaactaataatcaggttagagaagctcactgcatttgacagaacaaatactgagtctgcaaagattcgagcaatagaaaagtctgtggtgccttgggtcaacgaccaggatgtccctttctgtccagactgtgggaataagttcagcatccggaaccgccgccaccactgccgcctctgcgggtctattatgtgcaagaagtgtatggagctcatcagccttcccttggcaaacaagctcaccagtgccagcaaggagtccctgagcacccacaccagccccagccagtcacccaacagtgtccatggctcccgccgaggcagcatcagcagcatgagcagtgtcagctcggtcctggatgagaaggacgatgaccggatccgctgctgtacacactgcaaggacacgctgctcaagagagagcagcagattgatgagaaggagcacacacctgacatcgtgaagctctacgagaaattacgactttgcatggagaaagttgaccagaaagctccagaatacatcaggatggcagcatcattaaatgctggggagacaacctacagtctggaacatgccagtgaccttcgagtggaagtgcagaaagtgtatgagctgatagacgctttaagtaagaagatcttaaccttgggcttgaaccaggaccctccaccacatccaagcaatttgcggctgcagagaatgatcagatactcagctacactttttgtgcaggaaaagttgcttggtttgatgtcactgccaaccaaagaacagtttgaggaactg

SEQ ID NO: 130215 - DNA, 693 bp, Homo Sapiens
gattacgctcctagacggcaactacagaggcatttgaactttctttctttgcctctctatgtctctctgtcttttcctgtcttctgatttatctgtctttctttctctagtaaatggcactcaatataaaagtggtggagtcaatcttaaacttatttttattatgattgtattgatacatgcacgaagtccctctgccctactccctattcaaggatattactcactgcacatcataaatctccatcatctgtcttaaagttttatgagtagatttcatctacattatattcaagttcatttattactgagctgtattactgtggagctctaacagtatttgtttcctgatttcaaactcaatgctacagagcactttgaatacatcacaccttataggaaagatagtaaatgtattaatcccattgaaaaattagttttgtacaatgtgctaaatagtattgcattggattacttttatatttaacacactccatcaaaacatcccataacataattttacaatctgcatgtgaatttaactgtgaaattcagtattgtgatattttgaataagtgaattctttctctgcaaatactatgttgataaaattacttgtatgttcccctgaaatggtttgtttcctgtttcttcattattaaaacataaatcaatcatatgtttacagataaa

SEQ ID NO: 130216 - DNA, 1187 bp, Homo Sapiens
  misc_feature (12)..(24): n is a, c, g, or t
cagtgtcacacnnnnnnnnnnnnnatttggacacaatagattgctttttcacaaaacatcctatctacattaacctataactgatttattaatgctattttaacatgtattaaattaaaacatttcttagtttcaatctcaaatgccataaataccaacaaatattaacccaaataaacaaaaactctttggaatcctccatcatttgtaaggcgtctcaagatatcatgaaaccaggaagtttgaagccactggtgtccccactgaacttgaatactgaggtagatctggtccattactccttggctcagccaggacctcaaatttcagccacactcagggactgagtactgactccttgccaactgcagggacacctgagccaaactacatccacgtgcatccatgttcttcattcatcttcatcccaggtccaggcctgtggatgtgcgctctggaaatcctggggctgggtggaaatgagccatcatctcccaggtccccttagctgttatggtgggacttagccacccttacaaccttggtccctcccagctctctggttccacttcctctatctctgatctgcatatctggttccctctcctcttctggtggtcctgtggattcctctctcctcttacatcctggtgaaccctgtaggcctcattccaagtccatatcttctggtgccaactggaatactgggcttaatgtggtcaccctgatgttaaacagcaggtttgctgcccatcaacattctcacactttcttcttggctgggagctgtgtaacaactagttccctatgcctggatcccatcccatagttacaagcaaaggaactactaaaaacacagcctagtgaggaggagaaaactggggctgaggtctgtagtgggtgtgaaagaggcagctggaagatgttctcttgtgtgaccagaggggaggagggcgtgtctttcattaggggtgttgtgcggtggctgctgagatggccagggcttgtctgcatggctgtgagtccaaggaattgattctataggctctggtgggtccccactctgtgaagtgtcaggccctcttcaggcaccgtgaccccattggctcctgtgagtgcagggcagatgaagatggggctgtcctcacaccccaacctgaagaagggcctcacaggcacggaaaagg

SEQ ID NO: 130217 - DNA, 1108 bp, Homo Sapiens
  misc_feature (43)..(71): n is a, c, g, or t
  misc_feature (1039)..(1039): n is a, c, g, or t
  misc_feature (1067)..(1067): n is a, c, g, or t
  misc_feature (1073)..(1073): n is a, c, g, or t
taccctcactaaagggaataagcttgcggccgcctgctcaggnnnnnnnnnnnnnnnnnnnnnnnnnnnnngaatcaggagctatttatttttaagttaacagtacagaagggaaggttctctttccatcaaagttctcctccacgctaccaaacctggaattattaggaacggcagctccacagaatggaaaagctaccagcaggcattcaactgaaatcaagtgctctaccacatatccctccttcactctccctatcacagcagttctcattctcacttagtgagaaagttagtggaggaactactagggttaggggtgagagaacaagcagcattcacccaggcagcaatttgcaaggcaaaagatctacttacccacactctaatagcagccctcttatcctaaaggatgccacgaattgcaaagccctggtctcccacccacactgtcccagcaagttctgagcatgtttgtacatgctcttgccccacaggtagcaacgctctcatagtgtgtctcaaagttcagtcccatagatggccttataacgtaggtattcttctaagcactgaagagcattatcatctacctttgggtcaaacttgttggccaacaggtgatggttttgaagcatccaattcaagtccccagccccataaacgcagatagcccgctggtggattccagagcagggagcataaggagcacccttatcgatgtctccctcatgaccctgccacttgaccagcctggcaatagaagtcatgtctgagatgtcgtacttggggtggttgggaacagagccaggcatcaccgtgcacgctgaagggtggccagaggtgttcatcatgggctataagtgtcttttcccattcaatcagttgttgggattagggttcttcacacatgttggacgaatctcgggaagcacatgtacgcattcctgtaacatagttatttatacggggacgatcttcctctgttgtacggtatgtgcctcacactccaatgatattccagggttccttgtgctangagtacttgatccagcattctccattanatctgnagctgacacctgcatgtctaaaggagtcgtcccat

SEQ ID NO: 130218 - DNA, 1184 bp, Homo Sapiens
  misc_feature (573)..(603): n is a, c, g, or t
aatttgggagaaaattatctccatttattttgtttcatatacatccatagttgaattttaatacaaaagaaaaaaattagaatctgacaaatgtttacaaacaagataccttcaaatagattttactcactttagcctggtgcagagtaattgacaaattgtactgttatattcaaggcaacagagtctgtagtccaggaccacttagcccaacctttatgcaagcttaattttaatctaccatgaacaataaactcattgttgattcccagttgtgtgtgtgtgcacatgtgtacatagcagctcctttcatagaaagaaaagacatctagaggtcgtcttgtacttttacctacaggaatcatgataagatacagatgattatatgtaaccggggctggattttataagaaaaaatacttagctgacaaatgagggcagcaataaaaaagcgtcttttttgcaacaataaataaatacagtcaaaagttttctgtgagactctaaaccagcttcttcactgaagagcagacgtggcatttccatggagttacacttgaccccatagtatcnnnnnnnnnnnnnnnnnnnnnnnnnnnnnnncaagaaacaaagttttctcgcttctgccacaatagtaaaaccatctgatcttgacaagataatggtgtcgttgactttgcttttttcttgtccgttggacaaaattggccaagaatataattggactgttatgaccaataaaaacgaagtttaggtcaagtcttgtcaggatagcctgactaaaaacatctggctccttaatttaaaatagttcagacaaccagattcttgctgtgttttatgttaggttaacacgctgaactttaagaagctgtagactgcagtttgttgttatgagacctacagaatatagaaaaaagggaacaattaagcacccttcatttttgaaaacaatgatgctttatgcggatgccaaggtcagtcagtctgggagaagcagccatgttctttcattcaccctgctagctttgaagcctttcaatttctgtacaaagaatgattcgagaacttctgcacactggtaaaatggggagtcacttggattgtagtaacgacagttatcaaaaattttggtcatatctgccacaaattccgtcagcttttcataatatcctcgtgcc

SEQ ID NO: 130219 - DNA, 460 bp, Homo Sapiens
ttttttaaatagcaaattttactttactagcgtcaatggtaagaatatcacatgcaagaccatggatgaaacattactcttaaatttaatattttcatttatatcactcccaaaatattcattttcttcaaaatccaatttaatagctaaactttcaagacaaaaaactagagctcaaaaagatctactcacttagattcatcataaggcgttttacagatacagtaaagctttgtgtccttcttagtttcctttgaggtagtagagatcattttctttttcttggactttgagctggagtctttttcctcttcccgcttcctcttctgggaagcagcaggtaaggtgggcgtggacagaaggcctgtgtgttgcacagcaggtggagggggaggtgaaggtggaggggctggaggggctggaggagctggtgtcactggggggcagggtgcagctactg

SEQ ID NO: 130220 - DNA, 526 bp, Homo Sapiens
tttcagaggaagacattaccatcagtgtgtggtttattttttcaaattccagtatgtttttaaagacccatatttcactaagcagtgtacttgttgaaaccgatgtgagtgactttgtttccacatgtgatagagcatcagatactggagtttgccaggggtagaatggttggattcaggaatgtttagctgactcatagcaggaagttatcatttccatttcggatcttgcagattttttattggccatgatcggggtcagaattggtaccatgggtgctgcattggcatcttgcagagtgaggcagagctcattgatgagtatgtctgtccacagtgccagtcaacagaggatgtcatgacagtgctcacaccactgtttacagaagcagttgcaatgccagcatcactcagtgacagctcatcatgtagggcccagaatactgattttgtgacttctaagcttgtgttccaccccccacacctgctgccaacttgctggcagagcccagaggatgactgctgg

SEQ ID NO: 130221 - DNA, 483 bp, Homo Sapiens
tttctagtttcacagttttattcacaactttcattagtaaaccaaattactgtacagttaccaggactacgtcaaaggactttatattgaaatagcagataaatacagtattccaagagtttacaatttttaaatacacttgttcaacatggctgctagagtaacttttttaccccgatacatctttaccattaaaaaattatattacctaatctgcctttttggggggcaattttgaattaggtcatcacgaggtacaatacaacaaagcgtgaccccaacatccagttctgattccagttaaaaattcagactaaagatatcacaatctgctagctttgaagcctttcaatttctgtacaaagaatgattcgagaacttctgcacactggtaaaatggggagtcacttggattgtagtaacgacagttatcaaaaattttggtcatatctgccacaaattccgtcagcttttcataatatc

SEQ ID NO: 130222 - DNA, 1520 bp, Homo Sapiens
  misc_feature (564)..(594): n is a, c, g, or t
gggagaaaaattatcccatttattttggtttcataaacatccatagttgaatttaatacaaagaaaaaaattagaatctgacaaatgtttacaacaagataccttcaaatagattttactcactttagcctggtgcagagtaattgacaaattgtactgttatattcaaggcaacagagtctgtagtccaggaccacttagcccaacctttatgcaagcttaattttaatctaccatgaacaataaactcattgttgattcccagttgtgtgtgtgtgcacatgtgtacatagcagctcctttcatagaaagaaaagacatctagaggtcgtcttgtacttttacctacaggaatcatgataagatacagatgattatatgtaaccggggctggattttataagaaaaaatacttagctgacaatgagggcagcaataaaaaagcgtcttttttgcaacaataaataaatacagtcaaagttttctgtgagactctaaaccagcttcttcactgaagagcagacgtggcatttccatggagttacacttgaccccatagtatcnnnnnnnnnnnnnnnnnnnnnnnnnnnnnnncaataaacaagttttctcgcttctgccacaatagtaaaaccatctgatcttgacaagataatggtgtcgttgactttgcttttttcttgtccgttggacaaaattggccaagaatataattggactgttatgaccaataaaaacgaagtttaggtcaagtcttgtcaggatagcctgactaaaaacatctggctccttaatttaaaatagttcagacaaccagattcttgctgtgttttatgttaggttaacacgctgaactttaagaagctgtagactgcagtttgttgttatgagacctgctagctttgaagcctttcaatttctgtacaaagaatgattcgagaacttctgcacactggtaaaatggggagtcacttggattgtagtaacgacagttatcaaaaattttggtcatatctgccacaaattccgtcagcttttcataatatcgtctttgtactctttcttccatggtggcaaggtccataggttccttaataacaccataataatctggtgcatcattagggtctactggttcaaggaaaggccaggccatcttatgggcctgtaaggaacggagcaccctcttcaacccctcataatccttctctgttagtggcgtgagcactgtcatggcatcctctgttgactggcactgtggacagacatactcatcaatgagctctgcctcactttgcaagatgccaacgcagcgcccatggtaccaattctgacaccgatcacagccaatataaaatttagattcatcataaggcgttttacagatacagtaaagctttgtgtccttcttagtttcctttgaggtagtagagatcattttctttttcttggactttgagctggagtctttttcctcttcccgcttcctcttctgggaagcagcaggtaaggtgggcgtg

SEQ ID NO: 130223 - DNA, 758 bp, Homo Sapiens
  misc_feature (659)..(659): n is a, c, g, or t
  misc_feature (725)..(725): n is a, c, g, or t
ccacgttcagtcgcagtttattaaagttagaagtgtctccatccaccccctacagaggcttgcgtggtggttccagtctgctaaatatttcagaatggggacctcattctatctactgatttatcaaatctcattaattaatttcccttgctgatatgaggggttgggagagaagggggacgtgggaatgtaaggaagagcgagagtggtcgggctcatggggtttgatggactgtgacccaggctggcgttgctcctctccggatttcactcctggctgaactggtgccttcggtaaacagctgcttaaagagtgcggggactgctgcagggacttcctttttccactaggcggcaccacagccaaagtgataagaagtcaagcgtggggcgggtggctggagattgtctcttcccctccttttgctcaagaattcgtccattccttctccaactctcttcaccaccacccccgcccccatctccactctcagtagcccgagccctcccattctccactccttcgacccaattccactaagtcaagaaccgtggtcggtctcagccactcactcagcgccactctatgctccgaagtccgtgtagcaccaccgctccccgtgttctctgagctggcttagcttgaaggaacctcacanaaccaagcccggatcgctgtcagccactcactccagtgccgcatggagctcctcggacagcgcaancgtcaaatgtcttcgtatcctgagagctcgctc

SEQ ID NO: 130224 - DNA, 1015 bp, Homo Sapiens
ggggaccccccccgaaaacccggggcttacaaggccccccgagagaatgcggcgggccccgggcgcctagaaggcggttcccgcccgggccctgggctttaccgcaaaacttccaccaccgatggcagagcaaaccgggccttggcctcaagcatcccgcgaactgctcagagtgggcttgagatgcgtaccatgttccgccagaagaagatgatggggcactcaattttgcagcgaagttgaaccggcatgggcgtccccctcacatgctgccccatcggccgaagtaacaagatgacgaccctgcttggcattgcccgcttggctgcgtacgccgcccccaccgcctgagggatctgcgtggccagtggagaggagatagtgacgaagtggcgttccttgcagccgtagtggacaggcatctggcgccccttgcccaagtcactgatgttgccatagcactgggccatgaatagttccagggggtagtcccgatacatcagcacacctgcctcccggtactggccaaacaccaggtccgtgttgtccagggcggcggcactccccacgtgcgtgccctcctcaccatagttggtcatgtagaaggagatccggccctgccgctgagactcatagaggatgcggtccatggtgttaagcagtgtcatgctcttgtagagcttcagcaccttctccttcggcaggtgggggtcctcgctggggttgatgatctggccttgccggtccatgacgcggtagatggggattccagagatgacgttgggctggatgaattccaacttatctataaactccgccgaggcccctgggaactggggcttgtcatccagagatgaaaactgctgctgctgcctgggggggtgagatctagccagtccccgagccccaggctgccgcagcagcaggagggcagcctggctcaaaccacggtttagccgccagaccctcgctgcagcgatcgtaccgccatcttgcctcgtccgattcacccggc

SEQ ID NO: 130225 - DNA, 1492 bp, Homo Sapiens
tttttttggtagagagccaggcgcagagatgcagtttattcgtgacctctgctggccactcgcacctgcgcaagttccacaggctgacctgccatgtccaccccatgcccagaggggcttctagtcctgaatgtgccctcacccagcccctgggagaaggcactgtaacaacaggtgaagagggggctgacggagcctcagcaactgctgcagatgctgtcccctgacaatgtaacagccgggaggagcaggggtgaagagtggcagccgccctggccgctgagtattttagagggagctgactggggaagacagtggtgtgctgtcaggtccccctgctccccttagagtggggctacctctcggggtagctgaggatgggtgggggtgggctgagcaggtctcacttatcgaagtgatccagtgggtagtgctccccgtaggtctgcaggtggcgggccagagactcctgctgcttgcggagctgggcgggcatctcctgatacacgtctgagaagagcaggttggggttgggtttgggcttccgctcggcctgctcaaaggcctccatcaccttcctgcgggactgcttcctccaggccttctcctgctcctcatcccaccagccttggctcagcagatagtgccgcagccgggagatggggtggtcctgtttatcccagtaattgacctcatccaccgagcggtacgctgaactgtcgtcactggtgctgtggtgcccgatcctgtaggtcatggcctcgatgagaaagggctggttctctgccacagcccgccgtcgggcctcctttgtggcgttgtatacggcaaacacatcattaccatccacgcggattgacatgatgccatacccggggcctcgtgctgcaatgccatcgccgcgatactgctcagaggtgggcgtggagatggcgtagccattgttccggcagaagaagatgatggggcactcaagtgtggcagcgaagttgaagccggcatgggcgtccccctcactggctgccccctcgccgaagtaacagatgacgaccctgttggcattggcccgcttggctgcgtacgccgcccccaccgcctgagggatctgcgtggccagtggagaggagatagtgacgaagtggcgttccttgcagccgtagtggacaggcatctggcgccccttgcccaagtcactgatgttgccatagcactgggccatgaatagttccagggggtagtcccgatacatcagcacacctgcctcccggtactggccaaacaccaggtccgtgttgtccagggcggcggcactccccacgtgcgtgccctcctcaccatagttggtcatgtagaaggagatccggccctgccgctgagactcatagaggatgcggtccatggtgttaagcagtgtcatgctcttgtagagcttcctcgtgccgaattcgccacccaggcctcgctaccttagaccgttaagtagttactgccg

SEQ ID NO: 130226 - DNA, 1027 bp, Homo Sapiens
ctggtttttgccacacccccttcggcctctttgggccgttgtatcggcaacaacatcgtaccatccacgcggattgacatgatgccatacccggggcctcgtgctgcaatgccatcgccgcgatactgctcagaggtgggcgtggagatggcgtagccattgttccggcagaagaagatgatggggcactcaagtgtggcagcgaagttgaagccggcatgggcgtccccctcactggctgccccctcgccgaagtaacagatgacgaccctgttggcattggcccgcttggctgcgtacgccgcccccaccgcctgagggatctgcgtggccagtggagaggagatagtgacgaagtggcgttccttgcagccgtagtggacaggcatctggcgccccttgcccaagtcactgatgttgccatagcactgggccatgaatagttccagggggtagtcccgatacatcagcacacctgcctcccggtactggccaaacaccaggtccgtgttgtccagggcggcggcactccccacgtgcgtgccctcctcaccatagttggtcatgtagaaggagatccggccctgccgctgagactcatagaggatgcggtccatggtgttaagcagtgtcatgctcttgtagagcttcagcaccttctccttcggcaggtgggggtcctcgctggggttgatgatctggccttgccggtccatgacgcggtagatggggattccagagatgacgttgggctggatgaattccaacttatctataaactccgccgaggcccctgggaactggggcttgtcatccagagatgaaaactgctgctgctgcctgggggggtgagatctagccagtccccgagccccaggctgccgcagcagcaggagggcagcctggctcaaaccacggtttagccgccagaccctcgctgcagcgatcgctaccgccatccctcgtgccgaattcgccacccaggcctcgctaccttagagaccgttatagttactgcaccgtttca
